United States Patent Application Publication US 2014/0057251 A1 - sequence listing, part 31

SEQ ID NO: 33228 - DNA, 2580 bp, Cannabis sativa
tcctaatacataacaaacaatcgagggtttccaaaaggagatctcatcttcaatatcatctaatgtaatcctcactttactctccttattctcagtattcataaacgaattctcaatctgatccatcgagcctgatggaatcgcatccatctttgatttcccccctttcctcttcaaaatcttagtcacagatttaggttttccatggatttttgaccttgttttagccatggcaccagctagtttagctgcaagagcaagaacccacagagaaaacccgtatcattattattattattatttgtccttttctatcactctacagtggaaatatttattttctatcttctttattaacattctattattctttattcaaattatttactgatttgatcgttgaagaaccttattctggcaccaccccagtattgtaaggctttcgttcttttttcctttggttctataattttgttagtgtccacgatccttctattctgatcgttatagattttaccctttacaattaatatttaaaaattatggaaaaaaataaatactacataaaacttcaactatatttatattatactaacttatgagtgtatatgtgtaattcagtgaaaaagaaaaacaaaactaaaatattatcatttggacgtaatcggtttgaatattaagctatatatatatatatatatataatatagggtataaccccaaaatattgtcatcatttttatttaggttatatatagattgtagatttacatatattatgcctaatattatcttttgcaattgtttatggtaataagatccgaacacatgagtcacatctgtgtatatgtgcttcagctaattacaatagcatatgaagagaatacaaatatagtgatttgatgtctaatttttaatcttatattaattcaaaaaataagtcaaatagtcctccaattattattattattattattatgagctagtgttggacaaattataatggaccatgccttgacaccatctttaactcgaagtgccaacaatcatatacatttattattcaccatgccaccagcgaagcttgcactgcttgcttatttgcctctatatattatataaatattactctacagtacatatatatatgatgcaagtaccacttaatttagaaagaaaaaagaaatacattataataatcatcttttacgacttcaaatcttttgattgaaatatatccaataattattgttgtacggacaaacacgttgaacaaattgatggtttttttttcttcttctttctcttttaagaacaaattgattgatgataatatttttaaaaataagtgcaaatatttatatatatatatatatataatctgatatggttgaattacacaattgtacttaacgtttttaaaaaagttatttcatagaaaagtgagcaaaaggtttgtattctacagtacttggttgtttcttaagattctgcatattcttatgtgtattgtgtatagtggttttttttttttttttgaattcaatattgtgtatagtgttgaaactaacacaaatttatagatatatatattcctatattatattaattcaacaattatttttattgttatttgctaattaaatatttgaatacttttgatgagtcataaaccaatagaagaatgtgaattggatggactggtttttcttttctttttgctttttagttgtacgttatatcccactaaataagaatttgacacatggaaaacaaaagtgactaaacttgaattcatataataatgaaaaataaaagtacaaaaataaataaataacaaaaataaaaacagtagaagaataataatgatggataagagggtagaagactttactgaatcatcatccttatccgaaacacacctcaattttcttcaattaatattgtttcttttattagttatcatactattactatactatatagtaagtatatgtaaatctaacattaaaaaacatttctatacaccattttatgccctctatttttgtggcttttgtcccacaaataaagtttgaacaaaagtagtaaaaaataataaaaaaatatattatttttagcttcatattaattaactaatatcatatcaattttattatacacatatgtatactgtattaaatatgtagactttaaatgggaccaatagtgtacgataaaatgggtggataggaaaactatattaatgttatgtttggttgtccgcaaaatttaaagaactaataatttgtttataataaagtcttctataaatttttgaggttgaaacttgaaactctatagaatatctttgcatttatcatgtataccatacatatatgcatatgacacatgcatataaatatatgctgtatatggaattgtattatatacatatatatatatttatgcagattgatttatgctgcaatatatctattggtgttgaagtaaaccccatattaaccacactgtaaaaaccagaatattacacaaagagtttacaaaggcagtaaataaaacctatgtggccttaggcct

SEQ ID NO: 33229 - DNA, 1514 bp, Cannabis sativa
aaataattaattaaataaaataatgattgggtttatttattataccgtataataaagttttgaacataagtttttgaaatagaattttcacgtatctattttgaaaagcctaaaaaagtttttatcaatttttttttctctctatcacaaaaagaaatcgttcttactcatgtgttgagataaaaataagagcttcatatatactttgttgtagtggcccacactactctttgtgtatggtggatcgatccagaagactacagtgtgagtttccaataaacctaaaatgatacatatggtaatattcttttcatctatttactttagttcaatatatgtaaatattgtgatcttaggcatatggtacaatgataataaaaaataactctttcgccgcgtacctaatttagtaccgtaaaaccaacaattagtaccaaagatgggatgacttttctcgaatgagataccacggatgagatgacttagctcgaaaaggatgacatatctcgaatgagatgatgacatatcttagttaatcaattggattactcatatcttagtcagtcgctcggatgactcgtatctcagtcggttagtcagatgactcgtatatcagtgtcagccagttgatgactcgtatctcagtcagtcgtttggatgactcgtatcttagtcagtcaatcaggatgactcgtatatcattcagtcagtcggggtgactctcataccttagtcggttggtcggatgactcgtatctcaatcgattggtcgaggcgactcatatctcagtcagtcgattaggattactctcatatgtcaactggtcgttggatgactcgtatctcagtcggtatgtgagatgactcgtatctcagtcagttggttgtgatgactctcatatcgcagtcggtcagtcgggatgactcatatctcagtcgataagtcaaatgactcgtatcttagtcggttggtcaggatgactctcatatctcagtcggtcggtcgaatgactcatatctcatttggtcgatcagggtgactctcatatctcaatcagtcgatcgaacgattcatatctcattcgatcgatcgggctgagtctcatatctcagtcgattagtcggggtgacatactttatatgagataacatatctcgaagaggatcacataaatataaacataaacaagatggataacttgtatttaggatggaagatacatccaaattggatgactcatctccaagagggaaggtatatctaaaatagatgacttacattcaaggtagaaaacatatacaagactaatgacttaaatatcctagttaagaaagttacacatcatggataggagagatataaaatatagacacctaagataaaataaaagacacttgtcaaaatatgtaaagacacatcatagcaactaataaatatatgtcaaagtaaggtcttgttaagttgacacttaaagataaaaaaaaataggataattacatacgacaccaatttt

SEQ ID NO: 33230 - DNA, 5080 bp, Cannabis sativa
  modified_base (896)..(899): a, c, t, g, unknown or other
  modified_base (1553)..(1553): a, c, t, g, unknown or other
  modified_base (2408)..(2414): a, c, t, g, unknown or other
  modified_base (3016)..(3019): a, c, t, g, unknown or other
ttttttctttatatccttcacgatatgcatatcacatacaaacgatataccttagaccaatataaatataacataaacttaaactaatatactattaactttttatatgaaataaattgataaataaaattaccattaactttttataataatttaattattttgttattattaaatattttatgtttaggtttaggaataaggttatgtttagttgggtttggtatgtattctagagttggatactattcccctatataaacattatttttgttttcatttaatatactcaatacaataaaatcacttttactaaacgttatagattaaaacctagaaaaaattggagattaaagattgttaataaaatatgttagtatttaatatatattaataaaaagtagatgcatatttatttttgaaaaataaaataaattattgtaattatatgagattaatctttaaaaaaaaaaaaattatcaatattggtaccaaaataatattttggagcagttgtttttaataattaatcaaagttagaaaaaatattttggttttgaaagatacgctttggtatgcggtaatgggagaagtgggaatgagaatctgaaagtttactatgtttagttaggtttttaatattttaatattggctaagtgaaagtggtgggctttagtttgggtggcaaggaaaacccaatgaaaatgtagttttcactttccaatgctactggcagacacaaacttttgcattttaaaattgttttccttattttccccaaattaaaaaatgatacatgaagttttttccttatttttttttatatattttattttataaaatatattatcaatttgtatataaatctactctttataattatttattattgttnnnnttttttataaaattatatgaaaaataataaataaaaattattttgaacacctaggaaaaaaatatattgaattattagtattttacaaaaaaaaaattattattgtaaaaaaaaagttatcacattccattccaatgtcaaccaaacgtaatgttgcttttctagatttagcattccatttatcactctccaacataccaaacgaccccttaagaaaagtaataaaataatgaaagaagttaaaagaaataaaaaaaaaattaaaaataataatttaataaattatatacgtatacactttgtattttttaagtgttcattgtacatttctttcaaaaaaaaaaaaaagtgttcattgtacataacttatattattatttgaaatatatatttatcttatatttaggttaatatgaaagaaaattatcactcaaatatataataataattaaaaaaaaatggaaagaccccaaacaccgtaccagcacttggttcaacaatggtaagaaagaacattgatggtgtacgcttttggtttggatggaaccatataaataggagagcagtgctaatttgtctccaaaaataaacttattcaatataaaatcttagtgcatgtttgacatcataattaaaaaactgttttttgttttnaaaaacagaaaattattttttgaaaacaatttggcatgtttggccttgttttttgaaaacagttttcagaaaacaaagttacaaaaaacaagaattttgaaaacaacaaaatattattttctgttttaaaaaccaattcacttttagtcaatattgtttttaaaaaatactaatcaaacatgacttgtttttaaagacttcaaaaattattttttgttctcatttctaaaaacaattttttgaaaacaaaaaacaaaaaacaataccaaacatgctcttagcaactcagctattataaaattatgcccactaattagtaatatataaaatatatgagtaagataatttaaatacaaagtgatacatgcacactatatcaaaaaaatacattcctaattgattaaacactcacatatttctataaaaattgaaagtttaagaatcatgtcttcctttagactcagatttttgttcttatttttgttcttctcctttaagaaattccattctatggaatagaagttcttatggtctgcaaacaaaatgaaattctttaatagagaaaaaaattaaaaaaaaaaaaaaaaacaacaattatagaaatcattacaaaaatatttgttgcagcaaaacctcaaagtaactagtattagaaatgatattatgattacatggttattttgaagtgaatttgtgataagttgtgtagtgataagttgtgatttaggttagagttatgagttttatagacaaattaatatatagatattttgaagtgaatttagatttttttttaatatggtattatttaaaaagtaatgtttgggttatcattttaaataataataataatannnnnnntaataataataataaaaaatgtatcttcatattttgagtttttttttttaagattagttaaaatttaatatggttaaaaatgtgaaaaaaaaaagtgatatttaggttgagtttttttagattaatcaatattaaatttttttaacatggtattgtttaaaaatgatatttggattatcatttttttaaaaaataaaataataataataataaaattttacgtgatgtatcttcatattttgagtataattagtattagtattattgttaacgcagattttcgttaacaatattaaagcctatttcgtgattgatttgcacagaaataataataatgaaagaagaaaaaaataacacaaagctttttacgtaattttgtagttaaaactctgcatagtccacgagtctattttattagatttctctgatacaaaactagggttctttctctcaaggatttttcgtcattttttcagtgtattttgtccctatttatagttacatagggaggcagttaattacaatcagattaatatcccgcaacaatattcccctaaaattatgggatttgatttcattccacgtaaaataaatgcggttannnnttgaaaatcacacagctgtgattagtccgcttttactgggtcaatactgatgtggatttagatacactgcaaagtgtatctcgctgggatagcaacaataatcctgacagcgagctggagcttttcccatgtctttctgaggttgataatataaatctcgtcgcttctacaattgaagacataacgctccatctgacaatcgcagttcttagtgacaaggtgaacttcagcagtcaacatcattgggatatcagcttctatctgagagagctgactcgacggagtagtggatctcattgaaagatgtctgaagctgattagtgaaggtaccatgaatatgtctccttatagcgagatggatacctcgctattcattgctcagattcattcaacggttatgcttagtttgtatgatatacattatacgctaagtgttttaacagtcaacatgtctcatcttcatcccttcatacgtagcgagattggtgcctcgctttgtattactggtgtcgtcctcatgatcgtgtctttatatacgaaatgatttctcgtcaatatgtgaattaatagtttgtacatccgtgtctcacttaagactttacagtcaacgagttacatatactctatcagctctgcatttaatgagttattccattgcaatatcctttaatataatttccattatattcactgattcgtattttctccgattgacatgtgtcctcctctgaagtgccagcctaatttcggatataacaattgccccttaaaaagttatttttgatgaaaagtgatttttaaatgattatagagggtatttttgtcataatcccttttgaaaaaatgcatgtcctctgattttggcagttttgtagtttcgaggttcatcaacatttaatgacaatcttttccacttcttttccaaattctacccgttggatcaattgtctccctaatatgacggagattaatccaagagtataaaacgaaaaaaagaaccacctttgcaatacctttgccataacatttttcctgcgagtttcatccgatttagttttcgacttcaagcattcagagggatcttcacaccgttcgttgtttcgtcgattgtagaaccactcatcgttccaaaaaccaactccaaacagtaagtgactttttctcttttttttcttacattcttttaattttgtatttttggatttgattactaatttcctagttagcacctctattacctcatttggttttagcaattttagggttgaattgtatttgggtaaatgttaggggtttaggcagaacgtgttttcgagattttccaatttactaacttctggtttgataaatttcctccaagaattgggattgctttctccttgcagcaatgtcccaatctagttttgaagtttatcgtccaaaatatttagaaatagagtgtcctactgaacttgccatcccatacaaacccagaattttagaatccaaatccaaactagagataaatgatgcaaaaattagggaacacttagtgaaaacccaccaagaagatattgctagtcgccacagacacttcttgcaagaaattatagaaggcagacgccatttcttgcgagacgctgcttggcctgaacctcccagtttgtcttctattcctttggctaagcctttatttttacccaaggtcacgattgcttttgaactaggtgacctggactttgaaatgatgtcttccaagccacgtaaatcaaagactcctaggaccctaatgtcaccttcgaggccgagctaatagagtcaaaggtgcaagccattggagactatgtaggtaataccctaaggacttatggtgttgaatataagctaggaagtaacccaagctttgtctggagaggtatttggactacttaatctctacttcgttcgggtgttagaagaataattgaatcaggggacacaagaagcatactaaaccacccgtggctacctgtacatgataacccatatgtttcaacaatacaccctggtttaatgaaccaacatgttagctccctttttcat

SEQ ID NO: 33231 - DNA, 1703 bp, Cannabis sativa
  modified_base (424)..(435): a, c, t, g, unknown or other
  modified_base (494)..(500): a, c, t, g, unknown or other
  modified_base (846)..(880): a, c, t, g, unknown or other
  modified_base (1023)..(1035): a, c, t, g, unknown or other
  modified_base (1190)..(1191): a, c, t, g, unknown or other
  modified_base (1612)..(1639): a, c, t, g, unknown or other
tgcacaacggtcttggctttgtccccgtgaaatttcatgatttttggagatgtgtagggtgattttaacagaagattaacgagtgtaagagtaaggaaaaaactcgtgaaaatttcccctcaaaagaaaaatattttcaattttttaatcagggggccattttaaccaattttaaccccaaactaatcttcatattcatgtcttagtaatgcgaattcattgtgactagtggcaaaaactattccgagatgggtacgagtcacatttcacaaaggggcaccactataaaaaatatgagattttcactatttcgattaaaatcattgttagtgcatgaaaactactttttctctcaacgtgactaatagaaaagtgatgcataacggtcttgtctttgtgcccgtgaaatttcacgatttttggnnnnnnnnnnnntgagattttaacagaacactaacgagtgtaacagtaaggaaaaaactcgttaaaatttnnnnnnnaaagaagaatattttcaatttttcaattagggggccatttaacccaattttaacgctaaactaatcttcatattcacgtcttagtagtacgaatttattatgactagtggcaaaaaatattccaaggtgggtttgggccacatttcacaaaagggtaccactataaaaaatgtgagattttcactatttcgattaaaatgaatgttagtgcatggaaaatgttttttctctcaacatgtccaataaaaaagtgatgaaaaacgatcttggcttcgtcccaatgaaatttcacaatttttggagatgtgtagggtgagattttaaaagaacactaacgagtgtaagnnnnnnnnnnnnnnnnnnnnnnnnnnnnnnnnnnnagaagaatattttcaattttttaattaggaggccatttaacccaattttaatactaaacaaaccttcatattcacgtcttaatagtaccaattctttgtaactagtgacaaaaaataatttgagatgggtccgggccacattnnnnnnnnnnnnnccactatcagaaatgtgacatttttactatttcaattaaaatgattgttagtgcatgaaaactactttttctatcaacatgtccaatagaaaagtgatgcacaaaggtcttggctttgtgcccatgaaatttcaagatttttggagatgtgtagnntgagattttaagagaacactaacgagggtaagagtaagaaaaaaacttgttaaaatttctcctgaaaagaagaatatattcaatttttgaattagaaagccatttaacccaattttaacgctaaaccaatcttcatattcacatcttaatagtatgaatttactatgattagtggccaaaaacattttgagatgggtccgggccacatttcacaaagcagtagcactatcagtagtgtgagattttcactatttcgattaaaatgattgttagtgcatgaaaactactttttctctcaacgtgtccaataaaaaagtgatgcacaatggtcttgggttcgtcctcgtgaaattcacgatttttggagaagtgtagggtaagattttaactgaactctataacgagtgtaagagtaaggaannnnnnnnnnnnnnnnnnnnnnnnnnnnaagaatattttcaatttttgaattgggggccatttaacctaattttaacgctaaaccaatcttc

SEQ ID NO: 33232 - DNA, 1328 bp, Cannabis sativa
ccacacaaagctccaatctttcgaaataacttcatgttccatatattcaaaggtaagcctttgacaccaatccaagagccacggcattcaactttgatgtccctattttgctcctctactgaccatctcttgaaggagactctggtatctcctgttcccggaatactccaattgcctttctccataaaatacaccacttcggtctcgtctctgcaccaaatgatggttcgatcatcaaacatttggctcacttgcaatttcctacccaactctcttgagagattataaaagatgcagctccacgataacccactgttatctctaaacatgataaccgccttcttccagtctttttcaccttgttttgcttgcataaactcatggaaattcctctgtttcattcttctaagcgggaaatcattttttggtctgaagcttccatttgctttaggtaaaaaatcccaggatcccagccctttaatcttccagttagaaaattccacaggggccttattagcagtaacaaactttttgacagcaccattctctacctgagaattctgattggtcattggtttccatggctccttcactacatttgcccacgatctctggttcaacaatcttccattacttgtgtctgctttctgttgagctctattctcgttatcaaatgcttgctctctcttcatagtgctgttgagacaccttaaaaactccgaccaaccatttgccttctcttcttctggtattatgactgttttcatcatgttgttcttaagcactgaaatcttcaaaaagcttccttttgtattcgagaagtactccacgagatagcagctagaactatttcgaaacgatctttttgaagctgacccttcgcctttcctctttctgctggacttccttcactgtctcgatgatccaatccacagcatcaatcgttacagcaacttcatacccaaaatgtctagttctttcacaaatgcggacagagccaccatcacaagtcaaagtgatcatgaacaccttgtgcttagtgtggaaactccaatattttcggattttcggattataatttgaagcaatacaatttttccagtcaaaaccagtggggtagtgaccttttttcttcccaaaaccagtggggttttggtgctttccatggctagaaggaccatggaaccccctcgtgtgcatggcacagttctcaatcagaggagacagaagagagaaaaagttattttcagaatatgtcatatatagattttttcccttttagattttacatggttcaaaatgttatattaacagctggttaggtcatt

SEQ ID NO: 33233 - DNA, 4233 bp, Cannabis sativa
tgtgttctgtaaattttatttttctttttcatttgttgatttatttaattcaagtcgaggtcaggtctgaggtcgggattaagggcaagtccaagtttgggatcgtgttcgggttcagtttctaaaatttaagttggggtcggagtctaaaatattgattaaacaaattatttattttttttaaaaaaaaattagattcttaattaaaaattttaaaagtaaacacatttttagagaacataaatttaaaaaatattttcacttttttaattttaaaaacaaaaacctgattaaaaaagtgttaccaaatgcacccttagttaaatgatatgtgattttaaaaattaattaagaaattttgatattatttttgtgaaataatttatcgcacaagttagtgagtcaaacttttaacttataaaccctaatgtactatgtaaattgctttaacaagactaaagtaaacttataccatttgattgtgtgtagtcttgatgtagatgagcttcctagctttatttttatcttttgatccaaaattgactcttaccgagagttgattttaacttagactttgatttttatttttaggttgacttttgactttgagcttttgaagtcctcttttggatagggttttgaattattgatctcttggtgaaactttttctcttataaagtataaagttattgatatacttagttaatccacttctatgattatgtttgactttaccgagcaaatatcgatactttgtgagtttacttgcaaaacaatcaaaaaaaggattagtaacaaataataatcaaatttttgtttatcatcaaaataagtgagtgattgatttttggtcaacactatatattgtgaaaatattgtaagaattctaaagagtgtttaagaaactcatttggctcaggttatctagaaatataacaaaaaagggagtaggttattactaacacattaggatcggaccttcataaggattctgatgtcatttgttagttctttcattagtattatttaaattcattaattatcacattctagattccgcattgttgtctaaaaactgagtcaacatacatattctcataattctctaatagactgttatttatgtatttattttttacgtgaactcttaaattgagctagattaatgtcatgtcaatgttataccaataaattatttaaacgaatgagcagaatgcaactacgagaagatttttctagtaaaaaaaaataaaaaaaatcaataaaaaaaattcaagaagcaaaactctacaagtgtcatatttttgaaagataaatcctatttattctaaaatagctttattaatttaaaagatattgggaattggccagataaattttcacagcccacgaactcctactattcaatcgtatccgaagaaaaaaaaaaaaaaagttaggtagagataggtttagcattacataatcattgattaatcaattatgaatttatacgccgaaaatgctaatcacacaagagtgtttttataagtcaacaacgtaatccacacttagacattatcattgggtacttataaaaaaaactaacaataataaattcatttaaaaaacacagtaaagtaattggaagatgacccttgtctttcctacgaacaaaacaaagataagaaatttccatgtgttttcttcagtagctagcttatccacaatgatgacatcttactaagaatgaaattcgatgcatcttccaatcaaggtcgaaattaatggtcatggactcataaatgttctatatatgtaatgaatcacatttgtaatgtccgagaacataatgggcaggtcataatgtgccaagcgcattagttgaccactaaaccatttattcttctttcttcttcagctggaaaaatatggaaaatgacagtttgatctccggtaataggccggtgatcatggttacgaatgacgacggcattggcgcccagggattgctagctctggttcatgttctagtctcggctagtcgttatgttgttcaagtttgtgcacctgactcgtaagttatataaattttcatatatagtacaggactacatttttttttattcaaacgtttatatattatattgcataacttagcactcgaactcaagacgtccaacatacgcatcctcttatgctacttgagctagcctcaagtggttagcacaggaccatgttggtcaacggaactcattcttctggctcatgaccactatttacttgcgtgtgtgtatattgtatataatacagagaaaaatcagctgtaagtcattgtacatatggtcatcctctagttgtgaagagagtaaagattgaaggagcaacagctgtttcagtttctggtttgtttttatttcatgcatctttaaaaaatactaattattacatttataaaaattacctttcgttatgttttagtacaatttggtaccattagatctgttggtgacaaataagtctaagtgcccaaattaaatgctataaacatcataagtaatttgagtatcgcttttaatattctataattagaacaatgagtttacttgttttttgagtgtgctaattttccagtgctaagtaaaaagttggaatcttacaaagtagttattgttctaaaaacccttttatgttttgcagggactccagtagattgtgtttctttaggaatctccaaagcactttttccttcagtccccgatctggtatttttcttgttttgatgttaattaacaagcatagtaccctataattaatatcaacttcattttcaattatcttttggatactaatcatggtgcattgactaaatggctttgtattttttgataaaatctcttttttgtagttttgctaatgctgttatacgtgcatacacaggtaatcagtggcataaacaagggtagcaactgcggatataacatgttcgtaattttttatgtaatcttcttgcattatcattattatttcttacacacatctaattgttaggattcacttattatttctcaaaaaaataaaaagtgaagattacataaggcctctaacatcaagaatctaataagtgtgttttgtagttaataatgctataacatatgcatttttagctctacttagggaactgatttttggacttgattgacttaataactagagtaattcctttacaatgtagtgtgtattctggcactgttgctggtgctagagaggcttttcttgatggtgtgccttctatttcactatcttatcaatggtaagtctatattatttaatgcctctatcttgctatgtttttctcatattttttcttgtaaaatttcaggagttcaggtaagagccaagtcaatgactacttgctttctgccaaggcttgcttgcctatcattaatgcaattttggtagacatcaagaatcaaaatttcccaaatgggtgttttctgaatatggattttccaactgatattgctaatcataaggtatatatacatacatacatagattgtgcatatataatgttactttatcatagtcataatgggatttcaatttctgtttttaaattttaaaggggtacaagctaactaagcaaggaaaaagtagatccagattgggatggaaaaaaattacaactcctaacatacaaatagaaaaattgctagcagaactatcccaagaaaagcatacacaaataattgcatcagaacatgaacatctcttgttccaacgacatgtgagtctttacactctactcccccctacatgttttacttaaaaacaaaaaagacttaatttgacatggaatgaaaattttcaggattggaatcctcagtttagtgatgataatgatgatgaaacagataaaaagtccttgagagaaggatatgtgagttttctctttaaaaaaacattataatacaagaactaggcttataaataatggtgattaacatgatatttttattgtaattttcagattacagtaactcctcttggtgccctctcccgggctgatgaagataaccatcactatttcaaaaattggttaccaaatttaggctgacagctttcccttaatactgtcagcctatatgctaccatttatgtgcatggaaattctatgtatgagatcagagtcagccaatgtcattgatgagaaatgaagtacgagacaggaagaaaaagaaaaaataatt

SEQ ID NO: 33234 - DNA, 1250 bp, Cannabis sativa
acccacatcaatcggtttcttttgcagatcaagattatgtgagactaaagcttaaagattcaatagatggaggtatttcggtccttaattatagtgcatatatgttttattaattccgcaatttatacataatcatatatgtttcaggttattcaaataaatgtctaacagttggtatcacagcgattttatctctgccttgattttgtttgagtttgatatatatatatatacatatacagtgttcatatatataaatattcatatttggttagtttatatatatctttatatatatatattttcatttaactattcattatatcatatatattttacatatatatatatatacttcagatccgagaatttttatacatatatatattctatttattcatttatatatatatattatatatggttatatatatttttttttctgtatatatatatgtatatatgtttatatatgtattatatatacgttttattatataatattgattataatactctccttcatatttataatattttatgcaatatatacattatatacgtatatatataaacacgtggagattttaatttttttggtccgtgtttgttccgattttaattttcgttttagtatttatttcaatttctatgcatcactacattcatatagtattggtaagcatgaaaacctattttggaaaacaaagaaatatataaaaaaaaaaatttgaaaaacaccattcggacctgaaatttttggtatttttaaagtctttattttacgtatttttcgatgcatgaaatctatatggatgccttaatttttacatttagattcatttggaattgatttggggacttttggtcgtcggaaatgaaatttaagatcgggtttgggtcgggtccgtcggacccacgtgcagaaaaacgggacaaaatgactcgggttggctgtaggagacgactccgtacgacatgtcgtttttcttatgtgaaaaacgacatgtcatttttaagtagagagttttttggccactccgtacgacgtgtcgtttttcccttatgcggaaaacgacatgtcgtttttcagcatgtaatttttgaaccgaaggccgtacgacatgttgttttctctttatgtgaaaaacgacatgtcgttttccagcatgaattttttgagtccgactccgtatgacgtgtcgtttttagggaagattttcaaaaaaaaaaaaggaggaaaattaaga

SEQ ID NO: 33235 - DNA, 2137 bp, Cannabis sativa
tcatgatacgtttcatagttcactaaaaaggcattttattaattttttttttaaaataaagctcataactaaagagatttatatgtgtttaaatagataataatgatttaataacaatcttaaaggctcatacgtttggatttgcacccatccaaaaatccaattatatatagttctttttggatatcaagttgtcgtatgtccccttctctacattgtcaatatagcaacaattttttttttcttttgttataattttctattttttttcatctatgtttgtatgcatatgagatttctttttattattattattttccttcaagttttatagaagttcatgatttactcagagaatggttggacagcaaaggtttctttatttatttatttttttcaatattttgtgtttagatcgagattattattctctaatacttttatcagtgttttctatatgaaggagatcatacaagagatcaagcttcatcagtctattctttgattataggaagttgaggatttgaataatcatacaatatggtattttatgttttatatgaagcaaagtacaaaggaaaaagaagatgggtgttagtctataaatattttttaactatttttattattttatgagtcagatttttttaaaaaaaaagaatcatttacatgaataagcaaaaatatatttatatgtatatatatatatataaagaaatgaatattcatgttacataactaaattaggaacatatttaaaaaaacatttacatcaattaggagaaaataaaaaataaaattagcatcatatttatattttttctgttaaatagaaagtttaacaaccaataacttctctcagaaagcaaatatataataagtaattttgacatgcaaatatataataagcaaataaaatagtaattgatcatattacatttgagatatattcataagtaattttgattttatttttctctttaaaaaattaagaaaaaagaagataaaagatatattgatgtgttgataatgatcaattattaccatattataaaatttagaaattttatactatcacaattatatatatttttaataacaggtcataaatatagaaaataataaaatatgtcactaaattaaattttaaaattcatcataattcttttttaagttatttttaacatttacttaactttaaatatgaatattttttatttaaatattaaatagatataaatttaaatgaataataaaataataaaatacaattaagaaaatattacaaccgaattttttgtgaagaattattattattgttttgactttttaaatcgattattatatcattgtttggcttatgttttttttatttacttttggtacaaaaggtaattctaatatcaatcaaaaatgtaacatgcataaaaatattaattatatttttatttgttcatttaatacaaatataaatgtaataagttttgtactttataatctttctattagtacaaattattttgaatgacttttgatattcataatacttattaatattaattgatatttatagacacataatttctccctcttataaacttgattgagttattattgttattattactaacttattgattatagattattatgatgtaattgaatgaaaaagtaatttaaaaattaaataaatgtgaaaaacggagataagcaagaattagaaagaaacttcatatagatgccacctagaatgctttgtgtgcattactttatattaatatgtaaatatttttgttaattatttatcatcagaaaattttgaaatttttgttaacattatttaaaacttaagaatttaaaagtaataatattttttaggtgattattattaaatataaatataaatataatatacattggggaagttctatttgcacctgataaaatgataagtatacccattatataaacttaaataatttttaaatattactcttaatatttttttaaaacaaatttcctcatattattttatgttaatttcaatacttactttgattttattttatttttatttttctaaatcatatatttttttttattttttttctacgaaaatttcatatcatttcttatt

SEQ ID NO: 33236 - DNA, 1117 bp, Cannabis sativa
aaatactaattaacatgttttatatatagtcaatttaatataacataatgagttggtaagcctaatagcaatgctcataagttatttggacatgattcatttttaatcttaatttgaatttgaaaagtgaggtataaggaaaaatcatttataaaaaatgaaggcaccaacttgggtctttttgttttatctttaatcacttaaattattgtgctgtctagtgtagttagtgcgagtggagttttatctttttaactgtaaggtgtcttggtaggtccactattgagtatatggttattgccattaatcacataaatttcataagctgttaaaattaagtttatccaataatggatataaccaagtaagcaaaacttgtatttgtatagacaaaatgttcaaaagaaagtaacaattagagaaaatggacaccaagatttattgagataattaattaaggagagacaaaggtagcaatggttgctatctacaaatcattaacaatggtctcaaccatttctagtttacaaagtaacagtaatgaccactctaatcacactataatcatcaaccaatctgcatctgaaaacacttccaaggctaagacagaagctggtttgaaatgcaaaccggtactcatttatatatgttcattcacttggaatggaagctatcaatttgaacaagtagagtagagatcaaatcttcagatcaaaatggtgaaagtaaccattcaacactcatgttctatttacagctcagaaaattgttgaagctataggtattaatgtattatgatcacaatactcccaatgactgaggatcagaaatttaaaggaaagaaaagtagccttacatattttgtatgtagtcttactcgaaagcatgccaatgtgcaatcgaaagtacttatgatgacttctcagaattagattgatttattacagtataagacaacaccttttaacaaaagatcttgattcaaagctaacactggattattcatcataaacaccaatctcaatttcttttcgcaaacttccaagcaacctttccaatcaaagtaatgcaagcaatctcttaagtgaaaccaaacctagaagtgttgtaagaaaat

SEQ ID NO: 33237 - DNA, 2520 bp, Cannabis sativa
atttttaaagtaatttttattatatttaaatagttaaactactacaaattggccatatatacatcagggtatattgtggcacataacaaagttttttgaacgaaaggcagagaggttatacaagaaaaaaaaaggaaaggaaggaacaaaattgtttgtaatttatttttatttttaaattttaaagtaatttttattatattcaaatagttaaactactaaaaatttgtcacgtgtacatcagatactaaggttccaaaagaagggaaaaaaaaatgaaaaagaatggaatacaattattttgtaatttatttttatttttaatttttaaagtaatttttatatatttaaatagttaagccactacaaatttatcacgtgtacattagagtttactgtggcacataacaaagctttttaaacgaaagggagaagtgaggtttggagggttttattatcaaaagatttatgtagtgttaaatgtcacaaatggtataatattttttttttaagggcaagttgtatagttgagatagttttgtcataatactcctaaaagtattatacaaataactaaataataagtatacaacataaaataacatgttacagtatctaaaattctgtatttgttaggttgtgaatttcatttcccttacattgttttcattaaagtcttgattttcttttccaattcatctttggctaattttgtttttgtttcttacaaactattatggctaagaaggagaattgtaatcaacaattgaatcgggacgatttggctgagtcgctcaacgatcttttcactagtgtgtttgccatggtcaaatcagaggttcaggtttgtgttatgagccaaacaacactatttgatgatagaatcaaagctcattcccattattcacttcaaaaaaacatatatttatttttggtgtctagggctcaaacaacaatttagagctattggaaaagatgaatctccgaatagcagaggaatacaatggctatggagacgtggcttcgggacttagggttttcgtagagcaactgaagtccaaaagctctagtttcgatgaatatgcgcggcaaatagacaccatagagcaacaagtgattgagtttgaggctgtaatctctatgcttgacagatatgtatctatgttggagtctaaacttctatctgctacttctcatactaatccatccctttaatttgactccaaaaaatcttttatagtctgtttgaaataggaggaatgagtatttccttttttctttttctaatcttttgtagagtttggcattgcatttaatcacaatttttctttccttaccagtagattgatttctatttcatcgtgaaaatatagttaacttggaaattggcattgaagatggggtcattagcaatttgactttggagatggaatcatgagcaaattgtcattgaaaatatagttaacttgaaaattggctttgaaggagtcatgggcaaattgacattggagatgggagttaagagcaaaatgtatttacacaagtgactgtttcttcatcaacatagaagtccttttttagcatttggataatattatcggcaaaatgccactcatttggtacgttaattaattattaatagaagacataataaatatgagcttgtgtagtaatatgtatgaacttaggttaggttgtattgtggtaaagtcgaagttagggtctagatcagagttggggctatgctttaggtccaagctcgaggcatagggctcgggattgaggtttggagttcactgttgggaccgggtttgtgctctggaccaaagttagatagaacgaactactatatatttttgtgtgtgctctctattttacatagctatttctaatttttatctcgacaagcgagttggttaattttttgtgtcaacactttttcactgtcaatatcggtccagttcgatgtataactgatacattcaatacaagtttactttactaatgttttgaaaaaacattctacttatccaagtgtaagtaaaccacattgttgattattaaatccagtaattgataaattgtgggactaaataatttaaggcatctaatcatgattattttcgctgtgtagacaacactataatcacgaataacaatatgttcagaatttaacataatttgtatattaaacataaaatcatgaaagtaacgtgtgacctgtaatattctcttttcttgaaagataatttttaattttcttcatacttagtttattttatttgctaatagaaataatttatcatttgaatatttttgagtttagtggagtatcagatttttttagtgaataatttttttttatttcgtttgttttttattttattttattttatttttttattttaagggtgtgtataatgttagataaataattaaattattgaagataagtatattaactataataatattgataaatatattgtagcatactatttagtttattattattattat

SEQ ID NO: 33238 - DNA, 1614 bp, Cannabis sativa
acacttacattattattttctgctaaacaactaacagatagtatgttgtatttaaaggtaggcacatacaaaacattagtgagaatcagattgttatttatagcaatagtgccactttgaaatacagacatactttcattattagggaggataagtttggtcttagaagtgtaatagatagttcgaaacaacctggcattgttgcaaatgtgtctcgtggctcctaaatctacaatccaagactcatttaaaggagacatagagtttaaagataagataatacctgtcgtaccagttgaggtacttggatctgaattggtcataccagtgttttggttggcaagcaaattcagtaactgctgatattggacagcattgagttgagggaaaagagttatgctttcgtcgcaattttctttcgagtctttgctggtttgcacctggtttgcagcagcttctttggattgatttgacttgtatccaggaggataaccatgtatcttatagcatttttcgatcgtatgtccaagaacgttgcaatgagtacaaaagggtctatttctttttgtttgctgcccttttgatccttgagaatcagttttctttccagcagatttgtcattctgaaaagcaaatgccatgttagattcagtacctccaatggtgtttcccttttgttgttcttcttgggaaactagatgaaagacacgattgacttcgggtaatggatccatcaggagaatactgcttcgaacttgagtgtaattatccgaaagccccatgagaaaggacattatatattccatatgatggtgttcttggagcttcttgactccaccacaagaacacccattgcaggtacatgaaggcctataattggatagttcttcccaaattgtcttcaatttggtgaagtacatgctcacggtttgagcttcctgccttaagttcatcaatccctttctaagattgtatatgtgagggccatttctttggtggaatctcactttgagatcattccaaattgtagctgcactatcatcataaagtatactagaggatatatctttagagacagagtttaaaatccaagaaatcacaatattattgtttctaacccaagcattatataaaatgaaatcagtaggagagggtttagggatagaaccatcaagaaaaccaagcttgttctttaccgaaattgaaagtagcatggctctgctccacgagacatagttgtcttgacctgtcaaaggttaagaaaccagagtaattcctgggttgtcaccgtggtggagataatagggattagctggatcttcaagtggactcctctaattttcttgaatcgagggatcttgaggatttaaagatcgaacttcggactgagccgattgatcattatttgatatggttgatctgttctaaagaagaagaaacagaaaaaccagaaggagaagacgatgaagcacgagacgcttgctggagaaaacacaacagggaaggagagaacaggaatcgagggaaagcttaactttcccgctctgataccatattacggaatgagatggagagtgactgaacaacaacttccattgatgaacaagaatgaga

SEQ ID NO: 33239 - DNA, 2586 bp, Cannabis sativa
  modified_base (37)..(68): a, c, t, g, unknown or other
taacatacatgtaatcataattcacttctaaattgannnnnnnnnnnnnnnnnnnnnnnnnnnnnnnnggcataaaacccaacaaaaagttcttaccgtgagagatccaagggtcatcccaatgtttgtatcttttccatcagtgatgactatgcaagtaccctaaatcaagatatcattagctttaatcacatttttccaaaaccaggaatcagaaggcttggccttgcacttaacaatatttgttcctctcagatatttagctctcaatagttggcagcaaagagactgggatcttgagagcagtttccaaccccatttggccaagaatgccagattcatttcttctgttttccaaaagccaaggcccccacaggatttagggaggcacatcttatcccaagatctcaagtgaatcccataccagcaatctttctagtgagccgactaaaaagcttagtagtttgcatagcataagttggcatagccagccccacagatttaatgagggtagcagtagcacgtcctgctttagaaaatgtttttgccttccaaccttgtaatttggatgtcagattctatagaatgaaattgaagttgacatccttgtgtcttgatctgaacaaagggagactcaggtatttgatgttgccttctgggctgccaataccaagggctttcctaatctccgacttcatgttctcaaaagtattcttgctgaagaagatggaggttttaagcttgttcacacgttgccctgaccaatcacaaaaattaccaagacagttccacaaacccatagcctcccccacagtggccttacaaaccaagatgaggtatccgcaaagaaaatatgcaagatactagggtcattccgactaattctaatacctttgatctttcctttgttcacccgaatcctcaaaaagtctacataaaatctctgcatcccaaatgtaaagatacggggaaagaaggtccccttgcctcagaccacaagatggtttaattattccaacctgacccccattcagataaacattaagagaagtggtagagatacattggtcaatccatttacaaaatttatctgggaccccaaagcaccttaggacatggtcaacaaactgccagctaagcttgtcataggctttcacaagattaattttgattgcaaagagaccctctctgcccgttttcatgttgaaggagtggatgatttcctagacaataacattgttatcttgtatatccttttcaggaacgaaggtagcttgagtatgggagataatattaggtaggatgggcttaattctatttgcaatgatcttgtatgttttttatttatttattaatgacacaaaatctatggtatttttaatatctgcaaagagataataccacttaaacacttagaatttaaattcaatgtttacaaataattatcatttcttaagcaattattaagattttgtttaataaaaaaaatatttttacctaataggggtgaaagatgttaaaaaataatatatgcagttcaaagatcttttagatctattgaactctaaactatattcaaaatttcatagaatctctacatcacttaggggtagaagaagttattgttatatgcagttcaaattttaactttgaactctagactacgagaacttactcttgatcctataagtgtcccaattaacatgttactgtagtaatagagattgataccaataaagttcttggacatagtatcacggtaccttatcttagtgggagaattttaaaattctagctcatcattatttggatgagactagtgatagcctactatgttatgatcaagataggaactttagaataaaactaagaaagtaaaattaaccattcatatggatagaaatgacttatcaatattatgaggataagataggaaatttttttgcaatatttattcgaaagacttaggcaaaattcttaatccttatgaaaagttttatggtacttctagtgattacttaatcttaagtaattattttacattaatgataatactagaatgcaacgttgatgatttagtctagatggaacttattatttcagactaagataaaatgtcacaacaagagatccttaagcaccaatagtaagaggttaaatgcatatgtgtgtatgaatttaaccagacttatactgttgagtgggagccatcaaagatgtaatcaaacaaggaatcttgggagataatcaaggaagaatctctgaaagtgacctatatgttagatgataggggtgtatattaaaattcttatatctacaccaactcagaatctattagagatgatggttactttggggtggaggaattattctagaaggatgtaaaaacccatctataataatttagttccaccagtgaagctaaataacttagttgtttctaaaagtaatagaaagttattcaaattgaagaacgttcttaacttgtttttatctctattccattttggattgaattagagatgtgtcttctatatattcagatgcccttaataaccagtgaagaattcaatatccctagaggag

SEQ ID NO: 33240 - DNA, 3933 bp, Cannabis sativa
ccgccaccattctaaccatccaccccattcaaacctgtcgaccactgcaatactcaacctaggagacccacaaaacccactcgacccacatgagaaccacaagacccacgcaacccacgcaacccacgagacccacgagaccccgtctccgttcaacgtcatccccaccaccgtccacgaacccactcgaacactcgaacaacatttatttttctttaattattttttgtaatttatcctttaaatttagaatctgtgataaaactgaaatgtgctgttattaaatttttgatttcaagtttttttgtttggagaagaatctaggttaggggatatagcttttttttgggtttttgggtgtttgggcgattttcggcaatttatgtgtgattttgtgcgattacatagtcactgtacactagttttttctgtttgtatgatttgtgatatttgtgtgattttgtgcaagttggcagtgtggattgtgtctacactattgagcaatacttatgcattttttgtgcgactttatgcaatttatgtcggagttatctgtttggatattgcatctgaaacattgagcgatgttttggcgatacgtatgcaatattttgttcgattttatgtgagttgtagtcttaattttatgtccatgtgatatgtaatatttatgcgattttgtgtgagttgttttttttggatattgcatctaaaaatgtagtgtgatgttttggcaatatgtatgcgatatttgtgcaactttatgtcagcttccaatatgaattttgtgtctatgcaatttatgcgatatttgtgcaatttctttgcaaaatctgtgcgatttatattctaattaataataatctttatttgtaaatgcagatggctccagaacttattctcccattgttagagaattttctagggtgtatcacttacagtgggaacgggtactttgcttcaataaaagctaacttcaaagccttttacttgactgcgaaggtgaaggaaacgccctttaaagttttttggaatgccagtgaattgaaattctccagggttattgtgcatcaactattattaaggaagaagaaagtgagtgaggtcaaaaatgatgaagtgtggttttatgtgggtaaaaccgaagctagattcaggcggtctaagtttggtttgatcacaggcctaaagatgagcggtggcccttcgtcagaagaattgactacacaatgtgattctgatcggatattgcgagactatctcaacaatgcaaaacggatgacctttaaaacccttttgctagcttttgaggtgtgcaatgttgcaaacaataggtacaagctcgcatttattgaaggcattatgttgtcaacaactgagggtctatatatctggacagatatgctgaagttagtagaaaatgtagacaacttctttgagtttccttggggcattctttcttatcaaaagctattgtcttccataactaaaagtattcaacagcttaggaaaaactacttggataaggtctctagtaagaatgataagacgaagaagaaacacaagaaggagaaaaaagttactcaaccagaagtgaagtacaatgtgtacggatatctaccagccccacaatattgggcatttgaggccatgcaagatttggggaagaagtatggccagtgcaaatggactagattccctcgaatgttgaactggagcactcccattcgatcacaaaatactgtgaagcaacctgatgtggctgcgttgtttgagaaaaggttatgtgaatctttctctatgtattattgttgttttgatatctatttttgctataagtgttaactgtgtttatgtgggatatttatgcgacattagtgctacacctgtgcgacattaattatatttatgcaatttatgttatgtgtttgtgagatattgtgtgactttttgtgcaatttagcctaatagagtgcacacgttttttggcaattcatgtttgtgttgtgtgacattcttgcgattgttgtgcaattttcccttaacaatttataaaattggcttattctaacgatttataactgtcatttatactatttcgtattgctacctaaaatcgctggctacctgggtgtcataaaaatacaaaactttaaaagacggtttatggctcttgagaaaagacagtttaaatgacagtttataactgttaagaaaaattactttaaatgactatttaaaaatgttggcaaaagtaattcttttttttatttttttttatttctgctattatatttagcttctatttaatctgattttatattattaataatatattatgtttttaaatagtaattaacataaagacaattctttcatcaatcaaattttaacaaaaaatataaatgttatttacaatcaaaaacaaacatttactttaacctaaaaagaaaataaaatcaaagatcactaaatcttaaaatttggtataaacacacttggaaccaaaaaaaaaaaaaaaacctaaaacaataaaaacaaatcagatctagcttataatggaacgaccgtgagccacaatttgcaaaccaccaccgtcctttacaaaccccaaaggagaagaggactttcagaaggtcagatgtttggtgaagattaaagatcgctagtagagacttaagttacgaagggtgcttgtccgctggtgcagattggaggctgaagaagagaaagacagatcaagagggtgggaatttgaatttcaaagacttgagaagactattttagctaccgacgacaagagaaaccatagctgctgtccgggtacacacaaagagacagggggagaaggagaagaagagaaaaaaagtagtggctgcgaggaagagaaagagagaggcgagtagattttaaatttcatcaacttgatctagctatggttgtcgttggctatacacgcagagagagatagagggaggaagaaaagaagagacaagaaagagagagagagagagatagtgtggctgctagggttttctaaggctattagggttacaaaattaaaaaaaaaagttttaaatatatctcattaaataaaagaaattaaaacttctaataaaaaattaaattaatatataatgggaatacatgtgcaagttttttttaatatatccctaatacttgttgggaatacattctttccaataattataaactgttgggaatactaagtatacccaacattttataattgttattctcaatagttatacattgttgtgatttactatttttttaaaaaaatcatttagtattgcccacggttctccaccattagcatatgtttttcccaacggttttcttcccactactacaaacttaccttttagtgccacactttagtgactcgcattttttttgtaggtcactaaagaattagagatgagctttactgacattcacaaaaggactctaaaaatgcagtgttaatgtcttagaatcagagtcactaaaaatatgaagtgtcactaaagtgttatttccataatttttattttttataaaaaatactggcctatagtgacactcttggcgtgaatgggtaaacgtgtcactactcgcatgacgcgtcaccatatcctaaacttaattatttttaatttttattttttaaaatacaattggctccattattttatgtaatgattattaattctttacgtttttatttttctttttattttttttaaagggattgatttcaaaagtttaaaagtatgatttaagaaaaaggtaataagatcgatttgaaaaaatattaaagtcaaaaagaatagggttccaaaatcaaaacccttttcttcacactttctctgtgaccaaacacatcccctctttcgttcaggaaaaaaaaagttcaacaaaaaaaacacg

SEQ ID NO: 33241 - DNA, 1995 bp, Cannabis sativa
gacttcttttaggttgtccttcattcggttggcaaggcactttgcaattattttatagctgacattgcaaaggcttataggccgaaaatcagcaacttgttttgggctcttaactttcgggattagacacagtagtgttttattgatgtgcctgcagtcggtgtggttattgagcacattcaggcaaagccttgtaatatccttcgccacaatatcccaatggtgttcataaaaaagtcttggcattccatcaattccaggagccttcatggcattaatttgggacaatgcctttgttatatccaagataaacttagaaagaaggagctcattttgattcctcctaactttaaaaggaacaaatcgttggaggtaggcaatcatgtctccctcatagtctttggccgataacaactcttgatagtgatcacaaatggtcttctccacctcttcctttgtgcttatccacttcagatttttgtcaaatagcccacaaattctgttctttttccgccttgaggaagctttttggtggaagtacttggtatttctatctccatgggccaaccataatgctctacttcgttgtttccaaaatagctcctccttggccaagtgtccattgagatctctttctattgtctttaggcaagaaaagccatgaggggtgtggtctcgggataacttttctataacttttttcagttcttttattttggattgattgtccttcctctgtttgtgattccattgttctagcaagttcccacaaagctgaattttctctccgaactctgttgccgacccactattacatccatattgccaacttgctttgatgatttttttacattcatccatatcagcccatgccttttcgtagtcgaaccgtgagctccatctttttttagtctcttgttcattcggcatggcattaaaggtgaccaaaagcggacaataatccgaacaccatcttcctaaatgtgtcactttggctactacgtaaatcttccaccaattgttatttaccattactctgtcaagacgctcgaactccatatttgctgcccgaccattgcaccaagtataattgctgccttcaacttctaattctcggagagcacatttgtcgatggtggtgttaaaattcttcattagataccccggtttccctcctcctccaagtttctcattaatgcctctaatttcgttgaagtcacccccacacatccacgtccccacatggtttcttgcaagccttttcagaagagtccatgaatgtctcctttgagaaggatccggatctccatagaatcccgtaaagcgccaatttagatcatcctccgtattgatccaagcatcaatatggtaatcattgaacgatcttaactgaaccgagaaaggagccttccaaaggagagccagccacccactcttacctttagcatccacacaaaagcacccttcaaaccccaaccgaatacggatcgtctccatgtaatggcttttcgaatgagtttcgaaaaggaaaacaaaaccaggattaaagtctttcacatgagtggcaagagcattcactgtccaagggttgccaatcccttggacattccaaataagtgaattcattgtcctcggcgatcctgcttcgcatagttcgccgcttcattagtctgctcaggagttgaatcatttggcatagaaacttcccctgttatagcatcaaatctggttccccattctttagtctctgttgcttgaatcttggatcgaattcccgattttagcacaaattttcttcttttttctcgttgccttttctgctgtatgtttttttccagcatcataagtgatagggacatcaaaaaggattctgctcgacctcgactccatgctttttgtctcattgaatctggccttgcaagatctattcatgattgggttcattggtgcctcattccccatatctgttcccattcttttcctgatggtcatttc

SEQ ID NO: 33242 - DNA, 4050 bp, Cannabis sativa
  modified_base (3077)..(3081): a, c, t, g, unknown or other
aagttttacttttacaaatatataagttagtatttagcaataatatatttaactgactcctcaaatttataaaaaaacaaaaacaaaaaaaaaaaaaaacaaacttaacacataatttattgcattatgatttatgtgttgatcattcatgactaataacttttttttttttggaaaagggaacagagaaattctattaaaacgcatcaagccaaaagattgagatacaaaagataggcaatttaaacagctaaatcagtggtcaagcccgaccaccacacctgagcctcatctaaatctaatgctcgttttgttaaagaatgaacaacatggttctttgaccgattacaaagatatactactgaaagaattcaatatgtacatatatatatttttttacagaaatttatttattttttgacacgtatatacaagtattagaagttgcattaagatgcatgagatccatcatggtgattatttttatgctcgccaattttgcacgacttaattacaagtgactctttttgtcttagtcttttggatttagatcgattagatgtacaggttcatcttaaaactaattgactatatatgttatttaattttaacatattataatattttcttatttactaataatactatgtgttgttattttataatatgtttagagaattcaaattaatatataacggcagctaatttgaatttgaatttgaatacgttcctatgaatagggatctaatccatttgaataatattatgatattaatttccgcaattggctcctgcaattaaatttctgcgtatatattaattttcctctcaattaattttacgattttttctgtcagaaaattttactaatttttaattcatcaacgtcggcacataatttttttttacatatgtacgtatttgtaatttactaaatttagtatattaattgaaattcgtttacaaaatctgacataaaaaaaaaaatcaaccacataatgtagcatcattaagtttcattaatgaagaataagtttcaaacatatgttctaattaattataatatgagaaatttaattatgcatgatttccttaaagggaccaacaaagttaatatcttataaaaaaaaatactaataataattgaccatatatcatcaagtaaaacaacatgggattaaaaaaataaataaatagcatggttaacaatgtacaaacattttggtacatgaaaatgaaagttaaaaaaaaggctaaagatcacaatttttttcaatctgagaatgataaagatggaaagattcattaaggggtgtgcggtatttatttatttagaatttgttccttttataaatagggctttatactactttaaattattcctaccatgaatatttcgtatgtacctttagattataaaataatttaaaagataaatagaggtatgtgttcaaaattttaaatttataaacggcataaattttaatgtttatttttagtggtataagtatttaatatttgtaaagttataattttttttttcagttttatcaatacaaactttcttttgaatttgttaaaagaatttgagctttatttaaaacaataacagaatcagtaccgacgaaatttaaaaaaaaattataattttacaaatattgaatacttataccgctaaaattgaatattaaatttatatgatttacaaacttaaaatatacttatgccctatttaccttaattaaaaaaaaaaaatcaacataatgaaaagatgatatattcttgtatatatgcattgaaaagaatattaaaattctagtaaccatgtatggacaaattggggtaattaatttgagtgtctcaaatccatcgaatggttatataggtgcaaattaagttattcttaaacgaataattatacattgacaaacaccgaattaatgtttttaaagtatcaaaaatgttcttcatcgcgattgaaacatcatccccggctaaatcatcgtcacataatagttggttgatcgctaagtgcaaaaaccatttttagttgaacgagcagtaacacaagttatataactaattaattagtttaacaagttagtaactgaaaaaactatccagaccattaagaataattgaaaaatatatcagacgatttgtgatagattttcaagtgggctctactctacatatttttttagaatgattttatcaattgggtattgaattttaattgtgtgtaacattgaaagtgtatagttgctgagatttgatttgttggataaacatattaacaaatatattgatgtttacatataattaggtatggttgtttagcactgaaacaatttggttcggttgttagggattaataattaatgtcatcttttatttcatcaataatgttagtttagattgtatttaatttattatgatagtactggaatattgttccaagtgaaattactttgatctgacatatatatataaataatgtgtacgtataatatgtatataaaagtgtacctcgtaataatttatttatttttaaatataattacataataaatgtgatagtcagtagtcttgtaatttataaggggaaacaccaaataagttattcaatcccatattgcttggagaaggtagagtgtgaagattcgaagactgtgtagatataggactacacaatttaagagagtttaaatggattgattggtactacttatatcaacaaaatctatcttattttttagtagtccgtctcaaaagaactccacagttaagtgtgctttcaggatgagtgattttctaggaagatttctcagaaaacgtgcgagtgaggacaaagtacgctagaaaatcatgtttgatgtactcgtgtataaaaatcataaatatatgtgataacactataatttaattattttagtcacaatataaattttttgtgacttttagtcacaacataaaattactttgtgaccaaaatatagtatttggatacaaattgtcaggcttgtcaataatttagttttaatcacaataaatattgtaactaaaaacacatttannnnnaacaaattgtaatttttgtaactcatacttttaattacaaattttttagttataatatagaaataataatttataattagtcacaatttttttactttaaataataaattttgctgtgattaaaattaaaaaaaattgtagtataagacagtataagtatatgtatcatggagataaatatatacaatatatttcactagtacttaatttgattagaaagagtttaaaatcttgtgccctaacttctcacctatttcacttttttatttgtattttttccctttgtcttactgaatatttggactgaattatcagctctcttactcgaaatttgagagaaaataataaagaaacaaaacgacaatttattatgaacaagcaccttaattcatttttatctagtaataataattaatgtcaaacactaaaagttaagaagtaattttatatgtgaattaaatataattgaagcaataatatgattctatttccattagtacactccatgatgtattaagatatatatatataatttaactaattaataataaaagtgttctttagtaacttttgggtaaagaaacgaacataattaactgtcataactgtgaagtcaattaccgttaatagaagaaaggaaatggtacatgtacacttaatcaagattctaataattaagtgtacttaagctatgatgacaaaaagaaaatacattattaggtttcagtgatgttgagtaatggttaattagtaattttgtataatatataattattaaattaaattataagacactagatattattgtaataaatgacagtgttagatggtactgccctttagcttttctctaattagaattgctaaaaaaagagattatttaaaaaaaaaaaatacaaaaacaacaaaaaaagaattacaaaatacggtttgtatagagtttttaatatttttacggttttttagatt

SEQ ID NO: 33243 - DNA, 1364 bp, Cannabis sativa
ttttaactccaagaacaaactgtttatccatgtcaattcagcacacatgccaagctcctataccctgcctctgtacttgatctgaaaattgttggttgtttcttgcactgccagctaaccaagtttggaccaagaaagattgcaaaccctgaggtggaccttctgtcatctggatccgcagcccaatctgcatcacagtaggctacaagttctagggatgaagatgtaggccttctaagatgcaaaccatgcttaatcgtgccacttacatacctcaagattctttttacagctatccaatgagattgcaaaggttgatgcatgaactggcataccttatttacactaaatgcaagctcaggcctagttatggtcagatattgtaagcccccaacaatcgaacgatattcctgcacattatcaataggatcacttccataacccgatagtttgcttccactggtcattggagttgatgaagcttttgcactttgcattttggctttgcagaggagatctctagcatacttttcctgagacaagtgcatcccttcagtcgtgtagttaacctcaattccaagaaaatagtttaactctccaagatctcgaagagcaaactgcttattcaaatcagtaaccagctgagagacaacctgggaattacttcctgtaatcaaaatatcatccacatacactagtataagtgtagtagactgaggtgttgaacagataaacaaggactgatctgatttagaggaacagaaaccaagactcaataggcattgatgcagcttgtcaaaccaagcccttggtgcttgcttaagaccatatagagctttattaagtttgcacacaagatcaggggctgttggatcctcaaagccaggtggctgagtcatataaacctcttcttgtaaattgccattcaaaaaggcattgtgaacatcaagttgctgaactttccaaccacgagctaaggccaaagtaagaaccaccctgatggttatgggtttcaccactggactaaaagtctcagtaaagtcaaatccaggttgttggtgaaaccctttagccactagtcttgctttatgcctattgactgagccatctgcattgagcttttccttgtacacccatttacaaccaatagcagttctcccttctggtaatttgacaagtttccaggtgtgattccttattaaagcaagtatctcatcagccatagcttgattccagtgtaggctttgtaaagcttcagctaatgtctgaggttctttggaagccatgtaaacttttggtttagtgatcccagacttcccccgagtttgcattggatgagagttgatagttcttgagctgctgga

SEQ ID NO: 33244 - DNA, 3316 bp, Cannabis sativa
ggttgggtctgagtcccaagttccgatcccgatctgagtctggatttagttctgggtctaagtccttggttctgatccttgtcttggttcgagtttaggttcaggtccggttctagctttgggtctgattctatgtgtgggtgtttgagtttgggtccgagtccatgttcgggtttatgtccaggtctggaccctgatctgggtctatgtttgggtacaggtccaagtttagatcccgagtgcgggtccaagtttggttctgggtcaggatctcggtcgagatctaagtctagcatttcgatcctagtttgggtcctggtcccagtccaggttcgtatctggatccctatctagttccagatctgggttccaatataggtccatgtttgggtctgagttctgagttctgatctgggtctgggttccaaggcacaggtccaggtcccccatccaggtccgggtcgtaggtctcgggctgggtccatgttcgggtttgggtcctagtcccaatattgatttcgatttagtgtctgggttcgggtttgggtgtgagtcctggtccgacttttggttcgggtctggatccaggtctagatccttatttgggtttcgattcaggtccaggtccaagctcgggtctcaggtgcgggtctaggtctaggtatgggtcagtgtctcggtccggatctaggtcccaagttttgatcccagactgggtccaggtctcggttcaagtccaagttcctatatggatccctatctaagtctgagtctgggtttgggatcgcgtcccaggtctaggttcagatccgggtccaggtttgggtctgagtccgagtctgagtttgggtctgggtctcgatcccggtctaggtacacgaccgtgtatgggcccaagttccggtctcggtttgggtctaggggtaggtccgagttcggttctaggtttgggttcgggtcttggtcacggtccttgtcttgttcgaggggcctagtcttgcgattcttattcaggttccaattttgggtctcgagtttgggtcgcagtctgggtttgggtcctggtctgagtcccaaatctagatccctgtcatgtgtcctggtctagttctggttcaagtctcgagtcccaggtccgagtttgggttcgggaccaagattggggtgcggttctaggtctcgaccctaattctgtgtcccgaatctggttccatgtttgggcctgagttcgagtccaggttcgacactgattctaggtctaggttgggatgtgggtccgggtccaagtttgagtctaggtctgggttagagtcgtggtcctggtccaagtttgagtccacgtccaggtctggttacgatttcaagtctaggtcaaagttcttgttctggtcccgttcttgggtcctggtctacttctagtttgagttccaattttgggtcacagggtacgcgtttgggtctaggtttgggctggtactgggtttgagtttgggtttgggttccggacctagtctgggtcgaggtctgggctggctccaaaatcaagacaccgatctcgagtcctggtctggttccatttcgggtgtcagatcacgagctgggtcctagtttcaagttcgggtctggggtcgggtcttgggtcccattccttgttcaaatgcccaggtccctatcccaattctggatccatgtcccggttctagtctgggtttgggtcccggtctaggttttggtttgggtcctagtcacggtttgggtttgggtgtaggtcctggtcttggtcttggtcctagtcctagtcccattccagctcaagtttcaattctgaatttgagtttgggttcgacttcaggttggggctcgagtcttggtccgagtttgggttcgggtccggatatcggtctaggttcagatcgggctccaagtgtgggttagggtgctgggtctgggtccaggttcgggtccgagtcccaggtttcaatctcgatcaaagtctgggtttagtttcgggtctaagtcttggcttccgatcctagtcttggttcgatttcgggtctcggtgcaggtctaggtttgggtctggctatgagtttgggtttgctcctggtatgggttcatgtctacgttactatcctagtttgggtccggggaaggttttgggtctgggtctgggtccgacttaggatttccgggtctaggtcaggtcatggttgaggttcgagtcctagatttagatttgggtctggttccaaggcctaggtccctggtctaggtcccccatcctagtccggctggtagatcctagtctaggtctaagttcgggttcgcatcttgagtctaggtccaagtctgagtccatgtctcgagttttgatcttggtctaggttctaaggcccacgtcctggttccccatccaagtccgggtcctaggtcccggtcagggtccttattcgggtttgggtcctagtcccagttttaatttcgattgagtgtttgggttcgggtttgggtccatgttttggtcggggtctgagtactagtccgagtctgggtccaggtacggatcccggtctgggttcaagtccaggtccaagtttgggtcccaggtgcgggtccaggtttgggtctgtgttagggtctcggtctggatctaggtctgagttttgatcccggtctgggtccaactcttggttcaagtccaggtttgaatccgaatccctatctaggtccgagtttgggtctgggatcaggtcccatgtctagttctatgtctaggtttgggtctccgtctcggtcctggtctgggtacacgaccgtgtctgggcccgagttccggtctctgtttggactggggctaggtccgagttcggttctaggtctgggtcctagtccaggtatttgtcctagtctttttcgagggtcctagtctagcagttcttgttcaggttctagttttaggtcccgggtctgggtcagggtttgggtgctagtccgggttcgggttctggtctaagtcccaaatttggatccctattattatcccaattttcgcactctaacgtcacctcacatgatggtgacacgtggaatcgactctgagtatctgctcgtaggatatagtccgaacaggatacctcatatgcattctcgaagcaaagcgatcaactatccgcacatcgcgatcaacacttaatttagcttttgcatcgtgagtcatcaaagaaatctctataacttggcgatcagattgcagagatatcgcaggctgtccaaatcccacgatcagtgtattttgtatttattatgcaatcctttg

SEQ ID NO: 33245 - DNA, 2111 bp, Cannabis sativa
  modified_base (1292)..(1293): a, c, t, g, unknown or other
ttactggtagagttagtgattccagataggcttttacacttctctagaaatcactgctccacccccacagtaatcaccatcgcatatatatagacttctagaattgacactgtttgccgagtttttttagcaaccaaatacttttagaccttaaaaaagtaatgaaggcacgaataatgaaataataaacaagagatttttacgtggttcaggcgttaactatccttagtccacaagtccattttattaggctcatcaatctgtggctatttatacaaatacaaatacaacagacttttttcctattccaccgtgttcctcttgaataagaggaaggttagtaggaatattctagagttaatagtagggttactgtaatgtgttttcttgatgaagagtaagtcttcaatctcaaagtgaaggtccaaaaagtggatccttcctttgtgcttcctctggggtatttgtaggccaaccccattgcatgggctgtcttggatggatcttcatagggatgtcagattgtacggtctgtacatgctgagctttggatgcgtgtcacctcagggccattctcattatttgttttcaacaaactttcatctcctttgtcgcccagcgccggggtctagataggatgaagtaactaaagaacaagatctagaaggtgattggtcaatgcgaggccatgttcagggaatggaacgaggctcagtcggagatctcttgcttaaacaaggaagccaagaaggtgaagagggccaacaaagccgaacttgaagctactcagaaggaagcaaaggacaagtccgagctatgctaaaaactctaggaagaactcaatgcagccaaagcagcgctcgaggcgaaagaggctgacaccaaggagcgatccagtgccattgccatgcactccatctatcgagcctggatggagaatccataaatggatttgagtttcttgggaaaggccttggacgaattccttgcttactgcgagcaagctaagaaagcagaagaggaagtcgaggtagcaggagaagttatagaagaagaaccatccaagtctcctactatgtaggcttggtttttaattatttacttttattttttattttttggaaaatggccataaggccgagacaatggtttgcccttcatggcacttttgtaaagacagatttgcaaagttggatgaccaacttcgcttttattttatcttttattgaatgcctcgtacttttatatttgaacttgatatatttgcttgtttgcgttttcattcacaactnnaacaattatattttgatcaaattttaaaatactttaagcctttttattgctcgtattttcctttgatattgtttaagtagttagcaatctactatgtgcgtgggcagttattgtctgctatgcttttgattggcgaacactttattaattccgctttgcataaacagttataatctgttttaagcaaacttaaacataattttaatgattcatttcgtgactcactttgtacattttttattgcttatatgaatagttaggccttctattcatattttaggtttaagtattttctcaaggcatcttggtgactcgtttaatactttcctacaaaatgcgagtcgttagtattaagcttcacatgtagcttaatattgtttttatgagttaaatatcatttacaactgctacttttgacttccctgtctcacaagaaaggttctttaatcaattatctgaaaaaactttaaaaatttaaaatttttaaagtggagtgggtttgcaatatatcatgtatttccagatgaattctggttaatcatacacagatatatatgcccctcaagtaattttaaagaataaaactttgtaattacttaaaaaatgattcaactttcttaataattgaagttcaaaatattacatcaacaatagagattacaacatcagtctacttgtagtaaggtcacagatgctccacgttccagtattccttaatagcgagtcattaagctgagctaatttgtgaaccccggttcctactattacctcgatcacataaggaccctcccagtttgggttaaattcacctgcagatg

SEQ ID NO: 33246 - DNA, 1781 bp, Cannabis sativa
  modified_base (1722)..(1730): a, c, t, g, unknown or other
actaattaatatagctttatctaagaaaattaaatagttaaatattattaattatacaattcataattgctataattaatcaaaacaataatttcacaaaatactatttttcccttaagactttatttcccataaaaattaattctcactcaaaatttattcatcaaataaaacattcccatatacagtgttgtatagaggtgactcggggaccatggacctatatttcgaagctccaatatacacttaattattattaatctcatcaatagaataatctagtttttttaattccattattactccactatatagaattgcattctttgacaatatataattatatttacagaattcttacttgtagtccattgataaatcaatataagtagttcgtcgtccaattattagttcataattagagttggtcaaaatacagttttgcccttctaattatctctttatttcttatataacattaattcaatgtgaacaattaatctataactcattaaatatttagatctaactattagcacttccagaattaatactctaagggaagtaatatttgatctgttaggaaagcttagattctactattatatgacatgttcccagctactcatgttattaagcttctgaaatagaagttgtaagaatctttctttgagaaaatttaacaagtgaatcaaagatttcaatgaacacaaataggagttcatgtatactcaggtttcaggttgatttactaatgatcatcattgtgatatgaataactctttcgtagtaaacaacacgtttattacatatcggtctagtcatacataatccaattatacacaacacatttactacatgtccatccacatatgtacatccgaattaaaatcacacactagaagtattgtgtataataatccgtacttagtagtttcatattaaagactctcaatactttaatacactaccaatttgtttgattcattttgtataattttaattctcttgtacatccttacaagattatacattctccataggaataaggaatttttagatgtttaataattatactcttatagttaatgtatcatttatcttataattgtatttcatatattatccattaattacttgcttttagggcataaatcttaacaatctcccacatgcactaaaagtaagtgcaacatgttctagaactcttatagacgttgtatctcattcaactatttaggctaagtcatatgaacgagaccctccatataatgtagtgccagaccccgaagactaccacattatcattggataaatatattgaatttgattctatttgtctgcaagtcaactaacaagtatattcccttcttcaacctactaatgaagaaataacaagaggttcaaatggattgatgaatgcgagaaatcctttaaagctcttaaacatcatctatcaaagtcttcgatcctatcaaaactagtagatggcaaagagttgttcatttatatggctatcaccaagcatgcagacagtgttgctctagtgcgtgaggatgaagggacacaatgaccagcgtactgttgggttttgtgctctaaataaaatacatttcaatataatcagatttactaattaatataagatcaaaaatttgttttatgttgcatggttcatatgatttattttatgattatattaaatgtataaattctattaannnnnnnnnatatataaatatgtatatatttttgtgcatgattatagtatcgtcagcaca

SEQ ID NO: 33247 - DNA, 1255 bp, Cannabis sativa
gatgaatttataaataaaataaacatataaatgatctcatgaaccaaatgacatactaaataagttatgaaaataattgtgtttctttattgataattgaatagaaaagattacattgaactagagttttatttagggcataaacccaacacgacgtcctctctttctctttgaattagagggttgtcttctttcttttctttccacacccatttctctaaggagtggccttggagacaaattttgtttaccatgtgggctatctccatgcaatggtgcatgagtggcatgagtgtgttaggtacgtactccaatgaaaaattggtattgctaagagaatcattttcttggttcgtttggttatgggtacctccatggtgggcccaagcaccatgaccgtctccatgcaatagttatgtgcatgtctggcatgtactctaatgtttggtgaagtttgtggtcccctttgcttggtggattgggaggattttagtccccatgcctctgcgcttgctcttagaattctttgttgtggcgtaagctttctaccaactggacacgtagggcttttttttcttgaagcgcatcatgcacagtcatggatctgattggtgggagctctctagattgtgatgaagaactttcacattcttggacctgtccctcaatttctggcatcggtggcataagacgcttctatcggcccctagatgttccctgtccatgtggttgtgttgggacaaaggttccttcgccaaggcgttgattaacttcccccccttggaactttaacatcttcttcaaaattgttcctcctggtactcatcattgttgtgaaaaaggtaaattaatgaattttccaaagggaaaataatcaaatcttcaccgtggcactctcaaggaaagcaccaaactgttgacgcaattttttgtcaattgatctaagaaggtcgtaaagtaaaagaagaccacggtgaattaatctaactaataaaaccacaataaattaaatagacagtagggatttatagtagttcaccccaaggtcacgatggtaatggggctacgtctaattgtagttttattgattggatatgacacaccagagtgtgtggataaaagtacaacaaaggatttctagatgaaaccttaataagatttatgaatataaggctcatgggagacttgatattcataaatctgatataaattaaaggttgtaaagttcttcggaacaataaaccaatcatttgtg

SEQ ID NO: 33248 - DNA, 1740 bp, Cannabis sativa
cattcaatagcaaagatcaacacagccaacaaagttgttttctactcagggattaggtccaagttttatccaaaatttatgattgaacctcgttagtttccgtccattttcatttttgttattttcagtttatgtttcaagtttttattctttcttgttcttgtattcttgattagtgcttaagtgcacaacaatgcctaataatcaaactttaaaaacgatactaaatttaaaaattattttcgaacatataaattttatataaatacataataactaattttaacttcatttttattttggcatttaattttttatttgcttgttcaaaaatcaaagttgttttaagtatacaatatggagcaaatataacaaagggaatcagaaactaaaaccagagagaaaaaagaaaataaacaacactgaagagacaaaaacacaataaaaactataaacgaataataaaaaaaaatagaggagtgagataaatcatatatacaaaacaaaaaaaaatagaagtggataaaaatcatatactctaataatcaaataatatcccaacaaacacaaaacccacaaaaccttaaataaagaatctaaaatacaaatattaacacaatacaaaccaaaaacacaatctaaaaattaatatataaataaatggaaaaaataatgagacattcacatcaaatgcaattgataactacaattaaccaacacacccaaaatgagaagagacaccgccgatgacctctgaacaaagctccgattactgccgatgaacaaagaagaaggcagccacaaatgagcaacccgcgagcacaataaagaagaagaagaagaaaaaaaataagaagaagaaaaaagatgatcttaaaatattagagtagaaggaaaaaatagaaaaacagaatacctaaaatacaaataaaactaaaaaaaataaagataaaattaattcggctacaaacaaaaatatgaaatatgaatttaaatattaggtttacaaaaatattgaaaaaaataccataaaagaatgataaatttacaagtatcatatttttgtaattttttttataaaatctcatttttcatacaattttcactttcttttagagtgtgatatagcccagaacattggttcaaatgaatttatagagtactttttcccaatacaaaatggtgagaaactataaaaaagtatacatttccgccttttgcaaagaacagaaagcagaccaaaaaacaggattaattacttttggagtagctgaaatataaatagtaccatagaagcaaagataggaaaatatatatattgaaagatcattaatatttaagccaaaaaaagagattcaaaatcaaatttcttacaaaagcatatatgtaaaacttgcattgcataatgtcctttgatggtcattccaaattcatcagtttcagctgattttatgtttaataaatataaatatatatatgtaagagttacattaattaggttcagaaaccagttatatatatatatttatggcacacacaacaaagcacataggttgttatgcttcattatgcattttcatgatcagatgagatcatcatcttgtaaagtgatgaggagtcaaactaaagcatccacccagggataaacccgttgacttgttgaccatgagtattgttgctcatctgctctgttactcctgcgttatacctataaacgtttttttttagaaatattaatat

SEQ ID NO: 33249 - DNA, 1187 bp, Cannabis sativa
aaattatgtgtagtatacatatcctatcgatatgatatcatacataatttatttgactgcctattttgtgatggagattaatatgttgtttgttgattatatttgtccaagtgggagagatattgtgatcttgtatggactaatataatcacaaatataattctatatttccaaccatattcggtgttttctaaggagacaatatgagataagtctttcgcagcaactttcaagatactgagattcaatgcatcatatcgttttattctgaatagcctcatgaatattgtgattgaataaggattcacatctaaggttattttaggagttctaatattatgaggtaatatataggacattgcatttgataatcttggactttaatcatataaaacaagacgatcatctcaaaagttcattgaaaataccaagttctatacgttcatctcttctagctattattgctcataagtatataaagctatgtatgttggagttttaagccgacattagacaagggttaaaattttatttaaggaataattgaatttatccatcattttgttactttcgctgtaattattgatgactataattgaccagaatatggtaaaaaactccatatgtggacaaataaagataaagaattgagaccgtttgatgaacttgtgattccatacacaagataagtttaattagatatacctctaaatttttaatcgatagccactggtagttcttaatccttatatggagaattgatatggctatattatgatttccaagctatgatcaagcgtgaaagttttaggcttagtcccataataattgggagattttattgatggtggtttattttaagaataagttgtttaatggtcaaagtaaggtgaattaaagccaacagctagtctccattctaacaatggatttgttcattgctattattgagttgtaaagtggtgactatttggaaatcaatactaaggatgtggagaaaactctaaattcttgtttaaagatcatatcttgtcaaatggctcgattaagcatggagaaggtaactgaaaaagatacatgagttaaatgaatttaaacccttttttgaggcagaacaacaagatagtgattactgtaattctccaaaatggtcaattcaaagtattatcgttagtcaatactatgtg

SEQ ID NO: 33250 - DNA, 2272 bp, Cannabis sativa
atatttattgggttagaaaatagtattatatatttatttatcctaaatttaatagtatcatatatttatttattttacaaaataaatatgcttttaattcttattctaaaatactaacataatttttatgatgatttatttttttaatttttcataaaatatgagatatttaatatacaataaaattattaatcccacaattacatttacttaaaaaaatttcttattatttttttttgtttgaaatattttaggaacatttaagataatataataaaacaaataattagatattgtgcaaattaattatttaaataacaactcaattaaaaaaaaaaaaaaaaaaaacctctctttctcccaccaagaaaatgatgtgtatatatgtgcatcatttataaaaaattatatgtgtaacatcatatcaatattagtaattaattttttttttgggaatgtgatcaatatatacttagaaaaaaatactctcataatgctaacttcttaatagaattctaagtgaaaacagtgagtgataataactttgaatttagaaactacgagtgatacggtaataataataacttcgaatatagtgacaaccacaaataagatacacagtattaataacaattttaaatctacaaattaataattttttttgaaaaaaaacatagtatctatatagttattattattattaattcactaatcccaagagcacgagcagttcgataattattagtcttctaatcgtgattcccaaatcaagatctctgtagttcttgtcactatcattgttcctccgtagcaaaagtaacaagatatcattttcaatttataatccttgaatttttactgatgctcattctgaaatgctaggtgtaattgtaatgtcgtggtgtttgaatgacaattcatatttgctttaatatataatgttgtgaaattgcaatgtcgtggataggtagttttttccaagaggactttggctttgaacactatatgttatatagaggtcttctcaataccagtaaacttgcttttgtaatgacctatgggtctacctttcctattaatatcaaattattttattttcataaatttatggactctcttttttcagtccaaacttggactgaaagagctcatagaggaaacccaagatgtaaacgacagggaacttagtgacctatttcttctcttagatcagagaaaatatactttttcctataagatttctgttaagaaaagatatcatgtacatgcatactatttcatgtctttcactttatctttatggactctcacatataattcattcacattcatacattcataattgctctttaaaatatatattaaaaattcagaacagttcacaaaacaaaattgatgtaccaaaagcaaaaccttgtacttatatcaacatgtgatatggttgttctcataggtaaaagtcagtattaccttttattttttattagttttaatagcagaaaagaaatatattatcttttttaccaatatatgatttttcagtttataaggcaatatatgatttttcaaaatactattttttattatgcatttcacttcatggaatgacaccatcgtgttatgttatcttgctttctttcttttcttttattttcagggtgttctaccagatgggacagttgttgcagtaaaaaggcttttcttcaatacaagacaatgggtggatcatttcttcaaagaagtgaatttgataagcggaattccacacaaaaatatggtggagctactgggatgcagcattacaggccctgagagtcttcttctgtatgaatatgtaataacttatttggtggtactgaattcttttaaagctgaattttttcaatgttgaagcaaaatgatcttttctattcattttatttacttatcctttgtttgttacaacttaggtgggagtcaaggtataagatcatattgggtgtagctgagagtcttgcttatcttcatgaagaatcgaatttgagaatcattcaccgagatataaaactaaacagcattatgcttgacgaagatttgacaagaaaaataaatgacttcggagtagctagattattcccagaagataaaactcacatcagcaccgctattgctagcaccccttctaacgaatattattcttctaagcccgaatccaacacacaatcctatgggaacaacatgacagaaagttgggttgaaccaagatgagatgaacatttttaagtgtatcacc

SEQ ID NO: 33251 - DNA, 2514 bp, Cannabis sativa
  modified_base (2476)..(2476): a, c, t, g, unknown or other
aaaaaggtcaaagttttactagcatacatttgcagtggctacaatctaacttttaccagcgcatttacgcgctgggaaaagttctttttgccagcacttattttgtgctgacaaaagttttaataccaacgttgatttgccaaccctttttgccaacacatcagaagtaaattctaatttactagcgcaataccaaacttttgccagcatatttgacatttcttgtagtagaggttgtgacttgaattgtgcggagaattaagatcacttagccatgaataaaatagtcagtaacatattaaagttatggaatctttaatcaatagttgctagtgtgattcactgatgccattatttagtgtaagtaatctcgattcgggttactgatgtagtataacatataagtgaaggtgtcatatataatagagattatatatgacatcgaccgatatgtaattaagttgtctttatcaaatatgttgtttactataaagacctaattcatatcataaagatgattaatagtagatcggcctaaatcttgagtaatcatgaactcctgtgaaacttggtgaatagcaagtgaccaagacacttgcctgcatggtcgcttgaggggcacccataactcatcgaactggcacaaagaacttatacagagaaattttaaggcttaaaataagctactaaacctgcctctaattcatgcaggcatccatacttcagcttgataaagtaaatccaaacccttacttgtcaaggccataagaagatagccaagacgatcatatatccatcatagatggctttaaggctaaataatagtagtattcaaaaatagagggcctataggccaaagcaagagcataaaaggcttgaggctggatatgagatcagttcgcatgcatgaggctaaggccctgctagaaatgtatagccaaaaaagaactggacagagctccaataggggtcgtgtactaggctacggcttaggcagagttccttacgggaaccaagccatgttgagtcttaagttgaacatttgactataatagactcaccatgaagcttcatacaaagtttctaagaaaaccatgtatgagactaaggttgtatatgcctacagagacaaactcttgccaaagtcacaagaggacaaaaactggctacccacttggaaccaaggcccatgttgggctaggttcttaagccttcaaagggttggctagggtcactaaacccaagcatgaacaggcaagctttataggataaaaccctaaagctggccaactcccacgattaaaccttaggggcagccaagtcttaagcaagacctcctaggccggcgaaggtaagttttgaatcccaatgtgtatttttcttttaaaactcaaatatgagccttgtattcttcatgactcaaagagtcaagaatcataacgaaggccaaaatcgaatcctttctatcaaaaagtcatacattacacattccaaaattgtcatgagaatctatctaccaaagagattacaaactaacatgaatcaaaaagtttccaaaagcttaaaaaaacttgaaacttgttaatggaagatacaaaaaagagatacccaagaagagaagatgagatgtatatagagagagaagatcaaagatccaaaagcatgtcacgcaaaaagctaacacttggctagacaaggctgctcaataaagactactacagacaagacgatggctagaaagtccctatccgaccagatgtttgaacagggacttggggggaaaatgttatcctaagttttgttcacctaacgtggcatgttcacgtaagccaaagatagagtacatctggagtaaaaccctaccaatagcagaacagggccttcatgcaagatatagcaaaatgatcaagcagcaactgaatggagtgaagcaagccctcaaggagttgtatcaacatcattggctggcctagagaagcccataaggcgaccagggtgagcctataggccggccaggatctgtgcacaagctggttggccaagaagtgacttttggaccaagggatcttccgttcgaccaagggaacctggtctctacaaggaaatggtgtacaaaatatatcctcaacttgcaaaaggatagcatccacactcaaaggttagccttctcttggtggagctatagtgacctaccagatcctggaggccttgtcctgccagatcctacaaagacttgtcttgccagatcctataggcattgtccggccagatcctacaggccttaggtagttagacctctcttgtaggtccatggcaagctaagattgacctggcaggaatttttgtacaactctcacgtggacaacacacttcggctgcaaattggaccctaaaggcccaatagagcagctagataatatctactttcaagggcactttagtattttgtaattatctaacaacctatgcaaatatntagggatttaaactgtaatctagggtttaggcctccta

SEQ ID NO: 33252 - DNA, 1069 bp, Cannabis sativa
gtaaagttcatttttatttttatttttattttttatgattttatttaagttgcgtctgggttcggggtcggattcgagttcgggtcagagattgagttcagcgccaaggtcgtaggggggatttgggtccgggtctggtcggagttcaatatattaattgagaaaaaaaaaaaactacttaaaaaaatattgaaagtgactttttttgttttcaaaattttgattctcaattaaaaaattgaaaattgaaaacagttttatagaacatgttttttaaaaatacttttacttttctaattttaaaaatataatactgattaaaaaagtgttacgccatttaaatttttccccttctatgttttcaaattaaaataaaagtacaaaataaaaaataaaagagtgaggacaataccctaatattcttttttcttggaatcgactaaaaattttagttaaaagatatgtgtattgatcatataaatttacctaaaaacgactaaaggaaataaattaatttaaatattattattattattattatttttgatcaatcaatcatgtacttcattactccaaaaactcatttacaacctattggccccttcaaaggaagacccaaattttatctatacaatacaatgtgattacaactcttccttgtgtattatatattacattcacagctgcaactatataaaaaaaatcagtcagcttcagcttctatagaaccagtcggcctcaaactaaaccagacggcagcagctgaaaaagaaaagaaatcagctgctataggagagcaaaccagtcggcatcagctgttttgtgcttctttggccaattacacaacactctattctttacatcttcctttatagcatggactacaacatcttgtgctattctccttgaattccatagcaaatcattgcgatttttccaaacatggtacaccagagcagccactgcagtagtgattactgcctttcgaaacctgctcattttcgctctttccagccacctgcacaatctgctcaagtctattgtttcaactctccatcctagccaagct

SEQ ID NO: 33253 - DNA, 3015 bp, Cannabis sativa
ataataataataataatacttaatggtagtttcaaataataaaaaacaacctaataggtgtgtaattattttgtgtgtttagaaccctacttaatgtattaaaaaaatgtcatttttctacatacaaaaaactcgcaaaattttcaaaattaccattttatataccaaaattagcaaaataataacttttgcatggagcctcaattgtcttagaatcaaccatgtgtaagtaatgagtgaaaattacacactttataaatttttatacaatgtgttcaaaaatatgatattttttactttttagaaaaaaatattttacagaaaaaaaaaaaaagaaaagaaaagataaaaattatgaggaaaacaatataccgtaattggttaccttaaactgtttttccttatattttttaatttctttcataaaatatatatatattttttgaaaaaacaactctaaaactcttaccaaaaaaataaagaaatttacataaattattatttttagttaaaaatttactaatttatgtttaaagattttttaatatatattttttacagtatttataaaaataacacaaaaacaataaaaaactacataaaaataacagaaaaacatctaaacaacataaaaaaaataatatacaaataacaaaataacaagagtacaacataaaaatacattacaaaccaaattttatgtaaataaaatcttaaaatctgtaaaaatatttaaaatttcgtacaattgtattcttatattattttatttttgtgtattttttaaataatcccattaattaatcaagaaaaaaattaaatttatgtagcaattatttcatactttttgagttcaacagtttcttcaattggaaatatttgatcatgatccccccataccaacaacacttcctgcaaatttcccacacatatatataattagtatatttatacataaatatataaaaattgataaaaatgaaataatgtcacaccttatttaaatcaacaacatgtgcttgattatctcgtccaatagttaatccatcaaaaagttctgacttctcctccctattatcaaagaacaatttctgcaatagtataaaaatatataaaagttgtaaagttaatttacacatttacataaatgacatatactaattttactttgcaatattatcaacttttctagataatgaatgtaagagaatgattacttggagcatatcgtcgagtaatgagtacggtacaaactcgaaaaaattatacacagtgagactgagcagagtccttaattgtgctacagtggtcggaagaaaaagatcttgaatcttctccactttcgccctttttagcaactctacaccgtctctcaacctcatatttgtagcagaacttgcaattaccactttatcaactctatttgcccacctttttgctacattgtatgcaacgaatccaccgtaacttgtccccaccacgctgtatttcttcacgccaatcttctccattagtttggcaacaatgtctgcttgaaattgctcagaacggtcagccaatcgagttgtggattggccgaagaatatcaattcaggaacatagacgttgaatttaggggcaaagtatgtgacttgatttcgccactgccacgtgggcacggggccaaagccgtgtattagaaccaatgatggcttggtcgtgttaatggaattcggtccccaaaagtggacagtggtatcaccattatcaaggttgattaactgagaagtgagcccagcaacaacgaagcataaacgaaggtaatttccgtaccaataaattggactaagaaatgatgacaccattgtgtaattgatagatacgataaagagagaatgaatgaacgaaagagagaaaagaatgatagaagaaaaaaaagaaaaaatagctcttaaataagaaaaattaaaaaacagatttttacttgaaaaacaaataaatgatgtttagtagtttttaattttttacttgaaaaacagtagttgggttgtttgtttaattatttagggtcaatgttaatttaagtacattgttttttaattcttgttttttttttttttttggttactagagttaaatgaaggaataatttaaattaattaagccagcctaaaattgttattttgtctaaaatgatttttacaatagacaccaaacaacatatatttaactacgtaaataaattattaaataattaggattatgataaaataactaaaaattagtgggagacataattaattatacaaatagtttattttggttggttttggggatggcaaccttctttgtagctattttttttttttttataaaaaaaaaaattgaaaacatttcatttaaacatgaacaatcatacaatagaacctatatttaaaaatatatttgaaattaactaagttataactaaatagaattagattagaaaaattaaaaacgccaaaaaatatcaatgaaacaataatgacaataagcaattcttaatattatatcataataaaattatttttgagtaactataatctttatacatgtattacaattcaaataaaattattagttttgtataaataaatttataaattatatgtatatatttaattaagatataattattcttatatagagatatactttcttaataagagatttagaaaatatattatttattacaatttagatgtcttatttataactgacttaaattgagacttgatttttttataataaattaaatgttatttttaaataaagtattcttaaatggattatctactgtattaacaaatacatcaattatacaatgcgcttaaagcgagagaaatctcttgattccaaaaaccatgagctttggaagagaaagttacttggctaaaacatgagataagcaacaagattagaagttcttcctaattttatttattgattttattggaagaaatacactagtaatttgttacttccttcttttttttt

SEQ ID NO: 33254 - DNA, 1197 bp, Cannabis sativa
ataggccgaccgaccctcaatgacttgaaggcggtaacctccatctacctcatatgcctcaaatttccaacgaggcatggggtggcatgtgtgaggggagaccaataattttcctgttattgttacaacttggctctttccaaagccaagaaagagaagatgcccgccaagggcccagaagacacgcccagcaaagggcaatgaagtccggcctaaagtggggacacaacatagatcctcgctttagggatcctacaggaagtttcgggcctatagaagaattggaagaagtggaggtcaatcccacttttcctaaagattgggaaaggtttagcaccaaaaattaaatcaacactaataaaatttctaagggaaaacgtggacctttttgcatggtcatggtctgaattgacccctctgtgatgacccacaaacttaacatcaatccaagcatctggtctgttcagcaaaaaaggcaatttctagacaaggagcacgcccaagcgctcaaatatgaggtcaagaggctatgagtccatgacttcataacagaggcattctatccactatggctatccaatccaatactggtgcccaaacccaacaagaagtggagagtatgcatccacttcaccaacctgaacaaagtatgtcaaaaggactgcttcctgctttacaaaattgactagcttgtagatgccacaactggccatgaaatcttgactttaatggacgcatattcaggttacaatcaaataaagatgcatcaatcaaatcaagagcagactagctttatgacagatttaggcctataatgctacaaattcatgcccttcgggctaaaaaaagcagaggccacatatcaaaggctggtcaacatgatgttcatagatctcatcaaccgcaacatggaggtgtatgtggacgacgtgcttgtcaagtcccaaaagactagggggcacgtggaggacctaaacgaatacttcaaaatccttcacagctacaacatgaagctcaaccccctcaaattatctttcgatgtaggattaggaaaattccttggcttcatagtcaacgccagggaaataaaagcaaacctaaacaagatccaagcccttttggacatgaagtcgcccataactgtcaaggaagtaaaaagcaggtttttgagcccggtgattgggtatggttacacat

SEQ ID NO: 33255 - DNA, 2337 bp, Cannabis sativa
  modified_base (160)..(177): a, c, t, g, unknown or other
  modified_base (1495)..(1520): a, c, t, g, unknown or other
  modified_base (2066)..(2091): a, c, t, g, unknown or other
  modified_base (2134)..(2155): a, c, t, g, unknown or other
  modified_base (2203)..(2212): a, c, t, g, unknown or other
tatcaaaagtgacaattttattttagcaacctagtctattttaattatcaaaattaaatgggctccctatatgcatctaggcccaaagtaaacatataagcacaagcacacactgctttggatggatcctatcatgttactaggtttatacacagatgannnnnnnnnnnnnnnnnnacctgttacaaattatttatttaaattattgacaattggactacagttaacatcagatcattggatctgtcaacaagttaaccataacaatttagatcaaacaatagtagattttataaaacaagttttgataataaacaatatatataaaacacacacatgcaacaaattagatagttcgatataggatttatttaaatcaaattaattaaataattaaattaattttgaaaatttaaaaaaataaaatattattttcgaaataattgaattaaataattaatttaaaaataaaatctataaatttaatttaaaattttttggttagttttcaaaattttttaaattattttattaaaatatatcttactttaaatttcaaataaggtcatgttataaaattatttaaataatgtaagattaaaatatctcaccttatatttaaaaataagataaaataatcaaagtttaaaaaataagataaccaattaagaaaaaaagatatatttttatctattttcgagttcaaaatctaatataatctagaattaattaaaaaaaaataattaatttcaatttgataattagatttgacatttgaaaaataaaatctacattcaaaatttcacaaaaaattcgaaattaatattttgaaaaatcatgaaaaaatagcaaaatttgcatttggcacggatggtatgcaaggcataccatccgcgcgcgtgtgtaggggtgcacaaccgagttttaccgcacacaaatcctgcactgtatttctgtgcacgtgtggctggttcagatagggggccgtcaaggttctttggacaaagcttgtcctaatgcgcgtgcagaccgagtgaagactcaagtccccactcgcatgtggggtgagccttaccttgatatttttctaattttcaaaaattcataactaattcaaatgaaaccaaaatcaaattatgtaaggtgaattgttaatttttttccattctatccaagaaaaataattccataacaaaattccaattattttatgtaaaatttcgcgtaaacatcaattaatcatcaataaatacatagatcaacatgaatcacatccaaattacatatacatcgttttaaattcatatttcttgaaagtaaatcattaatgtagctctgagaccagatgttggaatatgttttaccagaacttagatttactaacaagtatgtttttaacatcataaatatgaatttgtaaaacaatgaaacataatcgaaatctgagccagacactccttcagttgtttggatttttcacagtcttacacactannnnnnnnnnnnnnnnnnnnnnnnnngggcatgcactcaatcactaaggcccgaatttttatgtgataaacactcttggattttgaaattaggaagaagaataagaagtctcaaaactctctagttgtctgacagaatgaaaactaggtttagagtcattagttggattataagactattctttttttatactaattcacttagggttaggtttaaattatatggaataaaattgataaaataatagcaaaaataaggctatagtggcctatcatatgtgggccctacactaattatattttggttatttttctcaaccatttatctattattttacaaatgccatattttcaaattctaatcctataaataccaaaactatatatttcataatttaattataatattataattaaaattaattaccaaataaaattgtcatctatattatttattacttagactccacaaagtctcttaattaacaaataaatcctaaaatccctatattcttcacaatcaagtcataacttagtgaaaaattcaaaaataagacatagtctaatttagannnnnnnnnnnnnnnnnnnnnnnnnntaactgagtcttacaagcagtattgtctcaacaagtatggggnnnnnnnnnnnnnnnnnnnnnncttccaataagcagatttagaatataccaagtaaattccctaacttannnnnnnnnncctgcaccactatagatttggaattgcactctcaattctataaaactctctatatgttctacgatatagatacactatgaattatccatttattataattttaataatcaatcatcctctataga

SEQ ID NO: 33256 - DNA, 1298 bp, Cannabis sativa
  modified_base (28)..(28): a, c, t, g, unknown or other
  modified_base (1245)..(1258): a, c, t, g, unknown or other
atttcgaacaaagcgggtattttcacancctttagcttccctttttataaatgggggtgaaaaaatagcctctaaaggccaacattgtagtagtgagagcccatcgatctagaggtttgtgacaacgagatccaagaacaagttcctcctctagtcgtttctgacaccaatgctcctcttcctgaggcaacccctgctactgcttcttcgagcaaggccattgagatcttgtcggccgcatcaggagaggtcaggtttgaattttcccaagcatatggagttgcctgttggcacaaacttcaagctcttcttcctcccgattgggatttttttcaatcttaggagtccaaaagatatgctttcaaggagcttggactataacttcatggtacgctggctttgttattataatcatattattctctttatacctcttttatattcatctctttgtaattctccaagcttctttttcttcttttgcttccaattgattactctctgagtggctcgaatacttggagggctaggtccacaagttattatcccaatgcaaggttgtgagtaagcaccgggacgacgccaagcaggaaagtacctgccttaagcaagaagccgagaaagcgaaggaggaaactgagaaggcaaagaaggaagccaagaagtcaaaagaggaagccgagaaggcaaaagaggaggccgagaagaccgccaaagcccaagccgatgagtttgagaagaagcttgcttaaaaaaagccgagaccgtagaacggtgtgacaaggtcggttttcacactgtctatcgggcctgaatagcaaaccctaatatggaaaccatcttctttgaggagaaagaggaggaaactttagccctttgcgagaagaccaagatggaggaggaagatggcgaggtagaggaagaagaagaagaagatctgtccaagtctcccagcatgtagacttggttctttatttatctcccttttcattttagaaaatggctccctggccgagacaatggtttgcccctagtggcactctttttttttaaagacaattttgcaaggttgtggccaactttgcttttttttttaatgcctcatactttcaagtttaaactttaatgtatggatgtttgcttgtgtttcattcacaatttaaacaatcacatgcataaagtttattaggggtttccattgctcatatcttcctttgatgctaagtgttggaaatattttaccannnnnnnnnnnnnntaccaagtatgtttcattaacatcgtaatatgaattctaa

SEQ ID NO: 33257 - DNA, 2706 bp, Cannabis sativa
gttagaagagagaagttttttatttcatggcttcttgtaataaaactcatctaacaatttcccataattgtttaattttcttttacttttctctttgaccaaaatctctgcttttttttcatgaattgtccaatatatatgctgcaagaacaaccagccacaacattgatggtagcttttcatcttttagcatttgtgagaaatagatttctttctctctattattagctgatcttactagctctttttattagctcttttttgatgaggttgcagaaactctaatcatcaaaatctacactttggtaacttgcacatatacaagtggacaaataagtaattgtctaaatttctttgtgataatgcaatcaagaaaggaagaagaagataacagaggagaaagactatcttattcaatgaatatcaaactgtacaaggcttatatacagagtaaaacagaacacaacaacttgtaacagaatacatgaaaagagttatgacagttggagttagttacaactaactaacagaacaaactatttattatccttgacagcccccctcaaactcagtgtgaatttggattcaacactgagtatggatcgaatttcattgaatctagaggtggatatagcttttgtaagacagtcggcaatttgagcttgagttgggagatgattgacctgtatttgctgctgtaatactttgtctcgaacaaagtatagatcaagctcaatgtgcttcgttcgagcatgaagcactgggttggcagtgaacataattgtgctttgattatcacaccaaacagagggaatttttggtgaagatatatgaagttctttgaggagagattgcagccaagtaacctctgtgacaacactcgccaagcttcgaaattcagcttcagttgaggatctactgatggtaacttatttttgagacttccaagagactaagtttcccccaaaatagatacaatacccggttgtcgatctcctgtcatctgggtcagcagcccaatccgcatcacaaaaaacatcaagagagaagtcttgtgctggtttgatccaaagtccatagtcaagtgtccctgcaatatacctcagtatacgttttacagccatccagtgagattgaagaggtttgtgcataaattgacaaaccttattcacaacaaatgcaatctcaggtctagttactgtggcatattgcaaagcacctactatggatcgatagagagtaggatcttttactggttcacttccataatttgagagcttgaggccactgttcatgggagtgttttgagtgttaacattgtgcatgtcagctttgtaaagtatgtcttgaagatacttggtttgtgtcattaaaattccttcagtagacctggtaacttgtatccccaagaaataatcaacaaagccaagatctttaagagcaaatgtgttgcttagctctctaatgagttgattgactaactcatcatcactgcccatgatgagtatgtcatcaacatacatcagaatataagtgcagctgagtgaagtgacacggataaagagtgaatgatcagccttagagaattgaaaaccatgtttaagcaaaacagaggaaagcttgtcaaaccatgcccttagtgcttgcttaagaccatagatggctttgttaagtttgcatacatgagttggaaaatcaggatccacaaagcctggtggctgctccatgtaaatctcctcttgcaaatctccattaagaaatgcattgttgatatcaagttgtcttataggccaccctttagtgactgcaatagtgagagccacccgaattgtaacagcttttaccactggactaaatgtttcttgaaaatcataaccagcttgttgatgatatccctttgccactaatcttgccttatatctatcaaggcttccatcagcattgagtttcactctaagaacccacttgcacccaattggaactttatttgctggtctaggaactaccacccatgtgttgttctttttcaaagccaccacttcagtgttcatggcattatgccagtgtggttcttgaagagctgctttgacagtttttggttcacaaacagctaatagagctttgggttttctgattcttgcttttaaccttgtggtcataggatgagtggaagttgacactggtgttggattagtaggggcagatgggctggaggtgtaagggacattgagtgtggctatagctaaaggaactgagacaataacagcttctgtagctgtagcagttgcaggagtttgagtgtgcacactgttgacaggtgtagggatttggttgctagaacccgattgttgactgagaattggtgaagcagacagaggaccagtgttggtgacagtgtttgggctatggacaggagaaggaacatgcaaagaagtgaacacaggtggttgtcctggtggggtaaaaataggctgctgaacagtaatgttagataagtgagtagagtgataatagggaaaactactttcatcaaaaattacatccctagagatgtaaactcgcttatctttagacatacatttataccccttgtgagacatgttgtatcctagaaaaacacatggagtggatcgatattgcaatttatttttattatatggctttaagttgggatagcacaagcaaccaaaaactttgagcatagaa

SEQ ID NO: 33258 - DNA, 2775 bp, Cannabis sativa
cttttatttattataaaaaaaaactaaatttgtaaatttttaaaattattaaaattaatatataaatcaacatttaattttgatacacgtgcggagagcacgtatgtctcccactagtatatatataaattttatcaactttttatagtaccaatgtacttcaatttttttaattaaaattttaattgtgtacatacaagtatacaataagttattgtaatttcaaaagtctactatatcaatggttgagaaaatgttctcatagtatgaaaacatttataaatattttaaacagagtaataaatgatttaatatattttactctttgattatatcaaagaagtcttagttgaaaattaactaagaagacaatagtgtcagtttttgattattgggacagataatgggacatgcaattggaacggaggatttcaatccctttaataaaagatgtattttataagattcaatacttcaatataccacttggtgaaatgacatttaagtagtttagtatttctttttatctaattagattattttattacagcagtggtgtgcgtatatatgttgtatattctttcaacggaggcggctgcccctagtatctacttggtccgagagtcacataatataatcaaatattaatatatgagaaggttcaatgatcacgtgtcacaatttaagtggtagaagaggattgttactctaatagtcttaataatcaaataatttaatataataaatttttgtaaaaagacacctttagaaattattaagcagctgtactcaataggaatgctcctcatagagctacttgctagcaatagagtttgtctatatgaaaatatatcttatcatcatcagcagttaattaactgagctactaaaattggtatattattgtcatggaaaaagcagagcttgtactcattccggggccaggaaggggtcacatggtaccaattgtagaatttgcaaacgagttactgagtggagatgaacgattctccgtaagcattcttatcataagctcaccctttgagaacagtcctgtacgagctgatcccatgcccactaacatttcccaacaccatattcaatgcttccacgttcctaaaccctctaacctacctccctcagagctttatcatgagtcccccgaaaactacttctctctctacattgagagtcacaagtcacaagtcaaagacataatagtcaaccgttttacacccacgacaccgtttcgtctcgctggactggttgtcgacttgttctgctcctccatgaacgacgttgccagagaactcgaggttccctcttacttgtttttcgcctcaggtgctgctttcctagggttcacgttctacctacacagccaccaggagctccacggagcagagttcgagaaatcagattccgagtttcacataccgagttacatcaactcagtccccgccaaggctttgccttctttcgcactcaacaagcaaggtttcgtggccttcgccgctctcagcagagagtataagaagaccaaaggtattatcgtcaatacagtttcggagttagaatcccatgcagtgtgctcactatccgacggtgtaattccgccggtttatacggttggaccgcttttggaccttaaagttaagagccgtacaccgtcagatcagctggaatatgaccaaatcatgagttggctcaatgatcagcctccgaaatcagtggtgtttctctgctttggaaactacggttacttcagtgaagcccagctgagggagatcgccgccggacttgaacgtagcggcaaaaggttcttgtggtcggcacgcaaagccccaaaagacggaaaattttcaacggctgatgatacagatgttactgaaattattccacgtgaattttgggagaagacaaaggaggttggaagagtttgtggatgggctccacaagtggaagtcttgtctcatccggcggttggagggttcgtgtctcattgtggttggaactcgattttggagagcatgtggtttggggtaccgattgtgacgtggccgatgtacgcagaacaacagcttgatgctttcctgttgtcgagagatttgaagttggctgtggaactaagaattgactacagaagaggcagtgatgatattgttagtggggaggagttagagagggccgttagatgcttgatggacggtgatggtgatggtgatggtgttttagtgaggaagagagtggaggagatgagtatgaagtgcaggggagctgttttggaaggtgggtcttcgttccagtcatttgaacgtgtcaaggagactattttggcaaacggtcccatgcaacttgggcgcgggccacctaaatttaatgcttaatttgactcattatgatatatatttttagttttcttttacaatttcttttagaaataaaaatcatggctcacgccttaaaaaaaaaattctaaagatttcaatataattttaatgtgatttattatgctgaactaataaactcataacattaaaattaatattttagcttttcttatataaataaataatgtcttatttatttatttgttacctagacataaatatttatatcaaaattaaacataaaattaattaagagtattttcatttttacattttaaaatagtttttttttttcattgaattttatatagaaatccctttaacaactaacggagcaatttaaatcgtaaataaaattcacatagcaactcccataaaaactatc

SEQ ID NO: 33259 - DNA, 1366 bp, Cannabis sativa
  modified_base (55)..(56): a, c, t, g, unknown or other
  modified_base (489)..(502): a, c, t, g, unknown or other
tactgatgttttataaaaacacagtatttttgaaaagatttccgtgtgacagtanntttgtaaaaattaacctaaattccagtatttttgtaaatttctctaagaaatactctaataatatagcgtggtactcgtgctactcatttctacatgttgaggggtccccatgcttgcacaataatactcttttattgaagaaaaacataaatttgggcccatagcattgccacctttttcttttcaattatcattgtgaactgaattctttttaacatttttttcccttacatttttacttttgacataacaaatttactttaactatatatacattgataaggatggattgagagtttataaaaaaatagggagcaagagagatgaagaggataaatgcccttctttttgttgcttgatattgggagtaaagttagaaggattaagtaaaataaatattaaaactaatgatattttttttattttattttnnnnnnnnnnnnnntttttttttttttgccttttttctagaatttccatgcttttggaaggattaaatttgtatactttaatggagagagtctccctccatctcttctccttctctctgatctctcttattaaacaaaaaatttacactatgtttggtagagggaagaatagaaggaagggagatggacggaaagaaagggatagagggattgatgtgttaaattttgattgattaaataaatattataagtgtgtcacgcattttaatttagtaggggattgttatattatttaatataataatatgtagattaaaatgtagtaatatattttattatgtgaataatatatattatgtgtttggtaagtactaaataaattgtgtaacatatgatttatttaacctaaaattgtaattaacactttgtaacatggagatgagttacaaaattaattgctgtcaggagcggagccaggacttgaatgctagggggaccaaattttaatttagcatcaaataaaatttttatagtatatatttatattcaatactaaaatttaaaaccaaaattatctataataaaatgttaaaataaaacaaaaagtattatattattgaaatttctactctatattatccaaattgagaatattattacaattctaattaagacacattaaattttaaatttggtaaatattttataaaacaaaataatttatataaataaaataattttaacaaactctaacaaattagaggagatcgtaaatctcaacttctattttaatgataaaagttatcaattaatgagtgattttgagttaaaatgtaaaaaatataactattgttataaatattaataattatgtggat

SEQ ID NO: 33260 - DNA, 1245 bp, Cannabis sativa
tctttcgagagaccaagccaatatatctgatccatttttatgatttttttttttgttttagatgaattggtgtattagtatcaagataaatttaattttgaattagagaaattagatggagttgatgattttttccccagatgatcgaagttgattatactgagcgcatttattaatctctttcgagagaccaagccaatattctgatccatcttcgtaatttttttttttttttttgtgttaaaatagattaatatgtgttttattttctatctaaataggattgaagttttttaaattagtataaatttgatggagttgatgactttttccccagatgatcgaagttgattatactgagcgcattattaatctctttcgagagaccaagccaatattctgatccattttcatagtttgtgttttaatctttgtgttaaaatagattaatttttgttttagtttctaaatagaactttagacattaaaattaagagtaaataagatggaattgatgactttttccccagatgatcgaagttgattatactgagcgcattatttatctctttcaagagatcaagccaatattctgatccatctttatacattatgttttgtttgatttttatttagatcatttatcttttatttttctatataaatatatctatttttataatttaaattcggataaacaagatggaattgatgactttttccccagatgatcgaagttgattatactgagcgcattattaatctctttcgagagaccaagccaatattctgatccatcccaatataacttttctcaaaacaaaatccagaaattatgtgtttagatgtaggtattttcatgtttcatattgcattgtaaattgtgttgtcaaccttgttaaaatgatagaaacattaatatgtgcagatgtgaagataactatctgtttgccaaaagagcactctagggtgaccaacatcctatgttgctaatggtgtaaatgaatatcgggtctcacatattattatgtaaatccgctacttacttgcaccgatgaaatggttgtttggtaccatgtgctctagagcaatgcaatttgtcttcacccattcatttgttgttggctatgaggctatttttgtgtcgatggaattaggcattccgagccatatgacactacatgaaaagttggattttgcaaaatgctgctaagtatgtttcttaactactcacgtggtgccacg

SEQ ID NO: 33261 - DNA, 6224 bp, Cannabis sativa
gaccatctttgccatctgcttctgctgtaataaatcctgacattataccagaccaagctataccacagggcaatgattctatggatactgttcctcatgctatcactactacagatccttcatcagctcagaatcccactcctaatgaggctacatctcctgcttctttagatgagcaaactgccccggctcacaccagcacctctgagccttccactggtttaccagctgccaatgtttccagcaatgtggcacctccttccatgaattcgcataacatgcaaactcgtgcaaaatctggcataagaaagccgaaggcatacttggctatcacagaaccaacaaatatcaaacaagccttgcaaagtgacaaatggaacaaagctatgtctactgagatgtatgctctaaagaaaaataagacctggacttatgttgtgttaccacctggtcgagaacccattggctgcaaatgggtttatcgaatcaaagaaaatcctgatggtagtgtctctacacttaaagcaagacttgttgcaaaaggctttcatcaacaacccggtttcgacttcactgaaacttttagtccggttgttaaaccagtaactataagagtggttttgtctattgctctctccaatggttgggatatcaagcaattggatgtaaataatgcgtttctcaatggggatttacaagaggaagtttatatgacacaaccacctgggtttgtcttgcctgatgctcctcatctagtgtgcaaacttaataaagcattatatggtctcaaacaggcccctcgggcctggtttgacaaactgaacaatactctaactgaccttggcttctcatcatccaaatcagatagatctttgtttattcagctacaactattatcctggtttatgttgatgacatagtcatcacaggcagcaacactcaaactattcacaacattgtaagcatcctcaattctaagttctctctcaaagatcttggccacttgaattacttccttggcattgaagttcaatccacaccagaaggccttcacttatcacagtccaaatatattaaagatctgctacacaaggctaaaatgaccgatgcaaaacccctgcctactcctatgattacaggtctgaaattatctgcctatggccatgaaccctttgaaaatcctcagttatacagatctattgtaggcgccttacaatatctgttgataacaagacctgaattggctttcagcatcaataaggtttgccaattcatgaaaaatccccttcaaccacattggcaagctgttaaaagaattttaaggtaccttagtggtacaatagatcatggtttgcatctccacaagtcaacctccacagatctaatagctttttgtgatgctgactgggcatcggatccggatgataggcgttccacatcaggttttgtcatctttttaggtggcaatctcatcacttggcaatgcaaaaagcagtaaactatatccaggtctagtacagaagctgagtaccgaagccttgcaaatgttgtttctgaaattacatggcttcaatcgttgtttactgaacttcacatctctcaacagaagcctcctgttgtgtggtgcgataaccttagcacggttcttctagctgccaatcccgtgctacatgcaaggaccaagcatattgaattagacctttatttcgttcgggaaaaggttctcagacatcaagttcaagtaaaacatgtacatgcaactgaccaattagctgatggtctaaccaagccaatctcaagccaaagtttccctcgatttcgctccaaactcacaattgccactccttccaattatgagtttgcggggaggtattagggacacatggttcaagttagttactttctgttataagtcagttgtagtctgttatctttctctgttatgttagttactgagtcttggtccttttcatcagtgatatatatatcacactctttgtactcagtgaataatacaacagaatgattcttctacttgctctgtcttttcctctctttgctcatctttgttcttctttgttcatcttttacattgttctttccttttgatctttgttacaatgaaccgaaggaatcataatcatgacatggggcaaggatgtctatgaacaatgtcaaactgtttgagaaggtcagaaaatggtctgaactcacctccccaatcaatttgaagacatttgatttgtttacctaattgtagttcagattcagccttgaattgggtgaatgtttttaaagcatcacatttatttttaagcatgtatatccaagtgaatctagagaaggaatcaacaaaacgaatgtagtatttgtacccattaacagatggagttatagcatgaccccataaatcaataaccacaagttgcaggggatctgtgtagacagtgagagaagatttgggaaatggaaatttgtgaattttgcctaaacaacaggctgagcaaactgaaagaaggtgttttattgctgatttgtatattacatgaatgaagtacagatttgacaatcctttcaaagggatgtccaagcctcactactagataaatctttctagtctattttggtgttggacatagtattagggacataaaatggtgtttttctaatacaatagaaaccgctttctagtccaagtatgttggacatgaaaagcataccaaattaaattatattagcacaattttttttatatatttttaaaatttaaattatatagcaaattaaagaaaaacgtatttttatttgagataaatgatggttgactggccatttattgtattgatttgattaaaattttataatttattatgatattaaatataataaataataattttatatttcttttcaaaaaaaatataccactttcagattttaacatagaacaataataattttacactaaaaacaaatcataatttaaaaaaactcaaaaatttaattacacgattggaccaaagccatggccattgacataacccaaacacactagtcaactcaaatcaaacttaaaacatatatatctaaaaactttaaacataaaaataaaacaaatacagagattacaaaatttaaaaaacatgtacatattacatagactttatatatctaggtaaagcttctctcctccgtgaataatgaacgacaaatagtaaacggagttcgacattgaatgcagaacgacccatctcctctacgaacagtgaaagttaaacgaacgtcaagaaagtcaaatacagagattacacactgttcttctactttgtaggcggcaaatgtcgaatgtctaccacctgtgcaagaccaacttcatcgaacccccaaatcctgagccccaaagctcgatttcttcaaaccccaaagttcagtctgaaactttctcttgaccaaccccacgatgaattagcacgggagtgagagattaaaataagagagagggagagaataaatttgatgtaaatgagattagatttttttttgcagatgaaatatgtgcagctatgttaggttatcttagagggataagttaggttttatatgtaaatatataatataatcataaatatttgaattatgatataatgaagattgatatgtgttcttcaatttcgggtccattatatgataataataataaatattttaaaagtttcctttacttaaaaagagtgataagtgtgagtggtccttaaatttcttgaccggtatgcgtgtaagctaactttttttcaaggaatgtcacgtccagcataacttgattagaaaactaccccaaagtatttttctactccagtagagttggacatgaaaatagactatttttttaataaaaattatatatatatatatattacgtccaacacaagttttctagtccaacattattagacatgataaaaaaaaaaatctaatccaaaaatgctgaacttgaaaacttcccaaaacctttacatgtccagcaataattttgttagacatgaaaaagagacattaaaagtgtttattgtagtagtgcctattatgcccaaaatcatattcagaaacatgggatttattacatgtagtacagacagaagaaacttgctcattattctaggatagggttgatgtgaaagcacttggaaaggcagctggtgttgaggcttgaacactaaactgtgagggtttaaaagtgtagaggcgattctggtgtatgccagtaagaaggatggcttgactgatctttgacaaaacatttgtcaacatgaaactcaaaaaagacattgttgtcataggcgaactgagacacacttagtaaattttttgttatttcaggcacatgtaaaacattatttaaaacaagaggatgagatgaattagaattactaaaggattggccatccaatgcgtttgattgacagacctgaaccatctccaacatagagttgatcttgaccttcatattcagtgttggtggccagattttgcacatttggtgtgcagtgatttgttgcacccgagtcaggataccaactggtgtcatcagtttgagatgtctaaggaagattagcttgagcagtgaaggagttagagccttgaaatacccctatgaagcttttatcgagcctgtaaaagcaatcaataacagtgtgtccaagcttataaaaaagctgacactaaacaagctggtgtgggaaacttgccacctctgttgacaccagaaacaccacgaccattagtaccagtaggtaatccatagttgttacttgtgaaagctccacaatttgtgtatccacggccacatccacggggtgtggataatggagaagggtttgattatagttgggaaacctgttgcttcgattaggatagttctggtaagcaatattgacttcaggagattgatcaaaatcaaccaaggaaagattgacacgcagatcagaatcttgatcaggatcagtcttctctattcgagaatcagaggaaatcaatagtgcttcgatttctgcaacaaagtattattctattcgagtgttagaagagatgatgaaagtgtcatactcactaggtaagcctttgaagattgcagcaatgtgatctctggcacttagaacttctccaatggatgcaagaagatcaacatgctgcttgacttttagaagataatcattaagagaccttaatcctttttaaagcttttgcaacttggtccgaaactccaagatcttggaagaaacctgcaatgtaaagtgtttttcaagtgcattccagatctgtcgtgttgtattacaccctaccatgcgtgtgagaagactttcagtcatcgatgataacaaccaagacaccagaagttgatcctggacttcccaatctagaaactctagattgaatgtgttggaagcttgatcagcatcactcaagaactgaggtagtggagctcgatcttgaatatatttgatcagtctatttccacgaatcacagcaagcacctgctgtttccacaaaagaaaattgtgatgatttagtctaatagacatattatgattaaagtacactggattaggttcatttgagttgtttcttggtcgattgaaggcagaggctccattttgttggttttgaggtctgctggtgttggagtttatttgattgccattgttgtcgattcctgtgctcaccatatttgttgtcaatggagaaaaaggctctgataccatgttgaatctcttgacgatgatcaaactcaataacagagagaacagggcaagaagtaaagcaagaagagaaggaagaaatgcagaaaggaaacaaaagaagattgatgaaacaaagagcaatcttattcattaagtgttgattgtagatgatttatatagtgaaagaatacaaagtaagcaacaagggaattagttatagttaaaactaactaatcctaatagattcttgtaacagataaaattgttacagctatcactaacagttataacaaccagatactcttaacacagatcaagtaaatttttcttatagcagttaatttttgtgctcatcatattgctaagaaagtactagtaattggtaggtgttagaaaaattaatataaaccccaagatcaatttgtatataacatagaacacaataataagatataataattaggtatgtgtacctgattgatccat

SEQ ID NO: 33262 - DNA, 1739 bp, Cannabis sativa
agcatttgcaaagcttttctatggaaagggcaacatatgatgacaggagccgggcaaatcgcttgggaaaatgtttgtcaatccaaaattgctggaggtataggttttaaaaaagttgcagattggaacaaagcggtaatgttcaagtatgtttgggcaattgcaaccaaagaaaacaacttgtgggttaagtggatacatagtgtatacatcaaaggcaaggattggtggagctatgagatacctcaaacatgcagctggtattggaggaagattgtagctctaaaaggtacgttgctgaacttagttgaccccatcatattcactcaaacgaaatataaagtagcagatggctacaagtggctatgtcctacggtaaatagggtcaactggagcaaggaagtttggaatcgactaaatactcccaaacatagttttatgttctggcttgctattcaaaatagatttaaaaccagagaccgtttgctcagatttcaaattgcaactgatccctcatgtttgctctgctcggggagtgcagaaacttgtgagcatctattttttatatgccctttctctattgaatgtctaaatcaggttaagagttggttgggatggaagaccccagcagctaacttaactgatctggtgcgagttatagagaagagatccacctctgctttccgaagacaggtatatactgctgcttgtgcagctctactttaccttatttggagagcaaggaacaatatattgtggctgcagacaaaagaagacccgaagtctattgtacagaagattaaaaatatttgtaaaactagaatacaaagtgtatggcctaggaaggtttcaataggggatactacatagtttaatgaattgtaactaatgtaattacttagaaggaaaagatcagaccttattttattaaaaggtgttgaatagattgtaaaaagtcatttggagtaatgaaaaacactcctgatttcccaaaaaaaaaataaaaaaataacagtttttgaaatttaatatgttatactcgattttcgagaagtcaaaaaagttaatcccgcaactttgacctagactcataagggccaaataagttaagacatcttatttgagggcctcatgacaatttaatctaatctgcacgatccaatccaatccaatccgcaaagtgcggattgaattggatgttgattgactgtaaaaataaccaattcaatccacaaatatttatatattttaaaaaattatatatgcaattaatattttaatataaaaaatagtaatttaaaattctaatatatatgatataaatatattttcaaaatcaaatgtatattccattataatttataaggaaaatataatttttttaaaaaataaacatctttatacatattattttttttttcttgctttgaatttgttatttttattttatttatttaatgcattaattgcggcaaaacctcaaatactttcactttgcttgcatttaactcccaaaacccaactgttagcaatttacagtttccatccatttgaagtattaaatacatactaaagaatctcatctaatgataatgtgttatgtatatagtttagcacaagaatgtatgtatgtagggtgttcataaaatagccgatccaatccaatccgcacgatttaatccaattcaatccgcaaaatgcggatatctgcactttgcagattggattggattggaaaa

SEQ ID NO: 33263 - DNA, 2497 bp, Cannabis sativa
ttttttttttgcttctagtagataaattttgaagtaattagtatatattgaaaaagaaattgctgaaaaatttaatctagattcacatgactttcatgatattaaagagaaactttgtattttgatattcatatgaatttaatattgtatttgaaatatttgttacttaatttttagggtaatttgcagccaaacccccttatatttatttttggccgccaaactatctatagttaattctctttgcaattttaatatctcgttacttgcaccccgttatttgtagccttgacactttcaactcagccaataatgcctacgtgctaatataaatatccacgtggcaattaattatcattctcggcttaaaacttacactaatttttcaaaaaaaaaaaacttacaacttaagaatattacagaattagagaataaaaacaaaacaaattaaaactaaatggaaaaaacaaagaagaaatctagccttattcatatagtaaaataaacattttgcccaaacccaacaaaaaaccctcatatttttcaaaatcatattgcgttgtacaattttaataaagaaggatgaatgaagtgatattggtggcatggatctccagttcacgaaatgttgaagcttagaggagaagacaacaaccctaaagattatggtaagagcctattttaaaactgtagttttccaagttttcttttggtgtggttggttcttcgattaggttaaaatggggggattcatagggcattttgattgtgggaagtgggtgttgggggtcatgtttggctttaatgaattgaaagtgttttcttttttttttttttttttgaaatgaaaacgttgattgatagcataaacttagacctcacggtcattacataggatagcgttagggatagccgaggcctccacaatacctgagatagtttgagcataagcctatctagcaacattgttagccgcaaagttacagtttctggaaataaaagaaaaattacaagataaaaacttcttagagagttgtcctggatacctttaagtgcatttataaccacttcagaatcactctcaaccataataaaatcatgcttcctggaagcagcagtttccaaagccagatggcatgccgccacctcgccgatcaaaggatctgtgaaattgagtaagttggccacaccccataaaacgattcccgaatgatatctagccaaggccgcaatacacatggagtcacagccaaccttaacatcacaattaatcttgatccagtcttcaggaggggtcgaccagccaagaggagacacatctactaccaggggaagcaaataggcagcataatctgtaaaacaatgagagatagagtaaatagcagtattaatgttacacggataatagttatgcactttatcatttcttattctccatatagtatccaccacgatcgaggcataaagaaatagcttgtgcgtgtccacccctttcgatttcaggttccaaataaatgttacccaatcccagatcctgcctccagagtcctggaccgggaagattccctaaggggaagctctccacaaatggtacgcaacatcgcaatgaaggaacaagtgttccatggactcctcatcagccccacacagggggcaagaagtttcgtcaacgttgattctcttcgccaggagtcccctaatggggagagcattcgacaggatgcaccaccacatgaccttatgtcgctccaggactttggaactccaaagtttgttccacagacttggcgccacgacaagatctggggctctcgccaaagcatggaccaagtaagtcgatttagttgagaaacgcccattaggctcttttgtccacacccatctgtcatctcctactccaccaagtttacctcctttgattatgtcacgcacagttccagagtcaaagagagtctgaagtttaggaatatcccaatccccatcttcctttagcagctcagcgactttcgtcacactcccacaggtcaaaccattaggtttagtgaagaaatccttgctatgcagcacccaaggatctgaccagacattggtgtctttcccgttagtgataattttgcaagctcctttccgcaataagtctttggatttcaccacattcttccagaaccaagagtcagatccgttatacgaaccctctaagaaaggtcttcctttaaggtatttggctttcaacaccccccaggaaagcgattgcttatcattcaggagatcccacccccacttcgctaggagtgcctggttaatttctaaagttttacagaaccccattcctcccctagactttgggaggcacaggaggtcccaagcctttaggcaaacacccctgttaccttgctcacaaccccaccagaattctctaaacataccatcaatttttgaggctagctttttagaaagcatagttgtttgcattgtgtaaatgggtaatgccatcccc

SEQ ID NO: 33264 - DNA, 2356 bp, Cannabis sativa
  modified_base (338)..(339): a, c, t, g, unknown or other
ataattaacatgtaaaattttcctagcaccaaacaaaggaaatatgttaatacatatattactattatttaaaatagtaaaatataaaatcaataaccaccatgctcatccatggatgattttcacataaatctcttacccttgtattcttaaaatcttgatttatcttctcttcctttgaaaaaagataagcttttgattgtaagagattttattacaatagaaaaaaaatcaagacattacaactctattgcaatataatacaaggaccaacaaagagattaaataaatattacaacaacatacactaaactatatatatgcatatatatatatanntatatatatgaaaggtagaagagatgaataggtgacacaatattatataacatatatataatatgaaggagaaaaagaagatcgctcactcgcaaccttgagtgtagaatagtggagatcaccatgacttgaataatgtattaaacttttgtccaaaaacttatttctctctatttctaagcactaaaggaactctcatgaaaatagctttgtgaattatcaagtcttttaggattttctagaaaaatatttttttgatagaaaacttctcttctcaatatgagcatcttagacatctttatatagtgtttaggatttctctatttgaaattcaaactcataatccccatgaatattatggactcaaatgtaactcatgcacacaccataactcctataacattaagaatttgaaagtaagatgtataacaccttttcacactcttaatattggtgataatggtggaggttagtcatagtaacaagtaacttctccaaatattacaaaatgatgacaactaatacatattatcatatattacatattagtttgttacacatatttaatatttacattatattattgataaataatataataacaatgacataaaaataactgaattattcttttgtagacattatatagtttttttttttttattttcaacaaaaataatatcaattgatgaacagataattatagattctttaatattcagcttcattagggattggcttttggtttttttcttattgttttactgtcgattctgttttcaaagtgtcggtatcaaccaaaataacatcttttgaaattgatcccctccttggagcaaataaaagttatctagttattgttgttgtgttgttgtcaggttgctgaacagttgagtgttatgagtgatgttcacttccaatcactgtcatattgttgcacaccaatgcttgggtagctaccagaaatgattattattctgttgtttctgtgtagttgaatgtgttcacacacaatggatatcatgcaaaattggttttctttgttaaaaactgtatgtaaaataacaaacttttgtcatccttgatttagagtggctagcaaccttctttcagttgtatttgagttattttgagactctagtctagttcctgcaacattatctgcactaattcagcataagtgcaatctcttgatattaattctccacttgattcgtaatcaatatagtgcttgttgtcattccaatgaccattgctatgtacaatacttgcagaggttccatctatatcctgaaatttttatatttgttatgagtatcagtatatttaaacaactattttaatccataaaaataacgtataaacaacttttcttgacaacaaacaataaattaccttaaatagagcagtagttgttcaattgtaaattaattgcatcaatttcttcaaatcaactaatttactctaagaattatgcttgatctgattgacaaacagtaaataacaacctcattatgaagaaaaacactaaaagtattggtaccttgtattttttttttgtcagattcttccaagttatttctaggtaagctttgactcccctctctttgtgttgttatcaaattatttgcacaatatgattcgaattattgttcttgagatttatgtgtttttgaattaatggaggtagaatatctgttttcctcttttttttttctggtttaccttttgatttttagatttgtcagggttaatcattttgttgttcagatctactttgtggtcttgttattacacagcttgggcatttttttagagttgaaatcatgcctcaattgagaaggaaaatggaggagagaatgctctggtgtggttgggaacgaaagaggaagaagatgcgattgttagtccgtatttttttttaaaaaagaaaacctttaaattttcttttttgtttaatttacaaagctaataatataaaatttgggcctaagatacctattatagaaaaaagggg

SEQ ID NO: 33265 - DNA, 1828 bp, Cannabis sativa
agaggaaaaagctccagagggaggagccctagagtagtatggccaatatccttgtgatacttacagaatgtgaacaataaatcacaggaaatcacaggagcgatatgccaagaaggcaagagagaggccactcaccaatgtgaacaatctgagtgagcggccagaaaaactgtttaagaagaaatgcgacgatatcacattcatggaaagcgatgccagatgggctcaccatcacatgccgatgcactagttatcgtcgctaacattggaggagacaatgtccaccgcatattagtggacaacggaagttctgtgaatctcttaaattttcaagcttttaagcaaatgggactgcatgagaaggatctgcgaccagtcgtgtcgagtatctacggttttaccggagacaccaatgctttaaagggaatgatcaaactcccaatcactctaggaaccgcacctgtcgtggctaagtcaatggctgacttccccgttattgaccagtattcagtacataatgcagtgattggccgcctatcctgaaggagatgaagattgtgacatccatctatcatcttaccatgaaattccatactcccagtggagtgggatctgtgtgaggagtccaattggacttgcgagaatgttacaacgcggcattaaagctcgcagaaaaaaagtcagttaacatgatttacatgttagaagcaccacctcctcgacatgaggtgtttagaattgaggaaataccgcatgaagaaaagccagacttcgatccaagggtcctcaattatagcaccaccgcccaagctgcggaagacgccatggaggtacccatttatcccttagataataataaaaaaaaatggttctaaactaacttttcaacagcgagaaaagcttattacatttctcaagcaaaacctggatgttttctcctggaaacattcgaacatggtcggaatatctcaacaggtcatgtgtcaccggttgaacattgaccctgaagtgcgaggtgtccgatagaagcaccgtaaaattaaccccgcgaggtaccaactgctgaaagaagaagtagatcaccttttggcatgtggcttcataagggagtcattctacccaaactggttagcaaatcccgtactagtgcccaagcctaatgtctcatggcgcacatgcattgatttcactgatttaaacaaagcatgtccaaagaacagttttccgttacctagcattgaccaacttgtcgatgccaccacaggtcatgaacttctcagttttataaacacatactcgggatacaaccaaattccgatgtatgaaccagaccaagaacatacctcttttattacagatcgaggtttgtattgttacaaggtaatgccttttggtttgataaatgcaggagcaacatatcagaggtcggtaaacataatgttcgtggaactaattgggaaaccatgaaggtatatgctgacgatatgctcgtaaaatctcaacatgcaaaggaccatgtcacccacttgcgatcaatgttcgagatattgcgacgattcaaaatgcgactcatccctctcaaatgtgtctttgaagtcggatcaggaaaattcctcgggttaatggtaaatcagcgaggaatttaagctaaccccacaaaaattaaagctttggtggaaatgcaacctccgaccaaaccaaaagaggtccaaagccttacaggtaaagtcgctgctttaaatcgctttatatcgcgtttctctgacaagtgcaaagagttttttcaaattttaaaaggaaataagaagtttcagtggactgagaagtg

SEQ ID NO: 33266 - DNA, 2313 bp, Cannabis sativa
agggctcgcttttaattttggttacgttagaactgtagtatatatggtatatatgtgctctgtgaagttggagtaattttgattggttttgagggtgttttgatgagtgaaaaatttaagattttcctacccaaaaatggtctgctgtttttgccaatatagactttcatttctgaaaattccgatgagatttggaatcgtgtttttgtcatagctttttacttgggtgtttgttttggacgttctatatactattttgaagcttgcgatgagctctatcatattgtgtatgtcttaaagtgaaaatataagttttcttttagcgtattggaacaatagggttcggtaagaaaccttaggttgtcctttgcaactacaaagcagtgttttgagataaaaacttattcgtatattattgatatgacatagggcttgggatcatcgattgtactctaagtaggtcagcaaaaataactgaaccagtactcaaggtaagaaaagtatattgtactgcgtagtacgttgtattgtaatacaattaatattgttatgaattgattaatattaagatcaaaatatgatcaatatgttatataatgaaaagattgattgggtaaacaatgatactgtgatgaatatggacataatatatgggctcacctaattaggtgatgcaatatacctggcgacgtactaggcgtaggtacgggcatcagtgacatatgatgagtactgagcgtcggtacgggctcacctgattaggagatgcaattttcctgatgacatattgaccgtaggtacgggcgtcagtgatatgaaaatgcctatttatggcataaatcgaaaccattgtggggttacttcttgccaatgtatcgagcgtaggtacaagtgttagtgacatatgataagtactaggcgtacgtacacgctcgtctgattaggcgatgcgatatattagtgccaggttgtggcatgggctcacttgattagatgatgcaattatataccgggcgtatgtacgggcttgtctgattaggtgatgcgatatattggtgccaagttgtggcatcggctcacacctgattaggttatgcaattatatgatatatgggtgccggttcttggcacgggctcacctgattaggtgatacagttatggaatatatgggtgcatggctatggcacgagatttcttgattaggcaatgcaataaaggattattagattaaagcatcgatttgccaaattaggcattgtgttgtaatgaagatttttactttatgaggtaatatatataaattatatttttcaatgaatatgattcttattattggtataatagttttgtattaccaaatatttgtaaactgatgcttattcatgggagatgtcagtagtgatttaagattcatcttatgaacaatgcatcatggtttgattctgattgtgtataaatgataatatttgaataataaactatatgattattattattgtttttttattgagtgcttgtgactcacaggtgctatgtggtgcaagtaagggcaaggaaaagttagagctgggatgaggtgactgccttctccagcaatgtacacattgacctcaccggcctatgtcctgggttgctgggagttgttttgtgctttatctattgtgtattttaatttttatgtgttttgaggcatcgtcgttttatagttcttttgtaaaacttttataatagggatccctagaacacgctttttaggccgttataatgtctatttttagtaatttattttagtcaagtttttttaatattatcatgattttaattaattaattaatctattagtattaaattattttataaaatcatacacgtgacgtccctatagattagggcgttacaaacataatctcatggtttgagaatttctagatgcctttccagaggagctaccagggttaccaatgaaggaagagattgactttgaatttatttgatattgggagcagaacttgtatctaaagcttcgtatcagatggtacctacagagctgaaagggccgaaggtttagttacaagggatgttgggcttgagattattggaccgagtacctcaccttggggtacaccggttttgtttgtcatgaagaaggacagaaccttatgaatgtgtattgaccatcgagggttaaatgaattaaggataaataataagtatcctttgccaaggataaatgatatgtttgatcaattacagagaaatgtcttctctaagatcaatcttcgatcttgttatcaccagttgaggattcgaga

SEQ ID NO: 33267 - DNA, 2258 bp, Cannabis sativa
gagcagagatctttacaaaaaatatctcttttcatttttaacttggtatcagagcgggaggttcctccggagtgatgtcgaccggcgaacaaacaccacctgtaggatctcaggtggacagatctgctccacatccaacacagacgaatagcaacgttgctgctcagtcatcgaacacagccatgggagcttctagttcgagtgtagtggttccacagtttgggagtacccttaaccagccatttgctctcaagttggataggaacaacttctctctttggaaaacaattgtatctgccattgtcaaaggacacaggttggatggttacttgacaggaaaaaaggtcaagccgcaagagttcatttcaactccaaaccttgatggtcaaccgggctttggtgttgaaatgaacccagaatatgaacaatgggttgttcatgatcagcttcttatgggctggctatatggctctatgacagagaccatagctacagaagtgatgggttgctctacatcaacagatctttggcgtgctttggaagcactctatggagctcattcgaaagcaaagatggatgaatatcggacaaaaatccagacagttaacaaaggatctcaatctatggtggaatatctcaggcaaaagcggcagtgggcagatgtccttgcacttgctggtgcaccttaccctgaacaacagcttgtgtcaaacgtgctatctggtttggacatgacttaccttccaattgttctacaaatcgaagcacgccagtcaacaacatggcaagaacttcaagatctcttactctgcttcgacagtaaagtggagagaatgagttctatgcacagcattaagtctcagaacaacacgctgtcaccaacagcaaatcttgcaaacaaaagttctcctggaagtaacactggatctggctatccgaggaacaatcgtggaggacacaatcaaaatcgtgggaggtctggaagcaggggaagaggcagatctggtggtggtggtggtaacaaacccacatgtcaagtttgcggaagatatggtcactcagccgctcattgttacaacagatatgacgagtcatacatgggttcagccccttcgaatggtgcatctgagtctgcaaaaaccacacaaaacccagcagcttttactgctactcctgaaatggtcgaggatgatgcttggtacgtggatagcggtgctagcaatcatgtctctgctgacacaagcactatgaatcagaaaaacaagtatacgggtaaggatactctggctgtaggtaatggcagtcaactcaccattgaacacattggtaatggtactctttattctgttaatagctgcccaataattcttaaagatatcctacatgttcctagcataaccaaaaatctgattagtatttccaaattaacagcagataacaatgttattgttgaatttacatctgattgttgttatgtgaaggacaaacaaacaagggagatggtactgcaagggagacttgaagggggactgtacagacttgacaaagccagaacacattctacaagcccttcaaattttctcactcaagttaatgtcaagtctcaacccaagttttttactggtttagcctcgttttctggtttagagtctaaagtttctgttgctgaaaaacaaagttatttagtttcaattaaggataaatggcatagacgtcttggccatctgtccaatcgtgtgttaaatcttgtactcaatgaactgaatgtaaacactattcgaaatgaagaaagtcacttttgtgaggcatgacaattcggcaaagcacattctcttccattcaaaactaacactgctagagctaattctcctcttgacttgattcattccgatgtttggggtccatccccgatcatgtctaacatcaattatagattttacattcacttcattgatgatcacacacggttcacatggatttatccaatgaaagccaaatccgatgctaccaatgcttttgttcagtttaaagctctagtcgaaaatcagttcaataggaagattaaaagacttcaaacagattggggaggagaataccaacccctgtctgattttgtcattcaaaatggtattgaattcactcatccgtgtcctcatacttcagctcaaaacggtagagctgaaagaaaacatcgacatattgtcgaaatgggcctcacaatacttgcacaagccagcatgccactaaaatattggtgg

SEQ ID NO: 33268 - DNA, 1993 bp, Cannabis sativa
tgtgcacaaaacccaacaataacgtcgatcaatgactaagtaccgtctcaagtacacttactaagaaatgtagaaagtcttgagttgtataattaactataatggactcactacctgtccttgtacagagtttctaagagaaaccacgcataaggccacagttgtatatgcctccaaggccatcacaagaccctagccgaggtcgaaagagggagaaaaactggctgcccacttggagccttgcccttggtcagccagggttccaggtcctagtggttgaccagaccccaagacccaatctagtggtcgacaggaaccctaataccaggcataggccggccagcctaggggtacaccccctggctggccaaaccccatgaaagccaaccatggctggccaagcctcaaataaggcctcattggcaggccaggatctgcatagatcggaaacatgtgttttttcaagaactcaaaaatgttcttcgtgttcttcatgacttaaagagccaagaatcacaacaaaggtcagatttaaatcttttttctctagaaatcacacattatgtatcctaaggctatcatgcagattaaaataccaaaaggataacaatcgaacataagaatcaaagcattttcaaattgaagaatagaatagtgttcatacatccatggaaaaatcaaccaaatcaagcaaaatggtgggaacagaaagcttacccactacaagattttgttggagaagaaggtgggaagcttagatcatcgaaatggcacaaaaacctcaggaagatgatgcttgtggattcagccacttagagagagaaggaaaagctttttctaaaacacaagtagtgtgagagagaaagtgaaaagtaaaaagtgagaagtgaaaaaaggttttccccctagaagtcacttatgtaatgtatgtgggcccattttcctcacttacctcacctacacatcataaaggtaactaaagcagctatttctctatagcaatgagatcagacagttaagacaaaatgtttcaaaaggctaaaaaacgcatcaacttttattcagtaaaggctacaatagtcccgtccgcaccaacatagatggtaaagtccttatctgtacagacgtccacacagggacttgcgggcaaataatatcccaatttttttctccctaacataggatgcttacatggaagaaattagtaccatgtggcaatacaacttagcaataagaaggccaagttaacacctaagcaaatggagacaccgacacccaaacgagcatcaagtgacagaccagctccctcacaggagcttggctggccaagaggtgctctgtatggttttttgtgcactttaacacgtggacaacaactcatgggctacaaattaggccttaaaagtccagcagaatggatgaatagtatctagattcaagggcaaattagtcttttgtaattatctaacaaactatgcaaatacctagggttttgaactgtaatctagggtttatgcctcctatgtaaaggccttaaccctagtctagaaacctaagttgaatctaagcctaaaacttgcctctaagctctaagcctaagtctgacaacttctctcttcctcacttcctctctcacatgcctacactaacatcatctcaacacttgagttctaccatcattgattcatgccttgtattcctaagagtgttataatttatcccacttatagtgatcgagatagtattacccttggtattaatacaactaaaaggagagtaggtcattactcgttattacaagggggcaaaacctctataacaaatctattttttattgtttttcattcttatttgtgcaaacacgtgacaagcatcagatctataagatctcgctgtcggttgatcactttttgagctcaataacatagaacactcgttatattccaaatatagatacactataaattatccattgtttcaattcaaataatca

SEQ ID NO: 33269 - DNA, 1965 bp, Cannabis sativa
ttttcatacattattataaatatatagtctatgtatatatttttttatagggatatgattattgtactttcacggattgtaatttgtgatgtacggtagccgtcagataatgaagttatttgatctgacggctgagattgatctaaagataattagggttaaaatgtagaaacgtaccctgacactcatttaatgtaacctgagacccatctaatgtaccacggaatatattacgtgaaagtacatcacgggaaaaaatcatatccctatttttatattctattttcataaaattgaattctttaatagtggtgcggtttaaatttcacacatgttaaaaattatattaaatttagcaaaaaatttacactatcaattgtattattcttaaaaaattatgtgttgttatatttaacacattttaaaaaaaaaaattactctaataatgttctaaataatgtgttaaatttgtcaattactaaaagttatataaaaatttagcacaaaatttagccaataaatattatttttttcatttactataatattactaattattataattcattactttacaaaaaattacctaatttatttaccatattgctattatgtaaacataaaaaattattcactcacatcaaattttttttgtgactacaataaaaaaaaattacttgtgagtaaatatagtatttagatatcagttgtcattaatttaattttagtcactatgagtattgtaactaaaaatatatttagtcacaataaattgtgattttcatgactaatatttttagtcacaatgtaataataataatttgtaattaattataatacttttttactttcaatcataaattttgttgtgactacaaataaaattcttatagtaattaaaaaataattttttttttatattatcaccaagatattgaatcacctttaataataataggttatgacacaaacttttttttcttatgtataaatttaggaatgaactaaataagttattagaaaccatagatatgattagtgtttaataaagtgataatgtggtgtgtagtgtagtgtagtgggaaagaagaatatgaggagtagtgtagagatgagactagtagaatatgaattaattctatttcgagttgtcttctctttattacttgtcttatatatttatgcagctttttgtttggcacatatgcaaataaagctggtgtatgttctttcccaaactccttgagatgaaccaaaagattttgttgggcagtctatatatcttattatcctcctatatctgcaactctaagtaccattcaatattcatgcatgtcttgtgttatcacatattctacatatataagacaaaactaaactaatttaactatttcccttttttcaacctttgaaccccatttgcttgcttggtttggtttaactctttacctttgtcactaaaaattagagtatgcatgtactaaagggtaccctcctaattcatgtttgttagatttaactcttgacttaataatctcaatagcttcagatgggagaatattgtcccacagagccatatataagaacatggactactccactcattgccaattagttttgagatggaaccccataattctcaacatggtatcagagccatatctcttacgggcaagtgatcatatccgatctgcacctatacagatagtgaccatgtccactctgatacggttcaagattgatgagcaaaaaatagtcatcatcttgagaagaaatgttgtggatattgtcccaaatgaaataaatagtaaaaaattgagccatatataaaaattctgaacaatccaaaaaatttaaaagatacatgtaaaattttgagtagtaaaatttataaatcatatgcagtactatataacttacatttatcgtttttctttttttcttattaattaattagtaaacatg

SEQ ID NO: 33270 - DNA, 3402 bp, Cannabis sativa
  modified_base (26)..(29): a, c, t, g, unknown or other
gtatatttaaattatttttttaaaannnnaaaaatttaatgacttggatcaattagaaattgctacatgacaattgcttaacacttaacagtcaggtacctacaaaagttttagaattataacttaggtattattaccaccaaaaattaaacttaggtatttatttacaactgggagttaaacttagttatttataccgcaaattactctttatgtaatatattatatacacttttattaaaaaatatataaatcgatttaattcagtttattcgggttttagaataatttgtaaaccacccagtatattcattgaaaggttttgaattttcattgtattatttcaggttatatttttttgttgatttattcgggttgggtggtttgtaaattttgttgaagacctctatttgtagtaggtaacaaaaaaaagtatgtaaaagagtaagaaatacaagaagatttggaaaagataagagtgtggttgtgtgtaagagagagtcggagagcttgatatgtgataaacttcttgtagaaatctttcaaaaactctcattaagtacatgttctttagtctttttggtctcaaagtgttgactccatctctaccatacttctaagtccatcctctttctccaatttactattttctgttactggtttattttgttattgttttaatgttatttattgttttttctttcatttctttatcacttttttctaaatttaatgttatttactgttgtttctttcatttctttatcaattttttctaaatatttttatactgctctatttttaatagtaataggaaaataataaaatttgtatataaattattttcttcggtatcctatactccaatatatgttcagttttccttcgtgttgttccactgttgtctcctgtatgttctcttattgtccctagctcccaacattttgttgcatttgttatgttatttctttttctaaccaacttacatcctttttttttttcatcttcaaaatttcactctttcaatgaaaggtaagactattactgtcaatgattcttttattatagttggtttaacttgtgtaatttgattgttaggggtgtttgcggtgcgagtggtgcgatttttgaccatttttttcaaaccaacccacacatgcagtttttttaatttctcaaaccgcatctgcaccgcaaaactaaaaagtcgcagaaaccgcaccacaaaaaatggtatggtgcagcttttgctgcttggattatcaccaataattaaactattacaaatacaacgaagcttgagtaacacttgtcaaaaataccataaaactttaaaaaaatttgaaaataaattttaaatttcaataatacaataattagtgagctttggatcgaacattcacatattgaacctacataaatataaaaattagtatttttataatatgcggtgttatttaaaccgcatattaacaattcaaaaccgtaaaccgcactgtgcagtttaagaaaaattcaaactttaaccacactgtaaataattttaaaccgcatttttttttttacagtgaaactgcatttttttttacagtggggtcaatttgaactgtttgatgaacatcgatagaataaccaaaaacaatgttaaaaccccactattaatagttttaatatttccacatcatttcaccaaaattaataattatttttcgactagtgttaattactagcatgtgacagtctaaaactcaatatttttgtaagttcgaaaaaaaagtctgagttatcatgcttttgggctaaccactcttggaccatattaactgcgcttgtagtgttagttgtacaggccttataggttctcttaagcaaatccatggaggggttgccagcgttattgaagactcattgagttggctatatttaattaaaagattttactctcaaagcccaaaggacttccgagctacatggcaatgttttaaacaaattagaagggaaatatatattattttttggaatgaattagaagggagatattgatttcgaatttaactaaatttgcatttgttatgatattaaggtaagactactttggagctattctctataaattataaagaaaaaataataatttttaagttaaaagtcttaaattgagaaaataaaattttaatataatattttgaagaataaaaataaagaagggagtgttgcaatataaatttcacaaatgcacataacatcaatctttagtgacagtgatatatatagtccacaattacaaatcctttactaaattgcgccattttgattttcaaaatgtcaattaattagatttccaaacaattatatcttgaaaaagcaagccaacaaagtttttgatagtgaataaatttatctatatcaaaatataaatgcaagaaaaaacattttctgtgataaattgtttaaagatgtagtttcccaacgtccaaatgcaacataaaaagtagacactggatagcgaggggaacattttatattcgacttcatttaacaacatacataaatttaatttaatgtatgctaattaatgaaaaaataaatgaagccaaaatttaaaaaataaaaataaaataatgggagaaatgtagggaaaaactcagtcccttagatgttcataagatctgcgatcatttccgcaaaatcattacaggtctgttaagactcatcacagttaatcatacaagactcccttatcttccaataatattatcatatttagctaccaacttcatggttcttctcataaaaaagagacaaaaacctaaatcaaagagcaagtagcacgtattgctattgcttcaagggaacgagttcgatgggaatttgattgaaaaatcatccgcaacgaccagatagtgaagcctaagatggaataaataaagaggatctgggaactttgacagaaaataaaggaagaaactagagcagtgaagttgaaagaaaccctaatagctgcggctattgagacaccttgggttgagattattgatgctagggtataacgtatatatagggaaattagtattatagatccgttgagttaacaacatattatattcatctttaggtttaggtttgggctttcaagagttagaggccttgttaaactttgggcttttgttaaataatgtaattgggcttggcttagcttttgggcttatctggacgtacatatcagcaacaacatatgtatacaatgttccaaaactacaatttataggtagattttgatattagacatattttgaagagagttttcaggtgaggtgtgccatggatttgccatgccttcttctaagcttccggttgcatgagtctctttgaggattctctttctactagaagctgaaaaaa

SEQ ID NO: 33271 - DNA, 2788 bp, Cannabis sativa
cccaccaattcttgtgcttattaatctttcctatctctcttccccaatgccttctgagattttaaaacatgccatttgataagtaggcattgcttggattacagctttcactagaatctcctaagccccttgcgagaaaagtttggcttgataatcatttagcttttttccatattttatccttgattggtctgaatattgtacttttgttttttcctcctatcacgggaaggcccaaatacttttatatagcctgtgttattttcatattcaaggcttctgcaaaaagtttctgcattttctcaggagtattagacaagaaacacagaatagatttgttaaaatttataacctgaatcaaaataaagaacacataagtcgaggtaatatgataaaattagacatcccataaggtctagattatttattaaataaacatatcaaatattttggtataaagaacttataaattactaaaccaaacatgacatgacctgtcctgaacaacgccaatataatgaaaagatttgttgaattgtgtgcaacaaaccctcgtttgcgtctaagaaaagtagactatcatcaacaaaaaatagatgacttgtactgggagcttctcttgcaacttttagcccaaaaatttatttttttgattctgcatatttaattagcaatgagaggccttctacacatattaagaaaagatagggagaaagtggatccccttgtcttaatcctctggttgagatgacttcaccatgaatagaatcattaatttgaaaagaataacgaacagatgaaatacatttcaatattatattgaaccatttagacttgaaacccattttcaacatcatcttctcaataaactttcattccactctatcataggcttttctcatatctaacttcatttctacatagtgtcgccttctaacttttcttgcttttaaattatgaaggcactcataggcaataagaacactgtctgttatgagtcttcctgggacaaaagcactttggttctcacttattagtagtgatagcaggtttttgagtctatttatttaaactttagagattattttatataacacattacataaactaatcgatctgaactcactaatcaattcaggttgttggactttaggaataagcatcattaatgagtcattaataatatacatatctgctacccccgataaataatctaacaccgctttagaaactaaagggacaccaatatcccaatgttcttgataaaacaaggcactcattccatctggactggggcttttatccgcaggcatactaaaaactacctgttcaacttcttctaatgtaaaagtcttcatcaatgcttcattcatgtcatctgtgaccacttgctcaacagtttgtaacaactcctcaatactattatttgtgggcatcatagacgtaaagagttcagtatggtatttttttgtcatatcacctctagcatcgttacttgtacatcttatattgtcttcatttaataaacctaaaatataatacaagattagcctcataattgatttttaaagtaattatgagctaccatctcatattccaacttatatcaatttcatatatgtaaataaaaatcatttatgtgagttatattcatccattgttatctatttaggttaaagcataataccttttaaaatacaacctatattaaaatacatattagcctaaatattatacataaacagtcacattaagacctgaatttgaaaacacattgcctcaatctattcctaaaccactcatgaaaaatcactagttaaactattcaatctactatttacgctaattaaaatgcatttatactacgtccaattacatttatattaaatttcttagccatattatatatacttcactctatttaaattgtaataataaatacctcgtattgtattattcttctttcgtgcattttcctttttgtgaaaacatttagtgttctgatcaccagcctgtaaccattggacccttgccctttgcttccagaagaccttcttcctttaataatagattgttaagtttactttccaattgcaaagatccttccctggaacaacctttactttgcaaattgtgcacttgaactacttttgtatgtacatttttaatttctctaaataaagatccatacttattctgatgccaagtatccaggtttgaaacacattgttgtatattctttatagttgatatcagtggtgtattttcctcagatttctaacaattctttaatagactcttacattcttcgtcaccaaccaaaagattctcaaatctggatcttttccgctttttggaaccttcttgctggtccatctcataatttattttgaccaaaagtgctctgtgatctgagtgataataatctagatgtgtcaagcttgtataaaaaatatatcccccaataaaattatactagtttattttaataattccacattatacccaaaaaaaccctttctaattattttgtttcaaaagcataaaaaacctaaaaacttattcctctctctacatctctctcatcaacccacccaaaagaactaccgccctcctcctccctctatttctctctctaaatccatctcatccgtccaaaggagtcgccgccctcaaccccgtccgattctctattgaagcccaaatgttcaccgtggaagcccatccttcgtcttccgtcctccatagaagcccaaacgttcgtcacaccacattttaattgaaagtc

SEQ ID NO: 33272 - DNA, 1416 bp, Cannabis sativa
  modified_base (27)..(28): a, c, t, g, unknown or other
actaatcagattgtaaagagttttatnnagggcataaaacccaacacagcagtgctgccttctatgaatatgaagctgtcatctgcgaagaaaaggtgagataacttgattttgtgtttaccaaacatgataccatgaatcctatccgctctttcagcctcttggataaggcaagagaggccttccgagcaaataagaaacatgtaaggcgatagggggtcttcctgacgaaggccgcggcttggctaaatttgaccactaatttctccattgatgagtactgaaaatgaaagtgaagtgatgcagttcatgaccttgtccacccaccgtttgtcatagcccaaacaaatcatcattgcttcaaggaaactccaactcactctgtcatatgctttggacatgtctaacttgagagctatctttttcccattgccgaaccttcttttcttcatacaatgaagactttcaaatcccaatattgcattatcttgaatgaggcagtcccgaatgaatgcactttgattttcagatatgacttcctttaagctatctttcattctattggcaaggcatttggggatgatcttgtagcttacgttgcataggcttatgggtctatactcgccaacttgttttggttgtttaacttacggtatgagacaaaggagggttttgttgatctgcctgcagtcgccatggtagttaaggatttccaagcacactctagtaacatcctcgcctatgatttcccaatggttttcataaaaaatccgagacatcccatctattttcggtgcttttagagcattaatttgggacagcgccacctgtatatcatttgctgtgaactcggcaaacagaatttcattttgatgtcggctaagtcgtagaggaacaaagctttgaatgtttgctattgtattttcttcatgattcaatgctgaaaataattcttggaaatggtcacatatagttcgctcaatgttctccttagtattcatccattgcaggtttttatcaaagaggccttttattcggttcttctttcgcctagaagttgctttttggtggaagtatttagtatttcgatctccatgggataaccaaatggctctacttctttgtttccaaaaaagttcctccttctcaagatgtccattgaggtccctttccctttctttaagcttggcaaattcgtggctggtatgatctcgagaccacttttccacctcttttttcagctcttttattttagcttggttggttttcctttgaattgtattccattgatccaataaagtaccacaaatatttattctgtcattaaggtctgctggcgaacctatatgagtagcctctttccaagtgtctttcacaatttggtaacattcttccttatccgcccaagccttttca

SEQ ID NO: 33273 - DNA, 2708 bp, Cannabis sativa
  modified_base (767)..(771): a, c, t, g, unknown or other
gagtgacatcattttgtagtaaaaccctttaaatatgtatctaaatcaagtttcaaaagaagcttggaacataaaggtctttgataattttaaaacaatgccactactatattctttgttccttaaacttctaaatatgagaactcatcttgtctgtagataaaatttgctcacagttactaacattcttaggtttatttgtaaaccttgtaagaaattataaatatgaaataacaatctaaaataatccattatgtgttaataatcacattaactatattagaatgaattcatacaaaatatattaaaaatttattggtgataatgaagtgtgatttatttttcttaattatacagtaaaaatctgtacaatctagatgaagttatcagaataaattttgaaaatttctacttgtattgtaaaaatatatgaatggtgatgtaataaaattttataattattaatacacagttttgatgtttaaatgaatcatgtttttaccaatgtataaacatgcttaaattatgaaatcctattaaattaaaattgcttgtgggctaaatttttaatttaataagattagatttagatgtagatttcgatatatttacacaattgatgaaaaacttaaagtttaatatttctatctcaatgaaaagtgtgaaacatttaattattttataaatatttcaaaattgtatcatttaagataaaactattaaattaaatctacataattcactgtgggataaattaagagaatttnnnnnaacatattatcctaattaattatataaacataataaaattcatgtggggtaaagttattacacctatataattaattataagttatgtacatcaaggtaaattttaattaatatataattttatataattaaagatgttgtggctagtctctaattatttaaaattatatttcatttagacattaagtattgagctctacctaaaagtaatttcgttatcaacataatagacaattattgagattagtgctcctagtgtggttgttcgacgatcattaaaaattgttctaaatatgagcatttagtcccatgttcatgttttcttatgtcaaaccacaaaattacctatgttttattcatatttttatttattttaagaatattttatgaataattttatgaaattttataaaacttaatgtgctaaaaaaatattcaacatatctttatttttgaatatagtcttaatattgaaatcatataaatcttaattaattgcactaataataaatttactaaaataaatataaaatagcaaaattatgatatgataataaattaaaggctaaattctataatttgcaattaatggcagatatttctcaaaaataaatagtttagacaataaattacttgatgaggtaaataaatataataattgtataaatttaaatgttaaagtcaacacacttattaaaattatatgcctaaatataatcatgtaattaattaccaaattatttttttccaattttaatttatatgaaataacatataaattccaaatatatattttttaaaatagaaaaattaattaaatgtaatttattgaccaaactaagaaaaataagaaaataattaatattcaaaataaattaaaatttatctaaaaaattcggaattttcctctatttttttttttttttttgtaaaatagcctctgaaaaaatgacatgtcgtttttccacatagagtggaaaacgacacgtcgttcaggggttaccatcaacctccagcagggtcatttgactcgtttcacagaaacacgggtcctgcggacctgaccccaaacccgctcagaaaaaaaaatcgacgaccaaatttcgtgttttcaattctaaaataaactaaatgaaaaaaattaagatatatatgtaggtttcggacatctaaaccacgtaaaatatgaacttttattaaaaaaaaattttgggtctctgtgtgtttttaatggatatgaaattagagaagaagagaagaagaagagattagtaatgcctaaatatctatgagagaggaagaagagaataataatacatatataattatctattttgaaggtctcttttaaattttttagtttccactttttttattgttacataaagaaaaaaaaaaagggtatacatttccttttttataattggagttatacatatccatgtgtctcttcatcatcaattggagttagagaaattataaaaattagaaatatcaaatatttaatgacaacattacaactaatagagccaaacatttatattttaatttatttttaaatctatttaaggtaaatacaattttattattactttaggtaaattaatttaaacaaaaaattatgtgtaactaatatatatatatagaatctaatttaggttgtaaaattttgaatacaaacaaatgttgttatttcaaatatatcacaatttttaaatatataacaaaagagttcaaaaaaatacaatgaaagatttcgttgtttatgtcgatatgaatcaacagttatactacggtaggtatctattttttattttattttttttttttgagcaaaaaagatgatttattcattcataaacattcaacatcaacaatagacttgagtttaagaggagcagtatgctcactatcaatacgatctgaatggtaacaag

SEQ ID NO: 33274 - DNA, 1027 bp, Cannabis sativa
agaaatccagcagtcgttcatatcgatactcgatccatagttcatctcgtaaccaaggtagagaaatcatttgaccacggagaagtggtttagacacatcaataccaacccggatccttagaaaaggaccccacccttcattaagagagtcatcatgaacttcaagaaaatcacctataagatttccaataatcttggcaagagcctctgatttactaaggaaaggtaacctataaacctgaacccaaaaaggagtgatcgtatatgaagaaattaagtcagataatagcgcagttggaggacataaaattaaatgctgattatgaaaatgccaaggctccttggacaacaccctcctcatatccccttcacaaccaaaagtgaccatgaaggattcagaatcatagtcagaaatagtaactgcaaacctgcctaaccactgtttaagaataaaattcttaaattgattaggattgaaacctctcttggagtaaatacgacagagtacccgaaccttagtaacaccaataggaggagccgaaacgccatttatagtgaccacaaccctttctcgctctgagagagccgtagagacatcatgcaagaaggaatccatgaagacaaaatcagaaaggaaaaagtgaaggaaaaaaaccagaaaagagaacaaaaccagagcaagatatttaaaaaataagggggcgggaacagttatggagaagaaaaaggtattgaaactgaagaaatatggtttaaaagaaaataacgactaaaactgccacagagcaaattgtgaagggcagacaacgctcattatccaccatatataattgactgtgactgatacttattatctttcccttttttttattctcatttttattttcattacagttttctttcagtttttatttttcaatttttttcatccctaaaaacccatctcaacccacgatcaaaagtcatatacccacgattcaaagtttgttttgctattatcttctccaaactctccttaatcgaaatg

SEQ ID NO: 33275 - DNA, 1066 bp, Cannabis sativa
tatagcgtccactatcaacaaattctaaatataaataggattttttggccaccaaattacacttttacctcccatcaaatatttaattgtaattcacccaattaaataaaagtattgttaggatcacccaaaagtggctcattacaattgttttgaccatgttctataaaaattattatattaaattatatgagactcgatatttagttatactaataattatataacatgttggagagtgttagtactactactgacttaatattttttaatcaaatattagaaaaaaattaactcgtccaattattttatcagtttgatcgagttttaaatcgatcttcacttttttataatttttttttaggaaaagatttcaacttctaaacaccaaaagtaacaagtactttattaaagtgggagcgggaatttattcaattatagcgtccactatcaacaaattaaatacaaataggattttttggccactaaagtacacttttatctgccatcaaagcaagtttggctaatgtatgggcaatgctagcggagtttgcagtgcgggtggtgcatgttgtaaaaaaaatttcaaaccaaactgcataagatttttgtaatttctcataccgtaactgcatcacgagatcttaaaattacagaaaccacaccgcaaaaatacagtatggtgtggtgcagtttgagcagtttacactatcatcattattaaacattataattaaaatatgaaaatcaatctaataaagttttgacaattgtatatgtaaaaaaatcttattaaaattttaatatcataacatatatatactaatcatcaagtcattatattaaattatctcttgttaacgcatgttttcgttaactaagtatgagcctaatagtgacaaacttgctcagaaaaactaaagacaataaagaaaaaagtatgaacacaaatgattttttacgtggttttgcagttaaaattttgcatagttcacgagtcaacccttttagatttctgatattgttctagggccttttctcttataaatttttcgtccctttttta

SEQ ID NO: 33276 - DNA, 1353 bp, Cannabis sativa
accacaagatgggaccacccagtataagaaacaaaacaatgtaagggttcactgccctcgagtagggctgagcatcggttggtttggtcggttattttctatataaaaattcaaaattcgattttcgatctaaattgatccaatccgagaaccgaccgaccaatccagaacctatcttaaaatcgaccgttttgaacctcggtttggtcggtttaaaccgcctaaaccaaacttcaatttattctataaatacataattctacattttacaactacaaacatacaaactaattatcttattcttttaagtttaatataataaaaaaatatattatttttatatattataatacatgcaagaaaaaaaaaacttaataaattaatatatatatgtataacggtcagtttcaattttttcggtcggtttattacctacaaaaaactgatcgttcaatggcggttttaaccgttaacagttttttcagttttcgatttcgtcggtttcggttccaacggtgttcagtaggtcggtttaaacggtttttcaattttctagattttatgctcacccctaccctcgagctgaaactcgcaccctcctctttctgattacaacttccacgagtgccccagagagacctctatcctcctcggggtatgccgttgggtttcatcctgttgtgtttcatctatctattgccaaatgaaactagtttagtctattcttttctaatctattgagatatgtaaacaaatttatgttagttttgtggtactaattcaggtacgcattgaaataaaagtttttgattatcatcgtaccacatcttcaggatcaccatatgtatatacattaaatatgaaataaatagacgaaaagaaaatttaccttttaaagcctatcagagtattcttgttttttttttttctgtaagttgtatccttagatgatgacgaagaactaacatcgtagtctcccgaatcttccaccacacacaagaactagtgtaggctagtaggatataaattgtatatgatattcttaatttttttcaacacattaatcagattaattctttttaggcttaacaaaataatttgtatcagtttttgtttatatggtatatttaaattaaaaccaataaaaattttatttactgaattatttaaattcaaataatttattaaatatatttaattatttgaataaataatataaccgaattagttatagatatttattaattataacttattaaggaaatatctcaaccaacagaaatatctataactacttttcaaatttaaatttcaataaatatttatcttttaaattaggctaattagcaattt

SEQ ID NO: 33277 - DNA, 2257 bp, Cannabis sativa
ttaatatttatgtttgcttatgatttcattcacaatgtaaacaactatattttgatcaaatgcagagtacttttggtctttccattgctcgtaattttcctatttaattaattagtaatcaactatgtgcgcgggcagtttattatctaccagacttttgatctacgagcacttatcaactgtgccttacaataactgttataatctgtcttaagaaaacttgaatatacttttaatgatctcatcactttgtacatttttgattgcttatatgaatagtttgatcgcctattcatacattaggtttaagtacttttatcgagacaccttgatgtctcctttaatactttcttatattgtacgagccattaaaattcagttttgtacgcaagttatgagttatatctcatttaaaaattttgattttcctttctcgtcagacaggtttaaataaaaaagttatgatggtgttatgcccttctcatcagaaaggtttgaccaaaaactttaaaagaaatttgtaaagttgtgggtttgcattatatcatgtatttccagatgaattctggttaatcatacacaaatgccccttaagtaatgtaatcactaaaataaaagaaatgattctctttattcataactgaagtttaaaatattacgttagcaatgctagttacatcattaatttacttgtagtagggtccccaatgttccacgttccagtagttctttattagcgagccatttagccgagaaaatttgtaaactttgattcctactactgcagacgcatctctcatgttcgcaaatactcaccttagcaccaagtctccaacattgaatagccttttcttgactttttagttgaagtttcttttgactcggtgttgatacgctgcattagtgacttgcgactctgttcgtttttcatcaagcagatccaaggacaattttagaagttcttggttttcttcttgatcataaactctcttctatgagtcgatattgctttcaagccgaatgccagcgagaacgaagtgtgtcctgttgttgtcttctcggtagttctgtgagcccaaagtacctgaggaagctcgtccacccacctgcctttggcagcatctaatttcttcttgataatatccttcaaggttttattaacagcttcaacttttccatttgcttgaggcctggatacagacgagaagctcttaattatcttcttccttttacggaactcagtgaacaagtcgccatcaaactgggaattccaaacctacaaacaatgtttttgacaacaaagttgaggactttcttgcaggttatggagacaagagtctcggcctcagtcaatttagtgaagaaatcgaccactacaactgcgtacttggatcctcctcgtcctttaggaagttccccaattaaatcaatcccccatatagcaaatggataaggcgaggtcatcatccttagttccgttggcggtacgtgaggtatatgtgaaaatctctgacacttatcacactttttgacaaactcatgggtgtccttatcgattattggccaataatatccttgtctaatgatctttttggataggcttttccaacctgcatgatccccacaaaagccttcatgaatttgtctaatgatctcgtttgcttctgtaggaagaacaaactgaagtagaggcatagaataacctcttctgtatagtttgccttcaattattatgtattgaggcactgaattcaagagtttttgtgcctcgtttttgtcggttgaaagttgctcgttgagtagatagttgattatagtagtcatccatgtaggtgaaatgtctatcatctctatgtattccatttcacatatacttggctcgcttagcatctccactggaaccaagttcaattcatccaagtcgttctgcaaggcgagttttgctaaggcatcagcgttagagttttgttctcttggaattttctcgattttaaagtaaccgaatctttcatagttcttccgaaccttctcttgatacttagccattttcagacccttggactggtattccccgagaacctgatttacaatcagttatgagtcactatggcagatgagattcttgactttcaatgccttggctatcttcaagttagcgatcaaagtttcatgttcagtctcgttgtttgatgcgtcaaatttaaatctcaaggcataatgaaacttaaagacatctggtgaaattaatattacccct

SEQ ID NO: 33278 - DNA, 1358 bp, Cannabis sativa
aatttttatttatttattaattttgttttaatactaaaaagtaaaataaaagtccaattaaacctgatttattcttagtttagtaaattgtacccaaaaaaatcaaatagattataatttatatttttacaagctaatctattcaatttagattggtaaaattaaataaaattattaagtgaaagtgaatataaaataatttacaaaataatacatgaccaaaatgtacaaatattttttcagatctatatcaatataaaataatttacaatataattacatgacttaaatgtacaaccatttttccaaattgtaaggttataacttgtgaggatttagatgattaatgaattgataatctcttgaaggtccaaaacaacccaagcttcaatatgccaatagagcgccctttgaaaacctctttgttccaaccatattcgaccaaaacctgcaccacatttatctccaaattatatagcatctctgaacaaaattatttggaaaaaaaaatgggtacgctcttagtgtgagaaaatctctagcatctaattcattcaaaggtgagtattttaaaaatgaaaataaacaaacccagttagtgtagtaattatttctacaagacccactttctaaaacgttcataagagacggtaaaggtgagttggagatgcatatggtaaccaagacaatatttattctactgagttaagttgaaacttattcgagtacctaagagctcagaatcatgaaatggtagctaaaattatattttacttatatgcacacaaattaatgtaaagaagaaaaaaaatgagtgagaatgtagattcaaaatgtgttatatatcaaagttgtacctgagcttctcgttttctctggctcttcgtgttttagtttcttttgttgtttgaagagtattgagtcacagacccgttccatttggagtcacaaacatctttggctctggtggtagatggcggaggagcggtatgcgcgcgaggggtcgacgatgacgggcgacgttgaaatggatgatgataggtggttgaattagggcttcaaggacagaggagggagagagagaagagaagaaatgcaaacagagagaggtagaagagagaggggcggctgagagagttagacaaattgttagggtttcgtttattaaatgatttttattgtttgagcttttaaaaaatatatattttatttgttgaaaattttctcaaaagtctgatacaaattttttaattaaaataaaatggtatggtgacacgctatgcgtgttagcaaacgtgtttaccaacgcgttttgcgcgtcactaaagccacgtctttagtgacgcgcaaaacgcgtt

SEQ ID NO: 33279 - DNA, 2432 bp, Cannabis sativa
  modified_base (1703)..(1707): a, c, t, g, unknown or other
agccattggcaaccatcacatccaagaaagggcaagacttcattataaaaaatataatttgtcggttcggactaccgtacaagatagtctcagacaatggaaaacaatttcacagtcaatccttcattgatttctgtgcaaaccataagatcattaaaagtttctctgcagtggcacatccccaagcaaatggtcaagtcgaagcagtcaataagacactcaaagatactctaaagaaacgacttgaagatgctataggaaattgactagaggaactccctgaagtattatggtcgtaccacacaactgagaaaacagcaactggacagactccattttccatggcatatggttatgaagctacgctggctctagaacttgagcctccatcccaaagaagattgacatatgaccaagaagttaatcacatgctcctcgtagaatcactcgatgaaatcgaagaaaagcgaaccgcagcaagcctgaaattggtagcccatcaatagaaggtagctcggtactttaacaagaaagtgaaagcacagaaatgctttgaattgtgggagatatggtcctcataagggtattcttgaacaccaaagatagcacggtaggtgtgctcagaccgaactaggaaggaccatatcaggggatcgaagttctggaatcaggagcataaaaactaggtaagtattacgaaaaaaatgcaactcgttgcagtaccaaggtattggaacggggaacacttaagaaaatactaccagtgaaagtaccatgtcagatgaccatgttaagtacgaaacaaaagaacatttactcttaagtgaatggccttctgggcggaccacgcccaaaggttcggatgaaatgacaaagtacttaggtcaggtgaccacttatgaaagtaaaatttttattttctgcaatttttttttgtttatgctaagctaaagatcatactaagatcaacataataactccaatataagttactatggtaacaaacatattcccgaccaataaatgaataaagatgtttatttcaattcaaattgagtcaacattattagcaagttatacatttaccattaaatgcgtacaaaaggtctgctcgtacccaaagacccgaacagacaaaaagcatacttgtgaaaaacaagtgacaaagagtcaaaagtatgctcggtcacttggggggcacctacacctgtacaaagcatttggtaaaaacaaagtaagaagcaaaaaaaaaaggaacaaaacgaacacagttgcacaacgatcataaacaaggaacgaaattcattaaggatgacaaagcatttaaactcgagattaaaggctgcccggttagcgagttgttcaaaaaatgaaaaatattccaagtttaaagaccgcttggccggtcactttgtcttaaaagaaggcctactggccgaacagacatatacaaaaaaatgatggtaaagagaaggcaatcagatagtaggagtcccaggctcttggtaaggatcaactaggtctaaaggggctggaggatcatcggtctgggcgaaaggaacctcaacattctggtcggtaggagaagtggaattggccgcctcagggttctcattggccgcttgagccatgcagtaatcaagaaatatgtccttggaagtgccaaggcagtcaaagtttgctttgggattggccttccaaannnnntaaaaaatctcgagaccagctgtctctaaggtatccaccctcttcccaagctcctccaccttggatttttggctcttaacctctgcttcaagttcctcctccctgttcttcttgtccttgacctcatcctccaacctacaaagaagagtctgaagaccccctctcacatcttgcagactggtaatttcctgagagaaggaaacgttgtcttcctcaagctgcgcggtctatggcatgtcctgtagctccttggtcagcaaagaaaccctggtccagcagcaaggagtttcttatctgcctctccatgttctatcctcacgacctcaagctaggtctgcgcatcttcaacgtctttcttggccaagtttgcttctcttcgcattgtgttagaggtggcaaggttcttggaagcagccaacttggctcgagagtatgcataagccatcttcataccagtctttatggagaatgcaataaaatctgaattatccaaagaataatgaaagaaaagtgatagagggaacttactcgagaaatttccttcaaaactcctcctaagaccagctccaaggataactcagtgtccgccccggtcagctgttcgttcacttctgggagcgacaaagccacgttttaacgtccccgcatcaagcctccattgggcccttgcacccacggactaatggctcttatacacgagttcgtcactctggctgcttcatgga

SEQ ID NO: 33280 - DNA, 1999 bp, Cannabis sativa
  modified_base (969)..(975): a, c, t, g, unknown or other
cctaatacggcgttccaaacaagtcctaaaagtgttaatcagtgctggtgcctaataataatgttataaaataaagtatataacttaatttttgtgtaaatcctataatatttgtatgacattttcaagatataaaattaattatagaatttgaataggcattttaattttcatttatttggttatttataaatttgttcttctacaataaattatttatcatgttggctcatataatttaataaataggtaatttgtttgtgatggaaaaaaaaaagagggtattagggcatctccaataaagaaacttaaatttggtgttaaatcaacactaagaaactgctattttaacactaattctttttttaattctaaccacaacactaaaaattacaccaaatattatattctttattactctattattttatcaatataaaaaaataatttaataccaaatattatgttctttattatttagttttttttaatattatataattattaaaaagtaaaaaaaaaatagtgtggtctacagtgcctactaaatttggtgggacactctagacaaacctatttatagtgtaatttatagtgttaggttggaatttttatagtgtaaaattacactatatttagtataattggcgctccacgattatattctctaaaaattatttttttaaaaaaataatatgagacttgacatttaattattcaactaacattttgatacacattgctaagcaccagtcttctactaattctaaaaaaaaaatgctaattacaacctcttagtcaacatccatgtctgaaatcctatgccaaaatatttttttcaaatcttttttatagcggtattcgttatagttacagtatcatctctgtaaattttttaaaaaattccgaatagtttacagtaccgaaaatagatttcttgatattccaatttaccacgcgcgttcaaannnnnnnaaacgtattttcggcacggtaaactattcgaaatttttcaaaaaattacaaggatgatgttgtaagcataacgaacactctcgtgaaaaaaaatattccgagatatgttttcaggcgtaaaatttgactaagaggttgtaacaagagattgacgttagttctcctcaaaacaaaaattatgttgttgtgacataaaacagatttggacgctaaatttgccagtgttgggtcatgtcatgtcctttttttctttttgctcttgagtgtctgtcatgatgtataaataaaattaaaaataatttttaaataaaaaaaatactttccatatatttaacatataaaataatttaaaaaagttaaatcaaattataattaaccgtacgtaagtttcgtttatacttaatatacatacataaataaataagaaatatagatatatattgatagattaactttgaatagcaaagcaaacattggaatcatttgaggtagataggtaaaagatattacatattgatgatggagataaatgttgaagtagtgtcgaaggagattatcaaaccatcttccccaacttcaagccatctccgaacttaccatctttcctttcttgaccaaatatcaagccatgtctacaacccttttgtcctcttctatcaaaaccacaaaaacctcaacaaccacaacctccttcacctttactccaccaacatcaagaaatctctatccaatctcctttcccgctatcatttattcgccggacgactcaaacaaaccaccgtcgattgtaacgacgagggaatcccttatttcgaagcaaaaatcaattgcaaactctctgatttcctccaaaatccagacccccaacaactccacaagttcatccccttcgagcttaacggactaggccttgatcttctactcggtctccaattcaatctcttcaactgtggcggaatagctattggaatttgtatttcacacaaagtagctgacgctatttcatgtctcttgttcatcaaaa

SEQ ID NO: 33281 - DNA, 1620 bp, Cannabis sativa
tccacgcaccatcaaagcgcgtctgttaaacggaccaaaacatttttaataatataatatattatatcattttttatataatgtaaattttctcattctataaatctttttataaacaaccccacaataaacacaagtttcttctctccattctctctctataaatatttttttttctctctctaagctcaaaacagaacgactttattttttattttgcaatttttattttatttttggagtctctctcttcgaatttcagtcttcgtagccatgaaagctcaggtttcttaaaaatccaggtacgactagctatagtaattctcttattataataaatatatctgtgcttttcttttatctttctttcttgttcgatatatatatattattttatgtttgtttaaatatatatattgttgtgtgtatatatataagtttgtttacgttttatatcatagttttaatctcttaagtaactaatcgatgctcaactttgaagacccattttctcaggttggagttttgacgtgggtttcgacttgttttttggtttttcttcatcttaaggagaggtacagtttaaagaagagatttttatatttctttatttctttctttctttaaatggggttgctttttctgcttatttgtacgatttgaaatacttttctgcttgttttaacggttccatgaagagtaattgattagaatttgatggatcatattggaattctcactgtgaacggtggtttttgtttgtttggtgtgtatagatattatataataatataaatatattattgataataataatattatttttgtgtttagaatgtgttgctttctggtaaagtttataattttgatttggttcattagataaatgtatcttcttaatggggtttcggtgtttttgtgttaaaagtttcttctttatcgaacttgtttgccttgaattctagttttggtttcgaaaatgaatctgggtatatttattgtcttcttttagatactataagtgttataaacttgttttttttttttctaaatatctttacatacgaattaaccaaaaattctcaagtatggccagaaaggacgaaaattcatttttgatgcgaaaattcttatgtgattttcgggataatacttcttctttccctaatttggacacatccttttttcatttattattattattattatttgaaaacaagttggtctaaataaattaataaagtataatatatgggatatatatttattcaaaaaaaaatatgtaagatatatatttttttaaaaaacaaattgactttttacaagttgaatctgtagaaaatttctctatttagtgtttttttattcaattaatctgaatctattaaaaatagatattctgtagttcaaaatttcaaatgcttataaacaaaacattgttaacataatactaacaggaagaagcttaaccatctcattcttttttctttttggttcattctgtttaaattcagaaaaatggactgaccagtcttttaaaaaagaaaggtaaaaaaatgctttctttttgttacttaatttgaagttatgtattgcttgtttaaatgggacctgcaattt

SEQ ID NO: 33282 - DNA, 1073 bp, Cannabis sativa
acttttaaggtcgttaaaaatgttgatttaagaacttttgtctaattttattcaattttactatttcaggattatttatgtactaaaatatattttctagactttgatatttactaaattatatcttttaactttgatatgtactaaattatgctccctaaatttttatctatgttatttttttttattaaaacttaataaaaatctttaaatttaacaatctcaatagttcagaaaatatttttaatgaccttaaaaaatttagagaacaaaatttggtagatgtggacaaaaatcctaattattgtatttatatatgtcggcaagaggagagagttaggtaatagggtggggtcgtaggaaggaacggtcaaccgtgagaattgggaggtgggcagtgggccccacctaacggaaacattaacatcatctaccacgtgtccctaacgtggcaaactgccataaccgacaataaccgtgaccacagaccactgagaccaccacctttctctttactattatttattattaaaaagaaaaatgaaaaaaagaattgactaagcttaagacttgagacttgaattgttgtcttctttcctaatatatgactcatgtaattttaactatcacaccgtcattagcgcttcgaagtagaccatttaaaactaaatcttattataagttgaggattcaaaactaaattttattattttaagactatttaatatacctttcaagactatagttgttttactcaatcacaagtagtttttttagttcatagtgatttcttttagcttatttttcgtgaattacaagtggtttcttttagcttgatcgtttttctgaaccaattttttttaaagtttaatttaactctaatatcatagaatttgataagatgtgtagttaagatgcataaatctctatttcaaaaccaattaataatgaaagaaactcatcgatcttatatattttattattttttcacacaattaacaatgagactctttaataacaacaacataacaacttttctttttctcttctttcttttcctaatttgaattcat

SEQ ID NO: 33283 - DNA, 1454 bp, Cannabis sativa
aaaaagaacatatccttttgcacatattgtaatatacttgggcacactattaaaaaatgctacaagatttatggttatcccctaggataccacaagaatgacaagggaaagatgcttctgccaatcaggtacaagcaaacaatgacatcaactcaattggtgaaaatcaagccttgctacctcaactcacaacaacacagtactaacagttgctcaacctgttagttgttcaacaatctagtatgcccaacacataaactggaaataatacaggtaatacaagtattgttctcttaaacatgtctagttttccaataagtggttcttgaatattagattcaggagctactagacatatatgctatgacataaaacattttccaattaatgcatatgcagtttcaatcccactagactgttgttacctaacaatgaatgtttaattgttaatcaaagtggcaccattgccatcacatataaaccggacttgagtaacgtactttatgttcctactttcaataacaacattatctcagtaagctgtctaacttatgatgacaatttgtatgttaagttcttcactcctcactttgtcatacatgaccaaatcaacaagaagaagattggcggaggtaaatccaagaatgagttgtacatactggactcaagacctcatgattcaccaatccttgtagtttcaactgatgtctagcactcgaggcttggacatccctcaaacaaatacttgatacttatagacagtaaattcaattgtaacatttctaatttacaaaataattcttcttgctatatttgtcatatggcaaaacaaatgaaacttcctttcaaaaataataatatttttgctgataatatttttgatttgattcattgtgatatatagagtccctattatgttcaatcacattctggttttagattctttctcactattgttgatgtgatcaatgaagattcacatgggtataccttttaaaacaaaaatttgatgtgcagttattcctcaattcttgacttatgttgagaaaacacatgcaatttatcttctcattataataatatgcacacgctatattcttcaactcaagtttgatcttattttctccctaaaaaaggatcaaatttgatcatgttaacaactcaatcatatcaaggattatctgtggttataaaacacacttaatgaatatcactcattgttggttactaaaaattaacttaactataaatattgattttaaaaatattaacaccttcgattttgatctaataacgaaaagaaaaaaatttatgcttaataacaattaaaaaaaatattatctttttcagactattgtttatataaaaacatttaagttaaattcaacttttttttttatcttatatttttgctaaataatttttttttgaatacaacctcatataatataaaa

SEQ ID NO: 33284 - DNA, 2625 bp, Cannabis sativa
tcaagtccaaggcttgagaggtaaaaatacaagaaataataccacgaaaaatcaacccgagtgcctagggtttcacccagtgccaaggttgacaacccaactagtgtttcagtttttaggtctgtcttaatacaaatgggtcaaaatttgtactgtgatatgaactaggtatgccacaagcatgttagaggcatcaaaatcagatttagagaacgttcttttttgagcacccagagcaccaagtacccgaggcaccaagtgcctaggttgacattttgtcaacctaggccccttgtaagcatcaaactgaaaatttgtctaaggaatcttctttgtcttcattgaaaatggggaaacaagtgtttttaagggaagaaacaaaccaacctggaggacaaaacaagagatcattgcccaggttgacacctggtgctagcttagcacccaagttgacattttgttaacttgagccaattctgaggagtttctttgaaaagtcttccacgcatattctacgtttctgtcaaagattaagattcaagtatttctagggagcaaatagaactatctaagtgcttgaaacttgacccagtgcctaggttgacacttggcactgggcccaatgcccatattgacacttggcactaggcccaatgcccaggttcacatattgtcaacttgggctgtttccaatcatgtttctgaaaaaagtgttacgtgcattaaactggaggagaaaatgacaaaaccaaggggcatcaaaattgagcccagcacaaaagttgacctagtgctgggcaagatgcctaggttgacaatcaacctagtgtgttggtttcaatcacttaattgcaaattctaccccgagaattctttctgaaatggttaaaaatagagtaagagacctcattctcaagttaaagaaccttagaagtgagaaaatagcatcccaaaagctccaaaagaagcctctaatgtctaggttgacatatggctttgtgcattgggttctgtttatttgattttgattccatctcgatcgtttgtctagtttttcatagtgactaagagttatgaactcagaagagtcaaattcataacttcatattttcatttttttggcaaagtgacattcagaaatcagggagttttgaggttcccatttctacaaaacaacaacatctaaccaacttcaccaaaacacagaaattgcctaagatatgcccaaatatcacctaagcatcaaaaaatacatcaccaatacattttcttactcacccagcatctaggttgacgtcacatgtcaacctgggcactagatatcaacctgggtgctgggatgtcaacatgggcattcgacccagaacaacctttagtaaaatagccataagtccaatgatattgatctcattctcacgattcaagtttagtttcacagctatttcaatgctttatcaagtaatgtctcacactccaataaaaattataaatttatcaattctaaatttcatctttaagagagttacaaatttaagcaacaacttacctgaagtggatctcccggacgcaactcatgtttcgaaagttgatgaacgacttcgagagttaatttcaccgctagatcatcatcaacagtcaaaaataacctaaatgctttttttttccatattttttggattattatattattattttaataggacctcattccctataaaaggagagcttctctagctcattttttaagttcagaaaagtactcataaggccaaagagtctttctctctagaaattaaggcttacaaacttagccagttttcttataattctcgtgagaaataaaaactcaaagtatacatagctccattaccatcgcgacatggggagtgaactactataaattttgtgtgtctctatgattatttacttaaacttattattcatctcaccaatctagcgagctattgttggctactttttagcatcaacatttttatgctttcattgagagccacaacttgagttctcgattacagtttgatttctttactagaagctttgctatgaaaggaattaataagtttaagaaagcaatcatctatgatcgcgtagagcaacactaccactcctactagtcatgccactacacaacaagcagttgcccatgatatttcctgtaggtaagcaaagtgagagcgagcgtccgaaaggactcacactcagaaacatagatctatgggttctccccctgatgtgtagcgcacatgttaggggaatgagctacgagttagcatccaaaaggacatagacttgtgatcccagacctatatgtccaccacacgcagttgataggatcaactgcaattctgcctaaagcaattcgaacaatgcagaaaaccaatctcctccatgggattctcttcataggtctaatgactgtaaacaaccccatgaccctataaaaggaaagggacctgtagtcagaattagggaaagaacctggaagttataccataaaagtgaagactctgagattcagagggtcaagatcagcgagctactccacactcaaaaatatttctgtgatggatgaggtgcttagtgtaggtacttcactcgaggttc

SEQ ID NO: 33285 - DNA, 3610 bp, Cannabis sativa
  modified_base (40)..(61): a, c, t, g, unknown or other
  modified_base (362)..(366): a, c, t, g, unknown or other
  modified_base (815)..(822): a, c, t, g, unknown or other
  modified_base (976)..(976): a, c, t, g, unknown or other
gtgaaaattcataaactagacaaagtctaactttagaatnnnnnnnnnnnnnnnnnnnnnnattaactaagtcttacaagtagtttgtccaactagtataggaccatggacctatataatcgagctttcaataagcaaatctagaatttaccaagtaaattttctaacttattaattcctccatgtaccactatcgatttggaattacactctcaattatatagaatactctatatgtttcacgatatagatacgatatgaggttatccatttgttattgtcccaataatcaatggtcctctatagatgatttacatttagtagggattaatttaccattacacccttcaatatattttatnnnnnaaacacttagctacctatagatgatatttcagtgaactaatataatcactaaaatgagtactcaaccatttatctttgctaagccaagttcgaaggaaatcatcgtttgacttctatatctagataaatgctataaattttgtatctatgattagtgctctcactcaattgaactaccatgttcttaacctatatatcacgagaagaaccatttggtcgactttaaggaacatatttaagaacacaaataatgcaactgaactagaacctaactatctcaggattgagatcacttgatctaggatcaactaggtgagatttaatagatattatggtaagtttatcatatctagttcaagttcaatatttgtccctttcaatgcatactccatgtatccaacccaagtttactttaatcagtgctctagaaaggacatagcacttatccnnnnnnnnagtaaactacattgtagattatcctattagttaaaccctgtgtattgataaatcatacaatacatttaatcacacaatcttgattattttccactgtgctgccacaataaacaagaaaatcgatgtgatatggatttggatgaatttataaatnaaataaacatataaatgatcacatgaactaaataacacactaaataaataataaaaataaatctgtttttttattgataattgaatagaaaagattacattgaaataaaattttatttagggctaacacatcagtgaaccgtactagcaaccattgattaaagattctataattttaatatgttggtgactgttttattcatagctaagtggtcttagttctctatacagctacaagccagaacctcatatatgaataaagattctttcaatataaattattcaataaaaatttaacattcacacatacatcaaatgtttactctttatttaataatcataaatatctttacaggcttttcagggtataaaccctaacacactgttaggccttagggtaataaataaagaggttaattgggtaattataatgggagggattaatgctatatatatgagtgagtagtgagggtaagaggtagagaattattttgttaagtgagcttttagctcttgggagagagcttggtctctcgaatacccaacaacttgttattctcttcttctatatcaatatacaagtcactattttcttataattgctattgttatactaagttgataggaaattcctatcaaatggtatcagagcaacgattctggtcctccacggtaataccgatgttgccgttatttgaaggtgaggattcgtttggttgggtccatcgcatagaagactactttcgggttaatcagattcctgagaaagaaaaaatagtagttgctgaaaaatgtttagagggtgttgctcgactatggtttcagatggtagaatagcaagatccgatcaagcactggttggagtttcgaatcacgctgttcaactgttgcggtaaaatcgagaacgatccattcaatcggttgatggctctccgatatacaagttcggtgatggagttcaaaaaacagttcgatctgattgctgcacaactagtgggtattccagacacgttccttcgggatattttctttggaaatcttccaaaggagatggcgtagaaggtgcttcaatgtaagcccaagacactcatagatgtggttataaaagcactgctggttgaagagcaattgaaaatccaacacaagacttgcaatcttgttagagatgagctgaaggaagagataccatcgctgcttgagataatgatttcaccggagaaaatgtcacagaagactgagtctcacggtggatcatcctcttccattgatgtgccagagagtcctcgcgatcggagcttcaacagtccattaacggttttcgatcaacttatggaaggcaacgatgtgaaggacgtggcgtcgaagaagaaccagtagaggaaaacgttgctggaagaaaaatatttgtaggatttgataccggaggagttggcgttggaggagaaaagattactagaggcggttccatcattggcgtcgaatgggatgagtcagaaatcgttaaggacagaccccactattcaccctgatgagatgatgttgaagatggtgactgcgagagatgacttctgtaaaacaaacttctcaaagccctatcatataaggcccacttcattaactcttcgtccatatccaaacccaccaaacttggcccacctaagcaaaatccttaccttcactcatcatttcaatgggcaggtctaatgggatcctggtgcagcccatttaaccaatatttcttcaaaaaaaaaagcccaaacaatgcatcatcaaagaacatgtgccatttaatgaaaggtcacgtcgcattcttctctgtcacatatggcccaacttatttcaatttactcctgatccaacccactataacacatgccttgacctaatttttccaattaatgaatttgccctttgggacccaagtaaggtacaacccaatatgatggtccgatttcctatttcctcttcatctctttgtcacgacatggagtctttccaggtaccttctcttaccctcaacgtctaccatggatggaaggacccaagctcgaactcgaacatcttttttctggtgtcgcacatggcagcggtagctaccgtgattctagccatgagaaagaaacaactccagttttctcgagttttccctcctgtcgatccatcaaaatctgtaagttctatatcagtttggttcttttatgtgtgggagacgggtcgagctctccaatctcttctctatgggaattttgtcttgtgttcttcatttctcttagcttgttggaaaaatggaaggggttctcttaggtctatctatcactcaaaaaattttctttcaatttctcctctttcttggcttgttggggtccaaaaatgagatatatgattgggaataaactgatatcggagaagcacacgatcagtcttcttaggttggtacttgatcgaggaagacaggaagaacatcagctcaaatttgttgagaagagtgcttctgtagatgagaggtttgtattttctatgcttcaactaaaccacatagtgtttggtggtcactgggtttacgacaggggcagaacaatacccttttgagtttttctatatggctaaggtttaaggaagctgattggacacaact

SEQ ID NO: 33286 - DNA, 1162 bp, Cannabis sativa
tcaaatacttttaatgttttttttttaattatatgtatattaaaagtaattataaatttaaaaattataagtttttttaaaaaataattaaatatatagaaaaagtaaaatataaactaactttttgatatttatatagatttaatcaattttttttaaaatatagaaatatatttaactaataataatggggcaaattcttaaaaataaacaaaaataggtcgtattcagtcactcatacaaaattaaagaaaaatagtaatttttgcacaaatagtacatgaagaaatactttatttataacccttacatcatttgtaataatgtgagacttttatccaaaaaaaaaaaaacataaaaaattgtaagaaatagattattcaatatatataaaattatatatatataaaaaaaaaacaaattcactaaaactctaataaaaaaatgtgtaatacaaaaaaaaaatataggatgccaccttatttaatttttgtttttctttatataaatatatcgatatagatataaatttaggtaaatttacacaattcacttaaaataaaatcttttcttttacatttttagttttttacaagttttttacaatttttttttccaaaaaaaaaatttatatttattttatttttatgttatttttccgtaaagacaacatgaagataactgaaagataataatttttatttttgtagaaaagaaaaattaaaatctataaaaatatatattaaaaaaatgatagatccataaatataaagtttttgttagttttagctttttaagtatttatgaattaatcctataaatttaagctttgatgatgagaggccattagggcatctccaatgaggttaacaaatatagttgtctcattattccccacctaacacatttagccaattacattttttttttgcttattttttttattttaaaattttaaagaacatcggtgcctactttgaaaactttttattatctctctcttctctcttatatagtcagtattatgtggcatataatctgcagcaatggcacacacatttttggtcaaatatatcggcaaccaaaaataaaaaaatagtaaatataagagacaaggagaagagaagcaaaaatttattgtggcatccctaatattcattat

SEQ ID NO: 33287 - DNA, 2348 bp, Cannabis sativa
agaacataataaggaggatgcttttattcatgcttgggtatttgctttgacccatgcagaggcccatgcttatccttttaccctgacaggtcagatttctattgatggtatttagttttctgctataattgattatggtgctacgtattcttatgtgttgagtagagtgatcggtagtctgaacaagcctagtgattttttaacaaatgattttggtactttgttgcatactggggagttggttatcttcagcaggtgggttaagtccctaccattggatgtggagggtagggaactgtcggtggatctaatctaattagacttagaagattttaatgtaatacttggaatggattggctagtaaagtataatgcaaccatcgaatgttagagcaaaatggtaacttttgaactcgagggtgaggacccatttgtgtttgtgggaatggttcaaggatcttgattccaatgatcacatgcttaaggcaagagacttattatgtgatggatgtatcagctatttaaccagtgtggtggataccacaagagagatacttctaggatctgaacacgtgccagtggtacgagactttctgaatgtcttcccaaaggagttacttgggataccaccaaaacaggagaatgatttcgagatcaaattgataccaggggcagagcatgtttctaaggccccgtattggatggcaccaaaagaattaaaagaactaaaggttcaatggcaaggtttgttggatttgtagtttttaggccacatacctcaccttggggtgcacctgtatttttcattaagaaaaggaagggacactaaggatatgtattgactaccaagagttgaataaattgacagtgaagaataagtatcctttgccaaggatagatgatctatttgattaattataaggaaagaccgtcttatctaagattgatctttgatattgttatcaccagtgatgactcgggagaaggatattccctagactacatttcgtatccagtatgggaactatgaattcctagtgatgtccttcgaattaactaatgccccaacgacttttatgtacctgatgaatcgagtgttcaaataattttttgatgacttcatgattgtcatcattgatgacatcttgatctactctaatttggaagaggcacatgaaaaacatctttggatggtgttacaacgccttcaggagcatgaactttatgctaagtttaagaattgtgaattttggttgccccaagtaaatttcttagggcatgttgagaatgaagatggaattctggtggacttagtaaagattgaggcaggatactgaagttagaagtttcatggggttagcaggatactacagaagatttgtggaagggtttgctaagatttctacacccttaacagagttaaccgagaagaactataagtttatttggattgataagtgtgaaagtagcttccatgagttgaaccagagattaatcattgattattgtaccaatactaacttttctaattattaatgagaaattcaggatttattgtgatgacttgaaacaaaggttatgccgcgttttgatgcaatctagtaaggttatttcttatgcatctaggaaatgaaggagtatgaatagcggtatccaacacatgatattgagttggcagcggtggtatttactttcaaagtttgacgccattactagtatggaaaaaagtgtaaaatctacacggatcataaaagcctcaaatactttttcactcagaaagatttaaatacgagacagcgatgatggttggaactagtgaaagactatgattgcgagatcctctaccatcctggaaaaaaatgtggtagcagattctctaagagagagaggtccaaggcaagtttacaaattgaagatgatttcaccgacattggctgaggacatgaccagagcagaaattgagtttgtgatgtgaaattagccaacattaagttacaatctaaattgttagagaggatcaagaccactcagtaaagtgatccagcattattagagtataaagaaaagtttgaggctagttcgcaaaggatttctcaatttcatcaaatgggttattgtggtataaaggtagggtttgtgttccagcagacaatggtatcaaacaagaaattttggattagtttcataccacaccatattcattacacctgggaacaactaagatgtatcaagatgtcaaggcaccgtactggttgccaggtatgaaacttgatatatttgagtacgtgtcaaaatgtctaacttatcagcgagttaaggcagaacatcagaggctagcgggattactt

SEQ ID NO: 33288 - DNA, 1714 bp, Cannabis sativa
aaattgatgattttgttgaaattaattattactttgttatatatatttaaaaatttataaataaatatatacatttatatatagtggcatagtgatgatatataatataatgatggtcattaataataagggcaccactacttgaacataacaatattaatggttagtcaaatatttaattccaacagccgaaacaatacaaaagtttgggatatgaaaactacaatttcctaattatatttattattaatttatacttatatatgttctttgactatttaatgtcaaacttaaaaatgtgccttttaaaatttaaacaaaaattaaaaataaaaataaaaagtcagaccttaattttcttcttctctttttctgttaatctttgaaaataatgtacatttacattccactatactagacatctgtacggagtaggagaggttttaccaaaatgtgtgcccttttttcaatcccactatctattttatacataattaatttggtaacattaattttaatctcataattagtgcaactaagtaattatatgtgtagtcttatcactacttacccccaagcacaactaattaatctccaccatatagtgctttttttttttacatatattattgcaccaaaaaatatgtaaaataatatattattttaaaatatatattaattgtaattcacaataaaatctttttatattttaattttatacacttaattttcttatttttttagcaaaacctctttaatttttattttttttttcataaatttgagacgtttgttaaatattaccgttaaactctaactgaatgactactctgtgtacacctgtatatacgtggaaaaaaaatttcaaagtcaatacagtaataatctagttggtatttaagagtgatattcagatgataccttaagtttgtaaaagtaaacataaataagttttgtcacaaaaaaaaaaaaataataataaaaaaactaagtataaaaaatcaaaacataaaataattttaccacaaataaccctatattttttaaaagaaatattctttaacatttttgtttgttttagttttaatatataagaaatttaatattatatcatgtttttttaatgtcataattttcataattatttttaaaatattatatttttcattaatatttacaatatattatttattttttttttaaaaaaatatatatggagaagatgataaaaacttgattaatttgtaggtgtcttaaacaattaagggtgttaatatgatgtctcaaaaaaaaaaaaagaaatccttttattggtgaagaaaacatttaaaattaataattaattatgaaaaagtcaagctaatgtatcaatacataaagcaaattaaataaaatcaccgctgtgtgaacaagtgtagcattagtcgtaagggaaaacgtaagcattacattacacaattcaactaaaaataaaaattagaaagttaataaaatgaaaattgtgttgggtatatatttattatattatttgcctaaaattcatgttgaaaaagacccgataattaagcaggaactagaagaattagaaagaaaaataataacatagagtgtacacgtgcttgattagcggtatgaatggttcatgtaaaattaggttttgatatatatatatactaggtgattgttacgtgccaagccacgtagtgttagtttt

SEQ ID NO: 33289 - DNA, 1181 bp, Cannabis sativa
tcctcgaaaccacttctcgcatatgtcgtagccgctccaaaacctttgcaagcttcatcctcttccactgtcgttgtgctcatcttcatcctcaaaattttctttcgcaagtttcagattgcttttcacttgatgatcctcaaaattttcttcgatttgcaagcttcgaatttattttgaacatacacaaattaaaatcaaaaaaccaaatcatcactaatagaaatttaaacaataaataagagaatattgtgcttacctttgtgctgccacgagagagcaaaggagagtgacatagcgagagagagggtggaggagagggatgacgtggctcgtgatcgcagagaagagagagtctggaaatgaaatgaaatttacaaatgactttgaaaaaataatatataattttttcgaggagtttatatcttaagaggagggaaatgaaacttaagatgggaaaaataaaatttagaaatttaagatgcggaaaataaaattttagatctaaaacgcgtgaaattgaaacatggaaattgcctcggctatactttagccgtctgttttaaactgtgcccaattcccttatacaaatatacaagattttttaaggcacgtttaaaaaccgtcgcctatacctcccgacaatttaaaactgtcgggaataccctattttcccgacaattttaaacactcacttaatttttttagtgacggttctccaaaaaaagtaattttagaaccgtcgcgaatactcctttttgtagcagtgaatattttattattattctaaatttaaatattcgtccatcctttcctataaatgagagattcattcaatttattttttgcattcccaagtcttcggagaactaaatctctcaaaattataatattgagagtttttcttgacttcagattgaacacttcaagtcacgctttctataaagaatattgctttaatcacttagacctcagtattctaagtgtgttgaataatcaataaaaatttaagtagaagtagctctattaacaaactacagggtgaactattataaattaattacttgtgttaatttatgctctttgtttacaacttttgcttatgagatgacatttttgttggctacttttgagagttgacaaatacaatactatataatacaatattgtgtaccaaatat

SEQ ID NO: 33290 - DNA, 3700 bp, Cannabis sativa
cgtagcgaggttgatgcctcgctttgcattactgatttcgtccttatgatcgtgtcttcatatacgaaatggtttctcatcaatatgtaaattaatagtttgtatatctgtgcctcgctcaagattttacagtcaacgagttataggtatagtctatcagctctgcatttaatgagttattccattttaatattctttaatataattaccattatatttgttgattcgtattctcccaagttgagacgtgtcctcctctgaagttccagccaaatttcgagtataacaattgccctttaagaaattctttttaattaaaagtgctttttaaatgattacagggagtatttttgtcataatcccttttaaaaaaatgcatgtcctctaattctagcagttttgtggtttcgatgtacatcagcatttaatgaccatcttttcaacttctttttcaaattctacccgttggattaattgtttctctgatctaatggagattatcccacgagtataaaatgagaaaaggaaccacctttgcactacttttgccatttcagaaactctagaaatttttcaagttttaatagcagaaaaaccattccccgatttgcccgaaaccttgcatgccatctttgtcattaacatttctcctgcaagtttcattcgatttgatttccacttcaagcattcaaagggatcttcacgctgttcgttgttttatagattccagagccgctcatcgtcccaaaaaccaactcctaacagtaagtgacttttctccttattttcttacatgctttttatgttgtatttctgagtttgattactaatttcttagtaagaacctttgttacttcatttggttttagcaattctaggacttaattgaatctcgttaaatgttagggtttaggtgggacgtaggtttttgagattctccaatttaccaactattggtttgataaaattcttctagaaattgggattgctttcttcttgcagcagtgtcccaaactggttcagaagtttatcatcgaaaagatttagaaatagaatatcccactgaacttgccatccaatacaaacccagaatttaaaaacccaaatccaaattagagataaatgatacaaaaattagggaacacatagtgaaaacccaccaagaagatattgctagtcaccacagacgcttcttgcaagaaattacagaaggcagattccgtttcttgtgagacattgcttcgcctgaacctctcagtttgtcttctattcctttggctaagcctttgtttttacctaaggtcacaattgtttttgaaccaggggacttggactttgaaattatgtcttccaagccacagaaatcaaagactcctcaggaccctaacgtcaccttcgaggctgagctaatagagtcaaaggtgtgagtcatcggagactatgtacgtaataccctgaggacttgtggggtcgaatatatgcgagactgttgggttagatcagtagttgatggtgagttcagttgctatcctcaagtgcgacatacaagcaaaatatctgagggggccagtggtgagaccagtacaagtggctcgactaggataggcgcttggagccttgaacacattagggctggagcaataatccctctgcgagactatttcaaggacttcctaaaccacctcaggcttgccccattccaactgaatccaatttcatatagaatcctcgcaagtttaagggttctgtagaaaattttgaattgggagggctccactcccttggaaatagagtatctctactctgttaaggctgttctagcgaggaagaatgcaacagtggatttttactatcttgggactcacacaggtgatcgcaaggattttccaaataaaacttccttcaaggatgaattcttcttgacgaccggtctctcccgcatcggcacaaccactttctgcattatacgtaagtgattatttgcacaagatttggttaaattagtccatgccttttatttgggtttatctgattgtaattttgctttgttttcgatagctgtctcgaaaagagctgcccctactcttgagatggccgagcgacgcaggctcttgttgactctcccatgcagtcttaggtcatgtgactttcttctcaatgagatcaaccagaggtatgtggcaaggagtttacttgcgattataaatatcccaagtattcttcttggaagcaagttcttgtcccgaacgaggagaaagctcaagatcgcaaggctcaggcacaataccccaagaatactgcccctcgggaagccaaagaaggagcatcctgaggtaatcaatgtggttggtcacccacagtgcttagggccgagcgtaatactctagtttcatttcgagatagccgctataacttttacacctagaatcccctcctcatagatcgtattacacataggcttgatagtttgtatcccaggttccacgtccaaattaactgtattgagtcgtaccatgggatagccgagcagtacggtaccatgacagatagggcaagtcatttagacacgagatgggatttagaaccaattaatccctatgatatattcaggatcacatgttgtagggattttagtggatattatagtccttcttcctcatcttctagtgagtatggtaaattccttaggtaggaaattatgccccaatatacccttttacttgtttttcaataaatgctaacactttgtcttgtctcgcaaaaatgaacttcgatggtctcgtccacagaaagggaaagaagaggttgaccatctcgtaggccccattagacgtcgaggttgatcccttaaagaggtccaagaaaactacggctaataagaagcgagcctcctagaatgctaatctcgaggtccctgaaagagagacccaagatccaatccctcctccggcccccgcaagtaccaacgagccaattcccaaagtgacccaagcctcctcttcctcgagccaggccctcaaaactttgcctgtcgaggctggaaaaactagctcagattacactgcagtgtttggtgcaatattttggcgtcatttcaaggctttcctcccccatgaatgggatttaatcaatcatggggatctggggcaaatgcttataaggagtatatctcacagcctctaggtaaattttcttatctttatttgctcacttcttttattttttttttatccttcaaaatatttatgtatttttgtttgttggtttcacaacatctttcatttcttttttgcccagcaatgaggcatggaaaagatcatgtatatggagggtgagatccagaacttgataggctagtgcgaggttgtgattaagcaatataatgatgcccaactggagattactcgcattactaaagatgccgagaaggtgaagaagaatcttcaggccgagcatgaagctgccaacaaggaggcaaaggacaagactgatgaatgcccgaagttcaaaagggaagtcgatgtagccatggtaacacctgatgggaaagaggccaaaaccattgaacgatgcaacattgttggccttcgtaccatttaccaagcttcgatgtcaaatccgaaaatggatacgagtttcttggaagagtccgaggaggaaatccttgttgggttttatgccctaaataaagctcatttca

SEQ ID NO: 33291 - DNA, 1631 bp, Cannabis sativa
  modified_base (360)..(360): a, c, t, g, unknown or other
tgatcccagatttatagggattgcctttgtgattcacgatgcaagtgctaaagttgctaagtgttgatatactgtttggattgtccacttctcggctaggaggacttcgtccgcataggtatatatggtgttttgttcggaatatctccttcgggcagatacgggcagttgattccacgtatcaccagtgtgtgatgctaaatcaagtaattttcattaatgatttatttaaaataaatagactaaaatatattgttttaattaaaaaaattaataattagtttatgaattatctagatagatattttctaagtagacttttgatatttttctagatacatttaattaaataagaaaatnaatatttaagttgattttattctataaacttcaatatttgatatttttcttgagatatttaattaaataggaaaattatatttatattgaaaattaatttatttaattttagtccaacatgaattagaataatttttccagttttattttattttattttaatgaaattttgaaaatgtatttcttaatacattggatttcgaaattcagttgtatattaatagaaaattaaatttgagttgaaaattaatgctaaggatggaaaataaattttatttttcagatcttcctaaggtataattttataaatattaaattgttatactcgaaattcggtaagcacatcagaataagtgatcttcataaaagtattgaattaggagttgttcactgatctggtgatgagggcaactagcacacaaccttttaaatctttcccaatattcataaagtgactctccaataacttactgaattccacatattttttttctgatacttccaactttagaggttgggaaatatcgctccaagaaaacaatcttcatggcattccatgtcttaatagtacccagtggtagatagtacaaccactccttagcggcatctttcaaagagaaagggaaggcccgcagcttgatttgttcttcagtaactgatgtaggtttcatactagagttcacaatatgaaactccttcaagtgcttgttggggtcttctccgggtaatccatgaaaagcttgtagtaagtggatcaagtcggatttcagttcaaaattgacatccaaaggtggataatggatgcacagtggttgctggtccaaattcggcgcgaccaactccttcgatgtcctattttgagccatggtcttgtgagaagtaatcgagtcgtcagaatctaactcgagattagttgatagtggttgtttgtttggcaggaccaagaggttgaaagagtgggttgtcggtgatagtcttggatgatcaagaagcagatgatgactcaagatattgtttaacccttgaaagtctctcttgagtatcgtttgcactagacatgtacacctgagattatcaaagtaaaacaagttagtaacaaaaattagatatgaataataaaataaaaacaatagtccccaacaacagcgccaaaaatttgatgtgtgtcgtatgccatatcaaatttactatttttttaatttcaatacctccaattattttagtataattgttagtaagggacgataccgcgaggactatgtttattcaat

SEQ ID NO: 33292 - DNA, 1229 bp, Cannabis sativa
ataataaagaaattacaaaaatataatttatatttttacgatttttataattttatttacaaaaaatacggtatttttatgttgtactcttgttaatttgttgttattttttataatctgtattttatttttattgttgtttagatattttttttgttactaatttttttattattttcatgttatttctataaaaaaaaactgtaaaattgtaaaaatataagaatataaaacttttataaaaaatagtattttatgtaattattctttaaaatttggtcctttaaaataaataaatagagattgtttatattaaaatcacaattttattactagtctttttttttttcttttttgtaagatacatttataaatttttagttataaattttttatttatgtatgtataatagaaaaaaaaaaatcaaactttagaaattgagagtcttatataataatttaagctgcctaatatttaagacgatcctgattgtatgtatgaatttttgtatttatttgatttatgagaaatatgttttgctgaatatacagatgacacaatataaaatatattatctattaggttaaataaaaatttaagatacatttgttcgagcaaaaaaaatattattctaaaatttcaattacttttttattctagggataaaatatatttaatttatataaataagttattttcttcttaataataatgggaaaaggattgatttaaaaaaggtattatatttgtttgatttaaaaaaggggaagatgatagagataaagatatgtgtgggttgggtttggtttgtgtgtgtttatatttaattagaattaattatgttagagatgattatctgttcaaataattaaaatatactttattcaaaaaaaaagtggaaaacctgccaagtctcgatctatttattattattattataaaattagtaatttgcggttaaactctttaaatttttaaattttgtaaggtgtaatttttatattgaaaaaattatggttaaagttctcaatttatatttttgttttgattagcactttttctattaatttttggttattaagtgctaaataaatttatcattgtacacgtggcaaaattttattaaactacttatttaattgagcattgttattgggcaccagtggtgcctagcaccttctaaatgtgtcgacttgcaattggctagcgatactctataaaaattatt

SEQ ID NO: 33293 - DNA, 1463 bp, Cannabis sativa
ttgatctcccttgcacaaaagctcattgattctggtttaccaatcccggaagaacctgggagagtctcaaacacagtaatttagatatgcatttgtagattgtagtgcagcaagcaatcgacctgaactccacagctttagccaggttttctgtcttgggaataagagtgatcatagtggcatgaagttcccgtggcatgatacttgtcaagaaaaaattctccactgctttagtgatttcagctccaatttcagtccacattgtcttgaagaacccagctccatagccatcccgaccaggtgagttggtgtccggtatactatataaagcctcctttatctccttgttagagaactgtttgattaaagccaattgttgctctctgtttagcttgttccccatctccatacaatctttttttaagtcttgagtaggccttgtgctagtccccatatagccttgaaagtgcttaatgaagtgctcaacaacctcactgaaattgtctacaacctcaccatgatcattggtataagtaactatgctattttccatttttcttttttttttcttcaggaaagaatggaaaaacgcattgttctcatcccctttgcttaaccaggttactttgctcctctgtctcaagaagctgtggtacatcttctcttgggtattaaatgtcaatgaagcccctttttctgtctgttgagaagtggtatcatgcaggtgttcttgagcttgagttctagcttgaatgtacaggtccttcgcttcttgataatttcttccaatatccccaactctctctctattgagtctcttgatgcagtgtttcagtctcataagtttcaaatacaagcctgtcataccctctcttctcatcggtttttgccagctttcaagaaatactttaaattcagagagatcagcccaaaagttgtagtatctgaatggtttgaacccaatctccacattaggggtagtcaacaccacacataaacaatgatctgagatggtctcccaactataatgagcttttgtcttaggaaagttgtctgtccactcctcattcacaaaagtatgatcaattttggaatagatccttttgtccccatcttgattattagtccaagtataacccgaacctgtcttaaggagtctatccatgtgactttgagctagccaatcagtggaatcttttaaataattcaaagtgacctccttgcctcccttcctatcctccaagtcaaacagagaattacaatcccctgttattaaccaaggcatagtagtgaccttgaggttaattaacccctcccaaagatcctttctctcctctcctgtattaaagccatacacaaaagtgatattcatagcttcaaaatagccaggtattttcacataacaatgaagaaactgagagtcttctctatcaacaatgactcaagtaaaacttctcctccat

SEQ ID NO: 33294 - DNA, 2157 bp, Cannabis sativa
cctgcaggtgcaaacattttgccatgcaaacaaaagaaaaagcaaagaagagatgctgatgagccaccgcttccaaattgcacaaagacaaggagaactggtgcaattatgcattgtaggaaatgcaagaaaccaggacacagtaagaggacttgaaagaatgatgcaacacctgctcctactcctgctccaactcagataacacatttttagctgcaatttggtatacatatgtcctttggatactaaagtcaataaaataacaatcattatttttgtttagggccaaaagaataagggggcatgccaccaatcaaaaatccaaacaagaaaacgttgaagagaaggaaaagaagggaaaaggaaaaagctaggaaggctgcagaaggtggtggagctgggtcaactgaggctgaagggtctaatacataggattgagaagtgtttttttgtagcatcttgtgcacaaaatgttgtattttgaattagtgcacatgatgcttacttttgacacaaacactttagtgtttagggattttaattttcgttttttgaactgctattgctgcacattatatgctgtgtctgaattagtgcatataatacttacatttgacacaaactctttagtgtttaggccttctaatttatgttttttgttgctggtattagtacacattttatcgtacaagactaaaagcaatgtttgttttttactaattataagtagattatatttcattgatcaataaaagttacacttgttacaattaattgctcatgctttaagtacaaacaacaaaatacatattgcaatacatattacaagatatctaatacatccactcctttgacatttacaggtttgacttccatttaggaattcatcaatgctgggaggtgttatcatcaaaactctccacaacttcatatctatcattgcagctcattgacttctcaacaggttcagaatggtcattgttagttacaaagttctcaacaccttcagatgatagcatgaacacttctctctccaaattttgaatcatccttagtagcctaggaatcacatccttcgatcgttgacaaatgggtgggtcataccacatccaaaagccacacccatctacttcctacaacaactatgaacaattgtgaacagaaggaaaataaaaattagggcaaaaaaaatctcacatcatggcatgggcatctaatgaacctttgtccaggattcctatttgtccaggatgttgtcatctgtgcaactcgagggggacgacatttgcagtagtgaggccccgcagatatttttttgctggtttgtggtcttcagcttcgacaatggaggacaaatacaggtacccaatacttttacttttctttctcttgtcttcgacttcgaccggtgggtgaaaatggggtctgaggattttccctcctttgcaaaccgagatcttcgtgactgagaaatatagatctgggtttggaggttttaaatttaaatctgtattttttttcttttaatcttttgtcttttcattttcctaattaggcattagttaaaaacaaaattcattaactttttctttttttttttaatttccaaatcataataattaatgacatggcaagcaattgcttatttggattgagtcaagtaggcaaataacggggtcagggggacaaaggtgtgtttttgctaacagtatagtagttttaagggttatcctggacaaatttagattttagaagttaagtgagaccaaaacaaaaattttaggggttttaacaccatttacccttaatatttatattgattattcttctaatatacacataaataactatttaaacttattaattattaaaaaaaaaaaaattacaactaatgttaaataaggtcaacatacacaattttcattaaataaataaaatccttgaaaattcttttagggggtgtcgtatacatttttcttaagctataaacagtataaagtaatggatggatctttagaaattagttgggatcaggttatctctcaagtatatatatacacatattttttttggcactcaagtttatattattagttgagaggtatttggcaacaaataataaattaaatttcctatgtataattattattttataaa

SEQ ID NO: 33295 - DNA, 1159 bp, Cannabis sativa
ttttattattagttaagtaatgtatcattattcttgtgccacgtgtcttttgaaaccaaaattggacgtcaaccgtttccaccttcaaaacaaaaccgtgtcactttggtttcatacatcatttaattatcattattatttgagagggaatattacaactttgaacgtttccactttgtattatttatttcttggatattatcaccccattaatcgacattgcttgggaaaacaataaattaatgaagccaataaatcattgtgtcgtgtcttcttcttttattttgttttttaaaacaatgttcattaggttataaaaacaaatttagtatagtaacactacgtttggtagagtggtggatggagataaagaaatgtaaaatcaagagagaggagaaaggagaggaaaattgaaggtagaccttttctccctttgttatgctggacaaagtaaaaaaggtcttttccaatcaattcatgatcgaatatggaataagctttctaattggaagtctccctcgttcacgtcgagtggaagggaagtgctcataaaatctatcatcactacaagaaaaaagacttttattggcaaaatttattaattttagtagcataagttacttttgcttgacaaattaattaattatgctggtattactaatccaaagttttggctacatagtgaagtttttgtcggtgcatatattcgctggtaaagctatttaatgtcggtgatgttatctaacttcatcagcaatctgatattttttgtcggcacactatccaatctcactgccaaaaagttaagtaaatgtagagtcgaaaggctctattttctctggtcgttgaagtagttttgttggtgcacatttgcgccagcaaaagctgcgaaaaatttggtgggaaatttctcacatgacgaaaacgtgtgcattaaattagtgggaaaagttatgctggcgaacaaatgcaccgaaaaaactaaaaaatagaaattgaaacgttgcctttaagggtttttaaacaaatttcagggacgcattttcctctttttccagtgcacaacttgttgagaatattttaccaagatctagatttactaataagtatgttgaattaacatcctaaatatgagttctctaaaacaatgaaataaaca

SEQ ID NO: 33296 - DNA, 1377 bp, Cannabis sativa
ctacaatgatgaaggagagccagtgtctgaagcaggtgatgtcttagagggtggccaggactacgttgttgaggaatataccgaggctcatcctttgagaagaaactttgaacgagagatcgatggatttctccaccatccgtgatgaccatgaagaaattgaccaatctgtttgagcacgatctcttggggaatgtcgaatgcttccttccctccctcggccaactagctaccaaccctgaagagggttattgtccttggtcaggagctcacaccaagcagggtttaatgctgccctttcttccatatttcaagaagatggccaattactaccacattagtctaacccaattcactcctaagggcctcaagtatatgtctggcctgtttcgtactctatgcctcacaaggatggggtgagtcgtcccccacagcatcaattggttgttcgatctaaagtcaagccccaagcagaacaggtcggggtacttctaattttttcaaattgagaagtcgtggttgacgggcaccacggacaccaaggtgacaaagataggaggcttcatagatgagtattactttattaagggggtggacaccaattatactagtttttagcagattttgtcctactaccgccctccgttcacaatggaactcaggaagagggctcaaaaaattctccaactctcttttgatgaatggaacatctctcttctggctatgactcccaactttgtcaaatataagctttatccagttgatttttttccaaaggctgaggaggcagtagaagaagttgtacccagacaggaggctctgagcaagaagaagaaaaagaggaaggctcctccaagtaaccaagtacccattgagcgatccatcaggattagagatggccctaaaagggttgctcaaccgtctgccccagtggttggaaagggaaaaaatcatcctggtggagcaggaacaggaggattctttagacgacaatgccccttctttacttgatcgagaaaatgctcctgcctacacgtagggtactttaacttttattaaaattttatttgcatttacctagatcgcacttgtattgacattcttgtttaattcatgtacagctatgtctcagaaggtgttgccacttggaagaaaaggtcgggtgatggctccagccagatatctccggtcaaatggtcaaaggtggacgaagttctgcctaatgacatagtcccgagcaccgtcaaggagaagagttctgttgtgtctccaattgaggttcctaaggaagcagtgttggaggtggacccattggccaagaagatctaaaaatgtcaggaggtagctaccgcgtccaagggcacaaaaagggagggg

SEQ ID NO: 33297 - DNA, 1465 bp, Cannabis sativa
cataaatctaactctaaagaccataagaaatttggctctagagttagacttcagtcgaagtctctattttaagcccagtctcatctaacttagccctaagtgaagtatatataaaaaaaaaaaaagtgatgagaagagagaattaacctaagttttcattgtcggactactctcttctcttctttctttgtatatattccctctctaaaatatagtttcactctattcaatgtgatactcaaacctttgtggaagactgtgttgaacacaattgaaggagagaaaatttaagttcagatcttgataatcctctgctacagacaggaatcaagggttaaaaatctgaatggaaaaagtcatattattctgctaccattaatgtaacatttctataacttttatgtgtcatatttcactgttttaggaaattcatatttagaatgttagattataaatttataatcaaacatatgtctcgtttggcacagtttttgaaaaagttaaaagctgctttttgaaaaagctataataaaaatgtgtttggtaagctgttaaaaaacagctttttgaaatttttttggagaagctacagctaaaagctaaagctactccaacccaacttttaaaaaaaaattgttttgattaaaagactataataatttttttcctgaaactatataaacttatttattatatattaaaaaaataaaaaatatttaaaataaataattattaaatctgttatttttttttaaaaaaaataatttatattttatttatatattaacaaacagcatcaatctagaatttttcttatatacttgagtttctaatttttttttttatatttgataaaatataatgtaaaaatactataaattatttttatcaaatgcatataaatttatatttacaaaaaaaattaaaaatatgtagaaaataaaatattataaaaaataaatttttacatatttgtgattataataaactagattataacattatcactataatagatcttaacaactgatagtactttgaaatttataatttaccaaacactcagctcagcttttttctacagttctgatgcagctgttttttctcacagcacagctacagctgctttttcccacagcacatctatgccaaactgactcatacatgttagtaaatctagatcctagtaaaacaacatctaacacgaaattatgcctcttgaacttttcaggccgataaaaattctccttgaactattgagattgttagattcaagtacttatattcaatttcattaatttttactaacgtgatgattgtctatgtcccaaattgtgcccctaaatttttatatatactaaatcgtgcatactttgacatgtatcaaaatcgtgccctatgaacttttatccacgtcaaacatctgttagtaaaattaaaataaagtccttcgatccaaaatttt

SEQ ID NO: 33298 - DNA, 2163 bp, Cannabis sativa
gtacatagtgcatgtggtacaacattcagtaatactcaggatacggttcagctctaccaacactagtatgggatgagtacttagtgcatgtggtatagacatcgtacctttgttaagaatgttcttaatcatctattaagccttgtagataggtgtatgggcgcctatgtacaagtcagtagtatgttatgtgttatatgcttttcttacttagtttttcgattcacaattattatttacaatgtgtaggtgaaggagaggctaacactgagcaccagtgagtctagagcttggggatgattgtacaggccaagatggttagacttgaagaattcggtctcaggacgacttgggccatatttttgtagtcattgtgcgatgtgtttataaacgtgcattttagacatgaatataaattttaaagacgggatctcaactttttatacagataaatatatatatgactgtaaggtttaaagtttaaataaaagtttaaaattgacacaatttttgagaaactcttcattagcaaaagaatactgtagcacatctaggcaatatgctgttacaattttgttattagagccgccagattgcttactgaagatcgtcaaaataggtataatcaacgtaaaaaataagctcaactcacggttcagtaagcctctacttatttagtaagttatgtgactagaaaagtatgataggaagcatgctaggaatatgctagttgtttaaattcgttgcctaaaatccatgtacgtgctatttggattatatgtaatcgttgtcttacctatctaacttatgaatttgcaggccaagtcttgtaatatggacatctagcaaactacaaggagtctaggtaatatggttatgaccggaggcggtcgtggaggccaaaatcctaaaatctccatggacgtggcagaggccgtgggagatttcaaagaggtggtcatgaaaatctaccacaaactcctcagaattgggagcaaaggtttgcagaaatgcaagcccgaattcatccacaagatgaggagatttagaggctgagacagtagtgtcctcctacaatgcctcctcagcaagtgccagtcgctctagttcaagtggtgccagcaaaatagcatgttgctagcaaccgtatggagtctttgtatgaacagtttcgtaaacaagaacctcaagcttttttgggaggtccaaatttcatgaaggtttagcagtggttgacagtaattgagagaattttgaactttatgaacatcaccaataatgactaggtaacctgtgccacgttttagttctaggaggacacccttgtgtggtgggaaatggtgtccctcactcgggacgtcactacaatgacctgggaagagtttcaggatctattttgttgatctcacttttggtcaacgactctagatccttaaagtaacaataaatcaacaagatttaagagagatgtaaattgaggaaaactaaaacaacaatatattatagaggtttagccatattattctagtaatggcctacatctaggtcacttttagagatttctttttgattgtctccctatattcccttgttggattacatcttagatggctcccacttaacagtaggagtctagttaaattcatacctctcactattggtactaagggacattttattgtgatatttatctttatttggaaacaataaattccttctagactaagttatcaacatagcattctactattaacattaatgtaaaatacttacttaagattaagtaatcattagagataccataaaatatttcataggactagaaattgtgcttgagtcattcaaatagacattgtaagatttcctatcttatcctcataattttgataattataactatccatgcaaatggttagattaactttccttagttttattttaaagtttctttcttgaacatatcattctaagtcatcattagtgtcataattataggctggatttattaaaatcctcccacaaagataaggtattgtgattctatgtctaggaactttagtggtatctattactagtgtaggagatattggaacatatacatgatcaagaataattttactagtttcctagtttcaatatcatattatatctatgtctaattaa

SEQ ID NO: 33299 - DNA, 4322 bp, Cannabis sativa
gtgcttgttgagacagtgctgggtttatttcccgagccagtctttaacaacttcatctcttttcttgcttcctattttccaacaaacacttaagccctttcattgaactcagttattttttttactaggcgaccttgtaggttatcccatagctcacatttagcagtggagagatcagtagtgatccctgcaagaagagcagtaagctaggtactatcgtctaggtttctcaccctcgcagtagctgttctaaaataacttaagtaggccttaagcgtctcgcccggttgctgctttatgttagtgagtgaggacgcctcgggttgcctatcccttgtggcctggaactattttttgaagtccttagacaagtgtttccaagaggtgattgaatgatgagtaaatttgttgaactagcagctccctactccaactagcgaagtggggaataaagtacagcgtagattattcgtaacattgctcgctcgcatgatagtattgaaattatttaaatgcgagactggatatgtggtcccatcatacgacgagacgtgagagttcttgaatccctaggggaatgtagtattcatgatgtctagatggaaaggatcgagctcctcatttgagtcgtatctagactactttccatgttccccaacttgatacctcctgaatttatccttcaacttatcatttcggaattggataggatcctcttacttttgaccgagctgttggcgaagatcagatttttttttgttcaagtgattatgaaggtctcgttgttgctggttatagttactaacggacctcgtcctactcatggacctcgtcctgctcatggatcttgtcctattcatggacctcgtccttgagtaactttgagttctactcgtgcctgtagtttctcgattagtattgcgatgcgtttcgtctccccctcgcgttgatcgactatgggttcttgtgcaacctgagctgacactcgcctcatcacgtcccgtccttctcccttgggtatgggtcgttgcatggcccctacaggggtttgcacgtgccccttccgtattggtgcaaaaaggatgttggcaatgtctcggtggcaacccacctgtcccaagttcagtcccgagatttcccttattttcactggggatttcctgttccctggtcacgggtcgcctcctattctcatttctgtgagaaggctccggttggtcatttggttgttcattctcagggggaccctcagtttccccaggttgttcttcctgagtgttcagaggattctcttgagtcatctcttgccttctagttcgtgaaccgtgaggtctgcctcgtggtcttctcactccaagattgggttggttttgggtgttgttttcctgtgccgccctggccgcgactgcctcctgttccaacttaacatttttttcagtttccctcctctaggtggtgcttgaggtggtgattttccaactcaacaactggcacgtatctcgtgggatcataagcaccatcattttcatattccataggttgagcatccctaacattgggttcttcattccctgcttctgggttctgacgattttcacactgagtcctccttcaacgtgtggaccgtgtattttggccaccttcatattgggtccttctggaacgagtggttcgagttgaacgtgaattgggaggcctctgtgagcccattggctcttttccaggacggtgagttgtctcttcaagatgagtatcaacattttcttcattatcagccatggatataaggttttttttttggttaggagggttttctctaagcttttttcacgaaggctgtcactaaaagcaccaaactattaatgcaaattttcgttaaagatattaaagcctatttcatgattaatttgcacagaattaatagtgaaagaagaagaaataacacagctttttttacgtagttttacagttaaaattctacatagtccacgagtctatcttgttagatttctctgatacaaaactgggattctttcgctaaaggtctttccgtccctttttcggtgtactctgcccctatttatagttacaaagggagaaagttaattacaaccagattaatattgcacaataatattcccctgaaattatgagatttgattacttcctacgtaaaataaatgcggttattatttgaaaatcacacaactgtgatttattcgcttttacttggtcaatgttgacgtagatttaggtacactgcaaaatgtatcttcgctggatcatctcgctgggttagcaacaataaccctgacagcgagctgaagctcttcccctgtctttccgtggttgattatataaatatcattgtttctgctattgaagacataacgctccatcagacaatcacagttcttggtgataaggtgaacttcagtagccaacatcattttaatgtcaacttctatctgagagagctaactcgacggagtagtagatctcattgaaagatgtctagagctaattagtgaaggtaccatgagtatgccttcccatagcgagatggatgcctcgctatttgttgttcgtaatcaaccaactattatgcttagtttgtataatgtatattatacgctaagtgttctaacaatcaacatgtctcatctctaccttcttatacgtagcgaggttgatgcctcgcctggtattatttaggccactcttttaattgtgtcttctgatgtagaatagtttctcgtcaacgcatgaggcaataatttgtatatccttatctcgcttaagaatttacagtcagcgagtcataaatatactctatcagcatcgcatttaatgagttattctattttaatatcatttaatataattgccattatattcgttgattcgtattctcccaggttgacacgtgtcctcctctgacgtaccagccgaattttgggtataacaataactaattgtaactagctactagttatataagttgcaattaattaactagtttctcacaactagtaactaattgtatctagttactagttatgtaagttgtaatcaataaactagtttcttagaattagtaactaataactagttactagttatagaagttataactaatcatgttattatattacccattccaaatattgattagtttgtatttttttcttaagaaagcaaacgagcatagtaaaataagatgaagatgaatgggaggataataatggtggcaatgaggatggcgatgatgagaggaatttacaatacaattcgacaagcgatgatgtcttagataattttgtaatcatcgttgaatttgctattatgagatattttatggtatgtttgaaatttattatgtgacattttattcatccttataattctaaagtattatttcaatatagtttttaaggcttatacctcaaggcttatttacgttatgtataaattaattaccacacatatatgaattttactaaaatttaacactttatttttaatatttatgtatttttagtgaaatttatcttaattctatcaaaattttagtagcataatgactataatcagacaattttaaaaattttaaacatccaaaatacacaagacaatacaacacaaacaaaatagtattaatatacatataattctaccaatccgatcgcagtacatgtattagcctacttcactacagatgaatatttaagatattcaaattcatctaacatgcatattattccactcattcaatcgcattacagtatatcacagaacctacttcactacaaatgaatatttaagatattcaaactcatctacacatgcatattattccacccatccgactgtagtataatatatcacagaacctacttcactacggatgaatatttaagatgttcaaactcttctcagcattgataattaactaataacaaaacttagtgaatgaatacatgtagctagctaaaaatcgattaacactaaataatttagaccattacaaattacctcacaacctacaatataatgatataatacaaaattaaaatttttattatttaactacttattagttatatcatttatgagtaactagttactaactagttaagttgtcagtttattactaactagttagtaataaaaatacataaataggaatgaaaattgatcactagttactagttagtaaaaaatataaaaacacataaatagggttgtaaaaaaaattaaatttaatatgtaaataaaaaaacaaataaaagagctattttttttttcatcttacatttaca

SEQ ID NO: 33300 - DNA, 1255 bp, Cannabis sativa
acttattgccaaaatagtcatcacttctcaaaacaaattccaacccatttatatttatttttaaatttataagaagacgggcaaagaaccatcttttgagcaatgaactaaagtgatactatatatcaccaaaacatcacagccaaacaaaaatttacaaactataagtatatgacaaattatatatttaagatgtcatatgcaatgcagattgttttgaaaggcgaggcgaggaggctttgcctagcctaaaacatcagacacacgcacatatcttacctattatataaatgtttaactctactttgttgtgtatttaacactttgttagtaaattttaacactttgttaataaattttaacagaggtctgttaatacaaaagaattgtattgaatctattcattgcatccaatcatatgaataaacacccataaaaaataaagtacatttgttcttaaagttgtcataagtcatatgtgtgttattttgaccaaaatgaagaagcatatcaatgctgttaacaatacacagtaggaggagaggtatatcgatctccactaaaattaaattagagttttattgatccagcctatgaatttctagaagaaagaatgtactctccaaagggttttgtaatttgtatcaacaatgattaagatttttgccaattgcagtagcaatctaatttgattccattatctcccaactcccattctgcactttccctttctatataaagcattcatgtatcaatctcatttagcaaattggtcacactcaccattatagaaattttctcactcatgcagtcttctattttttcagtaatttttatccgtaaaattactttttgtttaattttatttttatagtaattttttcttttatgaataatacttagaactttgaaactctataaatatatacatatatatatatataaatatacagcgtctattatgtttttacttattgatctctatgatttcaaagtctagacacaataaactagatagttcaaagtatagacactgaaattgatacaaattcaaaaaattaaaagttatatttgatttgataacaattcaaaaacagaatccccaaaaaagaagaatagaaacccagttcgaatatcaatttacaagatttactatcaatgaccagatgagcaaaagatttaccctgagttgttgccgtttgcgagggagaagatacgtcgttttcgatgccgtcgtcggcaatgagcagaagag

SEQ ID NO: 33301 - DNA, 1130 bp, Cannabis sativa
  modified_base (932)..(953): a, c, t, g, unknown or other
attaaaaattcagctccaagggtttcttgacatagggttttctcggcctagtgtgtcacctagggagctccggtactgtttgtcaagaagaaagacgggtccttccggatgtgcattgactaccgggaattgaataagctaacaatcaagaataaatatcctttccctaggatcgatgatctttttgatcaactttaggggaagacggtcttttaaaatattgatatccgatcaggttatcattagttgagaatccgataggaggaaatcccaaagacggctttccgtactaggtatggacattacgaatttctggttatgttgtttggactaaccaatgctcccgcagctttcatggatatgatgaatagggtattcaaggatttcctcgatatctgtgttattatgtttatcgatgacatcctgtggttctgcaacggcttcgagaaaataagttatacaccaaattcaagaagtgtgaatttttgctgtctcaggtgtcctttcttggacacattgtgagcaaagatgtgatcaaggtggatcctggaaagatagaatccgtcagggattggccaagaccaaaaatagtgactgaagttaggatcttcttgggactggctggatattatcgtcggtttgtagaaggcttctctaaaatttcaacacccttaaccgagcttactaaaaagaatcagcgtttcgtatggacagataagtgtgaggctagcttctaggagctaaagcagagattaattatagctccagtgttagccctaccttttgataaggaaaaattcatagtgtattgtgatacatctagacagggtctagggtgtgtactgatgcaggctgatcgggttattgcctatgcctctcgtcagttgacagagtatgaccagcggttcccgactcatgacctagaacttgcnnnnnnnnnnnnnnnnnnnnnnatttggcggcattatctttacggagagagatgtgaaatttatactgaccataaaagtctcaaatacttcttgacttagaaagatttgaatatgacacataggcattggttggagttggttaaggattacgattgtgaaatcctttaccatcctgggaaggccaatgtagtggccgat

SEQ ID NO: 33302 - DNA, 1356 bp, Cannabis sativa
gttaaggaatgtgagttgaatatgaagtcttatattgatgcgaaaattgatggaagtttgaagttttatttggacatgaagttcaatgagttgagaaattattttataactggaaatgatggtggaaatgttgaagtcagtgatgaggatacttttaatatggtaaggtttacatatttttttttattgatagtgtctattattatttttaatttgctatttttgttcattgagtatctgattagttataatgctgagtttttattgattgtcttttaatttaattcagaatgatgatgaccttgtattgacaaatgaacaaagccagttgtggaggtaatattagctaaagaagaaactaataggtttactgttttttaattatttgttagttgtttatgtgtaaatttttgtttgattattttgttaaatctgttttgtttttcatgttcttttataatttattgtttgtaatggaaacttttatgttcttttatgattttttgcatattttagtggtattttgtttaagattactgttgtggttttatgttctagattaattattggtttttatgtaaactttttttttattatttttgataatatttttaatctaatgttgtttattttttgtggtatcctgtttgtgcgtaaatttttttgattatttttgataatatttgtaatctaatgtaaacttttttaggttgaaaaagttgaagatgaaatgttggtagagaataaggtaactttttaaaatttgaatgttgatgtaaattattctgtaaattactatgattatttttattatatttgtagtgtaatgtgaaattatctacaggttgaaaagttttagatgatacggctgtagagaataagataacttttttttttatatttttattgtagttttagttttgtagtttacttgttatatttaaacatcagtaacaatttggtttatgatttatttttttattgcagatcgatggtggtagtcagccttcttttgatataatgtgttttattacatcacaggctggtgatgataatcagaacgatgataagacataagtggttgatgatgatcatgagatgttcaaaaacaggtctaacaagttaaggaaaatgataatgatggcgatggcgatgacaaggttagagtttgtgttttatttatatattttgttatgtgagttatatatatatttgcatattgataatttatatttttatattatattttattttttgtagggtattggtggtgatggggtgggtgccaaggaagttaaaggtggaggtaatgttggtgcacctggtggtggagtgagtggttctggttagttagct

SEQ ID NO: 33303 - DNA, 1104 bp, Cannabis sativa
aaatagatgcacataaaaaattacaaaggaactaaatcatactaaaaccaaaataaagtgtcaaaaaatctccattaacaacctaataaaaattctagctactcgtagtcattgaaaacatctaataacaattaagaacataagaaaaatagagaaaaaagaagaactcttcgaaaaataaatgttgaaagtcttcagagtcgcatctcgcttctaatttttgtacttccaaattgtctattgagaagtactgaaaatgatcctttatatagctttttaaaaagattaaaaccctaattgttgcactttaaaagaggcaaaccgcaacaatctcttgtagtgttgcgacccgtgtcattcagccacaaaagatatatcgtcaagatttttatagacaacgaggatttaagggtttcaatgcctcaacattagataccaatgttaagctcacctctaaacttgctaaacacgatcttgctgccaaatttttgccttttagcgccctgacgttgaattctaatattgaggcgctactctgcactttctaattctttaacattagaagctctaatcacaccgaatcttttggatttctttcttggattattttctttgtgctttcgcgacaaaactttatttaattcatctttcttacacattttttttctcggatttgctctattcttctccaatattgaacttgaaaatattaacaaccgaaagcataaaactgcacaaagcacggctagaacttattaaaaaatacctttaaaacctatttaaaaatagtactaattaagtcctaacacctagctctgcgcccagattgactttggaaaaccccagaatggaagttcagactttgataactcgtttccaacccactgtaatgtccccacttctagcctccattgggtcattacacccacggaataatagctcttatatacgagtacgtcactctgactgcttcattgactgatgactggccttacagaccaacacgagtgtgttttagcatgttttttcctcactctcacacttcttgggaaaacttcacaggaggtcacccatcctaaaattactccaggtcaagcacactta

SEQ ID NO: 33304 - DNA, 1672 bp, Cannabis sativa
aagtttatgacttaagggcatgattgtcataattttaatatgtggataccataaagacaatttctaatttgatgaggggtcaaattagaaatagtaaaaaaagattaattactgttttttcaattattagtaaacaggtattggtccctattttttgtatccttcatatcgtatcattctctcttgtatccccaccattaagagactaaagtttcagagaaaaattttaatgtaaaaattagaagatcataccattcaaaagacgattttattgactttggtacactttcgctaatcttcaattctattgtttaattctcataaattaattagaattataaattaaaatttatagtgttctgaaccgttaatactaagcatggcaaaattttttcaaaagctggtacatattaaagcatctaaaaacttgcatacaaattattctttaacccctttaagttcaaacatgtattagttctttcagcttaagaattctcctcaaatgtattttctataacgaatccaacaattctgtacagaaatatatgaagaatttagaaaacaagagaaagaggttagctttagtgatttcaaccaaattaaatatggtataaaatgagtaaagatatgtgtgctaaaattatgttaagtttgtttcatagttgaaggtttagttagttatttgacttctttcaaacctaaaatgtaatttaggtacttatcgtaataatttttaaaataagtaataagcaaccaagaacattttaatggaatggaaaaaactagctagctagagtaatatacatgagtatattgctataggctaataatattttaatatactaatatttattgatgctttcaatgaccacccatgttcttttttgagtttttgcaagatgttcttttttgagtttaggtgattaatttttctactaaaagtagaataattgaagtatattaatgtttgagtgtttcattagcaacatgagtcaaagtaatataatctccaaaacaatatatacaatacatatttatccaattgaattcaccttattttttaaaaatgcatttttttttatattttatttataattttttggcttaaaattttaattataaaaatacgtttgtaaaattttaaaattataaaatacactttgttcagaaaaaaataaaaaaagaacgagaaatcaacttcaagaaaactataaattaactataaaataataaaaaacaaactcatgacaactataaacaaattataaaacaactacaatcaatttattattttaaattttttattgaaaaaatatttttgtaaattaaaaaatttcaatattaatgtttttttgtattttttttttaaaatttttagactattatctattttttttgtaatttaattcaccttaaattatataatttatatatttttttaactatttataaaattcatatcaaacaacgtgtgggaggcccagtcctccgctgtgacaagttcacatgaaaagtaaaaagaaaattactctacatacttcttttaatttgatgcatttaatttttaccctctctttaaaaatctattatatttatcttttttttttttcaatcattctaccaatttcactcctatcatttcacgataattttcattcttctctaatcaaaa

SEQ ID NO: 33305 - DNA, 2068 bp, Cannabis sativa
ttatttttgttttgatttccaaatgtatttttgtgtttaattatattttgttcatttgatctgtgtgtctgtttctttataatttttttatagttgctttatactttcaacactattattaattattagataacatttttaagtattgatcatatttatctttatctttttcacttcttttcatcatatatgttctctgtggtatccatatatatatatatatataacatcaaggagcaaatataagaactatcctaaaaattgatattgaaagagcttaattgggtcggtctactacttttttcatatttatgtattttatgtgtttctatatgttttgttgtttatattaggttttgttttcatctatgtttatgcttatgtaatttttttactttttgctctgtgtgactattttttcaaggttgtttttaggtgtattacggttttgaaacttttgtttgtccattcattattttatctttcttatttaaatgcagccttctattgagggatgttaacctacccaatctgaaagacttttgggcaaaggttgctggccgttgtatgcggtttaacgatgaagcattttatttgatttcttgtctggaatgttttggtgattacaataaattgttatttacccaggaatcaaaccaattagttgatgtatattttcctggaacgaaaactattgactgtaagtctattgaagatgcttttttgggcactaggtggggccatgatgagtctcttagtttgaaattcaccgttctttatttcatacattgatgccttctaagtaacactcttgagaaggaagtttttaggtcagaattagatctcattaatagcggtcgttgggataaatattgttggggtaggtagtcctttgagttgacaattgattcattcaaaggtatagttaaacatggtatcaagataaaaaaaataagaaatataagagaaaaagagagttcagtcttatgatggctggtatagagctttggggtgtccgtgggtgtttattgtattgttttatgaatgttatcacacgatgataaatttttttttgcaaaagagctgcatctaagattctgagaattctcaattggaccaatactgtcgggtccaaaaatctaacttttagggatttgtaaggcaagatatttgatttgccgttaaagtaggtgatttttagtttctttactattttactattgttttttctcattctgttaatctttttttatttatgtttttgttgtttttgatttataatttttgcaactttttttctagttaatgttggagaacattcatcaaactgttgaagaaaggaagtctttgaaattggatggcttatttttggatgaatctattgatgatcgtggttcattaaagccaacctttgagagtggttcctcttctaaaattctgattccgaagatatagaaatgttaaaagcgaagttggaattagttatttccagtcaagaattgttggccgaagattttatttcgttgaggtgtttagttgatcttaatttcaagtctgtgagactactatacaacaattttaatatttgtagtttagaagagactaagtctccctcatctcatctaccttagatttggctcttattctcactattgtaatataaagagagccactctagaactcacaaaaagtgtgatctgagtggtattacctctcatatcaatataaccgaaagaggcgtaggtcattacccgctaactaagggggctgaacctctataaaaatattgtgtcctttttgtttgcttattctaattgtgtacgcgtggtgattttagtaataaatacgactccactttcagttggccaaacttgaggtcaacaaaagcggttgggcttactgaagaaaacctatcaccttgtcaaatccagctgtaaggctttaatgaggacaccttgatgccaatggggaaaatccaactacctgtcaacctaaaaggtgaaaataatgttagtgtcttcaagcacaatacgttttaagtagtagattttgttggaatatattttac

SEQ ID NO: 33306 - DNA, 1263 bp, Cannabis sativa
aaagatcgtcgaagcaatttcttcgctggaactatgcttggcacacggaaacccattgtgatcgatgtatgtaaagaaagaacaagaacagttgagagtggaagaatggagataagatatcaaaggaagtggaaaagctttggttatgcttgatggtttagcttgcaatgttatgcttatttatatttgaaacaagtagaataaggatatcttgtgttggtatgaatgagtggttgatagagtgagttaggcttatgaactggggtactgatatcatcacatcacatggtattgtcttacagctctttcctttatcagtttaatgaagactcttgataggattggatatatgtagtgtagatggggtctgttgaaaggaatagtcctttacaaatcacatgctattgccttttctactcatcaatgcttattatgttttatgttctcatagttgtgtggtcaaaagccttcatatccagcttgttgaaaagaaaacagattgttactagttactatttaaaaaaaaaaaaaattaaataagaaaagagtacagattgttactttaggttgtactagcttcactagaatcacagaacatgggaagcttacattttgttcattatttttgtttctgtatttaatgcttagatctttcgtctatttgtgaacacataaaatgtccaagacatgtctcctattgcatggggccacatatattaatgagcttgtcattatcaacttggctgtcattgcccatttactggataacaaataagattttataatattgcatcataaaattttgtaggatcagataaagaaatcacattactgattgtttcagttttggtttggtggggttgagaaagaagagcaagaaaattgcagagcaaaagggaattagtattgtatttgaatcaataaagatgagtaggaagacaataccatgtgattgcacaagaactatatgcctctcactagaccccatagcttacaatccacctaagtttgaccattcatttcaatgcaatccataactgtgctacatatcttatcaaaggtattattgattataaatacacacaagcctaggatcactaccatcccaactcctcaaattcccaagtaacaagcttatttccttcaagttttctaaaaacatcttgttcattttcacttcttcattgttcctttagacactcttattattacaatcatgggtttccggtttgccagcttagttcatgccaagcaactcattca

SEQ ID NO: 33307 - DNA, 1589 bp, Cannabis sativa
cttataaaaggtatagctcttttaattcatttttcacacacagaaaactacccacaaggtcagagcttctctctcaagaatttctctctctagagtctaaagtttctgatacttaaatggttgatgtaattactatctcgtgagaaataagaactcaaaatagacgtagacgcatttctatcgtgacataggggtgaactactataacttgttgtctttctcttattaattactttttacttttcattctcatcaatctagtgagcgggtgtggcttagaagtctagtcacaatttttaagtcaatattttggtactttcattgagaaccacatctcaagaaagtcactagtcaagatagttgcaacacgttctacaagtgttgacaaacagactccattagctggccaatcaactgggggcacactgttgatggagctactcccgagactacttttgtgccccaagcaccaagagtcggccttagaaccatctcctcaactcatcctccaaggccaccagcaatagctcctcggactggcaccaacgaccagatcccacttggggagccacgtgtggagatagaagaccttgaggaggccattccttaggtagctcaactcagccaaactgtggctaacttgcaacaacaactgtgagacaatctcgataagtaacacgaacagtttcaacataggttcatggaaaactggaaaaacattgaaagtcaatgctttgagcagaagcattgaagagctaatcgtggaactgcttctcgaagaggtattttcgagttggtgagagagacaccctgtcgaccagctggtcatgtaggaactagtatccaaggtgaaaaggtgaatgctcgagctaccaatgctacacctggtaaccgagcaggcactagacaaactttaggcatggagagctctcaaagggaaagtaccttcaatcaagagcccaaaaagactcaagctaaagggtgccaactaataggttctctacttgatgttgaacgaccttgcaacaacaaacgaaccatcaggattcctccactaagtcctcctcaacattctcaagagaccaaatctcaagaccctacaaggggaattgtacctgctactcatcttgatggaagtatgtaggagacgctactttgaaactggaggctacagaatccggcaagtgaggaccaatgccctacttcatactcaaaagtaatttggagataaaagagggaagttgtgccagtactttatccgtggccccgatggccaacaatacaaatatttttctcgagtacatggagaggaactgaacctgagtgaccaattcaattctctttacatttgtgatcctgttgaagactacttcgaaggaaatagttactaaaatgttccagacggctgatcttgcagcaaattgtcccaagatgatccaacctttgtgtccaaaaagtctctggtgttgcaatcatgaccccatggtcaagagacaacaaacaaacccaagtaaacgggtgtctttgatcgacttctaaatagaagacggttggtggaagcgggagcttttagaggtgaccctgatcga

SEQ ID NO: 33308 - DNA, 3730 bp, Cannabis sativa
agtcaattcttacatgcgcccacagttactcattaggaagcttgcaagaaacttctcaaatatctaaagggtacactctactatggtctattccttaaaccagctgcatcaatggatctatatgcctattccgatgctgattgggccagctgcgttgatgatcgaagatcaacgagtggctatgttatttttctaggagggaacctcatatcctagtcagccaaaaagcagcaagtcgtggccagatccagctctgaaagtgaatttcgggccttagccaacacagctgccgagatcacatggattgcaaatctcttgactgaattacatgttccattgtctcagcaactagttatttgggtggacaaccagagtgcagccgccattgctgcaaatcctatcttccacgcgcgatcaaagcatatagaaattgatttgcactttgtaagagatcatattttagctcaaactctatctgttcgatacgttcctgcagtggatcaggtggccgatcttcttactaaacctttgtcaacagatcgatttctatatctccaaggaaaacttcaaatggcttcaaccccttttcgtttgaggggggatgataatgacaaatgaattagtttgacctgttactttttgttttaacagttgtaactgttttaactaactcttgattcttgattgtgactaattcttgtataattacacatataaataaagccttaagctcactgaaagacgtaaagcttttcctatcttcattctattttctctttgttctctctgtttgtctttcatggtcataccatctggtttttaccttcattgaagattgttaagcttctacagcaagtgagtgagaagtttggggttgagctgagtttagggtatagtctctgtagagagtttaggaatccctctcaagttgtccaagtacgtttatataaagaatcaaatctcattgtagttcaattggagggtagaatcgtcattccactccatgatttaaatatgttatcctattgttgtgggttgtacacctactttcccaaagatatcaatccacgatcaaaaaaagtagaagtagttataattgtcttggagtgctatagcccatgaattgtgtacatgatcgttgtgatattagatttggtctttgggctatccaaattactttcatgggctgatcacgtgggtcaagatagattctaataaaccctctcgcatttgagcttaccaccctttaaactatagagaaaattacatggtatacctactttactttatttgttttaatttttacctttattttcatattttaagatatacccacttttaaagatgatatcttcattaaaccccttaagttaatacaaattatatgctagacttaagtaaaaagtgaggatatattgggcaacccactcaaaaaagtgggtatatttttaaaaaatatataatatgagagtattttttattaattgaaacaaaaagaggtatttttcaacttatccctaaactatatcgtagaactaaatatttctaaggccagacaactcataattaattgggcttgtacttttcacaccacgaatatctgaggcctattctgaaatttgggctttcgttctcttgagcagcctacacaaaaatattattcgtttgcaagactttatgcccttcctgattatgattaatgaatatatatgaccacgcttgtttatcacgctttgaccttaagaagaatattataaagttgtaaaataaatacttttttttttcttctaaacaggcaatatagttatttttgactaccatgactgtaagaataaaagaattacaaatattttgcgtaaaagtatttgcaagatttatttgatgaaagttctaatcatgccctattatgccattgccctgtataacagggcattgcaagaccaaagtgtggaacaccttttataattttttatagcttaataatgataattcattttaccattatttttaatgcggttgattgtgacatctaaacataagagataagacataattaaaaaaaactaaagtaacataaaatggtttacgattatactaatcttattaaataaatgattatgatgagcttttaattttaatttactcaagaacagcatattttatagtttgtttatggctttgatgacttagccaccatctaataattccgatcaaataatatagaggaggcaatgataaactattttatactaaaatatatatactaattgtgtgtctttaaactaattatgttttattttaaagaagattatactacttttttaagcagtgtttcatatttatggttcttgaaaagagcatatatttgacaccattttcatagatagtattttagttgtgtataactatgatgtagccaccactctaacaattctatccaaatgattttaaaatgataataaacaaaaaaaatacaccgattgtgatatattttttaaattatcatatttcctgagaatgcgggtttcatttattttgtattatttatcgaaccttattttgcagtaaatgtcaagaaccatagccaaacattttttttctccatatgcagacactaaaacttactcccaaactaactttacacaaacttattagttcttatttggctatgtaaattagtttgtcaatatttacacaccatgtgcaccttcaaatacgcatgcaacctgttgaaatgatggtcttcattgtgccatcttcaaatacttctcatagtcaaacatttcatttccagagcttataatcatctttgactattctattagcatcaatttttttcttttgtctgaagaccattagcttcaaatttgtttactaggaaagtttttgagtaaataccactttaatatttttttttaatgataaataggactctctattttttaaaatagaataaaatagtagctttaacataattttctttaatattttttttaacaaatacaaaacttataattaaactggttacagagagcagtcatctctaggtgaaggttattaataagttttaccaaaccaattttgctggctttgtgtgctcatgaaacaatttccacgtcctattgtaatgttccagaactattttaatattggaaatattcacttggacatatcacatttcattatgtgcacctttgattctcttaatactctggattctgacccagaattctttggcaagaaacgcattaggactactttgagctagttggcgccaatccaaatgctattcatttgtaaaaaaaaatttgaaaaaaggcggttatatcataaattcaaataagttagatctctcggtcgttacaaaatatattgtctggtaaggacgaaactgggatagacccaaacacctgataagcaaacgcacatctagccacattatgagcggcaacattacacgttctacttatataagggaaattacaactaataaacgagggagaagacttagtacatattagtgtaatgaattcttattattattgaatgagaagaagtacaatatttatacagaaagatgtaacaagattattgttacaaaataaacaagtgggaagctgaaaaaataactaacagaatgattaactaacaataacagaatgtgttatcctaataggccccctcaagatgagcagtatatgtttatggtgctcatcttgctcataagaaa

SEQ ID NO: 33309 - DNA, 1684 bp, Cannabis sativa
  modified_base (1071)..(1077): a, c, t, g, unknown or other
ttttctattacaaggacaagaaggaaaatttcaaaaataagtctattcaatggactcaacaaaacttcctgatcctagtattataggtttgagattatcttaacttgtggcttatggtataattggtaatttacttattctagtgtaagcaacttactttagtaagatgctggagcatttttctaatgactatctaaagggagtcctttaggctcctagacatagattttatttatataagaaacagtttcaactattccagaaaagataagtcataaaaggaatttcttaaggatcaatagtgagaggtctttgatcaagaatgaaaaggttgagtattgctcaaacatttggaacaagcttgtcatcccaaagcacaggtacacttcctggaaagctataaacaactttcttttaacaagaaaccacttgatcaaatttatttacatttcttcttctctttgtccagtttgtgagattgaagaggaatcccatgatcatcttttcatggagtgtatcttcacaaagaaagttgttgaagatatttactcttggctaggatttgtggattggccgaagactagacttgatctagctgattggtgcttgaaaccatctttggggctgaaggaaaaagtgataaaaccgttattgcctcgacgatttatatgatttggaagaatcgtaatatatgtgtatttgatagttgttgtagcttggtaaaagtggttagtaaagagattaaatctcttgttaagtggcgtattttggggattattaccaatgtaaaaaagggtgataattatataactcgtgttgtagaaagctggtagcttctggggtgagttgttggtgtttgccttgattgtaatgtttgctctgtttgaataaaaagtttccttttattcaaaaaaaaaaatagtgagaggtctcatgtattttttgcaatgcattagactaggcacctactgttgaacgaaagttatgagtaggtatcagtttaatctaggaaaggaacattagaagacaatcaaataaatcttaagatcagaagaggaactatatgttagnnnnnnngggtggtattttaatactcttagactacaccaaatcagaattttagacttgcgttaatgttaaaaagtctacttatgagatggggattactctgggtgtggagcagtattttttagagaagtgtaaaaaccaatcaggagtctctaactgtaccagtgagactaaatgttaaagtggccaggaaggctattagataattattcagcctatggaaagttctatacagtttttggcgttattccagtaatagcttaactactagtgttacttcctgactaacacaaatatagttgccaaatagtaaagaatccagtatcccaataggagtagacatatagagaggaatttgacaatatcaaggattttgtgactaaggagatgtaatggtggagaactttggtaattgaatacaacctgacagatgctattacggagataatactacgtactacacttgatctggatatcaaggtgttgaaattaattgaaatgaacttttagttttgtatttgtgaaagtgagagattgttgggttttgtgtactaaataaaatacatttcaatataatcaaatttactaattaataaaagatcaaaaatcgttttat

SEQ ID NO: 33310 - DNA, 1133 bp, Cannabis sativa
taaattagctgcgcgaagagcattatattatctaatctatacatataaaggagaagtatgaggcagtgatatagataaagccaaaagcatgatttttttttctttttttgtaaatactcatattatgacagttttatacctataatctatttatgtaacaaacaccggattaaatactaattttataccaaaaatatcacaaggttttctaataaggaaagcttctcatattattttgaaaaaactaaattagaaattattatggttaaaatttaataaattttattattcaattattattaatttaattatctcatatatatatagttttaaatattcgtggcaaagtgctggctgtttactaattgaaaaaaattaagagtagatagataaaagtatttaaagtaattataaagtcacatgtcaccatcttataccataactttatatataaatatatagatttttcataaaaaaaaaaaaaaaatcaataaaataaaataaagggatcgaattaataacatttgactcattaaatgtatacatctcattttatataaaagttggagaaatactacaaggcactagtgtgcctaacagtcttttatgtgtaaatattgctattagcttaattaagtattgggtcttatatagtttaatataatagctaatatcgctagccaatcacaacgcgatatgtcgagaagatactcaatactactagtgactaataacaatgctcttgcaacaaacaattcaattcttagggacagcaacaacaatggacgaggaaatggaattatgggacacgcgacctttttccaacataaatctatctctctcttctattattttattatgactccttttcttacccgttactctttctcttattccattagtattttctcatataaaagtaacggtctcaaagattcacaactcattctctcactactctatagtctatagtgatactgtttgtcaaaactttaagcccaaagtcatggaagctacaagatttgagttaactcagtctgatcttttactcattcctcatcactacatccaaaagggacttctcttcccaaaaccatctcatcaatctcagcccttcattcaatggatccaac

SEQ ID NO: 33311 - DNA, 1130 bp, Cannabis sativa
  modified_base (377)..(380): a, c, t, g, unknown or other
tttttaattttaaaagtaaaattataatataatttattgataattcatttaaatatatgtgaatttatttatttttctagaaaatatatattaaattattttgaccaaaatgtttggattatatttcttcagcaatcttgagtattgttagatttttagtgcataaattcttatcgaatgtgattaaggatcatatgatcatgaatttacaagatttataaatttatgtatttctaattatacacaaatgattcgttcttaaaaataaaataggttcataactatatttattgaacctaaagttcaatgtcatacataaatagatttaaacaaatattaatttattgtgatgtattgaaatctctacaggtgtattnnnntattagatatcacaatttttaaaagtctcttgatcagggagagagaaatacatttgggatcgatgatgattttcaaaaaataatccttgcacaaagtatataagaacgatatagtttaaaatgatatataccaactacaaattaatattatttaaagttgagttagaatgagttgaaaatgcccaaagcgtcaataaacaatgtagaaattataaatatgtttcatttataatttgctctgaagatgttaaatctagaggcactcatggagatacaccttaattttgtaaagtattgataatttaaaactgataaccgtgataaaaatggtactctagaagagactccctagaaaagttagacataacatatttgatcatgactgaacaagtggttctatataggtacctataaatgatttacatatttaaaaaatatgaaatttaaagagatctctataagttatgtcaatatgggaagaaattatcatataatgaaatttttgtcgacaatagatgttcaatgtttgcttatgaaataaactaacatgagatagcaagaatcatggtattagatttttcgaaaattattgaatatattttatttttggctaaaatattatgacgcagtctaggcaagtttactcgcataaagtgaagtaagacctatgtgatgtgcaaataaatatttcaaatgagaaatttgcacatatgtatttgtacacaaaatgaattgttgtacacaatttgc

SEQ ID NO: 33312 - DNA, 1334 bp, Cannabis sativa
taccatattagtagcacaaataatttgaacaaatttaaaaaagtttactttatatgatttatttaattaagaaagttttattcttaatttatatgatatttgatacaatactctatttttttagttttaaaataattatagaaaatttaaagacttattttttttttaaaaaaaataaagttcggtttggtcggaaccgaccaaaccgtgaattaaaaaagtcagttttttttttacatttatataatagtcggtcgatttttggattataaccatgaaaatcgaaaaccgaaggttggatttttatgtgtagaaaaccgaacgttgctcacccctacaacaaacttttgtcatccttaatttgtagtagttggcatccttcttttaattggtatttcaattgtatttgtgttgtctcaggattgtattgtagttcgttcatcattatgttcactagttaatcaaaagtgcaatctcttgataataattctccacttgattcgtaatcaacatagtatttgttgttatcccaatggccattgccctgtattaaaatttgcagaggttccatgtcctgaaatttgtgtattcgttataatttttagtattaatagttgcaaataactattttaatctaataaaaaaacttataaacgattaactttttcaataaacattaaataacatctaattcaactgtatttgtatttttttaaaaaactaattcgtatattttttcagattgtgttcatagttctaaacaactattttaatgtatcaaaacaactgttttttgacaatcaacagtaaatgatatttaattcaacattagttgttcatttgtaaacaaacaaccattataatcatcgaaaacaacatctatacaactgtttccaaataaaaaaaacagttgattatatttatatgtatagtatttttttatttgtaatctaatcttatttatttgttaagagtaaccaattttttatatcattaattatttatctgatttttacaatttaaaaaatatatataaccatgaagaatttttttaaaaataacttaattaggaagaaaattattataaatttttgtaccttgtatttgatctctcattcgtttttgagttgactttgaagtttatccgatctccttgtattcaaattctctaaccaatacgatttgaatttttgattttaggttgtttttgtattttttcttatagaaatctctgtgttgggaatcatggggttctatctcaaaactaattggcaatgagtggaataacccatattcttatatatggctcaatattcttacatttgatccatgtg

SEQ ID NO: 33313 - DNA, 2828 bp, Cannabis sativa
  modified_base (50)..(53): a, c, t, g, unknown or other
aaatatgaatttctaaaaaaatggtatttaaacacatataaagttcaagnnnncttacattgattgcagcgaaattaaatgactcattccactcaaatttctaattcttgttcctttctgctgcagagcattatcaagatcttagcccaattctccttcaggtgttggatttttcacaatcttatatgattgagtgctagattagttatgtgtgggcatgtactcattcacatagctcgaaaaattgaaaagaaagagagagaaggattcgaaaattgagagagggctcaagtttgactgaaagacttatgttgcatcaacttctgtaaaatttgagtgtaaaatttgagtctatctctacctatttaagaatccttataggttctcatcccaaaaattcggaatccgacaagacctaaccatttcaggcctatatctctgtgtaatgtgctgtacaaggttatatccaagatagttgcaaatagaattaaacctatccttccttcgataatatgccctacacaagcggcctttgtcccgggtcggaatatacaggataacaatgtgattgtgcaagagatcatccactcctttatcaggaaaagaggaaaagaaggatattttgcaataaaaattgatcttgttaaagcttatgataggttaaactggaagtccattaatcatgctcttgattggttcggtttcccccagaatttttgtaattgggtttctcagtgcatctccaccacctcactgaatgtatgccttaacggtggaatggtgggaaagattatgccctcttgtgggcttctccaaggtgaccctctttctccctacctcttcatttgtgctgctgaaatactgtctaaactattggaaaagggcctgaggaagggcgactttaaaggcataaagttaagcaggggagggccggtcctaacacacttattctttactgatgacttaattctggttggatgggccaatgtgaatgaagccaaatgcttttggaattgtctggaaaagttttgctcctggtctggtcaacaagtgaacaagctcaaaacgtcaatcttcttcagcaagaatactcccaatgggatgagaagaggcattaagaatgtgttgggtattggctcttaggagggtgtcattaaatatctgggtctgcctctttttagatcaagacaaaaagatgcagatttcaatttcatccttgatagacttacatctaaattgcagggatggaaagcaaagacgctttccaaggcagggcgtgcgaccctgattaaatctgttggcctatcgcttccgatttatgccatgcaaaccaccaaactttctgatcgcatggttaaaagaatagatggtcttgtcagggatttttggtggggttttgagaaaggaaaccatggcctgcatctaagagcttgggataaaatttgtcttccaaagtctcttggaggtcttggttttcgaaaaaaacgaaagaaatgaacatggccttcctggctaagtggggatggaagattctaaatggttgtcaatatttatgttgcagattactagaggccaaatatctttgaggaaaaggttttttaaactgcaaatataaagattctgactcgtggttctggaagaatgtggtcaaagctaaggcaatcctgagaaaaggggcttgtaagttcgtgggtcatggtagagacacttgcatttggagggatccttggattcctcatttaaaaggtttcattctgaaaccaatgagagaaattccgcctggtttgaactgtgtggctgatcttctcaaaaattctggctcttgggacatttctaaactaaataatctgtttgacaaagacattgtctctgctattttgaaaagaggcaatccttcggggcaggaggaggataaatggggttggaccttagagtctaacgggagattcacaagtaaatcagcttacctaactcaagcgcaggaaagagccagccattgtgtggtggccccaatgctatggaacaagttatggaatagcaaagtgcttgagcggcataagatcctttggtggtgcattctctcagaggcgctccctgtcagaacagtgatcgggaggagattccaaatagaggatacaagctgtcctttgtgtggagtgggggaggaatctgttgaacacctatttctctcgtgcgatgtggcgttacacctttggcgctcatctccttggggcatatatccggtctgtggcaatgggattcgtgtctgggactgggtgaaatttctttggaatcttaacaacaggggtattcgagtggaggaggtttttctttatgcttcgattgtggttgataccatctggagggcgcgaaatgaaaaaatacacaataacaatcacctgaatgttttaaaatgtattgaccttattcatacttcttttgcagaattacatacttctctggtgtcatgcccatctcctattttgacagaaagctgaaattcacctcctgaggattggatcaaactgaattgtgatgttagagtgggattaataagcatgtgcacagctggttttgctaggaaccacctgggcaaggtgattcggatccacacgtctcaattggacttttcggatgctttatgcggagaggcggcggcttgttgttcagccatttctatggcatttaacttaggtttaaattttattattaatgagagtgacttgagactagctatcaatgctctcaatgggaaggagtcacattgggcacttgagaactatgtctccttttgtatgagatccactccttcttttattagttgtaac

SEQ ID NO: 33314 - DNA, 1444 bp, Cannabis sativa
gttccatgtgacctgtgggctttttggaacttttctttcatgccctatgtggattgaggcctttttagaacactactttcatgttctatgtggcttgaggcctttttagaacattactttatgtttagcctcagggccttcctgtttgtatctttggccatgagccctctatttttgaacactactagtatttaaccctatttctttttatcatggattttgtgacagaccaggaggtctttaatcctaactatcttcttatggccttgaccagtaaggatcaaatttactttgccaagctaaagtatgcctgtatgacttagaggttggtttaatagcttatactaggcattgaaatttttctgcataagttctttgtgctagtctgatgcattgtacactatgggtacccgccaagtgaccataaaaacaagtctcttggtcacttgctattcactaagtttcatagactttccatggattctatcttcggagggtaccatagtatgcatgtgaaactaaaagaataactttaaacaattaatctatgagtaactggttcatagacaataaacagaatatgaatattgttattattcattaataggtctttgttgctgtgaaacttacataaactgaatctacaagcatatattacacaaaattagcttctagatgtcatgtggctacccctgcttgcctagtgaagtagaggccactattgaagaacaatgggagaccacgcccaaaaagggtcgtttgtgctagggctttttgtactctaatgttgagtagatagatacattactttgtagtatagttctgtaatctggttattgatagtatttgcgaaggtgctctccattctagtatcttgctaggagaataagctccatgttctcattgtaccttcccagcttgtaggctcccttactagttatctatgtaacttgataagggccttcccagttaggtccaagtactgctgctattgagtctttagtgttcaggattactctttggagcaccatgtctcctatgaagaattgttcgctcttgacatgtttgttgaagtgccttactaccctttgcttgtatgcttgcagcattaggttggcttgttctcttatttcttcttcttcgtcaagggactctgccagcagggtgttgtttgtttgttggtcataggttattcttttgtgagacagtggcactagctctataagcatgatcacctcatagccataagctagagcgaacagattttgtacagtggtcgtcttctcggtagtcctatgcgaccataggacctctataagcagttcaggccagtttccttttgctacctaaaggcgcttgttcaaggtgtccttgagggttttgttgagaacttctacctgcccattttcttgacgataggccatggcagagaagcttttgatga

SEQ ID NO: 33315 - DNA, 4914 bp, Cannabis sativa
  modified_base (3968)..(3969): a, c, t, g, unknown or other
atatttttaaaattaatatttctacttaaattttgttagtaacctaagaagtgttttatatattacatataaatttgagagttaatgatataaatttaagagttatataaatatattttgtgtaatttttttttaaaaaaatcatatatataccgtattaattctgaaatttagtggcctatataactaaaaaaaattatttttgggttcttactcaaaaaatatagtattttttaaaattagtaaaaaaaaatatgtatttttaaaaggatttttttttttaaaatttctaaactaaatgtattctaaagtctaacctacttatatcttatcatatataactttattgtaaaagagtaaaaataagtaggctaataatttagggaccactattgcacaatatatatcatcgatataataatatatatatatatataataattatatagcttagtgattaataaggatatatcgtctaactcgtcttaattaactcatgacgaagaaaaagtaagtgttagttgacatgttctaattatatattatatataaataatattcaacgaattgttcatatttttgaatattgataaagtcgtaatgatatacgtctttataagattaatattattactataaattaattatatacatattcaaattaaccaaaatgtatataccatcacatatatagaagccatatttaattataagtgacaatttagatcacataataatttaattacataatgaattaatactacttattatatacacttaataaattaaaaatattatttatagaaagatattaattaaataaacatataataaactcataaaaaaacataaattaccatgcagctttattaataactttaatatatatggaaatggaagcaacttggtcggttggtgtgtcttttttagcttttcatacataaaactccacatttataattttaatttgtagctaatataactatcatatattttaatttttatatatacttaattttcttattttattttggtggcaattttttttttaagcttttctcttctttgcaagttggacacacatattaattggatgaccactgtatacacatgtgtatttgtaacagtaaagtcgatatagtagtaattcaattagtatttaacgctaatatttaactgacaccttaaatttacgaaaaaaaataaacttaaaaaaattaagtttataaaaattaaaatataagaaaattttatataaatattcctcatatataaaataaatgcatatttaattttttttgaaagaaatatgcaatttaaaattaaacttttatttaatatcaacatcttgttaattagtgattgtatgcgataaatcttaactacaatatttcaacattgtaaaaatcttaaataactaaatatttataggtctctccaatatttaaaataaaaaaaaaaccatatatatacaatttatatatgattctattttttcatccattctttatttttagtttctggatttttttttcatcatatatttagattaattattatacaaatataagtgatgatatgtaaatatgtaaatatatataaatatatattatatttggaggtatagtatagttggaaacttttaatgtttggcacctcatctaaattatttaaagttgtttaccttatatatattcttttactttgtcttcgcacattccacctgctacccactaccatattcactacttaactatatttatatatatatatatataaatattcatgagcatgcacaaatttaattatttttttttttaaaaaaatattctatatatataaggtagtcgaagattatatatatataaaaccaagtcgcctttgttctatcaaaaaaaaaaaaaagaaaaaaaaagtcgcttaagcttgacgtttatatagtgcatttacatatacatctaatattaatttttctatatatacaaaaattatatatattagtgtttatatgccaatgtttatcaaaataaaataatatatatcatatatatatgtaaaatatttatgacaatgccagataatatatatgctagcacagcatgtatatatctatattactatccaatcaacaagtatatcattatataggaataggaccttatctctgttatataattatgcaatatatacatgtatatatataagcatactactatataagtaataagtagcaatatatatcatcatatggactacatattaaggatcaagtatgaaattaatgtacacaaatatgtatgactatataatatacactatatatgatcatgatcttatgtatatcgaaatatctgcagtaaatattaactatatgttatatatatacatgtatatatgccataaactaaatatatagagaaaatagtgaattaattaaaaggaaatgaacaggatatttataaagaagaaaagaaagaaagatttggaaaagatatctctttttgtaaagatgaaaaataaaaataaagagtgacaaaaatagaatcaacttcatcacaagggaatataatttaagatcaaatctaattctttctctccacaattaacacatattcatatccatacatatatgtcttccactacaagtttatgtgtgtatatatatatatcatatattcatcagtgtaggtataataaacatctaataaattaaaattattattaaagaatatttggtaaagctgatgatcagagaaatgcagatttacagcttttgcacatggtttcccactatatatatacatgcttaattataataaatatttaattaattggaagaagagaagataatatatatatgaattagtagaaaacaaaaaacaaatccctatcataattaaaataatatatctaattgtttttacagttatagttttaccatattgaagatcgaattaatatatagccctagctatatatacctatatatatatttataacatgagaagaaagtactatagaatatatatatttataggtatatatataccagtactgcaaaaaacagcaatatatttgccctatatatatggtgaagatcatgatcatcatatatatatgattacagaaatatcttcagtgatatatatatagatagaaatagaatataatccttcacaaaagggctaatataacctattagctagagctatttatatataaatatatatataagggttttgttttgttaatttcttcctaaataacaatagtagctatatggatcagttatataaataagaaataaattaataatttcatatatatataatcatcaacatcgatctaagatctcacccatgatccaattaagagcttattatatatcaattaattcatcgatttgagatatgagctagaaaattataacttgataaatataaatatatatatatacctaaaaactcacctgatcgatgaagtgatgcatgatctatatgtatatatttatatatgatcgaagcagtagctgaggggaatgaagcctggtccgaagacactaattataaccatatatatatatataaatgtatatagatatagatatatatatagtattagggtgaaattggtgacctcgtgccagacaaacattcccctcaaaagaagcttcccctgtgccctagctaataactactcatccgccattcaaattaacctaccctatctatatatacagatatatatatatagctagggtttggtcttttccaatggatcttcaatcttcatgggttttctcatatataaatatattcttctttcatgaaaattattaataggcaccaccataatcaacataatcatttggtttcacaacaacaaaaaaagaaaaagataaaaaattaaaaattaaaaataaaataaagggtatatttttcctagagaaagaaagagaaagagaaagnnagagagagagagagagattaaaggtcatgtagtagttagattactatagtagtgtgttagtgttagtgtgagtggttatatttttttggaaacagctgtagggttttgctaatcaacactttctctctctatctttcacttaaatatttataaacaaattaattatttggatcattatgactaatatatatagttattaattatcatgattaattttgctattgtttgtataattaagtaattatcaatatataagtttgaagtgaatgtgagactaataatcatgccaaatctctatatgcatattaactagctagttatgtaatagtaatattttttctacttttatttttttattataagaaatgtcacttttgcagcacaatttattactatattggtaaaagtaacttttactagcacatctcgcaaactgcgctggtgaaaatgtcaaagttttaccagtacatttacgtgttggaaaaagtcgattttgccaacgcttttcattttgcgcttgcaaaatttctaataccagcgttaattcatttgccaacacatcaaaagtaaattctgttttaccagcgcaataccaaacttttacaagagtaaaaatgtactggcaaaagtaacatttcttgtagttttaattgttttacaataataattacaaactaatagggtgcacattcgggtgagttttcaggtttcgagtttgaatttggattttgggtatagcaaattcaatactaaatttgtctatttgtagacaagatttgattgagttcgtgtttaggtttgaccaggtgggtaagacagggttttggcgagtatctggtgcgaatcgagtttgagccttccaatataacattcacaataagccaatttatgttgggttttgggcgggtccaagtgacaccctgtaccgaaattgttatttttccc

SEQ ID NO: 33316 - DNA, 5154 bp, Cannabis sativa
  modified_base (4654)..(4655): a, c, t, g, unknown or other
aaagttcagggggcatgatttggtatatgtcaaagttcagggggcaaaaatcctaattagccttatatttatgattgtcttttattacatttaattataaggaaattataatagtcactacttttactatttgtatttaattatatttgaaatgacaaattataacttttaatattggagatttcttagacgatgtctttattttgatttattattttactagcatttgatttttttcatgatattagttattttgaacttttaaggcttgtttttatatatttatataatatttaattatatttatagcatatataatattatatatttctcatatttataatatatatttatacagttagttgtgtgtttttaattgtaagattataaatattattatatatttatttagtttttatgtaataaaagtcaatttttttttttttaaatcagcaagtgtattataaccaaacaagaatttatacaacctaagagcaccctcaaaggaaggcctccaatctaaatctataatctttacaatggacttacaatgagttaaaccaactctcttcactactagttacatcattgggtcatatacaaactattcaatttttaatgacagctttaactttgcagacaattctatcacaattttctatctcctcattccaaaaaaacattattttggttgctccaaatcaaatagatcaacgctgctatggtagcagcatatactttctttttgaagttgttgcatctagccttagttaaccacttgcttatatttttcagagttgctgtcgaggtcttccattgcagccaatgtttgatttgtatcaaataatccttcgagaactgacagcaaaagaaaagatgttcgatagtctcgttgccacagttacacaacaggcaatcatctatttcgattaccccaaatctcttcaatctttccttcgtcttcattttcccaagcatcgccaaccatacaatgaagctatgcttaggaatattaaaacagttccagacaaacttgtcccaatccactctagccaactgtgtatgtatttctctatagccaacagccactaagtaattgccttgtaccttgtttaaagagcccaaactcttcatttgatctttaaccatcaccaactttctccaataccaacttgcttgagctaaaggtttataggtccaccaatcctcatccttaatgtagacattatgaacccatttaacccataggttatcttccttcttagcaatagcccatatttgaataaagttgtttgttccagtccgagatacactggaatcctagtccacctgagcttttttgacaaatcgaggcccaagcaaccacggaaatacctactaatgtgtattgaccattccataaaaaactacggcaaatggattcaatttcacttacaattttctttggcagtagcagcacttggcaccaataagagtgtatggccatgagaactaagttgatgagtactacacgcctagcaaagaaaagatttctcgagctccaagttttgatccgagccatcatcttctccaccaaaagtttgcaatttgctgaggagattctctttggacagataggcacgcccaaatacttgaattgcatgtcatacttttggaaacctgatgcatccaggattctttgtacatctgcgtcagtcatgttgctacaataaatagctgatttagaagggttaggaaacaagcctgatgtttgagagaagagcttcaatccctggaacatgtaatatatgctcttgaagtctccattgcaaaataattgaacatcatcagcgaaacttaagtgattcaactcaagaccccaacatctttcatgaaatataaaatcttactttttcccaatcctcatcatgattcgagaaaggtattccattcccaaaacaaataaaagcggcgacattggatctccctgcctcaaacttcgcttggggtcaaaaaaaccatttaatgatccgtttatcatcaaagagaatcgaggagtcctaacacaagtcattatcaagttgatgaattttgtgggaattgaaatccatatagcatctcttttatgaaatctcattcaatggtgtcataggccttctgtaaatccaacttgatcaaaagtcaaattgtttaggttagtttatgtaatattcttattttctaatttatttatttttaaataatatttatatttaaatattatgagcattgttattaccattcaaatttttgagattatttatatttattacaaatatttattttgtttttatacttttattattactttattagcattatttttgcactattttttgatggtttggatggcttttatgatttttgtacaatttttatggctttcccctaattatttagagtagatttgtagtatagtcaatgagtaagagaaagatttcgtttggtattcatggcttctacaaacaaattttgagatttgacagataaatgcttcaagttttaatattattagataaattgtttacgatctttattcacattacatattttttcattaaattctgtggtaataatagaattttattgttattttgttggtcgattcttttggagggcctattgttctggggatttagccgagaagttttttagatataagttatttgagagttgtcatctttttacgattgagctttcttgttattagttcttgatatcatcgttaggggttaatccaattttatttatcttattttattttttagatattttgtggagcattttgatatgttaatgagttggcgtatagtttttaatgttacaagttgaagctcaagctattttgggttgttgttcgaagacgttatagctatattgtttaaatttttggggagtagttttgtctcatattgctcgcttactttagcaatttatggtttgacaaagcatgccctttggttagacaacgagttatcctagttcgaggaggttcctacatagtttgcggatatctgcatcgtaaattcatgagtgattttaatcaatacgtcaaaaaaaataccataaaaaatcttaaatgtaaaaaaataccataggagattggcaaatttaaagtatcacatttttgtaactttttttttatcaaatctcatatttcatgtaatttttacttttcactgcactatttatcaatatttcctaatttttattgtatttacgaaaagattatggtagttttttttgttagttgaagaatagtaaaaaaattataatacacctctcaaaaggattattttagaacattctccatatgtttcagtgttcaagataattttttaatctattttttttaacgatcgtgtactttgctattttttaagacttcctgtaaatattcaaaaactttaaataatttactatatcaaaaataaaattcaaacagtagcttagcaaccatacaagaaaatatagtcatatacgtgcaacaaattatttgaaccttattttcggcaatgtaaactttttaatttttttttttaaaatttaaagattcttttaaataactacaatatacacgatcataaaaagaatagactaagaaactcgacgctatgtccaaatcaataggaagtgtaacaaaacgaccattttaggaggtgtactatagaattaccctataggttatttaaaaaaaaaaaaattctaagaaagaaaaaaagaacccaatgagaataaaggataatgggtaattctattgtatactccctaaattagttatttttgcaatactttatctgttttgagattcaagttttttaggatatttttttgttttgatttttgtttttattttattttgtttttttttttttacttttaatgaccgtatatgttgtagttattaaaatacttagaaaatttagaatagtttatagtatcaaaaataagattcaaatagtttgttgtatgcgtaacttttatttttgtatgagtagtaaataattgtttgaactttatttttgacactgtaaattacattcataatgttctataaattttgtaagtggtcctaaaaaaatacaatgtatacaatcatgaataaaaattaaactaaaatgtcctcttaaatatcaaaatagattttaaaaaaatatattataaatttttgtaacgataatagatgtgtgcattcccaaattagactatttatatgtaaaaatcatttaaacttaataatgccaattactgagctgggagcggttgtgtcgccataaacatgcagggggattgggatttcgaagcttgagagattttaatgtggctcttttggggaagcaatagattataaggctaaatagtatgatactggtaatttgttttctgttgtattaggagacaatcctagtttcatttggcatagtattcttgaagctaaagatcttatccatgcctgtgctcaaaggacaattgctaatgggaaaaatgtctccattgttaatgatccttggcttccacataattcaaaacaactatgttgtctcacggcaccctgctcttgtgaataagtcggtcaactgcctctttcaagttggtacttgctcgtgggatgaggatgttgtgagggacctgtttnntgcccgtgatcaggaccttattttgtccattcagcttagtgatttggccgctaatgatggttggagttggcgacttgagacttgtggaaattattcggttaaaagagcatataaattcttgcaagaatctaagggtgcttggtgccgagatgccaatactgattttcggaaccggctttgctcattaaaaattcctcctaagatcaaatttttttatggcgagctgcttcgggtgtgcttccaacttgtcttcaactccaaaaacgtcacattcatgtcaatgccgactgccctttgtgtaactctactattgaaactattcaacatgcgttggtggaagctcgtttacaaaggcttcttggcatcgcaacatagtggacgtcggggctggggctgtaacattcagtagctggttgttgaaaattttcactaggaggcacgaagttgaaatggaggaagcaacgatggtgagttaggctatttggcgtgcgcggaatga

SEQ ID NO: 33317 - DNA, 1798 bp, Cannabis sativa
  modified_base (369)..(369): a, c, t, g, unknown or other
gtgattatatcacgtttatctttgaggttcagaaattcaacaaccatctattttagcgatttagggatcaagtccatgacttttagcgagaataatatatcttcatcatcataaccgcctcgtggagaaagcatggacactttcgccttcgacgcatcacgtcttgaaggcgattgagcgagtggatcctatacaaaacacaccataatatattaaatttgatcgtaattctactaaaatttcggcagcataacggctgtaattgaatacccctaaaaattttaaacatgcctgtaaaatgacagataacacagatataacagttgtttatttatccatcccactgcagcacatatattcgcagaaccnacttcactatggttgaatattgaagatattcaaactccacaaatcattaattatacataatttataacaaaagttacctcaggtgttacaattaggtatttaggccaaggaaggaatatgtttgctacttccctataacatatctgcacccttcaattgagattggtatttcagcatcctcttgcagcattttcaaaatcagaacccgggcatgtgaatcatcgtagtccttacagtgaatagtgattggaccctcatgctcgtatagatacgctcaggccacaatgttgtcgatattatcagagcagagatatacttgctgatcaagggcctttggtcatcgaaattgtacaagagaggtggctcgttgagggaaacaaactcctcaacatagatttatggtctaccctcatcctcacgagcgtattgttgtggaacatacgcctgatcagccacctctccttctttctcttgttcgacagtgtttttattctgtttaagggattggatttcagcttttaatttatcaatctccttatgttgccaagccacaacatcaaaaacttcccttttcttcctaccgaacagtttagatgccctggtcagaaacctgcaaatcatgaaaggaaaatcagctatgatttttttttttgtataactaatgaaacaatatttcaagtactagtatagtcagcagccctgacacgtccatgatgctctggtgtcccgagcgcctgcgtcaggatatcgttttggtcatggacctgaatttgtccctgagtaagttgctcctctaattgagcctaatgcacgcatatattcaagcaattagtataggaattatatatactaactcattagtagtactcaattaaggattgataggaggattttctctctctcttcgctccttgcaactctctgagttggtgccatggcgaaaacaaggtccaagaatgtggggaaatcgcaaatctcgaacaggaagaataagaagaagggtccgaattcgactgctgatgtaaagaaaactaaatccatggaggaagttcttggggttgaaccagtcgaattttcggatgatgaagatgacagggtaggagttgctgggtatgaacagccgcccctttcaccggagtcatcgttgagaatgttaaagagacaagatgaggtagttgcagattttggctatttcttagctgctaataaggaatgtcaaaactctatctcgaaaggaattcagcctacacctccggttcttcgagcagagccagtgatgcgcaacctagattcagcttttctgagttcaaacagagaggggaaagtgaagataacaatggatgacatagaggaggaggttgcatactggaaatcggctatagtttgttacgttcttggtgcgaatccacctcttgcagttctggaaggc

SEQ ID NO: 33318 - DNA, 1869 bp, Cannabis sativa
atcggatgaacacccctagatataatattgtgccaaatttaacttacaataaatgatattttttacaatgccactaattttaataattcatttactcttactgaacttcatattttttatttaccattgtaccattatttaaataatgaaagaataaaaagtaatatatttttttttgtatgttctttataaaatatgaaataactatccgtataattaattaattattttattttattttatatattgtgcattttttgagtacaattataaatagtgagataaatataacacaaatttattttttgtgctaaatttaatacaaaatttaaatcttctattaaaaatggtcttaatcttatatggtaagacttttaacttaaataagctttatttgttcacagtgcatatcgaaatatattatgttagagtaatgttaatatactgttattagtaataatttgaaattaattaaaaaccaaattaaagaaaaatgtttgatgattaaaatactcattgttccataccgcgcttgatttttaaatccacaatatctaggatggtgtatatattattcttatgtatattaataaagaaaaaggacaaaatgggacaatcatttttggagggaaaaataaattatggatcatgtcattattaatttcagtgcgcactcttttaattaattgcaacaaagtttttcctttacttttcctaataataaagaattaagttatatttgtttgtaattattgtttatacaaactttaatgtgttgcagagatgaattttgataataattaaaaggatatatacaatgcaataattgatgagggtccaggtagaagggccacttggattaatttataataagccgaaagtggcacagtaattataaaagagacaaagatatatcaaaataatatatttattttttttgagaactatatatacagatcatatatagctagcatatatattatatatataaagatatagataaatacataaatatccagaaacgtccacttaattatgacgttttttaatcttgatcgtatatatatagaggtagttattagttatatatttttcagctcttccatcaagtaattaaatgcatgcatttagatcaattggagtcgtgtgtaagtaaattagggttttcaaccaaatttacaaactgctcaatttcattaaattgttcaacctaaactgaataaatcgagaataaatacaatttgaaataatacaataaaaatttaaatcggccaataaatatattaggtgtggtttataaataaattattatttattctaaaccgttcaattaattaactcaaataaaccgaattaaaccgacttatatattttttaataaaagtatatataatatattacataaattacattttttttaataacataaattacatttattagttaaattattttgtatttaaagtttagatattttagtatttaacttaaaacttagactttatagttaataatttttattgtgttaggatattgaagttgaagtttaaaatctataccatattattacattttttaattattttatttaattattttatatttactcaatatcttatattaaagttattaaaattaatttaaactatagtagtattttttaaattgaaatataaaaatatcttttcattttttaaatctaattatttgaatactagaaactaacaataataattataaaaaaaaaagtgaagaatggacgaaatcattggacaggttgaactttttttaatttttaattgggcgggttacaattaaatatatgcaacctgatatttatattgagttagtaaaaatatgctataaccc

SEQ ID NO: 33319 - DNA, 1525 bp, Cannabis sativa
  modified_base (1450)..(1450): a, c, t, g, unknown or other
ccctcatttgaaccggagtaatgagcttcaccgtcaaaggcttcaacatgctagcaatcaaaagtttatagagcacattacataagctaataggtcgaaagtgactgtaagttttactattttgggaatgagaacaagtaaagtcatactatctaaaagtctagcatatatttgttaatatctcagtgcaactctatgtacacttcactaatatcatgatatactaatttgatggctactgatttgcctaacatatataggttatgatcttggtgcaactctatatatgtacacctcactgataccctgatatgttattctgacgacaactaacatgcacgctaaacatgtatacatatatgcaactattatactaatcttaccttgattttgaatgcagtatgctgataaccctaagtggaaactgcttctcgacgatttataggtccctaagtcacaacatacataaaactaaggactcaaacttaaaactaaaagtttctttatcgatagataacgtgacaataccctaaatatcgataaaatatgaaaaactaggccttagaatttgaaaaactcgatgaattgaatccctaaaatagtctactattttctgggattctgccagaaaaaatggttcgccgtttctggagaaacggtgaatcattttttcatgtagaaaatttccaacttcaaaatcttgctaagaactctcccaaattcaatcaaaccttccagatcacttaaataaggcataagaaaggaaatccaaccaataattgcaacaaaaaccccctgaaacaaatcaccattaaagagtcaaatttgacctttaaaagctcaaacttagttcaaacctgctacagcctatcaaataacagccaagaagcttaaataaaccaaattaaaacctcataactcagttttaacatcaccaagtccaaacaaaaattaaaactcataattacataatgaaacctaacttttacctggtgtgtataacacaatatgatgattttgaaaatgaaatggctctcaaagaagcaccctgcacttattcccttcatagccaaaagtgagtatacaaacaaatcagatagtttttcaaaaatcttgttgtggtacctgctattccaatggtccttcattttcttttgcaaagtagacaagtagaccggttttgtagtgaggattcgggctaccaaaacattgtcactagtaggaacaatattcaaacaggattacactacaaactgaaatttccattccaactttttttcttttctactgtggggcgaatttttttcaaaaacactttgtaagtttcatactgtataatgtgttaagtttttactattgttccacgattgctttttagttattctgctgttatttttaattttcctattttattattttacaattgttttaggttgttttataaaaaganagtatttttgtaaaaaattctgtgtaacagtaaaattataaacttttacataaaatttagtattttttttttttt

SEQ ID NO: 33320 - DNA, 2014 bp, Cannabis sativa
gactttacagagaagttcaacatcccaagacctctccccaactaccatcaaactagaaacatattgatcaacaaggcccgtattattggacaaaacaaacggattagaatcattgggtaaccaaggatcgtgtaaaatgctaaccgaagaaccattagcaatggatcttctagcaccattttttacaagatcttgagcagcccaaatgctcctccaaatgaaacttgggttttgtcctagctcgacattaagaaatgaaccatgcggataataccttgctttatagattttcgccacaagtgtgtcctccatagtaagcagtcgccaaccttgttttcccaaaaaagaaagattataatcacgaaggtcgcgaaagccaagaccaccaacatttttatgttgacaaagcttcttccaactaacccaactcactcccttactagaagaactcgattgggatttccaccaaaacttcgccatcatcccttcaaggctcgaccagatttcatgagtcaaaagaaaaacactcattgcataattaggtaaagcctgagctactgacttgatcaaaacttctttgccagctttagacaaaaacttagtctcccaactaaaaattttcttcttcagtttttccttcaaaaagccaagaatggcatttttatttcttcccatgatgcatggaagacccaagtaaaagctatcatccgaagccgcattcaatcgcataagaccacacaaacgatcatgcacagccacagtaatattgttgctaaagaaaacagaggacttagcaaagtttacttgctgaccagaagcaagctcatatctatgcaaaagccgcaacacattctgagcttcattctcattagccttacaaaacacatagctgtcatccgcgaatagcatatgagacaccataggagcaccccgagccactcgacatccagtcaaccaatgatgccgctcataatgttttaacaacaacaagagacccttcgcacaaatcaaaaataagtaaggagacaatggatctccttgacgcaaccctctgcttggtgtaataggccccattgaatgacctccatgagtaatattatacgaaaccgtagtcacacagaacataatcaaatgaacccaatgttggtcaaagcccataaggatcaacatgttctcaataaaactccactcgacttggtcataagctttactcatgttaagtttaatagccataaatccctccttcccaactctcttcctcttcagataatgcataatctcaaaagcaaccataatattgtccgatattaaccggcccggaagaaaaacactttgatgatttgagatcaccattggcaaaacatctttaaaccgatttgccaacaccttcaaaataatcttataaagcacattacataaagatgtagggcgcaaatctgtcatagactccggatgttttttcttaggaataagcacaatgttggtatgatttaactctcttggaaaagaaccaactacaaaaaattcttaacaagattgataatatcattacctacagtgctccaacacttttgataaaaacccagtgtcattccatcatgtccggaagatttatccggatgcatttggaaaagagcatgacgaacctcatcatccgaaaccggttccaacaatctgttgttgtgttcacttgtcacagccgaaggaacacactgaataacctcattatcagccacggctgtagctgtaaacaaagtagaaaaatactccaccatgaccgaaggaagcctgcctttccaattaacccaaacacctgctgaatcttttagcttttgtatcgaatttctacgtcttctagcagtggtcgatgcatgaaaatatttggaattactatccccttcacgcaaccaaagttgcttgcttctctgcttccaaaaaatctcacgctgcagcaacactttattcaaattagtagaagcagttttatagttctcaatggacacccaatcacggc

SEQ ID NO: 33321 - DNA, 1561 bp, Cannabis sativa
  modified_base (1274)..(1275): a, c, t, g, unknown or other
taccacatcagtacgactagagttttgggtatagactggatttgcagttagtcatactttgtcgcgaatgttcctgacccagttatcagatcgtgagtaggtgtatgggcacctaattatggtctggatatatgtttatgtttatgattatgctttcttactgagtctgtcgactcacagttattacgtgcttgtgcaggtatgagctagaatcgaattgggatgagtctaaagctaagggtgaggattgtacatatcaagacgattagacctagcacgttcatggtcttcaaaatagtttaggctcacctttgtaatagtcatataaagacaacttttgtaatgcaagtattttgtagatatatgcatactttaacgggatctcagacttataaaaaaaatatatttattttaaaaagttttcaccgagatttttgacaactaattaaataaataaagttgtagaactagaaaagaaaagagaatgtggagaccatgatttttatgtggttggggcgttaatgagccttagtccacgactcacttgtattgagatgaagaagatgaatttctctctctagaatttggcagcatttttgtttaataccaatgagagagaaagagaagagtcactttacatgtaatcacatggtcctatttatcagcgaccatagattttttttattcatctaaatcattcatttattagagaaaaatacattgatagacataaataaagcattaattgttggcgcatagccttgtcttgtcttgtcttttcagctttactaggaaggcctcctgacatgtcacatcaactttattggcacttatgtcagatagtgggtggaccattatttgtccttgtttgacaaaaatttggacatttagcctggaagtctttatttggcctttggtcaatgaagacttaagacttatcttctttgctttggggatgtatgattgttgtggcgactctcaaaaaatagttggacagagcctcatggatattggtctcattcacaagttttttgacccattgaatgggtgttagaacatggagataattgcaccaagcccggaggccttagttttaatctgaaaaattcctaaaccttgccggtgttagaacgtcaggagaagtgctccaagctgataggtcttagaattattttctaggtgtctaagccatggtagcattaggacatggagagaattgagccaagcccggaggcgttgctttttcttgaggtgcctaagccattggcattagnnctttgtgcctaagccattggcatttaggactttgaacataagtcattgacattagggcttggtgcctaaaccattggtattagcactttgtgcctaagccattgacattaggactttgtgcctaagccattggcattaggactttttcataagccattggtattaggactttgcgcctaagccattgacattaggactttgtgcctaaccgattggcattaggactttgtgcctaagccattggcattaggactttgcgccaaagccattggcattaggactttga

SEQ ID NO: 33322 - DNA, 1793 bp, Cannabis sativa
cattaatgtaaattatttcagcaaaaactatatataaatagtatacatataattattaaataaaaatcaatatattaaaattattaactaaaaagattatataaaatataaaaaaggaaaagctaaaggccaaattaacgcaaaataaaaataaaaatcagtaatcaaggtaattatcgataaatagataaaattttataaattaaattaaaatagaaaaaattaatttaaaattattttatctttttttttaacccatatatttaaattctaacctaaccctaataagtttagtataaaaagataattataggctcttatttgaaagaggttgataacctaattttattttgtcagaaaaataagagagctgttataattaattttcgaattcccttcttttctctcctcttgaattcgtgtcatataatatcaagtcaatactcaatcatagtgtggaagattgtgaagaattccatcacttgaaggagattcaagttcagatcttggcaatactctgcgacagaaagaaataaggtgatgtttagtttggtagaatgtaatagtaatggtaatgataattgtaatggaataagaatagtaatatgtttggtttgttattggaatgaatattagaataaatgataaattgataaaattattccctactttaacttttatatttatataaaaaagggtattaaagtcattttagttttactttatttagtcttttgtaatgtaatactcattagatagcttttctaatgtaatggggattcccttgtataatgtaattatgattacaatgtaatcccattacatcatttttaaaagcaaaacaaacattgtaatggataatctgattccattacccattacaacaaaccaaacatgccaagggttagaaatctgaatagaaggaatcattatattctgctaccactaatgtaagattttctacaactttatatgtgtttattttactgttttaggaaaatcatatttagggtattattatagtcctattatcaacatacatgttaataaatttagatcctgataaaataagttctaaaatcttgtgacatgtacacatttagcaaaactcatatacaatttaagtacaattgtcaaaattttgtataatcacgactaaaatattgcgttttaacttaaaatcgccgcagatttccataacgactattctaaaccgtcaggaatactcaatttttcctgacagtttaaaatagtcatttaaatttattagcgacagtccccgaaaaaaaacgtttttagaacagtcgcgaatacccctttttgtagtagtgaaagaaagaactgagtccaaataccataaatgagcacttcactaaaataagattagaggtataaaggttacatgttttattatccatctcacaacacaagaattgtagaattaagaattgacttgatcagtgtgaacgatcaatccacgaacatagtttctgagaaaggtcattcatattttcaaatttccacctcaagtattagactgattgtgattcacaacaacccctaaaattaaatggttatattaatcattgaaaactcacaagtcattgataatattttagtagatcaatctatttagtagtttcttgcaaattgccaaacaacttacatgttgaaccatctgctctttaagagaggcttctggttcatccttaaaatgacatattagaacaacataatcaaggatttttagtgattacattttgtacagtaagagttcaactacaatattaatt

SEQ ID NO: 33323 - DNA, 1509 bp, Cannabis sativa
atcccctggggcgctaccctggccctcttctctacccgtagttgcgtggattggcttagaactatttggcaattgggctctagtggtattgaggctgagcaattactgttgttcgcctccagtgttcttgactctatttggatgtgtaggagcaatctactgcatgacaacactaccccaaatggaagtaaagtggcataccaaattatgttgaattttcttgagtacaaagcaaaattgctaaacactaatcttgtcaacaataaaacaaaggcctgagcgccacccccttcagatggataaatataaacttcgatgttgggtgaatgctctcggtgtggtggcccatgatgaaaatgggcaatttttgtgggcagaaagtagaaactcgagtggttagggccatccttaccattatggatgaagctagtgttgcgctcctcgctatcacaacgattagggaaagaggccatgtctatattattgtggaaggtaattcagagctgaccatcaaggtcgtcaatggagaagatgttccatgggaaattggtagaatcattaatgacaataagagcctgaaacagtattttaaaagctgcaacttttgttttgtttattgtgaccataattttgttacctacaatgtggttaaatggactaagtgtttgtcattttcaggtaatctcgagttagatttactccctgctaaactttttttataataaccagtgatggtcattttaatgtaatgatatttctcatgtttgtttcaataaaaaaaaataaaaataaaaggtctaattataattatttatggatgaattgaactgtactctataagatcatacttttgggtaatttaaacatttggttggagggaatgaaatgaaaatgaaaaatgaaacaacttttattctattattttattttatttgattttgattttttttattttaaaatattagaatatcattcttattctagctatatttttattccttttaaccaaacactacctaatgggtatttattatatgactttgagttggagagagtagacttaaaaaaagtaaacttagaaagaacatgaaacgcatgcaattgaagagattaatattactaccattttaattaaaaataaataaaacctatttggaaaggcaaatctcttatcattcaaatttaatttaaatttacattttcattcccataaaatctcaatctcataccaaacgccccatatggtaagggtttaacaacttggatttgttaatatagctacgttttctttactctattttttttcctatatatatattttaataaaaaaaaaattctagctgatttttttttattttttaatttggctatttgtagataatttagaaaaacaagtgaacatgggtttttcttaagagtatgaccttgagcccaaaaagctcatttgtaagctaaatgctaggctaggctgtccaagtgaacatcgttgcttgcacccattcaattgtc

SEQ ID NO: 33324 - DNA, 1907 bp, Cannabis sativa
  modified_base (413)..(441): a, c, t, g, unknown or other
  modified_base (564)..(567): a, c, t, g, unknown or other
ccggaatggttctttcacatcctcttattgggcatggtattgtttgttgtaaacattgaaaaattattattgaaaaaaatagtttgttgtataaatatttaagtttaactctcaattttgtaaataaatacttaagtttagtttttggcagttataatatctaaattatatttttgaaattttggtatctagcgattaaatgtcaaatcattatcacgtatcattttttttgttggtatatataaattattcttaaaaaaaaataaaaaaaatttatgacttggaccaatctaaaattgccacgtagcaatttaattaatatttaataatcaagtacctatagaaaattatctcataaaaagggaaatatacactacaaaaaatagttaagtgacaactttttagtcacaacnnnnnnnnnnnnnnnnnnnnnnnnnnnnntagtcacaacaaaatgttacttgttactaaaactcagtatttagttacaagttatcactaatttagttttagtcacaacaagtattgtgactaaaaactcatttagtcacaacaaattgtaannnntgtgactaatacctttagtcacagaccttttagtcataacataaagaatgatattttataattagtcacaatatttttaattttagtcacaaattttgttataactaaaagtaagattttttataatgataatattatctcaaaaactaatttataatttacttattaacaattctatctatataaatttactttttatacccaatttacaattttattatattattgtgttaaaccaaacaaaataattcaactaacattaatctaattatacattaattctcatgaacaatcaaatataattataaatttctaaataattatattttatattcttatttctagctaattaaccagattattttgaattttttatatgtacaatcgcactctaatagtcatgacaaaacatatattttaattttcatttttcattttctttttaaacaattatgaattatgatggtatatctcatccgaaacaccaattatattagatagaacattgttattgagtattaatagtgtccaacactttttataagtgtagctctataattaattaacgatatttcttaaaaattattttttaaactatatagaattcatacataagtatgatacaaataagaataataatactttttagtaattctaataataataataataataataataataataaaaaagtagaagtagaagaagataggttggtattatagaaaataaaataggagagagagtggtttttatggtgtatggttgttgtaaagagcacgacctcaatgattgcagccacaccccaatcattattcgatttgaggcacaatataatggagatggagagtacgttttcatgttgtatgtatggactacacacgtgcttctctctcatcttacttatatttattcttcttcttctctatcatctctatctaatttatctcttttataatattatatttattaacttaccaatcaaattaaatgcctctcatgtcgtttctaacgaagataacaataaataattgatacataattatggacgtacccaactctaatttcaatttttttttattatattaaaacgttttgtgacgatccgtttggagaaaaatggcctctatgatcttatatattatatattggattttgttcaattattgattacgatacgtttcttaatatcgttctcacctgtttttgacgtataccaatttattaatggaataattaaattaacaaaatttcaaatgtaaaagccttgcatttatattacaaaaaaaactaatggtgtgctaatttaacactgtttatttatcattaccaaaaaaaaa

SEQ ID NO: 33325 - DNA, 1680 bp, Cannabis sativa
aatctaattatattgaaatagattttatttaggacacaaaacccaacaaagtcatggttgaggtgagcctcaactttcgccgctgcgagagcacgattccagatttttctaaattttatcttttttaaatcataagatttttatggggtataaataggacttttaaggttcatttttagagacttttagattgcgtttttaagagagaaactcaaagaaataggagaagaggaagattgcttcatcaattgttcatcaatttagttcttttgtttttctatctatttgctttttaattatgattttgattatgatgaataatatagagtagtttctttttagttaaggtttatttcaaaatcctaaaacatgaattattgattgttaataatgaatattactcttgatttctctcatattaaattttttttatttttctatttttttttggtgaattttattttattttattttatttttctatttaaatgctatgaatattgtgaatttttgttatgtgtacaactaattaaagttttacattgttctactattatcttagaattacttctcacctaatagtttaggattctaaaaagagtgatagtttgcgattaatagtaatgtcaagggtattattaattgtgatgaaaaatagaacataagttaaatgaattatatgcttcactgatttgttacttagattaacttatctccatagaaattaatgtttttcataggttaaatagattgcatgctttctggatctattgcttggtaaaaatatttaattattgagcgcttcaccttgattaattgttatagggagattgaaaaaattgactgcttcagtattttctacggagttaatagtttgattgagaaatcagaatattttttatataagtgatcttgaatgattgttgagggtagagattaattcttaactatttcttaatatcgtaatatctatctttatttgctttctaatttattgtttaatctctataatcaaaaactctaacttcccattcttgttactaatttttaaataataaattgataatagtcctcgtgggatcgacctgtatttaccgttatactaaagcaattggtaatatagaaataaaaattagtaaatttattgtggtaaatgatacacatcaaatttttggtgtcgttgcacttaatataagcattgtcctcaagattcaatcaaataaaatcaatgcaaaataaaagaaaagggtaaaaaaaatctcccattaagtttgctttgtttaatgtcgttagctcgactgtaagttgcgttgatgtggtcttcacgttgggtcttctaacaaagactcaatcattatgtacttatcaatggaatctaatacattgatttgagtgcttcaccatcgaattctattttaagtatccatactttcatattcaacttcttgatcgcagtgagtaagaaaagtctcccaaataaagttgatgtagaattgggatcaccctcatcttttatctcaatcatgtaggaattacttagagtttctcttaatagactaagatttaaagaaacaaaatttgaataagacataatattaataatttctcctaaatctatcatgcaatgatcaaacctggttttaccaattgtgcattgaattgtacttgtcttaggcaaca

SEQ ID NO: 33326 - DNA, 1699 bp, Cannabis sativa
tacagatttgtatgagagaatctctcaactacttgagaaaatatctcaacaattctgaaatatctttgaccactttttaaattcaaatatttacttgattgaattaattaaataattaattaacccaaaaagagaaattcccatagggacataggtgcctaccttatgttgtttaggacaaggatggtgtcctttatcctgacatctttcctctcaacaagtcttgacaaattttgtcttaacaacttttatcttttccctatttaattaatttgaagaattatttagtaattcacgaaaataaataattaatatttttcagattcaaaatagatttttctaaaaaatattacagtacctttaatgccttcccttgacagtgtttcaagttggcaattcagggaccatgaaactatagttccaagctccaataaactagattatttatggagtctcatcaaccaactaatctttgtttattagttcctcgattactccactataaatatggaattaaacacttatagaattatatttactgagttctactgcagtgtccattaatataatcaattccaatgattagccctccatgtgttaatacataattagtttttctcaaattatcgttttaccctaataatataattacaattttgatctcatcaaaatttgtccacaacattcatgtcctagaattagcacttcaagggaaccaacattcgatctactaggaaagtgaggattccattattgtagctcatgttcccatccatccacattattagattcccgaaatagaagttgtaagaatcatcttctttgagaaactgtaacgagtaaatcaaagaaactaataaaatgaacatgagtttatgattattcaggattaaggtcgatcaactattgatcatcccaatgatatgaattaggtatttatagtaaatggcaggttagataaagatagctttgttcatatcggtccttgtcatatataatctctattatatacaacacctttacattgatgtcacatctgtaattcgaactaagaatacttgcactgaagaatgggcatcagtgatccgtagtagcaagcattgattaatgattccttaaatttaatatgctacggaatgttttattcatagtttagtgatcttagttctctgtacaactacaactcacaatctcatatatgaataaagaattttttgatatttatatatataaatcatttaatagtaaatattaataatttaacattcatgcatgtataaaaatattcaacactttattaataatcagaaatgtcttagcttttcaaggtataaaccctacaatctcccagttgccgtaaaaagcaaattgggcatctcccttagtcccgtattagtttgatgacacgtaaaatattttgctggtagcatctttgcgaatggatcttctaggctctgttgtgatgtgatcttcaagaccgtcacatcacctctatctactatatctctttgtagatggtacttcctctcaatgtacttgcctttctaatggctccttggttccttggagttggccacctctccactattgccactgtagagcacctgtgttttttctacttttggaactacttctagagatgtgtagaatttcttcaaccaaactgcttctttagctacttcgcgagctactatatatt

SEQ ID NO: 33327 - DNA, 1503 bp, Cannabis sativa
agtttaatttccacgcttattttactagtaatcccgattagggtattagggtttcataagtttatttggtagcgtgcctaattatttatggcgttacactaggtgaagcctagcctttggcaacataaaaaataaataagcctgagagcaggcggtaagcttgcgggatcaattggtaaggcgcaacgccaacaaaaataaggaaattaacgaagtagtcttgaagagggagcatggctctggacataagatgggtttggctccaagctccgaaccccccatagttgtgattgggcgtctcttcgtctcgaggcaagcggtgaaagaccctggacgcagatggcttgatacctgccacagtcatgatcttctcgagctgatgagcacaaaccaaagtagaacgaagctcatccgcttcccagctattggcgcgagaagtgtagttctcttgggcaacagggcccttcattacttcctctagagtggccaaggtggccgcctccttcttagaagatttcgtcccagaggtaggagcagacattttttctaaaaaaattagaaatccaacagttaggccccaaaccaaaccctaatgttaaaaaaggaatgggggtcccctaaccgttgaaaagaggccccctccggatgcttgccaaaaaaggaaaccccaaggactttccttaacaagaatcgggtgccaaaatcccaaaggcagtgacagtggaggaaaggaaaataaaaaagaaagagaagagaaaggagaaaacgctgagggtggaaacaggaatcgccctatgccctaaaagcgtcatctcgacgaaagagacaactctaaaagaaaaaagcaataaaacagcaaggacgcaaataagtgagattctacgtagtacacagcaaatccagtcatttcccaaaaattcagcactcaacccagacattctaatcatgttatacaaacaaacagtagacaagcataaagtattatgaaaacttacatgaagtttgagagctgggggtcggtgttgatcgtcgatgcaatgaggactggcaatggcgaaggaagagtagcaaataatctatggtgtctgaaattttttctctctgtgaaagctctgagaaaatttggcaaactagcgatactaaccaaatgaaatgagaaggctggcttttataggcaaaaacgggtgtgaagcagctgtgatcaggcatcatcgtacggtgagaatagcaatcgatttgcattctacagatctaacggttgtgataagcgctcatcaatgcggttggaaacgcttgagtatttgactgacacccattaaatgcgtcagatcattaatggacgggaaaccaatcgttgcctgcaaaaggtaaaaactgcaatgatgatggtcataaatacaccccacgttcccaaagcacgtgccaggtagtcaataatacaaccggaggcacctaaacaagcctcgtttacttcccaccaaaaaaggcttgggggtaaatgtt

SEQ ID NO: 33328 - DNA, 2256 bp, Cannabis sativa
tggagaatgtacacgaaaggcatgctttcagtgtgccatggatgggcatttcaagaaagaccgcccttagatgaaaaaggaagagtagaaataataggcaaaatccatacctgctcaggtgtttgccattagacaagcatatgctgcagcccgtccttcagtggtaacatgtcaaattcttgtcaacgactcctactatactgtattgtttgactctagggctacacattcatatgtggcatcaagagtaattaataaattgggtaggcattgtgattttataaaattatggtttggaaccctactacctagcggagagttagttatctcaaaaaggtagattagatctgtgccaattagaattgaaaataaggagttgaatgttgatttagtggaatttgaattgacagagtttgatattatacttggaatggatttttttgtccaagtatttgaccagtattgattgtaaacataaaaaggtagctttttagccagagggtgaagagccatttgcttatgttgggacagttcagggttctcacatcccaatcattttagttctaaaagctaaagattcattacacagtggatgtgtaggatttttagcgttgcaattgactccagtagacctaaaatagttgggcctgagaatgtcaaggtagtaagataatttcttgatgtttttactgaggagttaccgggattgtcgttacagcaagagatagattttatcattgacttggcacctggggtagagcctgttttaaaggcaccatataggatggctccaactgaacataaggtgctaaagatataacttcaagggatgctagatctagggtttacccaacctaaagtatcgccctggagacctccggtgttgttcgtagtaaagaagaaagatggatctctctctctccgaatgtgtattgattatcgggaattgaataagcttacaatcaaaaacaagtatccattgcctagaattgatgacttcttcgatcagcttgagaataaaacagtgttctctaagatcgacctgtgtttgggttatcattagctgagaactcaggaggaagacttcccaaagactgcacttcggaccaggtacgaccactatgaattttggtgatgtcattcgaattgacaaatgctctagcggcctttatggatctaatgaatcgagtgttcaaggatttccctgataaatgtgttatagtgattatcaatgacatccttgtatactgttagatggaagcagagcatgagcaacatctctatatggttttacaatgactcagagatcataaattgtatgtaaagtttaaaaagtgtgaattctggtaatcagaagtatctttcctagggaatattatcgggaaagatagaattatggtcgatttggaaaagattgagttaataaagaattggtagaggtcaagaacagttactgaggtttgaagttttctcaggttggcagggtataattgttgtttcgtagaaggtttctcttatatttcaatgccattaacgaaattgactaaaaagaaccaacggtttacatggtccaaaaagtgtgaaatgagcttccaaaagctgaagcaacaattgatcacatcaccagtgttagctttacaatcagaccaagagaagtttgttgtttattgcgatgcatctagacagggtttgggatgtgttctgatgcaagctgatagagtcatagcttatgctttaaaggattatgaaaagcattatccgacgcatgatttagaaatttctgctgttgtgtttgccttaaagatatggcgacattatttgtacgaggagaagtgtgagatttatacagaccacaagagactcaagtatttctttacctaaaaatatttaaatacgagacaaagacggtagttagatttagtcaaggattatgactgtgagattctatatcatcctggaaaagccaatgtagtggcggacgctttgagcagagaaggtcctaggctggtttttagtatcgtaatgatatcacctcagttggcttcagacatggttaaagctggaattgagtttttgttgggaaactacataacttgacacttcgatctgacttgttagaaaggaccataaaagtgaaattggaagactctgatctaattaaggattcgagaggaagtatttgttggattatattttaccaggacctagatttactaacaagtatgtttttaacataatatgaatttctaaaacgat

SEQ ID NO: 33329 - DNA, 2884 bp, Cannabis sativa
aattatttgtattattatttaattaataaaattaaaggacatagaattaatttttttttgtgagaattataaaattaatagaaatagataatatatagattgaaaatcaaatcaaagagaatataatgaacaatttgaccatgacaatgattattttaagatttcgttatttttacattattaacaaaaaatagttgaataatttattaacattattattagattattttggtgattatttaaaaagtataataagaaaattagatttataaatacgtaatagttaaaaactaattaatatttaataataattgttaatttaaagaatagaataaaaaattagattaaaaaaaaagaaaataaaaaagagtggttatgattttataatctggttttaatagatattttatattattaattattttcttaatgatttatatcttttttaacaatttcaataataaatcttttcataatttcaatttttatattttcatggtactaaataaaagtattaaagactacaattttgttaaagtggtataatatcattctcttctcttatccttatcttcagtgtgttatttcattctgaaaaaatataactaagtttctttagaataataaagcataataaaccaacataccatgtaattgggcatgtatatatgattataatgataagatagagatggagatagaataaatagagattcgtggatgtaatataaagaaagatgaattaaagttatattggtggtatgatttatatagattagtgataattataaaagaaaaatatcgtaattaaggagaagttgcggcttgctgcttggttgttttattggccatgaatttagggtataagtatgttattgtggagagtgattcgaggatagctatcaatgtgctcaaaggaaaggtgttttattgggctcttgaaaactatgtctcttttagtatgaagtcatctccttattttatcagttgtaatctttatattagcaggacttgtaataatgttgcccataatgtggttaagtgggcttttatctaccaattgtactgctctatcccgatctcctcttttctggagaatctattttgtaatgaccgcgaggtctaactgcttgtttgattaatataaaaatacgcttattttcgaaaaaagaattagaataaaaaaaaatgttcaaaaagaaaaataaaatatcttaactaaattaaagtagaaataaaattgaaaacataagaaaataaatttgggtaaattaaagtaattttagtgtgtttttttaataaattttcgttattaattaataattgataaattaaatttttaacatatcatctagtgccgtgatcatatataccataaatattaattgatgttcacttccgcaaaaactcaacttactttagaattgaatttcaaatattgaggtttaaaaaaaattacaaatattgaaataattctatgtaatttatacctacaaaaaaaattataagaggatgaagaatagtatatgctttcaataatataaatacacatatatgattaaataatatatattttagggtatttttacattgcacacccttttatagggtgcagggattcatcctttatctgtttcgacattcaaaataattttttaatctattttttttgtttcataattgtgtatgttataggtatttaagacatctcacaaaactctgaaaaattcagaataatttacaatatagaaagcggtgttcaaacaatctatttcacacgcgtataaaataaaatagtcacgtgtgcaacagactatttgaatcctatttttggagtattaaatttctccaaagatctaaattttttgaaagatatcttacataattacaccatacacgactatgaaaaaagttagactaaaaaaattcttacagatgccaaaataaaaagagttgcatcggtgcatcccttttgggaatgtgcattgtataatttttctatattttctatattttatttggttataaaaatatatgaatcaattttggaaatctaaatgtggctaaaaaagattaaaaataaaacagacggattaatgtaaaaataaataaattatgtagtatacctcataaggaaagtggatcatcgagtgtttctattagaaatatgctaaagatgagtgtttccattagaaatctactaaagaggagtgtttccattataaatttgctaaagatacagtttagctctatggttgctattagccttcatcaatagttcaataataattctgaaaattatttatgtatgaaaaagcaacatattttataacatttaaataatacaagaaagtctattctgatattagaaattgtattatggtagaagagatcatattactgtgtatgatatgtatactttacctgatagctttcaagattctaacttaaaaattcaacaatatgaaatgttagaagatcaccaatagaacaaaaaaaccattaatttatgatacaaataactaaagaactactcatattgaaatcaatatataaataaaaaataataaagttaaaagtaaaactattaaattaggctaatttgtaattttcccccgcactttgacacttaccaaattgtgccacctgaattacttttgacgttaacattttttcctaaacttttgataatgttaaatttgtggtattccatcttgttccattcattttaataacatagtgctgacgtgaatcctattatgcagtccacgtaatttgacacatgtaattttctataacgctctaatgttaaggcacgctacagtactttttcaattacagtgcaatcttcgctaatcgaagagttttcttgaaaaacgtgtca

SEQ ID NO: 33330 - DNA, 5388 bp, Cannabis sativa
  modified_base (375)..(384): a, c, t, g, unknown or other
  modified_base (432)..(435): a, c, t, g, unknown or other
aaagaaattgaaaggaagttcatagaagatgccacatcatcctccccaacaaaagaattataaagatatatagatagagaagagaaataaaaaaatgataaaaagttagctctactaaagagttattttagttcaaattttaaaaaatactaatgcgtttctttgcggtaaaacttttttaattgtcgtttaactaacatttaaccctccaactcaaattttggcgttaaaacctttctaactactgaactagtagtaaatttaaagcgtcattcggtaactgtcactattgtctgcttatgtgtacactcttgtgcacagggcacatttatattagtacacctaatattattattttcaaaattcattttaaannnnnnnnnnattataaaaaataaaaataaaatattttaaaaaataaaaaatattatnnnntttgaaataatttttatatttttaaaataataatattaggagtaccaatataaatttgacacatgtatgaaagtatacacataagtagtctatattgaaaattaactataaaaaatggatgataccttaaatttgcaagcagttcagtagtttagaggattttaccgtcaaaatttgagcttagatggttaagtgcaagtagagtgatagttgagagagtttagccgcaaaaaactcactaatattttattcaaaatttattaatgtgtattaaatatattaaaaaatatataatatgtaaataatgtataaaaaaaaaaaaataaagaagctaagaagaatactcccaacaacttttctactctatcttttgaaataaaccactaagttctactttctctattttacaaacactattacattaaatcatacatcgatttctttaaaaatacatcacaaaaaccttacttcattatattttattaatttcaaatatataatgataatatatactcatatcctatacaaaaataattattaaactcaaaaaaattaataaaatatgttacaagtaaagaatagtattctataaatgtagagcatgaataatatattttaaacactttaaaatgaaggagtttaaactttaaagcattttagtagtgagtttttagtacggttccttaaagtttgtgagttaggaccggcaaaacgggtcagacacgatgacacgactcgaaacccgcacgagagttagcaggtttgggtttaccttaaataggttcagttcgtgttcggattaactcgtctagcccgtttaataaacaagtcgtattctgattgacaaggctaacacaatagtgacctgttaatgacctatttaaagttattttagtactttaacgtgatataaatgggttataaacgtgttaaatacttcataaatgtattattgattgacatgtttaaataaaatatgcttataaatagattacacaagtcatgtcgtgtcaacccgttttatacatagatcgtgttattaaacgggtcgtgttcgaactaagtatgtacctgttatacatggatctcgacacgacacgaacacaactcgcgaacacgaattgccacccctattgtgagtgctcttgtgtatgatgtaatgtaaaaatttaaaataaaataaaattttaataaagtattataaagcgtagagtaaaaaagttgatattagtgctctaataatttaaatggtacgcttgtttttcggcccgaatatgaataaattaaccgccaaaatgatatccaaacatgataagcagtgtgttttatgattttgaaacatgaaccaagcttataactaagcataaatacaagtcatttttgttgtaggacaatagcattattagcttatgtatcggcccacataacgaaaaaaacaaatcaacctaagaaagactcaactagttttcctttgcaagtcaaggaaaacaaataaaaagaagtataacgtaacaagccctattacacaatggatgaaacatatacattgcagccaattataattacattcaatgccctcaataaaaaaattaaataaaataaaaaagacaattcctatatttaatgtgaagacaaccaggaggtgtagttgttgaggtaaggaaccaatgagtgtgtacaaaaatggtgtaagaggaaaaaaaaaatgaataccctgggaccaaagagaatgtttacaaaagttcaacttagaatctacttgaacaagcagatatcaaacctaacctgcagagatcagaaaccagagtgtgaagaaatgtgatgtgtcaatttgcagcttgttagttacagcagctgcgcctttaaatttaaaaacaattgcttttagtcaaccccgggaaacttctggaatggaatgattgatggatagttgctctgttcttctccagtatcctatgcaacaatccagtcccgggaaagaaatcagatcaatatgacctcgaacaaaatcctcatagcacccaaaattgagggtatgccctccccacctatggaagggggaaaaaatgaaagaattccaacgcgtaaaagggggtcagtaataaacagcgatcaaaactgggtgcaaggaaattccatcatcagagtaatctgcatgcaaatcacggcgatgactgctttgaatcttctgtcttgtttgtacggcacatacaatctgggcaaggaaaggtatatatggaatcattgggtcttttcatctcgaatccctttgaatcactgtgagaacgcatactcagcatttggcgcttgaaacttttccatctggaaagaaagggaaagaggtaaacctaatggttttacatcattatcaaagtgaacattttgaacacaaatgacaaaccaaaattgaaaatacatatcattatcaattgatatctgtaacttgaaagagtcaagaaaccattaaactaaaacaaaactgaagccgaatttagtatagaaagacagaattctaaatttatgttagaaaaatgcgacagaaattatttgtttcacaaaaaacaaataataccctacaccagcagctcaaggaaaggcaggcattttttgttttgcttcacataatgtacacgtgacaattaagaaaacacaagagcaatgagatgataaatgacatacccaatacttggattatcaaagagtaatgccaactttcgtttgtcaggcctgatggtcttagagtgtccaccgtacaagtatcttcggtggcccatcaaaaaatgaggaaagtttcctccttgtgttgtcacaaatacctcactgtgaagacaaacagtgtagtctaaggcagccatcctggaagaataattctagtagcagaagctcaagttaaaacaatgacactaaatcaaacatttaaggaaaataactgacaacctaatcttcagaccttgaatggagcaagttcctcctcagacgtcagcatatttttggtacgcaaatttgggaacatttccaaaagtggggccatggtttttccagaattgtatatatttccagatgccaagtagataaatgtgcttttatcaaagcccattccacgaagcatcaatccaacctaacaagaaacaagataaataagtgatctattgatataaatagagaagcaacttagaagagtcatcaatttccccaaaaagaaatagaggaattgtttatatcttggtaatggtaaaggtgacgccacaaaagtcagaaacattctaatttctgctacgttttttttatatttcatttttttatctcgacatcatactaaaggttacgcctcttaaacagacgagctccaaacaatcagatagtaaggtgttattgtgattttgttatttgaagggtaattatcattttttattaagacacaaaaagaagagaatataaacctggagataaatatgttaatttctagaccaatttagttattaaccaaaagcaatatcatggaccatcatttgtgtacttcaaaatcaactcagttccctacattgtaatagatatttacctccaatggagtaagcggacactttccattgattctgatagctccaggacggataacccggccaggtttagtaaattttcccttccaacctctttcccttgctgcttccatatcttccctttcttgctctcctccatcaaacacacaacaagagaatgcaaccatatcctgcagattagaagaatttaattatgtctgcaactaaaagtgcaaaaggtgataatctccttgcaggaggttgtcgtcaaaattctaattcttctcaattggatctaacctcctcaaagcgaagatgcacagaaatgtacttgccaccatattttgcactacgttctttcatcctagcaaccaaagcttctcctagagtcaatataggactcgcaaaccttaaagcttcataatttgctaagcatctgagtcgttgaacagcaggaggagcatcaaacgacagtcgatttgcaaaaggagaaatacgaatgaccctgtcaagttccaaagataattgattcatcaacagttaaacctcgtgcactcgcagaattcacataaagaaagatagaaattcaatgactcagtcacactacttaaaaaaatgacccagctctatttttaaaacatatttgacattttaatgatacaagatttctgtagaccttttttccccttcctatccaatttgttctcaacctattcaagtaaataaataaaatataaaataaaccgaaggggaaaaaaacaatatttcatgctccctaaagacactaggaaatcagctacacagtaaaaaaaaattgcacatcattcagaagtgtaagtagattaagaatgcaaagtacagctaaaagataacgaatccaaattcataatcaaactcacttttcttcaagtaatcttgggagaaccacgtccctgtaatactgaacaggtgagaaagcttttattctgaagttgtaaacattactcatgttgtggtcaaatctatccattatgtactcaggaatcttgtcaaccacttgcacatcattttccaaggcatggatgaaataatcttcatcataaatatctccgaatttgctggacaagtgagagcaaatttagaaacacaaaaagaaaaagaaaaagaaaaagaaaagccgccttgtacaataaaactactagtgattggtgtaagattaaaaacagaaaaagtgttgaaacacaatgaacatgcctatgtattattcaaaacaaatcaatatgataaaaagttacaaaacattcaaaagttctattaccatctatcccctctttggcttcataatattcatatataataataagaggcaggtagtaaatggtagctccctaaacatataaaaatgaaattattccagaaacagagattaaaagaaaac

SEQ ID NO: 33331 - DNA, 2442 bp, Cannabis sativa
tagtgtggtcgtccgaagatcattaaaaatcgttctagatatgagcatttgttccaaattcatgttttcttatgtcaaattacaaaattaattacgttttattcatattttattcattttaggaatgtttatgaataattttatgaaattttataaaaattaatgtgttgaataaaatattcaacctatcttaatgtttgaatattttctaaatatatctagcactatatatgaaatgtaatatagcatttaaatcatacaaatctaaattaattgtactaatactaaattttcaaaataaatacaaattaatacaattattgtatgataataaattaatgctcaatccataatatgtaattaattatgcatttacaaccatataatatcttaaatatttgtactaataataaatttgtataaataagataaatatacaaattagtacaatttaattataggaaatgaattaaatgcaaaaaatcctgaatatatacttaatgaaaaattataattaattcaatcaataaattatttaattagtaattatagaatatttaatattcacattctttaaatatcacaattattacaatttcaagcaaaaataaatcatataattaatttatcaaattaaaaaatttccgtaattattttttactaaataacatataatatatgaaaatatgtattaaataaaaatggaaaatttaaacaaatgtaatttaatgactaaattaacaaaaataagaaaataaaaaaaataatattttgaaatttttctaaattttcctttttttttttttttttgtaaactgccatggaaaacaatatgtcgtttctccttcttcttcctccagataggtcaaacgacccagtttagttgcatatgggtcacgtggacccgataaaaacctagatagaatagaagaatttcaacgtccaaatcacacgaaatcaacccagaaacgttctaaatgatgatattaagtaattcaagaaggtttcatgcaacaaagacatgtgaacaaccgatttcaatttcaccaaaaactctcggggtgcccattattttttcgaaatccaagtgcttgcaaagtaactgtgaggaggtgcagtgtgttagcttggaatgggtggtccgaatttgggttgggcgatttttgggggaagggtggtgtattatttatttattttttttaataaagagaggaacttttttttttaaatgaagagagggacaacttatttgtaggaaaattacaactaaaagtgcagaatcaaaaatcaatgaaactttaaacaatcaaacaattagcaatgacaagattaacaaatcgagaacaacaatcgaaaataaaacagggtcaacacagattatctaaaactagaaacaataaatgcaaaaaataaagaaatcaacaccaagatatatataggttcaaaaaatttagtaaaaacaagaagaaggaagaaagaaagagaagagcaagaaggaatattgagaatttttttgtttttattttatttaataaatcatattttttattattattttaaatttaaaataattttttattttaaataattatatgttttataatttttaattattattatatatatgtacctatgaattctcaatgcgtaaattttttgtcggtatttaattatgctgttaaattgggtatgaatgaacaaacaagaattcagaccttagaaattattactaacattttttaaagctaaagacttttttttaaaaaaaaaagtttcagctttatttatttatttttttgaaagttgaagacttatttttctttttttttttgaaaaagagttgaagacttatttgtatggacattttaagaatttttgccccaattatccctattttaaacagaaaaataagagcggatttgtcagaaataatcgcgggtaaaatgttaaaatggacttttacagatacaacccgtagtttgtgggcttttacagtctcaccgcccaagtttggataggtcgacacctgtcttatttttaatagtctgacactttgacagctatatcatatatttctttttttatttccttaaatagtttgacacgtgtcttatttttaatagattgccatcttatccaatatatgacaggttgagcaataattcattttccgtgtctcctaaactataaattgggttgggccattgacgttgtcccacagttactaccgtgtgtactgtcccatataatttgatcctttacttaatatggaaggataaatgaaggaaaacttaaaaaaaaaaaaatattaaaatttgggttaattttataaaaaatactatcacacggaatttttttaaaaaaatattgtgtttttataaaataacagtgaaacacaaaacagaacaactaaaaaagaacagtagaacaactaaaaaataa

SEQ ID NO: 33332 - DNA, 1416 bp, Cannabis sativa
gtagccctagagtcaaacaacacaatataaaaggagttgttagcaagaatctgagctgttaccactgaaggattggttgcaacatccgcttgtgtaatggaaaacacctaagcgggtacaagttttgggtcttacttctgctcttcctttttcatctgagggcagtctttcttgaaattcccaaccatgctacactgaaagcatgccttcgatacattctccaggttttcttgcaacgtgggcatttaggataggaataaccctaacgtccacctataccttggatcccatagaacctcatgctctgccccaaaccactagaggttagaacattcttcctcttttggtcaatattggtatcagcaccatccttactataacacgaagtaggaagagtggtggttccaccaatatttgaagaccctcggggctcccgaaggaattccactacgccctcagctcagagagccttttgaaccatcttagcataactagttgtggcattggttgtaatcaccagatcgtgcctaatcttggcatttagacccgcaaagtatttttctttcttactgaagtctgtaggcacaattcccaaagccaacttagcaagtcaattaaactttgttgtatattctgttactgacattgtctctccctgaaccaattcagtaaactcttttcgcttagtactgtagactacctcattgtaatattggtgttgaacatgtctcaaaactcttcccaagtaaatgcggtgacgtcccgggggagggatacaaactcccaccacacaagagagtcctcttggaattaaaacgtagcacaggtcacctgatcattcccggtgacacccataaagttcatgatcctctcaattattgtgagccactacttggctttcatgacgtctagacctcccaataaaactagaggcgcttgtttgcaaaaccactcatacaaaggtttcctacggttgccaacaataggttgttctgctggcaccgctggaaccaaagcagcaagcacttacaggggaggcactgcaagaggaccctactatctaagcctctgaatttctttgtcttattggtggatttgggcttgcatttctacaaacctttgctcctaatctggaggagcttgtggtggattttcatgtccacctccttgacaccttccacgacctctactgcgtccacgaggatttggaggatttcgacctccctgatcgcccctggtctcgaccatgttaccacgacttcttgtgtttggcacccatattataagacttagcctaagaacccataagtaaggtaggttagacatcgatcatgtgttttaaattccatacttatggagtttatgttggaattgttttaccaagatcttagatttactaacaagtatgttatttaa

SEQ ID NO: 33333 - DNA, 4182 bp, Cannabis sativa
taaccgatatcttggagtagctcttgccatcaccaatcaaaatacctctaataaacaatgcaggagaagtcttcactacagatatcctgattattgaataggttaacatttgcaactgaggacaaaagaagatcagatagagaaactttacatgacattaatgaaaacgaaaaagtattcgatttttagcttttcccaccttagaaagaggcaccggtctttgtgatttcgaagtcactttcaaagattagccttggttcaatttgatagcaccaatttttagtgttgatatggtatactaaacttgaagatagcacaagacaatatagaaaccagttaaccgaaattgagttaaacatgcaaaatggtaattgacacattttgattcaaagtacaaatacttcttgaatagaattacagatagaaaagtgttatatacatatgtatggataaaaagaaaagatgaaagtagtttgagtacttacaagttttttcttcaatgaaaaattgagcagagagagccaactaattagagtacatttctgagcccccacatttctattatcctatttctgaaattcacttactaccaataatctttacatgaacagaaaccgccttcaaaatgatgaaaacggtatgcatcccttactatgatagctcgatttgagaatctcgatacatacttaatccaattatggcaatcattacaaacgcgaagattcttaatcacatgtataggacgacggctattagtagagctaaggagtccaaaagatatcgccagtttctcgctatgaatgtatgttgttggatctctctgctcttgatctacctcgtttaagaggtaataacagtcctgcacatatccaaattcagcagcacgagtattcaaatgagctaagaagtcatatatcttatctgcgagtggatggagtctgtcaccgacgaagaatgcatgaaacgagttgttaatctcaatccaactacgaccaggctctttcttcacacccttttctctcatcaatctcctagtttgatccctgaaatcccatttctttgctattgcatatagatttgataggagtacatatgtagctgagtcctcgggttccaactcgagaagatgatgggcagcatactctcctatttctgcatttttatgtactgtacaagaactcaatagggtcctccacacaattgcatctggttttattggcatcttctctatgaattcttttgcttcgttgagtagaccagctcgacttaaaagatcaacaacacacacgtaatgttcgggatggggaattaaaccatactctttgctcatggaatcaaagtaggcaagtcccttgtcaaccaaacctacatgactacaagctgacaaaaccccaacaaaagtgacatggtttggagtcagaccgagttgtttcatctgctcgaaaagatttagagcttcaataccaagtccatgttgagaatagccagtaatcattgcattccatgaaacttcattcttttctggcatttcagaaaattctctctgagcatcatcaattcttccacattttgcatataaagtgattagaacattagaaacctcggtttctgaactgtatcctgttttaatgatcatggcatgaaactgtgttccttgttttacatttgctaaattagctgcagcactcactgtagaaccaaatgtgaacaagttagccttaacaccagctctattcatttcggaaaatacctgcagtgcttcctcacagtaaccgctctgtgcaaagcccgagatcaatgcattccacgatatgttatctttactatcatttttctcaaatgccaagtaagcttcctgtatgctaccgcatcttgcataaagacttacaagtgaattttggatcgagatatcatctgaatagcccgaaatacaagaccgagcatggatttgttttccccaagccagtgatttaataccagcacatgcggtgattgcacttgcaaaacctatgttgtcgggtttgatccctcgattttccatttctacaaacaatttaagagcttctgaaaacatatcatgctgtgtataccctgcaatcatagcagtccatgagacaacatcctcctctttaagtcttcttagaatttccagagcagtatcaagcttcccaattttagcatacatgtcgataagtacactacacgcatagacattgagctgaaatccagtttttattacttgagtatggatttgttctcctagatcaagttgcccaacagcagtacaagttctcagaatacttggataagtgaattcattgggaataatgccttctatcagcatctgcctataaatttcaaatgattggcttagatcttctaactgtccataagcaactagcatcacattccatagtaccacattttctgtctctgtagtaatgaaaaaatcgtaagcagtatgcaaatcagaacacttaacatatagatctaacagagaaccttcaatgataatatctgaagacattcctgcttttatagcatatgaatgaagttgttttcctttatcgagtgccccgacagatgcacaggcgcttaaaagacttgccactgtgacacagtctggttttaaacggtcatgttgcattttctcgtacaattttaaggctctatcaccaaaaccagactgagctagacccgagataagggagttatatgaaactccatccctgttctgcattgcactaaaaactttttctgaagatatcaagtttcccgagcgagcatatagtgttacaagagcattgcacacatatctttccgaagaaaaacctcccttgaaaacaagaccatgaatttgctctcccatgttaaacaattctactttggtacaagcacttagaacacttgaaaaaacatatggagtaggggagattcctgatgtgtgcatttggcagaaaagcataacagcttcctcttcacgtccattctgagacaaaccggaaataattgcaacccaagaaacactatccctcaaaaccaatttatcaaagacctttctggcagaatctacatatccctttttggaatataaatcgatcaagagattgcttaccaatggagctgtatcaaatccatgaccaataattcttgcatgaatttgtttaacatagtcgaaaccaacatcaccatagccacaggcctttaaaattccagcaaaagtggtttcattaggatcaatattattcattaccatcttatgatacataaccaatacttgagaaatcaatttccttgctagtaaagcttgaattatcttattccaagaagataaacttctaacagccatttcatcaagaactttaacagccccttcgaaattatcacaagaaatataagtttccataagcctatcacacatgacaagttccccattaaaacccaactttaaaattctgcaatgaagcttcctagcatctaccaaagacccagaatttagacacccctctaaaagccatagataagtttgaagattagcacgaataccacgttcttccatcaaccgcaggaaatcaactccaactgagttggaaccttcactttcattaagagggatttcatcataaacatgggaagttgcagcacaactaaaaccagctgaatttaactgcaaattcataagggaaagacaaatcaagtctcaatgattgaatgacaaaaaggtaagggagaaaaaaacaaaaaggttaactttttattaccttgtgattgttgttgctaaaagagaagaccctcaaagaagaatggggcttgaatttacatgttagggaatgacacaagctgcttagaagagaggctgaaagtggggaatgaaggagttgaatggagtcacaaaccatcaatgacttagcaagaagagtcatttatcaactggggttaacacaatatacaattaaacttcatccttatatagaaataccgggaaagcttcattctttataattatcaatgaacataaaaatgaatgactttattaacaagttagcattttttttgctggcccaatgaattgaactctcagaggcattttaacaaacagtttatgtcatggcatgattaaaatggagtagtgagtgagcttagagaagagacaaacgggaattaggatgttattgagtggac

SEQ ID NO: 33334 - DNA, 3087 bp, Cannabis sativa
ttattgtattattgaaacttaattattttcatatttattttcaagccttatggtatttttagttagtgttgcttaagctttgctgtatttgtgatagtttaattattgatggtagtgtaacctgtaaaaaccgcaccgcacaacaccattttttgcagtgtagtttccgcggttctttagtttcacggtacaggtgcggtttgggaaattagaaaaacttcatgtgcgggttgatttaaaaaaatggtcaaaaactgcaccacctgcacatcgaatactcctaaatcagacgcataatttaatagttttacaatttttttaataaagagaaagtttcaaattcaaatcactctcaaaaatatataaaagaaactacactaatgtagataatttttagacttcagcgttgctaaacactatttagctcgacaaaacgtacaacattaattaattacggactcatttagtacattgcattgcctttgtattatattgtattgtgttagattgtattgtattgtattagtattatttaataaaatattgtgtttagtattgacttgttttaatagattgttttaatacactcgaccccaacaccgactacgggtcgggtcccgggtccgggtctaggaccaggtccgagttcgggttcgggttttagtttgggtctgagtccgggtttggatcttggtcccgggtctgagttcgagttttgggttcaggtctgggtccaggtccgggtttgggtcccaagtcccgagtctcgggtctgggttcgggtctcgggtcccatttggggggcggggggtcctggctctaggaccaggttcgagttcaggtttgggttcgagtttgggtccgagttcgggtttggatcatggtcccgagtctaggttcgagttttgggttcagttttgggtccaggtccaggtctgggtcccaagtctcgagtcttgagtctagagtcccaggtctgcgttcgggtcagggtcccgagtctggatctgagtcccgggtccaggtccaggtctgggttcaggtcttgggtcttgggtctgggtctgggtcctggatccaagtccgagtccaagtttcgggtctaggatctgggcttaggtgcatgttccaagtccgggttcgggtcggagattggggttgaccctgaatattttctaaatattataatacaagttaatacagaccatttgatatgtattaaataatacaacttacattgtaataaaaaaaatttgatcgtaataaataatacaatacattgcttcatctaaacatagtattattagtttgttttttttttaacatgaaatatcaacttcattgaaataaagcattcaaattataaattggcattataatctgccagacataccaaacatagtattattagttatttaatacaatacgacccttatatgacataccaaacgagcccttagtctatgaaaatatacatgggcagcccaattccgcttagtccattctttagaaaactcatttttaaatattaagattcgtcttggaaagtataaaattatgggttttaccatgtcgtacccatatttacaagtaaggtcaagctcaatctgtgatcccaattagttgtgttgtgcttgaattcgtattgtgttctaatgtgcctaaacatgagtctgaatacggccaaaatacgagtaatttttatacaagtatatattattttcatttaatttttaagcttaaataagaaataaataagttagtattttttaagcataaatatattagttaaataatttttttaataatattaaataacatacaattatatatatatatatattttaaataaatttatgcatatatgttttaactatataaataaataattaaagtacaaaaaatatatttttagatttaagtcatgttttttatgtttgtgctttcatgtcatgcattcttacttgttgtgtcgtgtcgcgcttaaattcatatcttttatatcgtgtccaaatcctataattttccgtgtcatgctgaacttgagcacatacttttttgtatcgtgcttgtgcctcctggccatcttgtgtcaatttttatgttgtgctgaaaagtccaatccaaatgtataactttaaccatatatataataggtttttttttttttttttataaacattcaaaaattaaaaaaaaaaaacaaaagacgtatttatagtttttttttaatatttttatgaatttaaaccttttttcttacaaaaatacgaacgattgtttctacgttattttcataacaatattatactatgttatttgcatgttattcatcatataagttttatatttatattgttgttgtggtcaaaaatttaactagagaatacttgctatttttagtaagtgaatatcctctgcctcaacttgaattcttatgaatctccttcttgttctcttatcatctcctctccggcggtcctcaatttggattattaggagcacgaggggtttttctacagaaatttcttccatacttaagttaaaaaggatttttacatatatatatatatatatatatagagagagagagagatagaaaaaatataggaaaactatagtttgaatttcgagagagaatctgaccctatttcttactcaattttacacttttataagctaagcagatggaaggcgagaataatcttactcagctaaatgtaatcgactcaacgatcatttgaaattgaccctggactttttgcttataccccaactgattgatcacgcggatcgatgacatcaacctcttatattcttgctttagcgaattgatgaagtcaacaaaattaagatcatactttcatctgatcggggaaactatgtataggctaagactctgttcttcgaatgcagttggattggacaattcctttagtggaccttcatgggcttggtcttctttatttttattttatttttgtgaatacttcgcgaggagctggatgagaagaaactctcattcacactccatgttctgagaaatatttaccatccgaaaagaggaaaaaacggggtctttgtcta

SEQ ID NO: 33335 - DNA, 1886 bp, Cannabis sativa
aaatagtttcttttgatgttagtcgactcccatgggttcgaccttgcacttacatgaacactatattccaaaacgattcgtgcacttgcgagtataaatattaaaacactcatttttgggtacaacaatatgtgtgactctaggggcaacaagaaattggctcaatttgttgacagtgtaggctaaatctggtctggtaagagtgagtactgcagcttccctataatctgcctatgcaacttaggatcagcaagggcatcctcactaccttggctcaactttagatttacctccataggtgtgttagcagccttgcatcctagttgtccaagatcttctaggaattgtaaagcatagtgcctttgagacaagaagatacctttgtcatttctagcaatttcaagatccaaaaaatacttgagttcaccaaggtccttcaacttgaattggtcattcaatctagtttttaaactttgtacaacgccatgttgttgcttgctatgatcacatcatcaacataaacaagaaggattatgatgcttgatccttgttgttgtatgaataatgagtgatgctgtagaaaatttttcaaaccattgcctagaagcttgttttaggccatagattaatttgtgtaacttgcaaacaacattaggtggaaactctcccttaggactatacccttgaggtatagtcatataaacctcctcatacaaatctccatgcagaaaagcattattgacatccaattgctgcaaaaacaagccattaatggtagcaagagcaagtattaatttgaaagaaacaagcttagcaactggggcaaaagtctgattggaatcaatgccttcttgttgactaaaaccctttgcaacaagccttgctttgaacctttcattggacccatcagcattgtattttatcctataaacctatttgcacccgattgcatgatgaccagcaggaagactagcaatgatccaagtcccattagatattcaagggttgtgatctcatggttcatagcattatcccacacagggattcctttggcttggtgatacaattgctcaaagtggctagagatggcaagaaccagagcacgaaattgaggacacagcctgctgtaaacaattatatcagaaatgagatgatttgtagaagctttagtgacatgagattgaacattgttagtggacaaaaagcaatgataatcttgtaaataggtaggtctttgagtatgtcttataattttggtattagcaacaggtgtgagaatggcaacaatatcaggattagaaatggaaattggtgtattaggagcatcagaattaggaacagttggtagtaaattgaaatctggtgtatcgtcttcaggagcattatgaatatcatgataattgggactaggttcagaagctagtgaaatatggggatgtgaattgaaagcatcaatatgtttgtgagaagcatcagcagcaaaaaaattggaaaaattagaaggcaaattgctttcatttaaaaaagggaaaatgtgctcattaaatattacatttctagagtaaaaaaatgttgtttgtgctaagatcaagcaatttatatgccttcattcgagggggataccctaagaaaatgcaagcagtagcctttggagagaacttagatctcccagctcctaatgttgaagcataggccaaacatccaaaactctttaaatgttgataactaggagctttagaattcagaatctcaaagggggataaatgtttgagattaggtgtgggagttctatttataagataagcaatactagtgagaattttaggaaccagtgaagaagaggcattatcgccattggacgggaaaataagggcttcgtggatcag

SEQ ID NO: 33336 - DNA, 1802 bp, Cannabis sativa
  modified_base (390)..(391): a, c, t, g, unknown or other
  modified_base (464)..(468): a, c, t, g, unknown or other
  modified_base (645)..(653): a, c, t, g, unknown or other
  modified_base (1374)..(1376): a, c, t, g, unknown or other
agtgcgggtccaagtttgggtcttggtcacgatctcggtccagatcaaggtccaccatttcgatcccagtttgggtcttagtcttgctccaggttcctatccggatccctttcttggtctaagtctgtgtttgggatcgggtaccacatttaggtccaggtccgggtctcagttccaatcttggtacacgaccgtgtccgggcctgagttcaagtctcagtttgggtctgaggctaggtctctattcggttcgaggtctgggttcgggtcctggtcatggtcctagtcttgttctaatgtctaggttatgcgattcttgttcaggttctaattttgggttccaagtctaggtctgggtccgggttttgttcttcgtctgggttctggtcnnagtctgagtcccaaatctagacattgagtactcgtttgctccaggacgcgttacccgaatctcgagtcaagannnnnatcactgtcacgggtctcggtcttatcttgttcagttcccatgtcccatttctgagtttgggttcgggtgtgggtttgggtccttgtcagggttggggtccagggctgggtcccaaatcctgacaccgactacgcgttttgtccaagccctcggtccagattcggatcccaatctcnnnnnnnnntctggttccatttttggtgctggatcacgagctgggtcctaggttcaagttcgggtctgggtcaggtactaggtcccggtcctagttctgtttcccacgtccctatcctgattctgtgtccaagtcccagttattgtgtgggtttggctcccgttctaggttcgagtttgagtcctagtcgcgattcgggtttaggtctctgtctgggttttgatgtgggttcgggtttgggtttaggtcatgaacctggtcctagtcatagtttggttctagttcaatttgtgattctgagtttgagctttggtttgagtttgggtcggagttcgagttctagtctgagtttgggttcggacctggatttcagtctaggtccagatcaggttccgagtgtgggtttgcctccttggtcttggtctaggtatggtccgagtcctaagttcctatccttattttagtctggattcagttctgggtctaagtccttggttcttatccatgtttgggttcgcgtttgggtctaggtccaggtctagctttgggtctgattcttggtgtgggtgtttgagttcgggtccgagtctgcgtccgggtttgtgtccaggtctggacctcgatctaggtctaggttcgggtccaggtccaaattttggtcccgactgcgcgtccaagtttgggtgtgggtcaagatctctgtccagatctaggtctagcatttccatcnnngtctgggtcttggtccgagtcctgcttcgaatccggatccctatctaggtccaagtatgtgtttgggatcgggtcccaaatttaggttcagggctgggtctcagtttcggtctgggtacacgaccgtgtccaggcccgagttctagtctcagtttgggtctgatgctaggtttgtgttcggttctaagtttaggtccgagtcctggtcacggcccaagtcttgttgtagggtcctggtttggcgaatcttgtcaggttttaattttgggtcccagttctaggtctgggttctggtttggttcttcgtctgggttctggtcgtagtctgagtcccagatctagacacagactactggtctgttccaggcctcgttacccgaattaagagtcaagatatggtcactgtcacgggtctcggtctggttc

SEQ ID NO: 33337 - DNA, 997 bp, Cannabis sativa
atccatgtttgacattttttaaagctatatatacctatataaattggcatgatttgtgtcaatacaacttttgtcatgtaatactatacattggaccgttcattcgtttatattgcaacttattacgtacgtaagagtttaaatataatacgatttaggattggttcgtagttgtaaaaatctataatcataagtataaatacccttaacgcaaaatgatttaattcttgacaatcatatgtatatattaattaattattgaaaaaagtttatatgtaatatttaagttgacaaaatcaaacgccacttgctatagtacttgttgtcaactagttagagcaaccaagtatatatatacatatatttatagatcattccacttgacatataactgtacgtacgtagtaataccatgggctttcgttgatgaccacttgcaaaaaccgcaattgatgatagattttgtaaagctgactttttctttgacatttataatttatcatcattttgtactttttacttggcaggggctattacagatgcactcatcgaaatgttcaaggatgtttggccacaaagcaagtccaacgatcagatgatgaccctacaatcttcgaaatcacataccgagcaaggcacacgtgcacccaagctcccggtcacgtgattggaactactactactactacttcgacagcctcaactgaccaaaaccaaaataataacaacttcccatcattattggaacaaatgagtcatcatcaaactcatcaagatgatcatcatcacaacaatattctttctagtctaagatcaggcctcaaagttatcaccgaaggcctagagaatcctcatgatggccaatcaccaccattaataatctcctctaataatttcaacttcccaactatctcctcttctactccactacccgtcaatgctaacatgatcgacgcagtggccacagccactgcagttgtagcagcagccgccgggg

SEQ ID NO: 33338 - DNA, 2177 bp, Cannabis sativa
cactttgtgcagactgagagtgaagttgaggtacaagatctgcttgataatcttgaacttagagataagcaacaatttgtaagttttcttagaattattaacggaatacacctttcttatagaagagtttaaatatcttatatattcatccataatgaaataagttctgagaaaatttgtgtgcttcggtgatataaggatgagaacttgtgtattgttttattgattatagttgaaattaaaaaatggctaaggttaataaaataggggaaatcaacaaatggtgatatattttaaattttcaatagtaaaattacaattttatgtgataagaatttgatatatttttttttattgattttgacaaataaaaaaaatatataaaaaaaatgatgcattattagttcttaaacaaataaattttggaaaaacaaaattataaatttagatataaaataatttttttttaaaaaaacaaaaaaagttgggtcggatcagatccgatccgagtatctgatccagcggggcggggcggggcagatccgtacataatctagatcaagtcggatcagatccgccccgccccattgacattcctatataaaaccaatcattttttaaaaaacttaaaacgaaattaaaccataccttaagcttttcctctttaaggatttgctatcctgctactactagagcttagatcgctaggttttaggttgaaaattgaagaaaataaatataaagagagaaatttttgtagaaggagagagaacgagaattcattcgttcgttcatttattgtttcctgatataacttataatatatatatatataaaaaaattaacgttgacttttatatatataaaaataatattattaataataatataataataatgtgacattaataaaaatattaataaaaattttattgttaataattattttattattttttaaccattagtatagaacgttcaaaacggacatccgagtggaaagttatgacaaaaatataatttttgatctcttaggaatttctaaaaaaggcaaaactcaaaaattccaattttgcatttaccaaaacactagcaaaacttatccaaatcactccaaatttcatagggcgcatatataccataaattttaccatccttatgtaacaaaaattaaaatcgagcccctaaatgaaaaatgcccttaaagttcggactaagctttaaaatgtcccaaattccatttctaactaaaaatcacctcaaattcaataactaagcatcgaaactattttcatagctaccaaagaataattctacgaagttagaatctctatagccactctaaataataaaacccctatataaaaccaatcgttttttttaaacttaaaacgaaagtaaaacggaccataagctttccctcttcaaggatttgttattctgctactactggagcttagatcgctaagtttcaagataacattcgaagaaaatgaatatagagggagaaagttttgtcgaagagggagaacgagagttcgttcgttcgttcatttactgtttactgatataacttataatttatatgtatataaaaacttaacttaactttcatttgtataaaattattataataataataatatagcagtattaataataataatataatgttgataaaaaaaattattattaataattatcttatatatattttaaccactaagaaacttctacttctagggtatttggccaactttgagtacccaaaatatttcagtagttctaaaatcaacttatcccaataatctcataagtatttctaactaaaactgttgtaatatttttggccttcaatcaagtctctaaggttgccaaaattgaaaatatttttatttcataaataactcatattatatccacgtattttaaataaatttctgtaattaacaaattacgcttatttatccacttatcgggtcttcagggtcaccgaacctaaatattatttattcgatatatagcacctattacattcacacatgctataaaaatctcctaaatttataaattatgcttatttactcatttgtagcaaaatttaaattttatgctgaaatagactagtaggatcataatcccacttattgcatgattaacccataatataaatataa

SEQ ID NO: 33339 - DNA, 2698 bp, Cannabis sativa
  modified_base (2164)..(2167): a, c, t, g, unknown or other
ggcaactaaaattaactaaaatttcactaaaatttcatcaaactttgtggtaactacactaatataaaatttaagtcgaaagacatttacctaatacacctaagcaagattttttttgaaagtatgtatttattcaatcaaagtggggaaatgttatattttgattttgattgattaaataaatggtacatgtgtgtcacacattttaatctagtaggggattgttatattatttaataatataatgtatagattaaaatgtggtaatatattattatgtgaaaatatatattaagtatttagtaaataaattgtgtaatatatgatttatttaacctacactttgtaagatggagaagagttacaagattaattacttttgtaacttcttttggttgatcatattttggtgtaataaaaaagatgttacacaaaattgatgagaggattcaaaagttatgaaatataatcgttacaaattatataaatactcatttatatgagagaaatgagatgatgtgtttgaagtgtgatcacataaacacaatatataaaggagtctaatgtgctcatttagatgagaaattttctatcaaaaaagtacattgttagaaaaccctaaggcttgataattctcaaagctttactatgagagttctcttagtgcttagagatagggaaaataagcttttagacaaaggtgtaataccttgttcaagtcatagtgattcctaatctacactcaagattgtagtaagtgtatatatattcttctcttgttatatgtattatattacatatgttgtattctttttcttctacctttcctttatataatatatatagtgtatataagtgtgttataacatctatttaatcaatctcttttactgttcttgtattatttttatgattaagttgtatatattttaatttatcttttattgtaataaaatctctgatatagtatatatataatatagatgacatatattaaagatgtgtagtatatataaagagtgtatatattatgtacatatataatatataatactatatagtaaagatataatatatataatagtatgtatgtatatataagagtgtttagagaagaaaaagagaataatataaaactagagaatagaataaagtaagaataaaagaacaaacacccaaagtggagatcgagatcaccaaaagcttgaacaaggtttttacacctttgcccaagaagattatttccccctctatgaaacacttagggctttgtggaaatacttctaggaattatcaagccttagaactttttagctttgtgtttgaaagatagaagagaagagtatgtcttaaagaatgaaccaatgtctttatttatagtgtttaggatcacacactttgaaattcaaacactttacatccaatggttgttatcatctcttaattgggtgtaaatgagattaaacgagtgatttggaggttatggaagttgttagaaagcatccccattgtcaaaaacattcaaatcataaatctgaagaaaaaaaaaccgtaactagttactagttaccaaatttttttaacttttgtaaataactctccaaagcattcaaaatcattctcactttattttatatcacttatacacattataaatgataaaattaaatcctcaacaactatatttatattatagctttgaattttataagattaagttgtgtaaccactctttacacacataattggtgataatgtggaggttacaaaatgtaagtaactccacctcttatattacaatttatgtgaatattacatgtatgtaattctcaatcacattatatattatactcataataatatacataatatataataattttaatcctaaatattatattatttaataaagcgaaatttgtagcaaaagtccttaaaaagttcactatgatgaagattaatccccaaccttgaaaaatagtagcaatagttctcaagatcacatttgttgtaggtccgttagtcttaaatttgacagatccattaagttattattattacgacgtgttgagccattattagtccaaataataattttaataaaaaataattaaaaattaaaaaaatgttttaaaatataatctttttctttttcttttctttnnnnttttcttttctttttcttttttctctttcgtcttctacctccagcagtccacccccaccacccctatatcattttcttcctctaaccacactaccgtaacttcgtcttcttcctccagccaaatctggaccccgaaccacccctatcttcagccacactctagtcctcgagctaatcagagttccatcgcgcacggtgaccttctaccgtcgaaggtgaagcttgcaaaaactattgacgagatataaaagatctttacagatagaatacgtttttgaaagtcgttttactcaatagatctcgaatatgactagatcggacccaaaaaattttactctgacgagcttttgacgccgactgaacgccaaagggaactacaggaaccttggagctcgtggtttgaaactcgactaaggccatggtggccttgcctccagagaatgacgtcgaggcccgtaatggcgtccattttttacagcgagacttcatcggtggtaaaaaacatcgagcccagagagagagagagagaga

SEQ ID NO: 33340 - DNA, 1645 bp, Cannabis sativa
  modified_base (1589)..(1620): a, c, t, g, unknown or other
ttattgcaactagtgctgcaaccaacccaaaccgtaaatttgaaaaaaaaaaagttaaaaaaaagtatatggggtaattctcctttattttttttatggcataaataaataacactgtagaataatagatttttttttttacatttatatgagtttttttatgccatatttttatataaaaaaatagaaatctcatatttgtaaaacaataataagttttactagaaaagtcatcggcagcggaaaagtcaccgttgccagaaaggtcgctagaaaaatcacagtcattgaaaaagtcactagaagtaaatgtctcaaatataactaaaaatataaccgggttctatgaataaaaactaataactgaaaccagttataattgaaatataatcagttttgtaacataataaataaaaataaataacataaaataacttaaaccaattatagttaaaatagatctagttcgtgttataataaatacaaactatagcaggaaattttttgaatagacactcttaaaatggcaccagtggtgcttagcatcctcctatgtgtcaatatcgctatcggttcaactaagtatcgagttccatataattaatataatagcttttaaggagtatcgctagccaatcataacgcgacatgtcgagaaagttttaagtactacttgtgcctaataacaatgctcaaaataaatatatcaatacctttattataaagtaatttaattggtgcatgtatagaatgaaaataagtctactatgaatattggtgtattgaatcaatactcggttagatgtgatgtattgatattcaccctaatttattgttcaattggtccaccttggttgaaaaaactgtaatgtgcttcgttttaagaaaaaagaaaaaaacctcaacattaggtaacttcctcctcatcattaaaaataaatggttgttaacttgttcttggttgaaatggtccactgtattttttttttttgctgaaagattgtattttctgtgtattgcaaactacagaactaggattcaatcattggcttcttctattcacataagtgacttaaaagaccaataaaagaaagttataaaagtgtcaatgttttgttgattattctcttcaaataatcaacaattcatatctcaacctacccatgacatttaacgaattcaaagaacaaaaggataaaaaacattgtataacatcgaacaaagattaaaaagaagaaaaataatgctgatatttcgaccaaaatttacatcccgaccgaactacactgcaaaatttagcgactaatcacatcttgtcatgtggctaggatgcaaagtatttttgtaattaaataactttttaaggttaagaaaaagtgttgaaccatacattgtttgtccgtattggattaaaatatcactttatcctattctaaacagcaagctatctcgaggccctccttatactttcgttgtaactttttaagaaaaaacaacactttatactaatttggtaaattgtaaatggtaggtgatttcagagtaaagagattattttgcaaatacacaaaaaaattacaaaaatacgnnnnnnnnnnnnnnnnnnnnnnnnnnnnnnnnttttaattttatttacataaaatac

SEQ ID NO: 33341 - DNA, 1430 bp, Cannabis sativa
  modified_base (70)..(78): a, c, t, g, unknown or other
tgtaaataaaatgaaaaaaatcgtaaaaatgtttaaaatttcgtgaaaccgtatttttgttttttttttnnnnnnnnntttttgtgcatttgtgaaataaaccctaattaatatcatatatgtattcttgactctaaaatatggactaagacttctaagtcacaccctcttgctagattggtgagaataaaataatggttaagtaattataagagagacacatcaaatttatagtagataacttcctgtatcacgacagtaatggagttacgtctacttcccctataaaagtgattttttttgtttttaaaatttttaagtttttgatttttaattaaaaaaattaaaaaataaaaaacaattttataaaacatatttttaaaaaatatttttactttttttatttaaaaaaatagaaaaatgattaaagaaatattatcgcccataatttatattattcacattccatttcaaaagacgagagcataacatgaacatgagatttactatcaaatagaaacaaaatcctcaaatttgaatatattgttgcattaatttaattaattagaatgaaactataatttatctaaaattgtcttctaattacatgtttttatatctatatatatatatataaaagaattatatagatataaaaaaaagaattaccacatatactgttttcttaatttttttttttttttcaaaatttacggtttgggtttctaaagtggtttctctggtggtttctatgtgagttgctatacaattttttgttgcgatttaaagtcccgcgctagttgtaatagggaattctatatagaattctgtaaaaatattaaaaaaaaaaaaaaaaactattttaaagtctaaaaataaaaaatcccttaaaaaaatatcggtaatacaattttttttatttgtttttattaaaactagagattatacagattttcaactcctaaataactagagatgactatgtcttatattcatcttacatacatataatatatgaaatattatataacagaacattaatttttattaatcattattacaagcctaattatttcattaaaaaaattatctaaacatataattaatatcatacacagctatatattagcctacattgagctggaaattttctataactgattattacaaagagcatttaatttttgctaaaacaattctttcccataaactaaacacctaaaaaagaaatagaaaaatccataaaaaaatagagcaaaaaaaaaaaaagctgaattgtaaacttatagtaggtaagtagtaactatataaaattaactatataaacaaaacataagaagtaataaaaaaatatataaaattagtatataaaattagttcatgtttatcagcataatgaagtaataaaaaaatataaacaaaacatcaac

SEQ ID NO: 33342 - DNA, 1353 bp, Cannabis sativa
  modified_base (1256)..(1257): a, c, t, g, unknown or other
catcaacaaaaagagcaggagtcgatggaagcagaagttgatccaagtcagctgaggaatggttatgacccatgttggaagcagaggagtgaatttgagcatcctggtaattctgtagaaagcttgaaacaaaatcttgaacattatcaattacactgcgtttgtgaaagagatgggcattccttatattccatatttgccaaattaaaccaaaaaataggggaaggtcatctctaggaagtaaagtaaggctatgaagataaaaatccctgatatctagcctacgataatcaacaaaaaacttcttgaacttggagtgatggcaaatggtttttactctggtacagtaaagaagagcatgagagaccgactctgaacttcccccacaatatgagcagcaagagcttggaatagcatgcttgtggaagaggttgagagcacaaggaagaagatggttaaaagccttccaggtgaaacgcttgattttaggaggaaggttcaaagtccagagggttttctaccaatccttaaaagggttaggatcggaagaggagggagaagtagtgagggcagtggactgggcaaggtgataaacagaattgactgtgagaatgccggagtgatgaaaaccccaaatgagagaatcagtgggtccaagatccaaaggaatattgagaacaactttggcttgataggtaggaagaaaatgctgcagtttttcagtattccaggtcctgtcagggttaacaaaaacagaaactgtagagagagaatgttcaatgggggtgaagaatggttggatgggagatttaggggatccaattaggagcagaaatagggatatcacagcctgaacagattttccagataagcccttttttgaggagttgggaaccccaaaggaggcttctccaggtaaaggaaggattgtggccatttggggcatgaaggaaatcagtatgcttaaagtaacgagcttcaagaagagaatgaagcaaggaatcaggagtagaccagatccgtcaagcctgcttagccagaagagcttggttatgagaagttagggaacgaaatcccaagcctccaaagaatttagagacagaatgggcagaccaatttctccagtgaattttcttcttatcaaaagtagagccccaccaaaatttaaaagtcaaactttgaatggaagcacaggtggatttagggagtttaaaagaagacattgcaaaggaggggatgttgggttttatgccctnnataaaactcatttcaatataatttgatttacttattaatatagatcagaaataacatttaatgttgcacggttcacatgatttattccatgattat

SEQ ID NO: 33343 - DNA, 2666 bp, Cannabis sativa
aatatgagatgattatctcttataatccaataaaagatgtaacttttcaaaatccatcttttattatctcataaagtgagatgttgaccaccaaattgaaaaaaatttaaaatattctttattcataaaataaataacaataattctcacaataataataaatactattttattactatcaacattattatcatgtggattgtctcttttaccacagaacaagggagattgaatgatcactttccagaagtagttccgcacttccttaaccattttcaagacatcatgggcaaagagaaaccaacattaaggccgattcagcaggattgtattgatatgggctcaaatctcactttggaccaacaggtacatttattgaaacctttttctcttaaagaggttaggactgcgatgtttagtatcctaagtactaaatcccctgcgcctgatggctttggttcggggttctttaaatctgtgtggccagaaatgggaaaggaaatccatagggctattattcatttctttgaaacaaatcaattccctgctgaccttcataacacaggtctctctttagttccaaaagtggaaaatccttcaaaagttgttgattataggtctatagcttgttgcacgactctttacaaatgcatctccaaattattgtgttctcgattagctaaagtgcttcctactttagttaatcagaaccaaggtgcttttgtaaaaggtcgttcaatagcttataatatcctcattctccaagatctgttgaagaactataagaggaagaattgttcccctaggtgcacggttaagattgatataagtaaggcttatgatacgattaattgggattttcttgagaagttgttgaatctttatcgttttcctgctaaattcataacttggattatgctttgtgtgagaaacacttcttatcctctagttatgaatggaagattacagggatcgtttaaaggagaacagggtttgagacaaggagatccaatatcacctttactttttgttctgattatggagtacttatctcgaagattccaacttgcagccaaagataagagatttagatatcatcctttgtgtaaaaagctgaaattgaccaacttatgttttgctgatgacctagttgtcttttgtaaggggaatgaagactctattcaagtgattagggaagctttggaagaatttagcaatacttcgggtctgtctataaatcttgggaagtctcatatttactttggaggtgtctctcaaccaggttaattggctcaactcatcaatttacaggtagggagttttcctttcaaatatcttggtatttcccttagaccaactaaatggaagcttgaagactgtggcactattttgaaaaaaatgaaggtcaaattgatatcttgggcaacaaagcacctttcttttgcgggaagggttcaattaattcattcaaccttattgagtctaaggaattattggatgagaatatttcttctccctcaaagtgtgataaaggagattgagaaattatgccgtggttttctgtggggattgaaggataatcggccaaagattcatttagctagttgggataaagtgtgtcttctgaaagcttttgggggtctgggtttcaaggatggagttaaatggaataaatcctctcttgctaggtttgtttgggatcttatgaacaaagaggacttgctttgggttaaatgggttaatggtgtttatctcaaggggctgatatttggaattatgatctaaaaggtgatacaagttggtattcgaagaagttgtgccatttgagaaattgtttctcggttaaagatataacaactgttggagctaagggaaaatttagagcttctaagctctataattctctaatcttgcagcaaccggatccaacagctcgggccatttggtgtgggctgaatgttccaaaacagagctttatcttgtggcagacagcacattccaacctgctcacaagagataagcttcttttattccacataacagtagttgatttattatgtgctgtttgtggttctgacattaaaaactatcaacatctattcttcacttgtaggttctcaaagatggttcttgaagcagtctttgcttgggtgggattcaattgttgggctgctgattttgggagctggaacaactggcttcggatgggccattctagcttgattgggaggttgttgattgttatattggcagccaccatttatcatatttggaggaataggaacaattgtactttttcgaattactcaaatactatcaattgtatagttagcaaaattaaaaaagatgtcaaatatagattgttatttctcaagaataggaacggctccaaagtggaaatagatttactaaagaggttgattgtaattaagtgagggtgtggttggtctccttgggagagccttgagggtgtattgttatttgttggtgtgattaatgaagctttcttcttgataaaaaaaaaaacattattatcatactatgtaactcatatacatatataaaattaatatataactcccatacataaaattataactcataaataataattttatgctaattaatatattatgtatgtaactattaacatctcatgtataaca

SEQ ID NO: 33344 - DNA, 2016 bp, Cannabis sativa
  modified_base (1834)..(1839): a, c, t, g, unknown or other
tatggcatttgtgaaagaataggataaatagtggaaaaatggtaaaattgtatgtggtgggcccacatcctatggccgatcacttatgcttacttttaccatttatttataaactttttagaactaaataattcaaacctaaacctagaaagattcctataaataaatagttgctatcccaattttcgcattctaacgtggcatcacatgctggtgacaggtggacttgattctccatacctgcctgaaggagatgttctgagcatataccgacacagaggaggtcctcccagccgagcagtggacaatccgagcagcatatcaacacttagcaattcaagcatttgcatcgtgaagcataagagcaatccctataaatctgcagtgttcatggaaatttgagttgtgactggaacatagacattaggatctacagtctgtgggtcttaaggaagaactgaagatgcagatggtgcaatcagggttcttctcgtgttgaccatggcatttgatcagatttgatatcgactctctcttaatgaaagtaccaaactgttgacctcaaaaagtggccaaccaacagcgtggttgtatgaatctgatgtctgccatgtgttacacaattagaacataaaagtaaagaacacaaagacttttatcgatattcgtcccccttagttagcgggtaatacctactccccttttagttttattgattccgagagataatactaattagatcactatagctgggctctgatacaaatctcttaaggttacaaggtaggaattaaatatgtcaaatctcaagtattgagagatgctatagtgggcgtgtgaatggtagggagagagtattatcgaacttagagcttgacggcttgaatgagacttagcatttagaacttaggttttctagggttaagttaaggctctttatataggagagcataaatcctaatttaccaataaaataagtagatatttacatattatattgcttaaatataaaagactaaatttcccttaaacatagatatttttcagcaactttattgggctgttaaggcccaatgaataccccaactcccagtctacacataaaactttgcatagaatcttgctaggtccaatcctggctagccggtcttgtgttgtcttgaggctggccaaccttagggttattggtttgtgaattgtcgtcctgtttgagtgttggggaccccgttggctaaggaattaacttgaccttcttgttagtgagttgtattgcaacatggcactaatttttttcacataagtatgccacgtgaggtgagcaaagattaggataacacattcttagctattggatctttcttatcagcccatttagctttaaccctaaatgtattgaatccctataaatagaacattaagggttttgattcaaaagacgactctagactctctagactctctcttatgtgacaaactgaatcaaaagcaaacctattactttctattattcttttcgaattcctcttgagatttcttcatagaatttcatggtgcatggtgaattgagagtatgcccactcatgtcaaagcaatacctagcatagttaggaagactgtttttaaccatattgaaggagagaagaccctggttcagatcttgataatgctctgctacagacaagaatcaagggctagagatctgaatggaaggagtcattaaattccactaccatcaatgtatggatttcttaatctcttatatgtttatttcattgttttaagaaattcaaatttgggatgttagattatagattataatcaaacatacatgttnnnnnntctagatcctagtaaaataagttcaaccaagcgtaaggtgaagctagtaggaccatgttttctcagtacctctccagcttgtaaactcggtcttcttgcaattggtgcgcatgggttgaggcttcattccataaaattaaaagatctcctccttgtaggcacctcaatttttttgat

SEQ ID NO: 33345 - DNA, 1037 bp, Cannabis sativa
gggtccccgcggggccccattccattcccatggggaaaatgtgcatccctacttatgagggacctaatattaaaagcaataaattgattaaagattttaatgcaatacaaatattaaaagtattttgaaccatggtccaatcaataaagtaacaaatatgtatgtctaatataatttgccatttatatatatatgagtatgttacgtgcagtgcaatgcacgtataatatatgtatgtttaatttttgtttaaataggtaatgtattttttttttatttttaactgtgtatattgatctcattattattatttaaatttaatggttgcaattactttattacaccatctttctttacttgtgtagattggaatcttacaattgaaacatatgttttttgcattaacataatgacacatggtaagatgtcatacacaaaatgtctaaaacttaaaaatgtgtttttttaaaggaaaactattacatatgaaattaatgttcataatttaattttacaagatcgtgacagagaaccttcaaagaggattccatataaagattttccaatcgttaaaaagaaagaaatatgtaaaaaaacaaagagagagatatgctaaacaaaaagtattgaagatcaattcgattagtgtaagtagtaatcccaatcatattgatcttcacacatatattgtcgagaatgcggcaacgtcaagtcaacaaaatccaaattttctttctgactatgcaagtattgttgaagatgatattcttcaacaatcatcaaaaagacaacaaaataatactactcacaccaccataaatgtagatgaatcttcttgtggagataatatttctatcaatgtcaattgtgaaactaattcattgtaaattcatcatcttcgggcaatgtcaatttcaatcaggtttgcatttgacccatattttcttttaaaactttgctccttccttcacgcgatgaaactccatatgattattttggatgttgtttttgattaatattaatatatataatcagaa

SEQ ID NO: 33346 - DNA, 1830 bp, Cannabis sativa
caaaaggtacttgcattatctaccatagaggcagaatatatggaaactactaaagctataaaggaggcaatttggctaaaagggtttgcacatgaactgaaaataaaggtagaagatataactgtgttttgtgacaaccactttatggagttgtagtcctatccctttaatagtcttttccactagatcgatagtctttcccgtggcatctaaagctattaactccgctttcatcgtggaatgagaaatgtcagtttgtttcttaaaccaccaagaaattgcctttccaccaaggacaaatacctaattcgttgtagatagattatccccaaaggtaggtatccaacttgcatccatatatgcttccagtattaaagaaatttggagtagtgaagacataggtttttagttctcttattaaataacccaaaactctccctattctcttctactgatccacacttggattactagtaaattaacctactaagtttactcaccgtaaatgatatgtcgggccttgtacattgtgaaacgtatatagctccctataacacttgcatactccaactgagctaccgctctaccattatttttaactagtagtttactatggtcgattggtgtctcctcaatattcattaattatggcttagaaattgcaagcccaattatttcacaatgacttccaaaaacactctaaatatttctcttttttaaggagtcatcatattgtatatattatgtgtagtgtcgtatatattatcttttattataagtttctcattcagttggtgaaatattagtctaaagtgcaaaatacaaaaattacactattatctctgccgaaacaaaggaagattaaaattcacctatgagtattattatttttcttatgtacaatttttagatagatattatcttcaattatcaacaatttagagattgatttttaattttttttttatcttgcacacatttaagttgtgtttccttaagtatttgaacattaatttttagtttatttttggattatcttaagaacatatttaaatcattaagctttcttaaatactaatatattgcatccagtatttacttttaattgtcaaaattataaattatattatttaaatatacataataataatctcacctaaaaactaataatattttttctttaatttttaattatataacttttaaataaaatagaaaatacttagtataaaatttagtatgcgtacctcgcacgtaactataatctagtatttatataaaggtaattggcgacaaacatcccttatgttttaattttaattatactcaactctctaattttttttatgtggcaatataataccccattaattttacttctatttgaaattggaggcccagttaccattaaatacgaactgaattatcactatgtacgtaatatattttcatcagagatttcaatgtcacgtgtatatatattacatgtgtacataatggcatccgtgttgacgtttatcggtagaagttaaatggcgccttaaatttgcaaacaaaagagcgaggtatttccacaaaaaaataaatcaaaagcttaagcatataaaaattaaaacataaaaagatttcgttgccacttacaatatattttatattgtaaggatctcatgaagttacattcatcttcttctcatttcttctgttggatttatcaagtaaagatgctatctccaatggtatacggtctggacgaaacttcttatttaaccaaactgttgtcacttttgcttccaaaataggctgaataaatagaataatatataatcaata

SEQ ID NO: 33347 - DNA, 2773 bp, Cannabis sativa
aataaaatgtttcaattaggctcaagaatggtgtcatacaacaaagagatattaagctcaaaaaggataacaatggataaatatttaaggctccttgaaaggctcaatcgttctaaaaatttcctaaatctctttccaaaacacatgtcatcaaggatttcgcctcaaagtccaaataatgcaagttctagccaattcaaattagcaaacctccaaccctagtcaagcatataaaatagagtcaaaaatattgcaattgcaaaatatattatcaatttctaaaaacattgcaattaaactccaaaatggttaaaccaagcacacgattattaatagaatctttttcataagtaaagataaagcaacaacagagaagaatattggcttaaagttttactctaaacaaaaagcaaaaaaattaaaaaaataaaatacacaacaaataaaagtaaaaattcataagccctcccccaaaataaagatgcacattgtccctaaggtaacatttaaactaaagatagagaacttccctcaaatacataccacatcaatgagcggttgatgcccataataagggtcatccatgaccacttagaattttccattgtgaatgccctcaagctttgaaggatatgaatttgttccacatgtcacaccaacactacaaaccaaaaacattattgatattgaaataaaaataaaaaaaatagaataaaaattaattttattgatattaattaaaatcaggccccgacatcgatggtaaaaacttgttacaaaatttatgttatgtaagtgcacgcggtagcaatttgtaataaatcttagtatcgtcccgcgataactgattatcaattaccaaataattaatcttttctttctatttcattaaataaaatattggaataaaatgaataaaaaaaactacaattaaaatttagacaaataaacaatgaggaacaaacaagaattattatgattcccaaccatctttcttttacttcttaaagaaattatccaatttcttttcttcctattcaattgacaagttgaattaaatagttcataatctgattaagacttacaaacccaatctatgtgaaaattctctacattcctatgacaaagtttaatcacacaaagagtattaaatataacaactcataaattcatacaaataatttagatactttcgttttaaatcaaaatcaatctatatccaatccataaaacaatcaaatcaaagcatattcaaatctcacttttaagaattttgattcaacttcatagataaaaattatatgtgattaattaatcatttcacaatttaaattagattgcatagaattaaaataatagaagaagatgaaattgaatatctactttagtccataaaagaaattaaagaaggattcacataatgatcctaaaaagatttagccaataaatatcatcttaaacctcccaaagattaaattaaaaacataaaagatgaaaaagataaaatggaacactaattggagtcctccaattgtgacccctatgctttcagtcatccatccttgcctcccaatgtctggaaatttcaaatatatcatgaaaacctagcctccactcgtttttaggtcgaaaataggaaactatcaaaatagtcaagagcagcgacctttgatatagagttgcgactattagaatttttacaaaacgcaatttttcaattttttcccaaaggtcgcgaatcttgctcaattttacaaaattgatgcaattctaaaatcgtgctgtgacaactgatgatgttttagtcataactctcttgatataactcggaattagatgattcaaaatgttttgaaaagatctagaactttcattcagaaatttctttctggaactgaacgaatcatagccaaaaatttgcttgaagctttagactttatttttaatcacaaactcagcgtccaaaacttagaatttttcacccgttgtatcttacaactctaacattcatgcgaaatccctaaaattcatcttatttagcatgtttcctctcatttcaatccataagatatattttaccattaaaatctaaaataagaataaaacaagcgtaaacctgaacaataaagcataaaaacactaaaactacacactaaaatggactctaaaaatacataaaaaatacacctaatattcttctttgtatttttttggttttgatatatgcttcgttgaaatcgtgagatctagttttttggagtattttgtgtgttcgtattttttcgatgctcttttgatatgttttcgatggattctagacgtaaatgtcctaaggtcagtgaagaccttcctcaatagtttcagtaggtttttcattatttatcgaatgacgaataattttgtgttcgtaaccattcttgacatgttatctacgtgttcttgattctttatcgatagttttttgatggtttgtatatttgtctttttaaacttctttgtcccatgttatcgacaacttctcgattcattattgattatttcacgatgattgattgtttattattttcaacaattatcgattgctttttgacagattctcgattgattctcgactatttatcaacaatatttcccaatattttaattgattgctatttcaattattttgatttagttgtttttggtttatattgaattgcaggattgtctgtgtatctcgttgtattgtatgatggtgtttggagtgttaagagatttaattgggtgtataaaa

SEQ ID NO: 33348 - DNA, 927 bp, Cannabis sativa
ctcaaatttttcatttttatttaatttattatttttatattgatgagttaggagcatgttgattggtcagcgtgatgctttattttttgttttttttttttctttattttggtttttgttgaaaatgttgagatttttttatttatgtttagatagatgaagaagcaagctttcctcgtttagtcttaataaaatcccaaataaaaaggcaagggtcagaatcagtgtgtgcaaaagggcgtttaaagaattttatcattgctttaattatttaatttttattatcataatttcattatcttttttatatatttttacagttggcacaatgttccacaacaaatcctaaaaataaagatttgagggggttcgttcgttacaaattatatcccatatagtattgtagtttatattatattttatttcaaattatacatgctattaaattttgcatgcatataaatatataatattttaatataaattaaaattaatataataatatataaaaatatgaaatttttataatataggaaaatcacttgatgtacatgttatcttaattttagttaacttggtgtggcacctctaattggcaaaaaaagcaaaaaacacattagagacaagttagcactaaccggttaagttagtttcgtgcaggtctagccctaagcataggcgagctagacccatgcgtaggacccattaaaattttttaatatatcattatttaaagaaaaatttacatgatatactaacttttgccatttttcttacaaaatacttattttttacttttttactgtgttttttttataagttttatactgcgttatactttgttaagttttcacttgtgttttttagttgttctactgttgttttgagttgttatgttttgtgttttactggtgttttataaaaaca

SEQ ID NO: 33349 - DNA, 3133 bp, Cannabis sativa
aaatagaaatatacctgtacaataaaactttatataccaacaaccccacagcaactcataaaaaatttaaaaaattcgtcataactttcaaataaaaaaaaataacaaaactaatatagatatatcataatctttaagtaatttttcttgtaattctaaaaaaatatgaaaaaaaattattgaatttttttatgtggaaaaagacaatataaataataaatagtctaaaattgtcatttctctacaaattttaaaacgagaatatttactaacatagtcctatgctttgtcaaaaatattgtatggatgtttcaaaccaaaaattcttgaggttgtgtttatttttcacagctaatcgagttgtaatttttaatacatttcattgagattgattctcttatggtagcaaaagaattgcgaccccgggccattagacatagtttttggcttttattgtgtatatgctgatattaggaatcttgtggtcaattttccaggagtatagatccctcatgtttttagatatgtaaatatactagttctcataagttagcaaagtatgctcataaaaattatataaactgatatttttggtaaaaatttacattcaaatttttatatatatatttttacgatattctataaaatcacaaaaaaaaaaaaaaaatcacatgaaagcagcaagaaaagaacaacaaaacaatatcaaaacatcataagaaaataatatacaaataacaaaagaataagagtacaacataaaaatacatcaaaagactgtattttatgtaaataaattttaaaaatcgtaaaaatatttaaaaaaatttgtacaatcgtagttttgtaacttttatgttatttttgtattttttttaaaaaaataagtaataatttgtatgtaaatactatttgtttagtgacaaattaataacattttgtttttttttttttttgaattaagcgtttatatattacaatggataatctggaactcgaacccaggacctccaacacacatgcaccctcctatggccacttgagctagcctcaagtggttagttaataacattttgttagtcatgaaaaaaattgtcattaaaatgttttgtcctttttgtgatgataggtgtcttttttgctatgcacgagtcttattattactgctccaaaattaaagtaactactttcagtggcggactcataattgaattttagggtagacttagtcatacattcaatataatctaaaacaataaataactagctaaatttaagtagaatgataatttaggagcatactcctattctaatggtcataagttcgatcttagtttaaactttatacttcatttggtttttttaataaataaaatatagatacacttagaaaaaaaggaggaaggaaattcagaacatagtctcccatgtaaatttaaagcattttaactaattgttctatttaactactatgtatatatgaaagtaacaattgtatattaatatattttttaaatctgagagccctccctcaacacccttaggtccgcctatgactacttcaaaaatgtgctctgaaaattagttttataaaaatgactttttcacaaaaatattctgtcaaactcctaaaaatgtaagttagatgtattaaggccatattaactttgaacatgaatagtaaccatgatgctgctgcagccagcctgccaaggtgtgaataatgctaatggtaattcacttttttacacaactccaaaaatctaaataggaagcccattactatatcatttcccaacagatttgatttggttcacatatatttgatcaagtctggaaagcatttgcttaaagcaaatgacttttgttgtacttatgtatacttacttctaaccttctacaaaaaactcttatctttaaaaaataaatgaataaataaatgcaaattaaatactagtgtattattgaagaaacaccttattcatctcattgaaacaatgttttggatcctaccagttacaaattgacttaccattgtatttttaaaacatcatttcaatgttatatatgattattatattgtatttcctactttgttgtacttcattattgattggtggttcaaataatgtgtttcaagtactcattgaaagagtggttcatttgttggcaaagtcaggaagtttccatttgatgagtggtgaattataacaagagtgacaaatagttcctaattttaggtttggggacccaagaatttaaatgagtaatgcttttatgggaagagaatgcacatgcttgccttgtcttgccacattggctttttatgcattatcattcacacaaagtaatatggttttgtagagaaatctaagtgaaatgtgatcggtgaagaagttgagtcttatcacttatggttttttgttacttttattacggctgtgatttaggcacaattttctgaaagatgctccacaaccaccaaaaaaaaaaaaaagacataaaaaaacaggccagctaactaaggggaccataatcaatattgtctaggtttcaaatttaagagccttaaaatatggacaaaagtcacttcaatttttgatctatttcattctcttaattaatcgtattatttatcactaattctggttagggtccaactaatagtttcaaatttcaaaagtacctttagtgtaaacctaatctttcacctttttatgggtttcacacctgtcgtccaaaccgttcttcttaaaaccaaactacacatttttaaacatcaccaaccaactgcaaccttttccataataacagaaatgttattcatgaaatgagtagttttgttttccattgaaatatatttgtgacgatgactttgtatgcctctcctatccggctatcctagtactcctattacatagctgtggcagtaaaattcaaaaagaacaaaaaataggactgatcgacatgtgagtgcatcataattttttttatttattttttaatatctattttacatatcatataaaaaaaaacaccttatatgggggtggagggggactcatgtgacactacattggctatatatcacatgcaataacattattcattattagatagggaccctctcttt

SEQ ID NO: 33350 - DNA, 1576 bp, Cannabis sativa
ggctgtcaatggaggttcgtctcagacttctggttccactcttcctagatccgcacctgttactttctcgcattctctctctgttcgattggatgagcacaattatctcccctggcgccatcaagtgtttgcagccattaaaggtagcagacttcagcatcatcttgatcatacaagtgctcctctaaagttcctcaccaatgaggatcggatcctcaatcgaccttctcctgaatatgaaatctgggatcagcaagatagcatccttgtttcttggttgctttcatcgatgtcagagaaaacactcactcgcatggttggatgtgactcagctgcacaaatttgggagactctcagcacctactacacggctttgaacagagcaaatgttggtaaatacaaaactcaacttagaaattccaaaatgaagggctcactcaatgatttcttgctgaaaatcaagagcactgtcgatcttcttgcctctattggacatccaatgtctgctcaagaccacatagaagcaatctttaatggtctttctagtgagtataatgtgtttgttacctctgtcaacaccagattggacaattatacagttgcagaaattgaggcattattaatggctcaagaagttagattggataaagattcagaggatcttgatatcaataaaccagaagccaatttggctcacacaaaaccttttacaggtggtagaggtacattttcatctccttattatccttcctctaactcttcatctcaatctggtgtgttcaggggtgcatcgggctcttactcggctaatcatcctccacctggttttggttctcattcacaagttccaactcgagggaccatgactggccgtggacagatgcattccaacaggtctggacaagtgcaaggccgtggtcaatacacagcatggggtcagaaaatgcaatgccaattatgtggcaagttaggccatactgtacacaagtgtttttacaggtttgataagtcattcacgggtccagaaactttccaaggattctcgggtagtgtcaatcttgctgaatgtgctcatctctatgcctctcctgaagtggttcaagacaatagttggtatcctgattctggagccactcatcaccttactcctaatgcccacaacttgatgtattctactgaatatgcaggagatcaacaaatacacatgggtgatggatctggtctcaacatccacaacattggtaaaacctttatcctttctccctttcattcacaccaacttgtcttaaataatcttttgcatgtgcctcacataaccaagaatcttcttagtgtgtctcaatttgcccaagataacaatgtttattttgaatttcacccttctcattgttgtgtcaaagatcaggcaactcagaagaccttgttggttgggaagcttgatcaaggtctttacaagtttgactctcttcaacttcaaagtcttgccacaaccaaaagatgtaccaactcccaaaccgagtccaactctccaattgaccaacacaataaagatcaatgtaacagtacctctatccca

SEQ ID NO: 33351 - DNA, 2019 bp, Cannabis sativa
tttttttggttagtttttcattccaaatatggaattctgtttttatacaaatatatatgtatctttatttttttctgataagtcgagtgtgcatgcttattgacctttaaagatgtacgattaaattgcaaacatagatttcctacacctcggtaaatttaaatatatagaaatttattaaaattaagttaaaattacaattgatactaacaatttatttatgcattttacagtgctatagcatatgttgaacttgatgacaatacaaaggccacaactttgtcgacactaccatatacaaattatccacacaaaaaatggacaatccaattatatgggaacccagctagaatgagaagtgcaaactacaaacattacactgttgtttctgtcgaaacaaaagaatattaaaattcaatcattaagagtatttttattttttttatttacaacttttagatgttatcttcaattatcaacaatttagagattgatttttaatttttctttattttacacaaatttaagttgtgtttgttttattatttgaacattaatttttgatttatttttggattaacttaagaacatattgcagttagattattaagatttcttaaacactaatataatatattgcattcaatatttatttttaattatcaacactatttattacattaattgaatatacataataataatttcaaacaataattaataatatttttttcttcaattatttaatgtattatttttaaataaagtaaaaaatacctagcataaaacttagtacgtgcctacttttttactagttgtccatacatatatgaaaaaatgtaatagataaaacataattcaatgccatgctgtcaactcattttaactaaattttattattaattttgattcactacttaaaaaactttattattaaaaattattaataaaaataaaaaaagtacaacgaaataaatataataataaataaaaatttattgtagtactcactgctacaaaaaattgataaaactataaagtaaatctaatataaccaaaagtagcaatcataaaagttgtattctgctcgccataacaaaaaattaatataactatgaagtatatcaataaaactaagtacaaccaaaagtagcggtcatataaaagttatataccctacacgtataaagaaccgtgtactcattccattaatatataagacttcacaaaatcggtccattcatctcgtatttcatttatctcctggttgttgtaaggcttgtcatctatgaactgtataacctgagatagataacattgaatttattttaaataaaaactttatcaaatgaatcatgtacgtatgtctaactaccttatccttcaaaaaagttacaggattgtgctgagtcatgaagcttttgataatcttcatgcagtaatatccacactgtttatcgtccggttgtcctcgacacctgtactgcctgatctttatctcaaccctttttcgtatatttttttgggtcatgtaggtttccaaagcactacaccaaagagaatttaattagtgaaagaattagtaagaaaagttaaattaaataaaaaaaatgataacttacgttgtgacacaatttctttcatttttaattggcttattctttgggtcaaggaatgccactgactaagtagcaccctggatgattttcactatctagtgttgactacacataattaaaaaaaagtttagtgaactccctgatcgatctatatttacatatattaaattataaatgtacttacacatgattccagggacaaatcaaccattgatcgggctgtatttccttcaaccgctcaatgagattctgtgtacgtctattgaaatctttataagatattgagaatactaaagtaggatttaaaaatacatatgtattattcaaaccactgatattaagtgaatgttcctgcaaataactgaatcataaaattttattaataaaaatctacaaatat

SEQ ID NO: 33352 - DNA, 4374 bp, Cannabis sativa
ttaatcagattaatcctaacaataatacatatctatgtttaggcctatatggtttatataagtcaaaatcaataaagattatttaaataaatatttgaattcaaaacaacaaattaaatcatatttaattatttaaataaatatttataatcgaatatattatagatatttgttttgagttacatatttaggtttgaattaaatatttaataatcaagtgagagaatctctcaactactttgagagaatatctcaaccacttggagagaatctctcaattactttgaaggaatatttaaaccaacttaaatatcgataactaccattgaaatttaaattcaaataaatatccagtggggacaaccctacatatggggcgcctatcattgtgttaggacacagtgagagtgctgccacccttgtcttaacaggacaacgacagtatctttgtccaaacaacttttgtcttttccttaatatatttaattaataaatttgaaaataaattatttattacaaaataaataattactattatgacaaatcaaaatagatttttctaattatgaatatacaacttttatctagtgttgtaagtttgtgtgtgttgtgttggcccggttcgtattatctgtgctttttagaatactcgtcgtgttatgtcgtgccaaagaaaattatgggtcgtatcgtgtaatgctaacatttttaaagggtaggctcggcacgactcgtagacttggtattttcgtatcgtgcgcagattcatgctatgctttgctcatgtcgtcctatatttctcaaacagtctgacccatttttatatctgggttttaattcgtgctttattttttcatttttttttaaaaaaaattactaaattatatgtatatttcacagctttagttatatttatatagttttcaaaaaatatttatagataatcatataaaaaaattattaacatgattataatttgaatatttacttataaatactcaaatttttatatcacaccctatatataaattaatatataatcttagtttttcacatttaataattttaattatagaattataatatttaatattgtatttaatttttattattattttaacttatttataattgataaatttatatcttattattattaataatactaaattagaaggttttttaatatgttgcgttgtgtttttggggctggtagtgtgtcgtgcttttttggaatagttcatttgtgcttacatgtcgtaccttttgtgcttctcgtgtcatgtcttgattaaggacatatttttcatgttgtgttgtgccaatttgtaccattgtattgtgttgtttccaagctcgtattttttcatgcctagtcgttctcgtgccttctgggctcgtgccggtttcatgttgtgtcaaaaagcccatcccatatttacaacacgttttatccatacccttgacaatgtttcaaggtgaaaatctagggaccatggacctacagtactaagctccaaataaacaagattatttattgaatctcatcaactaaataatcttgtttattaattccataatactccactgtaaatatagatttaaactctatgtacaccactacaaaatgcactattcatgtcgtaaatagaattatatttattgagttttactaaagtattcattgacataatcaattctagttaataagccctaattctgtcggtttgaaattaattttgatcaaattaccatttcagcattccaattatttctttatcctactattaattcactagtgaaagtataatttagatccaattaccatttcaccattccaattatttctttatcctaatattaattcactagtgaaagtataatttagatccaatctagatttatgcacaactttttagttccagaattaatacttaaaggaatccaacattcgatccgttaggaaaattaggatttcataattgtagatcatgtttccagccatccatattattagattcccaaaatagaagttgtaagaatcatcttcttgaaaaaactttaacgagtgaatcaaagaatctaataacatgaataggtgttcatgattactcaagattcgggctaatctattattgatcatcattttgatatgaatcaagtctctacagtaaacgacatgtttgataaggatagctcaattacatatcgatcctcatcatatatattctctattatatacagcacattcacttagatgtcatactatataagcaatttgaattgagattacttgcactaaagagagggcatcattgaatcgcacttacagtcgttgattaaagattccataactttaatatgttactgattattttattcatggctaagtgatcttaattctccatacaacataagtcacagcctcacgtatgtataaggaattatttgatatttatatataaattattcaatattaaatatcaataatttaacattcaagcatatatcaaaatgtttaacttatatttataaacaggaattcatttacaggcttattagggcataattcctaacaatattgaccttatacatagaaatttaaaatattttagaaatttcatgagtttctaaaaatagttcaaaccaataaggtaagtcattaaagatcttgtgaactaataatggtggaaaaatatttggttatgcattaaaaagattattaagttgaattttaaattgtatccaaacttaccactgagaactttagaatatcatattgatgaaaatagaaaggtctatgattagttactagtagcgacctgagtccttttagagatatgccttgacactctatgtcatcccatctaagtatgatcccaagagaacctcgaaatgatggaatgggcatatacatagtatacaccattactagatttagggatgcctgatcatgaaattaaggaaagctagaacttccaattgaggtttgcatggttgatagttattctaaaatgattaggagtggaccatcctatgctcattaagatgagaaagtgtttgcttcaacaaatactactcatctaaaaacatgactgtatccgagtacaaagtagcaaagtatatgacatactattgattcaatcccaatgtgttgcatcatcttataccatataagatggtcccacgacttctcttgtgttgccacgaacaaataattaccactaatgttcctagatagaaagtcacagaacctcgtcgtagtgggagagttttaaggaacctaccctgtaatgacttggacgacactagtgatgagaatccattgttaatttaaataagcaatgaatagacctaataaggaactaagactcaaagccaatagagctatggttcaaaccaatcacatggagcaaccaaagattttaaatataatgataagatgcgaaaccttactcagtctattcaatggacttaaacaaacttctgattcctagtattatgggtttgatgagatcatataaacttatagcttgtagtataccttgtaatttacttactcaactgcaagtaacttactttagtaagatgctagaaaagtttttaatggaaaactctaaagaaagtcatttgactcttagatgtagagtttatttatctaagaaatagtttcatccattccagaaaagataaaagtcatgaaaataattccttaagcatcaacagtgagaggtctcatgatgctctggtatgaattagaccagacacctgctgttgagttggagttatgagtaggtatcaatatagtttaagataggaatagtgaaagacaattaaataaattttaagattaaaggaggatatatatatattagtctataatggtgaagttttcgaaaccttataagctacaccaactcaaattactagatttgcatttatgctagaaaggctactttttggatggtgattactctgagagtaaagcaataattttttgacaagtgtaaaaatctatacaaaatctctaactctactaataagactgaatattttagtggctcagaaggcaactagagaattattttggctaaggaaagttctatacgacctttggcattattctaatcatggatgaactattagtgttacttgcctatagcacaattgtagttgcaaaacagtaaagaattcaaaactctaagaggagtaaacagatagataagaattatacaatatcatgaattttttcactaaggaagatacaatggtggagtaggttgatactgaatacaacatgtgagatcctattaaaaagataaaactacataatttacttgatgtagacatcaagaagatgagattaattgaaat

SEQ ID NO: 33353 - DNA, 1811 bp, Cannabis sativa
aatacatataaaagaggtatgtttcaattaaaaaaaaaattaaaggtaaatttgattaattgattaataaaagaggcatttttcaagttacccctactttttttcacttacattttcttactatttacactcaaattatttcatattattttttttagttaatcatattttgtaaatgaatcttaaataatttcttttaacccttactaaattaattaaaattattttcatcaaaataatttagataaaattattaaattgtaattatacatttaaatattttctcctcagataaaaaatacattttcttttatatcacgcttgttttctctctaggttttctacattttcatttttctttcctgtatactaaatttatatagggtgaaagttgacttgttaagttgttttgttgttattttgttatttttgttgcacacatatattttatattattagagttagtcgcatattgttaatgtgtaaaaataaaataccataaaattactcattccattactaattaattttgagatgaaactccatgcaccttaatcccaaatttaaacatatatatttatgtttggatgtagtaattaatattaaattaataaaagtaatattattttggatgttttgtagtttatatggagttaatttataaatgatttgcatattgcaacaaggttatgttttgttgtttttatgttgtattgtagttgttttttgtttattgtacaattagtttttgatttatgtacatatgttatagtgtatgtttttagtttatacttgacaattttttttttgttgcgagtgtatttaatttatgtgcatttgtttttgtttttttttagttgtagttgtttttatgtagtttttaggattttttttgttacaattatttttttgatttatatacatttgttatggtgtatatttttaatttattcctgattatatttttgtgtatgtgtattgctttctagatgtaaaaatatacatatttaatttattttttgacacatttttttttaaatacaatgataagttttttcgtttcttttaattatgcactaatagatactgacatattaaaattatattgttgtctaattagtttttttttatctttttaattatatattagttactatattttatactcaattttaaaattttaaaaattctattattaatataattatttatttaaattataaaaaaataaattatcattaccgctgccattaactacaaaaagaggagaaataatacaatagttgaaataataaaatagttgaaatgtataaaggtataaacttgtaacaaaaaaatttcacgagaaggaaaataacataatagtacaaaaaaaaaataataaagttttcaaaactaataaaagaaataagttaaatttgtatattaattaattgatgtcttgtattttcttttgttgctttgtaactatcttttagttggttttttttttttaatttgactgaaatttaatattttttttttttaatttgactgaaacttaatatttttttttttttaattttaaaactttaacatatatttttgaaaacttaattttataaaaaagaaaaaaaaaaaatgacatattttttttttataaaaactgcaaaattcaaacctatttatttgttgtgagtttagaattctatttttgtatctgatcaattttgtcacctttttgaaaggaataattacataagacataattttttgtaaaatatttttacatttttacgttcaaagaatatttttttacatttttacagttt

SEQ ID NO: 33354 - DNA, 1571 bp, Cannabis sativa
tcgacgccaattgagagagttaaagcaagttgggacagttcgagaatatgtaaataagttctctagattgatgcttgacattaaagacatgaacgaagtcaataggcttttctatttcctcgaatgacttaagccatgggctaatcaagagttgcaatggtcgtgtgcgtcagacctagccactgctgaagcagcggccaagcagctaactgcctacacctcagagaatttgcaggcaaagaagacgaatccctaaactagctccaacaatgctgggagtaagaagtcggggaagcattggcagggtaaaagtgggggaggggaccagaagactcctgaatgtagctcctcctctaagagtgatgctgctattgggaaaaagtcccttaagtgttgtctttgtcaaggccctcacagggcggctgcttgcctcaccagtcaagttgagtgtcataaaggcatccattacttaagaggagcaagaatgtggagaagaagatgaagatgaagattgcgtacacatgagcgtcatttaattgttgaatgctctcaagaagcatggcacaggaggaaagaaagtcctagggaggggattgatgtttctggaggccactttaattggaaagcaggccaagagtgtgttgattggtactggcgcaacacacaactttatttccaaaatcgaagccaagaggatatgcctacaactagagaaggatacaggtcgcatgaaagcagtcaattcaaaggctatggcaacaattagagtggccaagaaagtgcatgtcaagatcgatggatgggaggggcaactggacgccgtagcagtttgcatggattactttaatgtggtattggggatggagtttctagcttaaaaatgggccattccaattctaacaacagagaatttacttattatgggtgagaaaccttcaatggtttctacgaaagtaagaatacccccagaaaataagcttttatcgaccttgcaactgaagaggggtctgaagaagaaaaggccaatgtttgtcattgctcccgccatgtatgatgcaaaagtagaggagtccactcaacctgaaattgaccaggtgttagatgaatagaaggatgtgatgccagatgaattcccaaagaaactgcctcctaggagggggagttgatcatcaaatagaacttggtgtcgggtgtaaagcccccaactaaagcggcataccagttgtctccaccaaaacttgatgagctaaagaggaagcaagtggggatgttaagatcagggttgatcaagtcatcaaaggcaccatttggtgtgcatgtgctgttccagaagaagaaggacatgaccttgagactatgcatagactatcgcaccctcaacaaagtatgaaatgaatagggcccatagatagaattaaaagtttaggcaaaatatggtattcttttctaggaaatacgtgcctgaaacttgaatactcgcgggttttatgttgaactcttgaatacctgcatctttatgatataccattttacatactcgcatttttgggattgtttaacccagcataact

SEQ ID NO: 33355 - DNA, 2018 bp, Cannabis sativa
ctaccattgcttacctataaggcgtgataagcttttttgacagaataatccccataagtctccaacattcaaaacaaagcatcctcaaccgaagaaagagacagcggaatacgacacatcaaatcaatatccctttgaacaaataaatcttgaagtacttcctcatccccctcaagggaacccacctttaataagttattgaccttacaatcgtggagagccacatgaatagagattacatacggatttttcttgcatggaagccatttttgattaagaactagtatagaaaaactagctccaacacgccatctcgcacccatcttaaccacagattttgcctctagaacactttgccaaactagcttggattagcacctagttcagcatcaaggaacgaggaatggggtaataccgagctttaaagacctgggccactaaagaactattattcatcaaaagcctctaaccttgcttacctaacatagctaaattaaaatccctgagatttcaaaaacccaaccccccttttttgttatgcagacaaagcttatcccaactcttccattgaataccttggccttgtgaagacctcgtatgtcaccaatatctacccataagccgatccacatctttgaaaatttccaaagggatcaagatcacactcatagcataagtcggtaaagattgaataactgatttcataagcacttccttaccctctctagacaggcgcttactttcccaattgtgaattctcttcctcgccttctcttttaaaaattcgaaggtgacattattatttcttcccaccatactaggcagcccaagataaaaactatgatcatccgctgccctcatatgaagagtagacaaaacagaatcatgagtcccgctatcggtattaaaactgaagaagacagaatacttactaaggttcaccttctgatgtgacgccctctcaaaagtattaagcaactccaagacacgttgagcctcttctctgtttgccttacaatagagaaaattatcctcatcaaacaacatatgggaaacacaaggagcccccctagtcacccgacaaccatgaagccacttcctctcctcatacaaccaaataagagcagacaaacgttccgcacagatcataaacagatacagcgacaacggatctccctaacggattccccgagatgggacaataggacccaaactttctccaccatgaataatattatacaaaatcgttcgaaggcattccatgatcatgtcaacccaagcctccgtaaagcccatccgtaataaaatagcttgtaagaaagaccattccatcttatcatatgccttactcatatcaagttttagagccatacaaccattcttcccctatttcttacttctaagataatgtaatatctcaaacgaaacaagaacattgtcagtcatgagcctaccaggaataaacgcactctgaaactccgagatcaccttcaataataagcttatgagccgattagccatgactttcaaaataattttacaagatacattgcaaagagcaataggcctcagatcacccataacagaaggaaactttttcttcgaaatgtgaacgagactagttgcatttagaccccaaggcatggacttagatcggaagaaatcctgaaccatgtcaacaatatctttaaccacaatatgccaacgcttttgatagaaagcatgcgtcaatccattaggcccaggtgacttgtctgggtgcatttggaagacagcatgtcttacctcctcctccaaaactggctgtaaaagagtaacattatcctcagatgttatggattgttgtataacatcaagaacttcagcacaattcgaccccatagaatgaaaaatatcagcataatagtctactataacctgagacagacccgactgttgggttttgtgccctaaataaaatccattacaatctgattagttatcaatttagaattttgaagtgaattatgattacatgt

SEQ ID NO: 33356 - DNA, 1808 bp, Cannabis sativa
gaatagttattttattaaaatagtaagagaaaaaattgtaatgttttaaaatgtaagcaaaagattggaatgaaattaaaattatttccattccattattccaaccaaacatgttctcaatgtcatctccaaccaaatatttgtgaagtaaaaaattaaatggtgaaagtgtattcccttccaaatatttagaatttattaattgtattgtaagaggatggaattggtaatgcattattaataaaaaaactcaatttgccaaaaatttaataattatgtgccaaatttatcacgaagtaaaaattgtattaaataataaatttgacacaataaaataaaacatacgattcaaaattgcatcataataaatattatatttatattgttttataattaagtagttgtaacattaaatatttaattatttatagtaataaaattaagaaatttcttttaaaaatatacataaaataaaaaaaattacaaaaataacttaacaaatctcaattacaataatatcttgccacatcattaaaaaatacattaattctaaaataatatgtctaaaatgaaactaatcccgattttttttttttttttctagcgtttcaaaaataaccttttggttgcttatgatgttgataataaaccaacaagtagttttttcataaaaaaaaatatcatttttatattatataatttgatatacattttggttacatctaaaacttacatgtatacactttaataatcaattaattatttaggttatattaatacattttagtaaatttcaagtttattttagaaaataataatttatcattcaataagctaccattttaataaactgtattttaaaaatatatatgtatcatatatatttaagtcactcatattttttaaatgtaagttattatatgcattttgattagttaaataaagaagaagttacaaataatttttgaatcattacaagtacgatattttttttagaccaattagttatgattttgataagataccaattggttactttgataaaatcatcaattttaaaattaaaaaatgatgatcataccgaatattctataatcagatatgtctatactcatatatatcaaataaatttattagatttattttacaatattgaaacaaattttcattctttgtttatatttttcgtatagcctaacatcgtatatgctaataaatctataagtttattttgacataatgaaataaaatttcattttcttttcatatattgaaataacaattcatttcatttcatataatttaccattatatatgtcaataaacatactggtttctgtttgttggaacactattttattttttcaatacaaagtaaactataatcaaacataataatatacaccaataaacctattagtctatttttgtatattgaaacaacaactcattttttgtttcaaacaaaatgtgtgcttataaaataacaaactaattaggttgagacatcaaatctggttgtatatgcaaagtacatgactgtaatatgtcttacagacttacatagtaaatttgaataacaatatatgcactcagtagcggacccaaaatttaaagtggggggagtaattttttttttttgtaaagcaggggcaaaaataaatttaaaaagaaaaaaatataaaatataattagtgagatttgaacctttaacctctaacatatatataatctaccttaaccattacactaagcttactattattctataaatattatcttttgatacaaatatatgttgtaactaa

SEQ ID NO: 33357 - DNA, 1968 bp, Cannabis sativa
  modified_base (272)..(277): a, c, t, g, unknown or other
tcatgatcaggaggaactccgcgccgcggtaaatcttgcatttgaagagcagaggcacatgttcgctgaatggaaggacaaagagatggaaacgttaaaagcacagcaagcagccattaaagactgaacccagtagaccaccgtgttgatacaaaaggcctatcaggctgtaggacaacaacctgcaaccatcattcccctgggcgagaaagacgaagatccagcggtaaagtcatccgtccaatccccagtcacaggttccacctgtgggnnnnnnggtaggcgggcagaccctgtctagcaactcatcaggagatgttatacctaatacacttccactcaagttaatggtcctggccagctgattggccaaaccaaccagtcacggagatagccatgtgtttctgtatttaatcgattgggaacagcacatgatctctgagatgatcttaatagaaggagagggttggacgaccaacatgacgcaccagtcgttcaccccggagcccgtgctcaaaatcccgctcaaagatatgctgacgttactctggtcggccaagaggccgaacaagttaatccagtcgtgcaggcacaactggatgaactaaaaaatatgttccaaggcctggccggtcagagtacaaatgtcctcgagttggaccgagcacgtggatcccctttctccccagagattaatgttttaaaattgtctcacaagtttaagatgccaacctagaaaatatacactggaaaggaagatcccttatcccaccttaagtattttgatgcaaatggacctgaaaggaacctaaggagatgtatgttgcagagtttttcctaccaccctctcagaggtcgcccaacaatggtacttcaagttggcacccagaaggttcaactcatggaaggctttctcctcagaattccatgcacaattctcctcttctcgccaacttccgttgcacttaagagatctggtcaaagtgaagcaaagaccaggagaacctctccaggattacatcagcagattcatgacagaggcaactaaggttgcacgggtgaccaaagacggaaagttgtccgcgatactgggaggcatcgaagttcttggagaactttggaaggacatcaggaagaatgaaccagtagattctatgagtgacttccttgatcgcgtagaaggttttattaagcttgaagaagccattcagcgggcagaggtggagcaaaaacctagccagccaaaagctccctctgctgggatgtccgtccagctcccccagtacccaagcaattgaagctcgggtggtaaacggtccaacaacaataataggcaaggaaatgggaaaaaggaaaagtttgctagtaaaaccgaacaagctcccagggagaatcctaccaagtttactgcattttctatcctgacagaagatatagaaagcgtgtacatggctactcagtcattagccccgtacaagaagcccgcacccatgaaaaaagatgtaagcaagagagacgggaccaaattttaccattttcattgggattacagccatgacaccaatgaatgcaacaatctgaagcgggaaattaaatttctgattagaaaaaatatgcacatgcaaaagtatgtcaaggccgatcaaaatcaaaggggcgataacaaccaagatttactaccaccaccagtagatggaaatttacaagtcattattggaggtccgcacatagttggaaattcaggcaaagcccgggaaacgtatgcccgaacagtacaacatgagcaagaagaagtaattctggccgtcgaggaaagaaaaccaaagataccatgggcaggggagcccaccataacatttaatgatgaagacgttgtcaaaattagtttcccacacaacgacccattggtcgtggaagtctagatggccaacaagatggtggccaaaaccatgatagataatggagcct

SEQ ID NO: 33358 - DNA, 1324 bp, Cannabis sativa
aaaatgaacaaggttccttcgacggagactccttttcctcatcgagctgggaatctttttaaggttcaatactcagtaggttggaaagaagacgaggctcaagccgagagcaaatatttggaagagataaggagtctttatagttttatgactccatatgtgtcccaaaatccaaggtctgctttcttgaattatagggacttggacattggtatcaataactttggtaagaatagctatgaggaaggaaaggtttatggagtgaaatactttggcaacaattttgataggctggtgaaggtgaagagtgcagttgatccagagaacttctttaagagtgaacagagtatccctgttctaatttctcctgcaaaagcttatagaaaaactttacaatagagcattatactagttggggaacaagatgaataccataacttttgcccaatatttagcatatcttatatacatgggtgattatttacatatgtaacttttatgtttggctataagagcatttcaatgcaaacattaatagttggcaaatatacatatcattctaaaaaatatacatatttttttttattttttctatcattcaaataagatttgtcaaattttctttaaaaaaatctaaaagttgtccaccatcatctcacattacattaagttaataattttttagataaaaaaaaaaaattcatacgactattgtcttacaaccgctattggagatgctctaacattgttaatagataaaaatttaattttttaaattaaattgataataattaattatatactaaaaataaataaattttttaattaaaatatttaaaaatacccttttagcataatatttataattttttttaatttaaattcttaatattattttatgaactaacccatttaattataatatgtgcgataattttttttttataaattcaacgacagtaataaataagacgtactagaacattaccttattatctttcatagttttgtttttagggctcatttggtatgttgtaaaagagtcgtattgtgttaagtaataagtaacactatgtttggataaaatattatattgtattaattattatgacaataaattttaatacaatttatattgaattatttaatacataacaaattatttgtattaacttgtattatgattttgtaaaatttaccaatctatatgtattaccctctggggatatcaaattttgacaagtatatctatgttatcaagatgtaacgggaatagagtaaaagtcagtatagaactttcttgaataactttctagtaggctta

SEQ ID NO: 33359 - DNA, 1672 bp, Cannabis sativa
  modified_base (794)..(806): a, c, t, g, unknown or other
ttacttagttactaaattatacatacatatatataatcaattatatctcacactaattcaattttaaaaattttatttctaaactaattaaatccttctaatgtcattagtattcacaataaatatatatatatatatattacataaaatatatacaatacaatatataaaatgtatttacataaaaattaatatacacacaatgtatacacacattatatatacacatattcaataaaatataaaactacatatatatatatatactatatattgaggtttaaatttttaccttataaccgtaatctgacgagcaattttataaaaaatcctggcactatgcatatacaacacaacaatattactaaaatgaaaaaacccaaaaaataatttacaaaaaccaaaaataaaataatgtacattataaaaatgaatagaaactatattgatatcttaaaagaggttgagattcaatattttctcaataaaaaatggtggccggattttaaacccaaaattttctatttgggttcgaatgacactcaaagagggtaaaaaatgaaaactttttaggtgtatgtgattaagtatcgaaaatggaagatttaaaaaaaaaaaatgggctcaaatagttgagaaatggggaagaaagggtggggcggaggtggttgcggtgagggttttgctttctgctggttttgggtttgctgggttaagctgagggacgttgtgaggaagaagatgaagctttatattttggacgaccctatggcgtcggttcttatgtaagaacnnnnnnnnnnnnntgtcaaataaacgtgtaccctatgccgtcggttcttttataggaaccgacgctataggttaattccatataacccaaagtcgtccaacttccaaccgactctaaatagtataatgcaattctatacctacggtttttataaaaaaaaaccgtctttaaaggtcaattttcaataatcaggaatttttacatcctttacttccctttttataaaatgggttgaaaaaagggaagctaaaaacccattttgtagtagtgaaaactttttcacaacgttttctaattaatcaaaagacttcaattttttttttatttgattttatttttatactctaaaaattctgttacattgtaaagactaaaagtcactctctatttgtactaaaaaaaaaagtcactctctattttacttacataatgcatgcattaataacttaaattacattataatgatttcattaaatataaattaaaaaactattttcacaacatccctttctatttcattaaaagacttcaattttttatttacaataaagaatatatatatatacattttaaatttataattattttatatttataaaaaaatataattaataataataaacattttataaattcatgagttaccaacctttctatctatccataaccccctttagttattttatcactatataaataaatgtatttttctcttttgcgaattatattttaattattacttgtgctctactataattttcttattatgtaaattcatataaattttttttctttgttgtgttgtttttagtgtgcatatataaatataggaatatgattttatcccgtgatgtactttcacggaatgtattctgtggt

SEQ ID NO: 33360 - DNA, 1024 bp, Cannabis sativa
  modified_base (859)..(867): a, c, t, g, unknown or other
aaaaatggtgaaagtaatttttgaaagaagtgtagtcgtatttataggctaacttgtgaaatggggtaatcaattcaaaatcctcagactcttcgatttcccccagaatgtaaatattgggaaattaaaagaaatcaagtgcctcaatagaataaccgtcaaaggcatgcaaagggaaacatgtctcgaggcattacttagttagagcattaattagccaaaaattgaagggatgcctggtcagactcacatcaaatcacgaacaaacgaacccaacacgtgtcacccattcaaagacacctcggattaagtctacacgcagctttggaagtcccgtacaaacttggggggcaaatgttatcccaatttttgcactgtgacgtggcatcacatgctggtgacatgtggatttgattctccatacctgctcgaaggagacgtcccaaacaagacaccatgtatacctgtacggacaaggtcctcccagctgagcagtggataatccaagcagcatatcaatgcttagcaattcaagtatttgcatcatgaagcacaagagcaatccctacaaatctaggattgtgtcacagagatatggcaagctttccaaatcccacaatatgtggattctaaatatgtaatatgtatcctcaccaattatatacattgtaagcaaaaaggaaaccttccctcaagcatgtagccctataaatagtgatccattctcactggtaaaggggtcgagaaaattacttgagagagatctaagagagcatactcagagatttcattgtaaagctttaagagaggaaacattgtattctttgttttaagttaatacaaatcaaggggagtaggnnnnnnnnnaactgctcggggctgaacctctttaataaccttgtgttctttatttatattttcatatcatatctgaattacatcctttatcgcttattatcaagactaactgtcgttggctagaagtaaggtcaacagatctttagtgatagagtgccatgcccac

SEQ ID NO: 33361 - DNA, 1009 bp, Cannabis sativa
tggccagccaggccttgaaacatattttttagttcatataactatgctttcacagatgggtgaactggttcagcctcttgaccgacctatgtcacctcaggttctcttagagctgggtcttagatgcggatacttggctgagtggccggttgaacgtattgttcgtccaaaccccttcttctgttcaaatcattcttgagatcatgggctgtacccaatctgttgaatactgaagcaccagatgggctcagtgattaactggtttggctggtgggttggccagaattgtcagtttggatggacttattaggtataactccacctaaagaatggtcagatagggtctggtcgtctactgcttggcccacaagtgggacctgtgactggggattggacggctgaccattgagtttaggcggtatgcccactaggaatttcttcggtactgcccagtgggatactggacgtagtagctggttactaattagcaacttgatagacttttcatatcagtatggtagacttttcgtatctgtcaactgtggcttactctgatcaaccaagcctctgcgagttttcaccaccattttgtgtgtctgttgaaacttaagacaaagaacaaacttggatttttgctcttaatgaaagcaccaaaatgttgacctcacttttagccacgacagtgagtcaattaataagcgattaaaaatataataaagacagagtaaaaatcaataagcaataaagaacaccaggttttaaagaggttcaacccctttagttcggtaatagcctactccccttggattgtatttacatgagaacaaagaacacagtgtttcctctctcaaagctctcatagtgaaatctctgagtgttttctcttagatctctctctaaagcaaatctttcgatccctttgatagtgaggctagatcactatttataggactaaatgcatgagggaaggtttcccttttgcttgtaatatctataattggtaagaaca

SEQ ID NO: 33362 - DNA, 2994 bp, Cannabis sativa
ttaaggaggttttgccacaaataactcttatatatattttggctttatatatatttacaaataaatagaagaagaaattaattaataataatattaagaattattggggttaataatatgaatttgaagaatctgtggacacgatttgtttgtacgatttgtggtttgagatattgatctatacagaaagaaagaaagagaagacgatttaagaaatttgtttgtttgtttgttcagaaaaagaatctgatgaaaaatattgtgagagagaactaaaaattttcatctatttttcaaacacatacaaaattttggatctctgcataaaagagggagagagaaagaaacaaaaaaaaaacagagattcgacagattaccttgggtttcttgggatcttcggtcctcgatgagaaaagaggaaatgacgagcgagagagagacgacgagcaagagagatgactgattatcaagaaccctgcactagagagaagaggtggagacgatgaccgtctgactggatgagccatggacgccaatcactggaggagacctactttggaggacgccattagctggaggagacctgctcgccattcgctggagaagaagagaggcagtcgagagggagaagaaagagaaatgttgtcttgtgtaaaccctaattaatatccaccttttgttttttatttttttatttattaaatatattaatttacagctatttaccttttcaaaaaaaaaattacagctatttttatttttttattgtttcttttttaaaaaaaattatgattatgatatagtgacatgctaagtgtgtcgggatatacttatccaatcgcatttggcgcgtcactatatgccaatatttttcaaataaataaaatttgaaaatttttgagttttaatctttagtgacactctatatttatagtgatgcatattataggagactaacactaaacatttagagttgaattgtacatgtcactaaaaattactcctaactctttagtgacccacatttttgtgtgtgtcactaaatcatgtcactaaaaggctaaattgtagtagtggcctaagcggccttagcttcgcattatctccttgcttctcttcccttttgaaggtatctcctcttcgtacacttcgtcttagatgcctttcttcggtctttgtaccaaaagctaacaagttagtaaggaatggatgctatataaacatataattttataaaataaaaatacataactaatttttattattttaagcaaatccaacctatttggtgatacactccgaggctttgaacccggtgctctgataccatttttctatcacaacccgagccttaaactgtgacagatatataatattcataacttgagtggtcaaaggtcacactctaatccctgttgaaaaataatacctacaagcgatcctaagagatccttttgtttatattacaaaaataaataaaatacatatttaaaacaatagaataactactattacaaatttaaaatagttataataaaatatggccactcatcaatatacatatatatgtagaataattatattcctacaattatgtagtcaccaaatgattagatttaataataagaaaaacaccaaaataatgctaagcatccatcatattcctcatccataattgttaaatagctatttgaatgatgcagaccacccattaataattaggtacatactcaatcattaaaagaatagttaattaatatctaagataagactaagctaatcacactattctccatcaacgattccctctcacccacaagtacaaatctgagttcctggaagaggaaatatagggagtgagcttataaagccaagtaagaaaacaactaatatcaaaggacttgctatataattaaaaaaatccctgcatggttagcttttaaaacaaaacttttcatcatcatcatcattatgtatatacaaaatagagagaccacaaataatcacaagagacaagctacccgtgcatatcacaccgtccactaaacccctagctctcaataccaatcatgaaaaacgacatccaaaacaaggtagtcgcccagatttaattcacatcctgtaataattataggtctttcacctataggtgagtgcacacctaatctatttatgatgacacatagagactaagtcgtgaaacaacaatatgcacaaattatgatcacatggctctcattagtacaaccaaaagcaggcaaataagaataataaaagaacacatccctttttttttaagaaaatccagcagcataacgactgtattttgaataaaccaaaaatcataacctgcataaatatttgtacaaaaatatatttggcacttagtgccacagaacagttcagaaaaatatacagattaagttttaatttttcaaatattttataattcataaaaaattggaatatgtctaatgttattcaacacataaaatcaagtccaataatcaagttgagttcctacctccttaggatcgtcaaactttctccaaaagagacgctcctaagcccctgattcttaagttctaaataacttagtcactcaaaagttactttgtcctacactcttcaattaattaaataattattatcattgtcatgtactctttaaaccgagtctaacgacatatagcatagctatatttgaagtttaaagtttcgaaacctcacctaagtggtgcataatgacgattagtagcggtagaaattagtgtaccagaattgtcgccgaaaataaatgtagtatatatgaaaatgacctctttgacaagtagatcatggatgtacaactcattagcccaaacaaacatcggaattgccagaaaattcttccaaagaggcgaggatatccaaatctcatcggaaaaagtaatgagctgggcaaaatggcttagtgaagattgttctccttgggacgctgattccaactgtacc

SEQ ID NO: 33363 - DNA, 3034 bp, Cannabis sativa
tgtttttggttcattcattaaagcttcttaaatatgaaacttacaactgttgttctaagaacataatatcatggatggctaagaacatgttatataataagtggaatctaaactttcggagaggaaagggttaattatgaaagtgaatttagttattgagctcaaatctataataagattatagatgaactactcatattaattcatggtacttagggatttaatagataattagaaggataaaatagtaatttgattagctttaattattatctaatgaattagaccacctattatttttcaaagctttttagccaaaaaaattttatgatcgtgtatattgtagttatttaggaccatctatatattttttaaaatttttgagtaggttactgtgcctaaaataagattcaaatattttgttacacttgttattagttcgattttatattgttatacgtaaaatatttgaatcttattttcggcactgcaacttattcaaaaatttaaaaaaatatatttggatcggatgttaaaatctaacatttaatatataatttaatcgaatttgaataaactaaaaaatatcaaatatgatccaataaatacccctaatttcacccatgtttggaatgcatatgtgattattttaaaatgcaatacggctcttaatttatactttggggaacagtcaatagtgtcacttaccattgtcaatgcaaggtataaatgttaagcaaaattggtaaaaaaaaaaaataaacaaactttatatttgttataatatttgttattgtgttttaaatttctaatgtacaattacatttgaagatgcaaattagtataaaatgtaagctattattaataattattaattaattaaatacttaaaaataattaatggtaatattgtaattgaaaaatgtgtataaaagattcccttaatgatctatgaaaaactttaattatgaaagtttcatttatttagtccaaaattcaacaaatcattagacaaccaatctataacctaaataaaagccacaatatttttgacttcttttgattaatttacacatatacccttttcaatctataaatataacaatacaaacaaaatacaaaatattttgatttttttctcattaaattacacttatactatattaataaagttatagatgctagcttatattccaacacttttttctcatcatatttatatagtatattacggaagtattatttagtataatttaaaattagtgattgaaatcaaatggatattaaaaactaagtaaaaatgaatttgtaattttaatatttgaaaaatatctttatatataaaaagtgtttatctgacggtaattattggtttaacgattttttttaacgattctttttttttttttaatttagccttatacgattaacttaacagactgttaacgttaaacattaacaaataaataaatacaataattaaagcaaaaaattaaacaatcttttttaaaattaaaaaaaatcatgttacccacatatctctctaacaaatcgtacaattaaacccaaaaaattaaacggcatttacgattaaacaatctttacctactgctcatatctaatttacatgcaatataatttttgttttctatttctttaatttgatgtaattagaacaatgttattgtgtgtttgaatctagaatcttcatgaagctttgaataatacaatctaatggtttagagagctttgatatattgtaagaggtatgttttcgttcttcaatacattgaaaagatgtagatgccttaaggtgctaagaaaatattttggattatttctgttagaatctcgattaattttaataagtgagattgtttattagcgattctttgttgttgtttttgttattttttgggtgagataatttttcaaattttgaattcgtagttcatgtttgatgatacatattataggtagactcattgtgatgttcttcctctaaattccaaattagatttttaattcggcagatcatacgtagtttctatgttctaagttatcgatatttttactagaaaataattaattgtatttttattagtttgtaagtgccaatttccacctggttgaagtacaagaaatatataagattttatctttccaaaaacttacttcactcatgtatataatatatcttatatcttatgtagtatagcatatattataccttatgtagtatagcaggttgatctcttaaattaagcatactatatgaagggacaggtatatatctatataccttatataaataagcaggttttatttttttgctcaattataaataaaacaattagttgttatactgtacacatattacttattttatcctttggcgggtgttttaattttatagagctccgcagtagacatatttacactttaagttagacttaaatggcagggacatgtatatacttcaaatgcatttgtttgatttcgggggttttggtcaaattaaaaataaaataataataaaaaaagttgatgtatgggatttatgaacaggtgactaattaatgtataattcgcctgaattatcatgttctagaggatacttattggtggctgcaagtaggaaaatgatatcatattctacaattactgtaataaagaggtaaagttcttgattcagatagatgttatgtagtatgatatttgaattttgatgtatcttaattagttgttgatatcatttgcactatattgaccaagttagtccttcccaatttgaagctcatgctggaatgcatttatactttattaagatgagatgtttttttttatttatgacaatgtatcttaaataaaactaacatttacatggctcgaaacgttacatttacctagttattataacaataatagtcagaaaaatataccacattataaatttattaatattatatattcaaatatttgaaacaaagtatattgtattaaataaattattttacatatcaaatcctattac

SEQ ID NO: 33364 - DNA, 1567 bp, Cannabis sativa
  modified_base (785)..(785): a, c, t, g, unknown or other
tttttcttttctgtaatgaaaaatgaaaattaaaaagcttctacattttcttctttatcacactaaaatgtgtactttaaattttaaatatatcttcatagattaatattaattaacaataataataaaaagtagttgtatgagaggaacaatgaagcaaataattataaagcttgagtttaaatctttggcaaataaattttaccagacaatattattctgtacatcgtcggttaagcttttgaaagttctttcgcattaagtaaagaaagtcctcaactgatagctttctctgctttgaaccattattttgtgctttataatataattagttatattaatatttcttaattttttttttaaaaaaaagatacaaatgttttggagttggaccgaatattatattgtatgtatggttaaagcataaataatttataagtaagaaattatgaaattaaaaaagagataactaaaaaaaattagtaaagaattgaaattcaagaacatgacactaactacacacatacacaacatcaccaaatatatataaattagtaaagaaaaattagtaaaaaatgttatatatataaatatatttcaagttagtttaaaataagatttttgggagaaattttttagaacttgattttagttagcaacatatgactcttgaaaaaaaatatatagaaatttttttttgtaagtaaccatataaaaaaatttaaaaaaaatgtgttttattattttattttatgtgattatttattttatctttgaataaatanaaattatttgtgaactagttatgtaagtatggacattttttttttttaaaaaatagtgatatcttatttaattttatcttgttatagagattcttagaaacaaacaagaaacattaggaaataatgtctccaagaagatcagttcgaatcaacggcaatggaaacaaccacgtggatgcagctccagcacccgcaaggggcggaggccgacgtggaggccaaagcggtaggggaggtagacatggagcaccggtagcacggtagcatcagtagatgaagtagcacccgaacaacaacgagcacctcccaatgctcaagctaggataccccgggaaaacgctcgtatacgtgaggagctaactcaagaaattgcaaggctacgagctcagaatgaggagttacgtcggaatcgaaatccacccgttgcaaacctagctcttcaactagcctcattgaatccagaaccaatacaacattttgaacatgtgtacgagcgattcaggaagcaacaacaaccaatattcaatgagagctctgactcatttgaagctgaggactggttgcgctcagtggagtccatattagaatatatggacctcaatgatagggaaagagtatcctgtgctgctagcctactcaaaaaggatgcacggatcttgtgggaagtagtaagataaagtcgcaacataacaaatatgaccttgttggactttgttgacgtgttcaacaagaagtactatagtgctgccatactggctgcaaaagaagatgagtttatgaat

SEQ ID NO: 33365 - DNA, 1167 bp, Cannabis sativa
gaaggagaagttgccacttgtcgcacatgtggaggctggcgtagagagaagctgctcgcgggtcccacgcgtgtggaaagtaggcggcttggcaggagatggacaggaaccacacgcccttgtctggagtgggaagcacgcgcccgtctgggccgtaagatcaacgcacggacgacccagattgaggagcttgctgatgcgcgagtgggcttctattagggtccgaatctgatctttttgtaaaaaaaatatatattatttttttcactctaatttttcactttaaaataccacaataattttaattcctacaaaaaagacaataaattaaatctaaaccaaatattttcaacataaaaatatattttattaatttcatgaagatattaatttaaatttaacttattttaaactttaagcttattaaatgtatatattttcaccattaatcagatgcttagccttaatctactgataagttaagcatctgaatacataattcactacatctttctgcataccacatcataagtaataaaattctaagtcttggtacatcttggtggtaccaggatgtaatgattagggagtggtataaatttcatataatatctctgttttaagctcaagattgcctgaaacgtaaacttgagtttggtaaagtaacatcccgttgtctaatgccaagaaatcttcagcctggccagctaagacttcttcttgagttttcattaattcgaaatccatagattgggccttttgattctttctaacaaatctaattgaaatgttaaatttatcgagttggttaaccaccaactcaatacctgacttaatcacatcaactgacaattgaggggatatcatagttgtaccaaaagcctgcccgagacctttcctacttaggcattcaccactatattgaacttcccaaaaataaagaaaatttcgcagtcataatctttaactaactccaaccattgcctctgcctcatattcaaatcattttgagtaaagaaatattaagattcttgtggttagtatagatttcatacttttctctgtagagataatgttaccaatttaggtcatgagttggataatgttgctcatatttatacaactaacaagaagcataagcaacatgttaggttttgtgccctaaat

SEQ ID NO: 33366 - DNA, 1057 bp, Cannabis sativa
  modified_base (618)..(627): a, c, t, g, unknown or other
atatatatatatgaggttaaatactagtttttttttttttccatttcgagcttaaattatttgtatttttaatttgaattgtttccattttcaatgctagttgtttttatttcaaggttatgttatttctattttttgagattaaattgtttctatttttaatgtgagttgtttccactttttatgttatatgagtttgaatgatagttgtttccattacacaacaaactatagtttccatttcaaagttatattatttctattttcaatgctagttatttttatttcacatttatatatataaatacgaggttaaatgctaatttttgtgattaaattgttttttttttcaatgtgagttgtttaaattattttatgatatatgaggttaaatgctatttgtttcaattacgcaacaaactataatttccatttcaaggttatattgttttcgtttttagtgctattcgtttccatttcactcatatatgaggttaaatgctagttgtttctattttttgtagttaaattgtttccattttcaatgtgagtcgtttctattttttatgatatttatttctattttcacacaccacatatatatatgtatatatatannnnnnnnnntatatatatatgaggttaaatgctagttgatttcatttcgcaacaaactaaaattttcattttgtggaaaaattgtttccattttcatgctagttgtttacatttcgaagttatgttgttcaattttttaaactgaaattatttccattttcaatgtgagttctttttatttttatgatatttgtatctattttgacacacatatatatgaggttaaatactagttatttctattttgaagttatattatttgtattttcaatttaaattgtttctattttcaatgctagttgtttccatttcaaagttatattgtttccattttttgaggttaaattattttatttttaatatgatttattttcattttcaatgtgagttgtttctattttgacacatatatattgtgctagttttttttttttttttt

SEQ ID NO: 33367 - DNA, 1879 bp, Cannabis sativa
  modified_base (494)..(500): a, c, t, g, unknown or other
  modified_base (1137)..(1144): a, c, t, g, unknown or other
aacctcttccaattcctcaattggtttcaataggtttctctcatcttgaactcgggggtcaagatcttcgtctttcttctcgtttacttctaccaagatcgccatcaacttatgcctgtctttcttatgatgcagctcaatgcgatagcaatcgcgagccagcatctggtcaccacgcaccactcccacgccatctagtgtttggaatttcaagggtaggtgcttgatcaaactaattgcccctagttcgataagtgctgggcgacccaacaatatgttgtaagccgagggtaggtcgacaactaagaagtcttgcataatagtagcagataaaggtgccttgcctaaggttaatgcgagcttgattatgccaaggctagctgcaaaaattcaccatacaaggcctcaatttggtcttttcgagccccattttccatagagtctccttataaaggatatttatcgagcttccattgtctattaacaccctcttnnnnnnnttattggcgagttgaatggtaatcaccaatggatcgacgtgaggatatctcacgtttttctcatcctccttcgtgaatacaatgggaggttcctcgattttcaccttcttcgaaggttcttgggcaaaggtcgattgctcgttctttatctctttcacatatcttttctagatgttattgctttcccctacgatatgtgaccctcccgaaataacctcctctccttcaacaggaataggttgtaacccctagttgtttgggttattgggcagactgggctagttgtatccctggccctgtcttttcacgtactgtttaaaatggcctcgagtgatgacactttctatctcatcttttaattggcgactttcttcgattgtatgcccaatatccttatggaatttacaatattttttaggatctcttttactccttgaattcatcatgcgctcgggcttgccgaaggcaaccttttgctcatgtgcgaggtaaatattctaccgtgtttcattaagctttgtataaatagtatacactggcacacactggcacatacattgctgggtttacttcccgagctggttttcaacagattcatttcctttcgggcttcttccttccgaacgaacacctgagnnnnnnnnttgaactcagtgatgcttctcactagatgttcttgtaactcattccacaactcgccccctgcgattaatggatcagtaaagatccccgcctgaagtgttgtaagttgcgtgctgtcatccaaattcctaaccctagctgcagccatgctaaaacgacttaagtatgccttaagtgtctcgccgggctattgctttatattggttaacgaggctgcttcgggtcgcctatccccagcagcctggaattgtttctttaaatccctggacagctgctccccgaaagttattgaatgatgagtaaacttgttaaacaagctattcggtgccccaacaagcgaggtggggaacaaaatacagcgtaaatttttcttcacattactcgctcgcatcattgtgtaaaagttattcaaatgcgagaccaaatcagtggttctgtcatatgaaaagacatgcgggtttttgaatctcgatggaaaaagggtattcattatggtttgatgatacggctaaagctcctcgttagagtcttatccagatagtttccctaattcccccacttgatatctcccgaacttgtcgtcctgctcgtttatccgaaattggattggatcctcttgctttggacaaagttgttgttgaaggttaggtttcttcttattcaagtgctctcaaagatccggttgggagtaattgctggcagatcttgtcttactcacagatcgcgacctactcata

SEQ ID NO: 33368 - DNA, 847 bp, Cannabis sativa
attttgtaatattttgagaatgagcattagcaccttctatatgtatcatttcatgattggttaacggtatttcttaaaaactatttccttaagttatataagattcaatacttaattacactaataacgtaatgacactgagaaggatactagacaccagtagtactttttaacaattctctttgaaaattttaaaaataatttaacatattaaaaataatgtatacacaattatgttatgcacatcacacatacatcttatattttaatgtgtgtaaaataaattatttgaatagatagagaatcatactttatatattataaattattttaaatttcttataattttataaaatattttatataactacaatatacactttatataaaaactacaaatcaagataataactattcagatatcagaaatacaatgcatcaggagacttgtctttaagaaataaacattgctatttcgtaccttaaggtactcaatatcatatcgatataacactttataattagttaacggttttatatattaattattaaatcaaaatgtatagaactcgatattaaaatacactaattatagtatctcactttttgagtgttatatgcactataaaaatacccaataatttatattattttttcactataatcttgtaactttattttgtcaactttttttttccttcttgtctaaatgtgatccattttcaaagggttcaaaaaccaaaacaccctgacaagagttggtgaatcctgtaaccaggttttgtccccctcaaaacacaaccatttgtttcccaacatccactatttaattacttaaaaataaata

SEQ ID NO: 33369 - DNA, 1383 bp, Cannabis sativa
aggtatgaacatcattggcaataagtgggttttccgagaaaagagaaattcagatggtagttttcaaagacttaaggcacgtttggttgcaaagggctttaaccagcaacctggaattgattttggggagacctacagtccagtaattaaagcttctaccatgagtataattctcaccattgctgtctctaaaggctgggaaattcgacagttggacattaataatgcgttcttgaatggcactctacaagaggatgtttacatgttgcaaccgcaaggctttgaagatcaaaaccaacctgatgcagtgtgtaaacttaccaagtctctgtatggtctaaagcaggccccgagggcctggtatgacaggttaaaaggaaccttgctctgttggaattttacaaaatcaagagtcgattcatctttgtttttctacaaagctgctggtacaataataatggctctaatttatgtcgatgacataattatcacaggaaatgatgtctccaaactcacgaagttcactggtacaataataatgttctctctcaaggatctcggttctctcctgttcttccttagaattgaagtgcacatggatgaaactggtttgtatatgaatcaagggaagtatgtcaaagaactcctgctcaaaactgaaatgcttcacctaaaaccatgcaacactccaatgacagccgggaagcctttgtccaaaactgatggtgaaccactttcaaacccaacagaatacagaagcatcataggaggtttgcaatatttgactcacaccagaccagacctgtcctttgccgtgaacaagctgagtcaattcttgcaatctcctactacaacacagtagagtgcagccaaaagagtgcttcagtatttgaagggaacagcctaccatggacttcatataaaaccttcggatcgattggcaataacagggtactcggatgcagattgggcatgttgcccggatgacagaaaaagtgttgctggctattgcgtctatttcagagacactcttgtatcctggtcgtctaagaaacaggcagttgtatctcgatcaagtacgaaatccgaatatagagcacttgctcaagtggctgctgaaatagcttggatacaatccttgctcaaagaattcgaattccctctgccttgcactcctgtcacttggtgtgaaaacatgggggccagtgctctggctgccaaccctgtttatcatgctcgtacaaaacacatcaaattggatttgcattttgtgagagacaaggtgatcaataaagaaattgaagtcagatatgttccttcaagtgatcaaactactaattgtcttacaaaaagcttaacacaacacagatttcatttcttaat

SEQ ID NO: 33370 - DNA, 1053 bp, Cannabis sativa
ccataaataaaacccatttcattataatcttatttgttatcaatagaaaaatagaaataatttaagttaagatgtcattttcatgattatggtttaatatataatttctgttaaatctagaacatatagttattcacaattacagtgatgttaacacagtggaaacatgagacacgtgtcattcattcctattaccacatcaaggtacaaaaaataggataacatttgcccccaagtttgcatgggaccttcctggtcgcatgtggacttcactcagcctagagtgtcttgtttggatgggtgacgcgtgtcctaaatgtcagatgatgaaccgatgtgaccacgactaggagtcctgttactttctgtccatttaatgctaattaacggttttacctcgaatcacagttcaaagcttgcacctgtttgacggttatactccctgtaacgagtacacaatgtacttttttggggagaaatttgagaaaattaattttgaaatgattacttctcttttcagattgcttataaataggattaacgatctatggcaatcgttttagccatttcaactcttcaacaccacattaaaaaacttttaggcaaatttcctcccaaatccttcgaggaattcataggaaagcttatgacgattccatccgcgcagagcaagaaagcttcaaatcagtgagtaagttcttcatttctttcttttacacatttacaattaaatgccagtatgatttttggatttttcgctatgagtctcgcctgttcttgaactgttctaggttaaccatagaattcctaggtttaggacttgaaaatctcatttatgttcaaccatgacatctgactatctgaccacgctttgactttatccttacaacgttcatttccactcctccataggattccaattcaaatttttgaacttttgggatcaaaaattctatttttgggtgaaaccttagcttttgatttcttagtcgaacctggtcggtatatacaacatgtttttcaattgttactatgaccaactctcactttctt

SEQ ID NO: 33371 - DNA, 1771 bp, Cannabis sativa
ctaaagtttcaaaaaagccgtaaccaccaccactggagaccatattctggccaccacctaacccacgcaccgcacattcagacccccaaccgtcggggatctcaacccccaagcggtgcctcctcattcactaccgtaagcgagagatcacgagtcaaagtttggaggttaaaactttgaacgcatttttcgatcacatctggtgttcgtttgatgatccgtcttcaccactagacccggctcgtcaaagagaacaatctccactaagttctgcccagctcgctactttttcgagtgacatttttgtagctccaatcactttctggtgatatcgtgtacctctttaacaaatagttggcatgggtgtggtctattcttcgaggtggtctttttgatatatactatctctatttttggcaaatgttaccgatacacaaatatttttactgctaccgataattaatgcgcactgcttaagtgaagtttcagaactccaaactttaaatatagtcaaattatatgttgttggactcaattttgaatataaaatgcaatgatgataattatttagtattgatggtataagtgaaagtgatatctaagattagactaaaagattagagcttaggacttgagagcttatgatagtctttttggataaagtttaacaacttgggagagctagagactgaacttaattattagacttgattttattgtgatgaatatcatttgatatatttcaattttattaatttataaaatgtttgaaaaattgaaaacttattctgcatatttttctagactgttctggagtgccaaatatattttcgtacaattacttatgcaggttatatttttggattttatcaaattacagccgttatactgccaaattttctaaaataaagggaatatgtacttttgctattcctggtgcatgtatttagttttactaatgagagccatatttatcaaatcttgtgcatattattgtttcacgatctaatctatgtgtcatcatagatagatcaggtgtgcactcacatatatgtgtaagacctaaaatctatacggaaagtaaaatatagctgtgtggatattattatcatttattagcattatcccatgactacataaccaatttctactgtcactgataattaatgttcaccgcttaggtgaaattttggaactccaaactttgaatatagtgatgttatatgtcgttggactcaattttaaatgtagaatgcaatgatgataattattaagtcatttgatagtataagttaaagtgatatataagattagactaaacaattggagttcgagatgacttgagagcttaggatcgtctctttaaataaagtttaacagcttgattattagacttgattttattatgatgaataacatttaacatattctaaggaagtgttcatatgtagtactcaatgtaatgtactcacccacttcacatctcatataatattttggaaatttgaaataagttacaacattttccttcacttataagtactaacccaacttaacgagctgataccaaccaaaatccaccttattaatttaccttgcactacaaaaatactctttttttttttacatgaaaaaaacacacatttctttaaatgcatttatccgactatattgaagcaaaagatttcgttcactcacttcttgcatgcactataatccactggttggtgaatttgagagtgcaatacatataaatagctagcttcttctc

SEQ ID NO: 33372 - DNA, 1488 bp, Cannabis sativa
gggaaactttatatatgtatggggaaaataagaatcaattcgagagaaggtgaaaaaaatgattggcaacaacttgaaaaaaaaaatgacaaaaaagtgtcaaattcgaaaaaaaaaaaagaaaaagtaatatatatatatatagttgttgcgaggttgtagaaaaaaaaaaggaaaaaaattctcttatgtaattaaaaaaaaggataccatgatcatttgtgaaagttatggggtaaattgattggagaagcttatggtataggcaagcctaaatgaccattccatctacctgtacctaagcctatcattacaaacctagaaagactttttgattcttaattatgcatatatctatattagtgaagaattgtaagtattagaagcttatggaatatattaggttagtggattgatagttgtatttgacatgtataaattatttcaactgttagttaagtgctaattatggtttcaaaaactgaatgaaatattgagatgaattaataatgtcattgaactgaaattctggaaaaaactttataagtgaaatttttcgtacgaaatcatgttatttgggttacttgaaaaattgtgactcatattttgatggattgacttatttcatttagattgtgttgtttctatttgttagtactttactcgagggcaagtaaatgttaagtttggaggagtttaataggctagttttaggtgcattttataaagttttttaaaggtgtgtttcaattgattatattcattttgtgtagaattacgcttgttttctacttgttttaagtttaaatggtaaattttataatgtgaatttaaaataagaataaacatgttaaatgatataaatatgatgaattatcatagaattttgagttctaggataaaactggtgaaaaattctaaattttagatgctcaacacgctccgttcgtgatcgaaaatcaagtctgaaacttcaagtgaatttcttactatgattcattcactttgaggaaaaatattctgaataaaatttctcgatctctcttttcgccttccaaaacatcttaaatcgtctaattccaagcaataatgaaagagttatgttcaaaatattatcagtcgttgcaccaggaagtttgctgccaaaaatttggggtctaatgcctcaacactcccagctagtgttaaggctcgtgtgcaagaaatatcaaaggaaatatcaatgtcacaacacgggccatgacactaagggcctagtgtcgaggcctgcccccttgaattcgaaaagtggatatatttttttttatctttttttatccttttttttggctataaaaaggaatagatttcatacttttcagcaagcaattagagagtacaagtcagaaagaaaaaaaaagtgaccgagaaggcttttcaaaggattttttcactgatttcttcttccctgttttcttcttatgctctaagttaatatatgtcgaattg

SEQ ID NO: 33373 - DNA, 2615 bp, Cannabis sativa
  modified_base (102)..(116): a, c, t, g, unknown or other
aaatacaaactttgataatggttctcaaattatatcaaatcaaaaatttcacaactatcaatctattctctaattctaatgtgtgtgtgtgtgtgagagagnnnnnnnnnnnnnnngagagagagagagagagagacacacacacacacacacaaagactcctgttaaaagaacagcattaattaaatccaaattcgaaggcaggtgtgtactactttaaattcaagcattcaccactatacttggtttggtacagaatcgaatcaacactagtgtagtgtagatcatttctgttatctctacgttctgacatcaatacatacaatcgtgccccaacctcgtagatttcacccagaaattgaaatcttaccaggaagacagtaaaaacaaaattcctactttggttactccaattatttttcaaaaaaacaaaaaccatctgcacaaaatgataaagttgtttttccgaacaatgggaatccaaaaggagattaaaatgaaagaatggaaggtgaacctggttgaaagagtacataaggctggtactgagagatcttggaggagaccatgcatgaatgacctcagcctcaacctcaacctcctccacttcttcttcttgctttctttgctcagccattcttaatcaacaattcacactgttcacttgaatcacttccgagtttggcatttacgaagtgccagttctctctctctttaatgatatgattccttttagaaagtaataactattgtaataatttactatgaactttttatgtaagccattaaaaattattattttggatttgtcaaaagttattaattgaaaattattattttggatttgtcaaacacaacacaactgcacttcgttcccatttcgaagaatcaatactccgattttttattattatttttttttttttttgagattgtctggcaactgtggtacttataaaagtagggcagaattttgagatcatgctgaaaaataaaaaagaataaatattatgtggcaacatctttatttaggcttgatttgccgtggaatcaaaaacttaattttagaaagaaaaaattacacaaaagttcttaaaaagtttatgtttttaatgtctatttgagacttttcgatcaatacgtgtcagtgttaagtgttggggtccttcacctatttcaaaatttacaaattttttgattttttgtcttgtaatattctttcaaatgtcacgttcggtcttatagtctcttaaaggttgttcgttatacccaaacttttgagacccaaacgtgaggatgatagagttaatcctacattgctaatgtataaaaataaattaccatatataagatgaatggactactgctcatattaccaattagttttgagaagcaaccttatcccaaattctaatattcttatgtataaatacatttatatataaaaatgggatgccatggcttgtttgcgaagatctcaatgctcatataaaatattgctttgaagtcgttttcattccttgaacatactcacgagcagtgccggcccaagctatgagcaagaaaggcaactgcccaaggtccatgaatgaaaaaggcccttttttttttacctatatgctcatattatataaatatatatttactttgatattttcaaactaaaaagaacaaatcaaatcataataatgagatagtacagggttgaggcactactataagtaacctccaatttttattattttttttatttttttattttttttattatcttttaatacttaaatagtacctattttgtggagaaaatgaaatctgattaaactacacaaatattattcaaaatttatttattttttattaattagcggttagggatgtattgtttagataaataaataaatataatgtatatatatatatatccttctcttttatttttcactaacttcatttattcttcttccattttcttactcattttcattctcctttatcaattaccattacttaagagctctcattcaattccatcattattacaaacttatattgatatttaattttacattgaaagagacaaaagaaacacaaaggtatacattctaactcttgtttttatatatattattaacattattacatatttttcatcttactttaatttataataattattctttttggataggatctctttcaagaaaagaaaatttcaaagaaaatattcatattgaagtactcgttttagcttgcaattttttaggtcgtatctttctttcatcatttttttcttttattattattttgaattattattattattattttgtttagtgttcctaaattaaaaaggaagcatgtctagtaagaaatatctatcaagttatgaaaaacttaagaaaaaaagaaaaatagaaattatgataaaaactcaacaaggagctttagataaatttgttaccactagcaaaagagatgaaaataacacaaataaagaaattaatgaccaattaaatttaaataatttaggtgattatgaaattatggtagaaaaaggtttagaaaattgccatcataaaatatgtgataatatgatagttgatgaagaatgt

SEQ ID NO: 33374 - DNA, 1229 bp, Cannabis sativa
ataactaacctataacaaactttgggaaagataaaaacagaacacttgtaacaacattttaacagtaatatcagataactaaaaactaactgactgacactaactaattcagctaatagttagtaacatcaattcttaattattattattattattatttttaattaaactgcaatcgaattttagagcaattattttacttttaattttattttagtatttaacttttattattattgttttgaaagtattattatcgtattaattaaaataatcagagttatgttgctatttttatgagtttttttataaaataatttattattattaaaggtgttagtttttgttgtattagcttattatgttaatttttaaattctcatactaaactctattaattattaattatatatgaggtagattttattataactattagaggcattagttattagcaaattttgtttcttggttactaacagagttgtaaatatattgagttattcaagctattaaattgtttgaagtagtctatagtgtccaagatctaatatcgacatcaacttcattggacaaaataaattttctctttttatatagaaggaatatttttaataattttcaatatgattattaatttgtactgaaaatatattataaaattttcaataatatttatttatttatttattatgattattattttatttttttctttattaatgtatattttgttttttgcagttaaattttttctttctatgagggagtcaattctcatgaacacaagcttctcacttttatgctgcttaggccatcctctcccatctagagttattcattgttgggtttttgtttcttttttagagtatttctgaaggtgttgtgatttttattcattctttttccgagggtgtcttcaagtggggctgtcgttagatcttttaagttcttgttatctatctttctggatgtagtctttaacatgttatgcgaaatgataatatcgcagcatggtgaatatgatatgcactacagatagaaaacaatttcttttggttggaagaaattctttcttttttaataactaatgtattgtttgactctcaccaataaaattaaaagaattttttatttttgcacttgaaaacaattttttttttttttttttgtttgtatttttacgaaattttacatagaaattcctattgcaactaacgaaacaactt

SEQ ID NO: 33375 - DNA, 2208 bp, Cannabis sativa
gtcggttttttggataataaaccgatcgttatacatatatatatatatattaatttattaaatttttttttgcatgtattatagttactaataatatataaaaataaagaaaatatcgcgtctactactcgcttcacgtttgacaacgaaaaaaacctacaggaatggaagccacaggagtgtcgtcttcctctcgctccacgtccgtacgccatcggtcggcatcgccgatcaacgacggccaccgtctgcaagtcttgtcttttgtgacatggtgtgattgttttttgtttgctggtttgagattgttcttgattttgccattgttttctggtttgagagtttaagttttctggtttgagatttttcttgatttgccattgttttctggtttgagagtaaattttttggtttgagattgtttatggttttctggtttgggttcggtctgtcgattctcgtttgagattgcaagtcttgatatatgcagatttttaggagccaaagttttaattgataataatcctaggtacgccattgagtatgctaatgttggaataagggtactactttttgattaagagaactcctattcttggtgcaaaatcaattctattgatcaacacctcttgtgacccgtcctggcttataaaataagacttgtaaaacgattatccactgctaatcatatatcatccaataactcaaaaaatcaattattcataatcattatattgatcaacaccaaagtttataactaggacgaagtggaataacaacttaacacactgatttttcattagttatatcaacaactcaaaggatctagaaaacttgtagaacgattatccactgatcttaatctctctgtcatcaagttggattgatcggcataattggggacaagtgattttggaatcagacagtttggtatgcatacaagctattcaaagtaaaatttctatgtcatcttcttttggtcttttagtgcatgatgttcgtgcgttgcttttatctttagacaatgttgaattgtgttttgtcaaacgatctgcaaacaagttgactcactgcttagtcaaggactcttgtttctctccaggtcatgtgcttcaattggaggattgttcctctgaattactttatattgttattaacgatttgattagttaataaagataccgattttattcaaaaaaatatataaaaataatatattattttttattaatattaaaattaaataaataagataattaatttttgaacaattaatttgtatgtttgtagttgtaaaatataaaataatgtatttatagaataaattggatcattctttttttttaaaaaaagttcggtttgggcagtttaaaccgaccaaaccgaagttcaaaacggtcagttttaagataagttttagattggtcggtcggtttttgaattgcacgaatccagaccgaaaatcgaattttagatttttatatagaaaaaaaccgaacaaaccgacgaatattcagccttaaattaactaacaaatcaattactactaaaaataaataaatgagtgtgtagtacctagtaaggtaagaaaatatagtagtattgaaaaaaaaaaaaactataaacattaatatggattacaaatttcttaaataaacattgaatttatgctgtttataaatttaaaattttaagtgttatttacccaaacataaatataaaaaatcatttatatattattcccattaaacaaaaccctaatcattaatcactctttctctttctctctcagttcttgtagccgcccactgcgcagaagagtcgccgacgacggaaactcccccactcgccgacgacggcggtgcaggttctcccctactcgcagacgacgacgccgcaacttcttcctcagctcctctctcgcaaacggcaacgatgcaggttgatttatagtgagttgagttcagttaggacacttctgtgagaagttatgatttatagtgtcgcctagccaaggtaaagatatcaattataagaatcaatccttatgcaactttgcagtagtatatgggagctcattatgatttttttggtagtattgtagtgtttgtatgtatatttctaattgtcttcttttatacatttatttatgcagagatttttttcataagttaataacaaaggaatcagagatcaaaaaaaaaaaaa

SEQ ID NO: 33376 - DNA, 1324 bp, Cannabis sativa
aaataatgttcttgacgacaatgtcgagaactttcttgcaggttatggaaactagaggttcagcctccgtctactttgtgaagaagtcgactgccactactgcgtactatgctcctccttgccttatgggcaataccccaatcaaatcaatctcccatgtcgcaaatgggtatgacgaggtcatcactcttagttttgttggtggtatgcgaggtatatgtgaaaatctctgacacttattgcacctcttcacaaattcatctgtgtctttatttattgtcagccaatagtatccttgacagattatcttctttgacaagctttgccaacctacatggtctccacaaaagccttcgtggatttctttgattatctcgcttgcttctgtggggagaacacaccgtaggagaggcattgaataacccctcttatacaattttccctctaccatcgtgtagtgaggcactgaatataagagctttcgtgcctcgttttgtctgttggaagttgtccattgagtagatagttaactatgggcgtcatccatgtaggtgaggcgtcaatcatctcaacttctttcttttcacatatactcggttcgtttaacacttctactggtaccaaattcaagttatcaagttcgttttgcgaggcaagttttgtcaaggcgtcgacattagagttttgttttcttggaatttgttcgattttaaaataatcaaactttttccaagttcttccaaaccttctccatgtatttcgccatttttaaactctttgcctggtatttcacctagaacttgatttacaattttttttgatgaatcaactttagtttcattactccaataatccaatttacaacctaagagcatcctcaaattgggacctcggatatatctctctatattttacatttcaccttttgtcaaaaggaaaatttacaattacaaagctctaaaccattctgtatcacttaacccaacctttcacggccaaatactatatactctttgtttaaccatttcttttactgtacaaattactctatctatgtcttcattttttgcattccatattttgtcattcatagccttccaaatgtggtagactaagctcgacaaagcagccgaaaggacttgttttttaaacttgttggatttgcttctttcaatccaccgcattagccttgttaccgatggagtggatgcattccacctcaacaaatcttttatcctctatagactctgttgagagaatggacacaagaagaagagatgatcacaagtttcttcttgtgtattacaaaacagacatcctggat

SEQ ID NO: 33377 - DNA, 2086 bp, Cannabis sativa
caataatgacaacaattttttttttttgaaggaataatgacaacaattttaaaatcttatggtaatagctattttaaatgtagtatcaattacaagtaagataaagcgataacaataatttttgaataataatttataataatatacatgagatagtataataacatatctataatagataaactaattaataataattgtttattaatttcctttatgaagccaaaaaaaaatatcaaaaaatattaaaatttaaaatttaaaataattttatgatttaattatcattaaataaaatataactgcatgcaaagctcgggttgtttcctagtggtctataaaagccaacacttctcccaattggttcatttctactgcccctcaatttctagaatttcaaacccactcgataaaattccagaggcccctgatttttttctgctcttccttcgtcgttgccaagcgaagtattaccatcacacgacgtcttcggcccttgccttgcctttattgtgtaagctctttctgcatatatatttcttttcatctgctagggcaagtagtaataataatgtgtaggtttatatgctttgtttattttcctcgaaatgataaccagggtcgccattagtgtaacgtctcctttggtgggcatccgattaacgagtgtgtttctttattaccatattttgtgttcattattttcattatgcatgtattgctcctcttttttatttttttctaaaagagaggatcgaaatcagagggtttttcgtatgcccctttatggcagttcaaagttgctcttgcatgccttctatatttctttttctttgatttccctgtgttgcttggatattttgcacccgatgtctgcatttgtgaatcgttatattcctttcgacagtcatcgagggggcctcttcccaacggttaggagacccccattcacctttttgacttagggtttgatgtgggggctaactgttggatttcttattttttcagatgagtgaaatcctccatgatcttcacaaacacaatttctttgggtttgaccaagaaattcttaatctccaccaggcagactctatgtccacacccgcagctacggtgcgaaatcttccaagaaggggccaaagaagctggcctccttggaggaggttatgaagggtccggtcatttacaagaagttcacatgccgttccaataggtgggaggctaacgaactctattcgacattgacctacgcccatcaactgcaaaaggttgttactgtggttgggattaagcccttaggttctggagtgtaccaccatcttccaagggacgaggagacgccaaaccataactacaatggcttcggggcctggaaccagactcaccttatgtccgaggccatgctacccctccaagattacttcattgaattatttatttcatttgcttaaaaaaagtagagtatttttcatttaaaaaaatatttgttgtttggatgctaaagtagttatattatataatttttatataaaaaaaacaagaaaaaaatatgtttatgactgttctagtaaaaaaaattaaaaatatatttatttgctttcttttctatatacatatatatatattcatctttaaaaaatctttttgttggtatcttttatttttatgataataccttttgtttgattttagtttataaaattatgaatctttcttaagttgtgtttaattcttgggtcaattttgtttaaaaataaaattttggaaaaaaaaaaaataccatcatgatatgtaaaataaatattttgctatagcaatttttccaaaattcacataataatttgatgaatagattttaaatttataatttaaaatatatttttaatattgaattaattatataagcttaatttctattcatattttttttataaactattttcaatgtgtaatttttgaggatgttttgatatcaccaaattaaaataataaaaaaatgtgtatttttaatttttcttttacttgagaactaacaaaattttaagtttagggttgtgataattctaaaaattagagttatttttca

SEQ ID NO: 33378 - DNA, 3772 bp, Cannabis sativa
  modified_base (161)..(161): a, c, t, g, unknown or other
  modified_base (3662)..(3672): a, c, t, g, unknown or other
agaaaatatcaatatcaaaaaatacatcttctcttcttacactatattaaaaatatatttatataaaaaatatttaagtcaaagtcaacatttttatcaaaaaaaaaattatttcttttttcagctgatgaaccaatcacagcccatataatgtaaaaatnagaaatttttctaattaaatagaataatttatcatgaaaactcaaaatacattcatgggtaatacccattaagagtgcacccatatatataatatattactcatatatacatgctatatattatatatctcacatatatacaaataataacatgatataaaattcaaataccatattatatactactatatatattaatatgatatatatatgtcacatatacatatatatattaaacacaaaaatcaataatgattttcacaaaaaaattcttattcttgtattctcaaaatcttgatttagctcctcttccattgaaaatgaataagcttttgattgttagaaattttatatgtcaatagaagaaaatcaagatattataactttattataatataatacaagggcaaataaataaattaaataaatattacaacaatatatattacactatatatatttatatatatatataagaattgtagaaaaagaagaatatgtataaaaacactaactcacaatcttgagtgtagattcttggggatcactatgacttgaacaatattttatacatttgtctaaaagcttatttctccctatatctaagcactaaatgaactctcaggaaataattttgggaattatcagtccttgtattttctagcaagtgctcgttgatagaaaattgattgtcacaaaataagcactttagacttctatttgtagtgtttgagggtaactttagaaagtcaaattctcttcacctcatggttgttcccagcactttaatagatgtttaataggataaaaatttgggaagaaagctggaaacgtgctcaataaatctatgcacattcatggacgttattctaaaactggctccatgtgattaaaacaaccataaaacaagttatcaatcataaaacaacaatttcgagaaaactcaattttgagttttgtaactcctcttcgagctacattaattcttaatattttgatagatcatatctgatatttatgagtatttatgctctttcaacagttataattctatagcatttaattttcataatatatatacaatttactcacttaaattacacatttcgagcactcaaaacaacttctctaaacttgagaaactttaaaaaatttaatgaatcgtactaaaaatacactacagtagatgctctaaatttacttttctttttaaagttcctttaaaatttactattcacggtttacatttatattcattgctctaaacatattttattaattattttaagttttaataattatttttttatggagatatgtgtattaatttaatagatttgaagcgaataaaatataataaaatttaaaaaaggtagaattttggtgatgtattttaaagaagttgatatatggtgttatgtaaaagtgtgttgtaaagtagaaacagtaaagtttcggtgatgtattttaaaggatagaatagagaaactgttaagagtgctcttatgtttgtgatccataacttacaaaacagttactgttttttttttttttttgaagaaaagcatggaatgtattaaaccaaatcagttgttacaggaacacttaagaatctaggtggggccggcaaaacgagtcagacacggtgacacgactcgaaacccgcatgagagttagcgggtttgggtttgccttaaaatgggttcgggtcgtatttgagttgacttgtctaacccgtttaataaacgggtcgtcttcgggttgacacggctaacacgaaattgaccttttaatgacctattaaagttattttagtactttaacgtgtcataaatgggttacaaacatgttgaatacttcataaacgtgttattgattgacatgtttaaacaaaatatacttataaacgagttacactggtcgtgtcgtgtcaatcggtttataaatgggtcgtgtttgggtttcatttttttgacacgattattaaacgggccgtgttcaggtcgagcatgtacctgttatacatgggtctcgacatgacacgaacacgacccgcgaacacgaattaccacccctaaacataggacaagcatcaatccaaacatggacttctatcaaactagtaacagacttaactagtgtgtgggctacaccattcacaacacgcaaaaaggcaaaacaagaaccaccaccaactgtagctaaaagaaaaataatctcatcaataagagatttaaacataatattagaattaggacaattcacccaattataaactattgaagaatctgtctccactctcaccacattgaaccccgaattggaagtccatagcaaacccacctgtaatgctaaaagctctgccaccaccacctggaactcgccaactctaccaatagcccacaccgcccacataacccgctcaacacctcgaatcacccccaaaacaagcaaagcctttccccaaggtgacaattatgtcaatggacaacatgaaattaccatcttaaggaggaaaccacctgctacgcccagcaacagccccgcccctcacacccctgctcaccctcccctgccttgcaccagcagcacagcccagaaacccataacccgaccctgtcacattaataaaactagcagaacgggacctcgattcctgaccctctcctgtcgcaccatccccttgaaactcctctaacgccacactcactaagccaactatcgcctctaacctcgattgcttttttccaaacaaaaccgagttctgattgtgccacagccacccccactacaccatggctattaaagcaaaactatcctgaccaagctcatcaaacaaccaaaccagcaacttcgataaatggccatttctaagctgacataagtgattccacatctgtaatctatgccacgtcggaatcaatgaagaacaaaacacaaaggcatgttccggtgtctctgtttcctcatcacatttgtgataaattggctaaatgggaactttccgtttaattagttgggaatttgttgtgatggctagataaaacattcaccatagaattttttttcatttatggcacccttaaattccaaagcccattccaccatttagacaaattcaatgatgaacacccaagcttttcactcgccaactctagagctaaagcacatccacttttaatagtatagcatccattcgagttgttatgccaacaccaccgatccacgctcacaccattcgctaaagggaaaccaagaatcacatctttataactaaaggcaaaaaatatcaagataaagcttgtatattctaagacccactctcaccaattaactctttggccatcacctcgacactaggagcagtcgtaataggacaaaacatcctaggctgaggtatccaaggatccttaaaaggaacaatactttgcccatactccactaacttcctcatccccttactcagtagctccaaccctgtaaagaccgcttagcttaaannnnnnnnnnngcagataattagggtttaattacagaaattatttattaattctaaattattaatttatgaggttttatttgaattcagaatgcattttatatgtcgtata

SEQ ID NO: 33379 - DNA, 1568 bp, Cannabis sativa
taaaataatttccaacagtttcatcagggggtattgatggttgatggataaggtcaacaatgtttggtattggtttaggagtggtgacagggtgtgttgggggtattagaagagactaaagatttggtgctttgagcaggaagtaagatgtccagttgttgggtgtttagggacccctttagtggaaaaatcttctcataaaatacaacatcttgagagtgaaaaattttgttagtggctagatcaagaagtgtgtaaggtttcatgccattaggataaccaaagaatatgcaggcatgtgccagaggagagaatttgtgtctagtactgactagtgatgaaacgtatgctagacaaccaaaattcctcaaatgatcatatgctggtggtttactatgcagcaagtgatagggtgttaagtgttgtaacaagggggtaggtgttcgattgattaagtaaatagcaatgtgtataagatagggccaataggccaaggctatagaggattgaaaagccaaggcacgagccacatttacgatgtgttggtgtattctctcaacagaattttgttgaggtctttcaacacatgaactatacacttgaatacctttttgaccataaaaggatttgatattaagttcctttgcattatcacaccttacaactttaaatttttagagaattgagtgaagacaaggttttagaattgtggaattaaatattacacatcagattaggattgtaacatgtaaactcaagtatgtctgctgtggtcgtcacaatagttaaaaaaatatctataaccatcaatgctatgaacataaaatggaccccatatgtcaagatcaattaaatcaaagcaagattcatcaatgtgatttggagaattaaaaggtaatcttctttgtttagctaaatgacatatagaacatggggaaacatcatcatgatcaaaatgtaattatttattgaggaatcttattatggacaaggaaggatgtccaagtctagagtgccatgaatggacactgttgcaagttttattatattgattacaaggaaatgaagatgtgggagagttggcaaattgcaacatgaaatataagttgccaattcgtttagctgtcccaatcctcctgttctgagtatcctgtaatgtgcaagaatcagtggtgaaaaaaaatactattagaggtattagtgagaaaactagaaacactaaagagattgaattgaaaagtagggacatagagtgcattagagattgaaagatcctatgaaatgttgatgtcacctgaattatgcactctaatagtggaaaagagtaacagtatgggaaatagcattcttatgcacaatagaaaataaagaaatatcacaacatatgtggtgtgaagcaccactatcaacaatccataagcaattatgagaagatttactagaaacatgagatgcaaaatgtttagaggcacctatagcaggtgttggctgtattttctgtgtgagcaatgaagttatggcctgaatattgttaacgcagattttcgttaactaaatttgagcctcac

SEQ ID NO: 33380 - DNA, 5782 bp, Cannabis sativa
  modified_base (1640)..(1657): a, c, t, g, unknown or other
  modified_base (2040)..(2042): a, c, t, g, unknown or other
cgtacatgtcaaaattcgggggggaaaattgctaattagcctaaatgaaatataactgattctgaaatattatgaataaaaataaataacatgaaataactcaaaccggctgtaactaaaatagaaacagttatatagcataatgaatacaaacaattaacacgcaataactcaaaccgattacaattaaaaaataaagaaaaaatcgattcctaaaacactgaaacataaattaaaaacaaaaatagttccataacaaatacctcataacacataatacctcataaaactgattataattttttttttaaaaaaaatggggatcacttccaaaaattattgaggcataagtatgaaaagaaccggttccataacaaaataaataaacacaaaaaataacacacaataacaaatataatataaagaaactcgttatatttatcaactagttaaaaatttgagacaaaaaaattagttccgtaaagcaactaagataaaaactcacacacaaaaccaattaaataaaataacttaaacaaaaataaccatttaacatgcttcaattacccaccaaataattacacccatactatatctacccaaaaatacacattcattatgctatataaccggctctattttaattataactgttaggatattttaagcttattatttatgttattttagagttaattttcttctttagtattattttttggaatagaattatgtttgttttctttaatttcaggtttccacacttgaatgtataaattaatggtcaaatttcagacaaatataatctataaaatagagaaaattgtacaaaaaaaataaagctgaaacttcaagcctgaattcgactatcttcttattagattttggaaaaaatcaaaacataaaagttctagatctctcttttatctttgcgaaacattttgaatcgtccaattctaaacaatatcgagagaattatggccaaaatactatcagtcgatgcagtagaaaactcactgcccaaataaagggggggtcatgcctaggcatggaaatctcatgccgcggcctgccccttctaatcctaagcagaataggttttttcagcttttttttatcttttttttggctataaaagaagtagacttcaatagttttcaataaacaatcaaggagtacgaattttggagagcaaaatttatcgcgaaggctttttcaacggtgtttttatcattcttttattttctatttccttcttctattctgaattaatatgtgtgaatttgttacgatgaacatgagtagctaaatagtttattagggtctagatagatattgtatgatattgatttttggtttcaatatgatttaatttctcctcaatttctatgtattctattgcattcgtatttaattacttttaattgtctgatcaccaattaactatttatgattttgatgcgagatttgagaagtgagcgtcgattatgctatagtaaaatagaactgaatttcgatataggacgagagtacctatatggttgggataacttatagggtttcagtgtttaatgcttgttacatatttaatttatcacgagagtaaaaaatttacatgaggtttatatatctgagaagannnnnnnnnnnnnnnnnnaacctgctattgcatagaaattggtattaggatcatagaatcatatttaagtataatcaatagatacaattgaaatttaaagccctaacttatattcattgttaattcctttattaatttacctacttctttcttttagtgtttttaattgtttcctagttttaattttctctcaaattttatttagccatacagaagtaagaattttaattttaatgtacttaactacaatcctcatgcgatcgatctcactttttgtgagtattacttgttaaaacgacacgtatatttgagtgttgtaaattaccacaacaataatcgatttgagttatttcgtataatttgtttttatttattataacactgttatagaaccggttctnnnttaattataactagtttgagttatgtcgtgttatttatttttattcattatattacagaaccgtttatatctcaattataatcggtttgagttattttgtattgtttatttttattcattatgctatagaaccggttcctatcaattatattttgcttattttttaaaataatttatttatgtggctataaattatagatacaattagagtccaaaagtctatttaataactaacaatctaatttattaattattaaacaatattgttgtatatagattaaatgtaaaatactttatataagaagtcactctactcgtgactaattagtgttaaaatagaactctatgtttcttaacatgataaagacgagtagtttttttcagccttcggactccagagggggctgcatgtctttgtgtttcttttgaagtgatgagcgatgcagattgctaggtggcaggcagtcctgcgttgagcaagaaatgtgaattgtggaagactcgagagagactttttccatttatcttcttgttacagtatttagaccttaaacccaaactcaagttctcttcttgtttgattaagtgtatgttagtcgtggagacatctctttcgttgatgaagtagccaataatgctacaatgggtcaccttcggaatgatgtaattattcaatttaagggaagggtctctcctgtggtgcccatttctagaaataaattataacacgtgtctttagtcaaattttatacaacatactaatctaccaaatgtagatttgtgtgtgcatcaatataatctccttgtaaaagtggaaaatgcataccaacatacgtgttcccatttgtaaaactgaaattaatatgcttacctataattgcacatgaatatttcctatgcaaatactgatatttttataaataaaaaatatacttgaaaatttagtactcacactctaaattggttaaaaccatataaaggaggctctgtccaactggttttgttgctagatctcctcctaactctataaatagattagtattgctctaccaaactctgatatttctcaatattattgaattattggtagtgttgatgttttataaattttttagcatacaagtcaattatatcttctggtatgaaagaagaatagaaaattcaactctatgtagagttattgtttaaagaaattcaactctgtggagtgttgctattatttatatctaacaacctatccgcctaactaaatgactggtttaagtcctaaagattcctattcagtggatgatttcaatgtaggtacaagttacgaaggcagtgtcatgttaggttatcaaataaacactaaactagaaaatacataggacggaaaataattgtattgctggctggtatagagaagttttaagacaaaaagaccaatcgacacatgacattatatacatatcaatggacttctcacaagaatgtctgaaaaaaaatctctaacatcaatcatactctatatggacatatctttggatggcaaactatacagaagaaaatcccccaaaagcgtgtagaatcaaaacaagagaagacacaaaataatgcagcagagaaggaagatggacactctgttaagcgatttgtcaagctggacttcatgccttctcaacctgggactgctactaacaccaatttgagggtaagaagggaacagactcgaacccgagcccccaaacatccttgcaaacaccatctctccaaaaactcccatggttggattgaacaagctagtcatcactgcaccacctagataagatgatgacatattgtttgcggcatgaactccataaggacgaggaaaatattgctggttaagtgatcttggattcgattggacataagttggatgatgaaggtgatgattctggtgcgatgtagtattaaatacattgtttaagccagaaggaagtggcctgcgtggtatgacaagatccaagtgaggtttcttggaatcagaatcagaacgagatgttccccggccatagaggggaatcagtgaggcgtgggaaatgttagccttgcagacagggcagttttgctgctcaggttcttcaaagtcattttggacattaagccacttgtaaatgcagggccaacagtagaggtgaccacatagagtgacgacaggctcgtttgcggaatctaaacatatgttgcactcaaagcacccgctttcatgatcagagattctggatgaggctggcataccccatttctgcttcatggaaatgtcttcattcgattccaagtgtgcctctggctcgtagaaattgtgtgccattgattctacagtctgtaaacaaaaagggtttagcacaaaagccttagataaaacaatttgcctagcatctaagaagtacgatgattaaaacataacccatgactcaaacatcaagttttgttgatagtttttagcaaaaacaaaaatccactggtagttagcataaaaaaaaaaaaaaacaaaaaaccacaggtcagacaggacaaaataatataattttatacacatatgaggcagacaaatgtgtacacttatcctaaaaacacaaaacaaaaaggaagatagaagaatcaacagctgggcccctaaaccccttcttttcctaccacccctcatgagataaggatcacttgggaatattttttggcttttcttttatcgaattttccttgaataagattatcataattatcttagaaggaaaaaaaacatgcttaattatctttcataacatatttctaaaaaaacctaaatcccagtaatcgaaactaaagactagatttttgttggctaatatcacaccaaaaatgtctaatatttttatccaagacggtccagacatgatatgctaattgatcaacccttaatataaattttttacacatccttctgggagaatcatgtaactaagatttctagtttgttttgggagaagaaaaaaaaagtttttgtttttttttttttgctatttaaagatgcaatcatggaattcgccagaattaagaaaattcgatgcatcaggcgaaaaactaaataaattcatataaaggaaatcaagaattattttcttttctatgaaaaataaacaaattctcaaaggatttaatcccttgaaaagcacacaaaacatcagatccaaaccctaccctaaccttcgaatatatttaagaatctaaaacattgaaaagtagaaacaaaacaatctacagaaacttaaaaagaaagaaaaaggagaaagagcatacccaggaagagaagaaagagtacgcagttgtggtggtagaatgaatcgaaaaatataggagtaatttttgggatatgaaaatagcaaaaaccggaatgaaaagggagaagatgataggaaaattgatcacaccaaatagatttttgtgaataagctgagctgagctgttttgttgtgttttaggtctctttcatctttaactcgctatatatatattcgcaaacgcggtacgctatttaaaatttaattaatataaaaaattagaaacacctcttcggagttgggcctaattctagaaaagctgaaccgtcttcgcacgtgccacacgtgcaggattttcatcgagcgtcagatcaatccttcaacccaatcgtttttttttttttttttggatttttacacttggtatctttttttgctatttttttacatttttatttttat

SEQ ID NO: 33381 - DNA, 1242 bp, Cannabis sativa
aaagctattctacttttatttttcttcaaaatttctccacgtttttttttctttcaagcttatgtatcttcatgatgttagaccttattgtattccttgacatcaattgagacataggagaaattatatctgtaaatataaatccactgtgttcaaccatcgataaagggtactcgtgtagaattatcatatgagctaacttttttcttccttgttcttgatcaagattgtaggtgactacagaacttctaatggcatttgcacattgttcttttaacactggacatcgatctacatgaagatttaaatgattagtctccttattttttcctgttgtcatgtgcctcccgcagtgattgcatactgctttcaatacattatcaatcgtttgtaaaataaagtaatcccatgcaagagattttctcgttctcttatttgttgtccctccactctaagttacatttattgtatctttagactctacttcttcttacgtaacaaattcaacatccccaaaactagaattcatttagacatataacttacatttaatatcatattctcaattatattaaaactaatgcagacaaaatatatctataaaatattggacaacattttccttattttattaaccttaaccatttgttaatttcaactacaatcaataaaacaatacacaagttctcatccttacatcactgcagcacacaaatttcacagatcctacttcactaaatcacacaattttcaactttctattatcactgcatcacacaaaatttctcaaaactatcttcactatagatgaatatataagacattcaaactcttttataagggggattatagatcaatctacctgaacacgtgatataaaaatagaattaaatgaattcctcatcttgaaaagttcaatgtctcctactaaattcaataatgctgcttgaaattgataaaacaataaatagattattgctaatagtcaatatctcaatgatcattccaagctctcaaaaatgtataactagacaaatttcattaacaggaaaaatggcagctacagtgttccaagaactcaaccaaactaagttattcattgcaataattccccaaagcaaaagcgcttcttcatagatcatgctcagaatttaacgctatcacaaccatcattaatgcaaaattgcacaagatttaacacctcaaaattttagttaaacaatctgatttcttatcatcaaa

SEQ ID NO: 33382 - DNA, 1523 bp, Cannabis sativa
aacatttcttattatcatttttatttttctttagctatttactctccatgtgggctgcttgtgatcctttgcagtaagcattttagtgataaacttaatgctatattattatctaaattctttgtttaaacaactgttattatatatgttaacttgtatttcagttatgtgaagaccataaaaggaaggaaacggttcttgtcaaaaataaagcttggaaattctaaagaaaaatctaaggctgagagacaagctgtgaattctatttgtcaggtaaaaactaaaactctttttcttttcttgaatggttttgattatgaagatcataaagaaattctttatactaattactaacatatagcttttgtagggatctgctgctgacataattaagatcgcgatgataaacatttattgtgtaatagtcgatggagtagtgccggcttcactttcatcatttgcagacaagtttaacttgttaaagggccgctgtcgaattttgttacaggtacatgacgagctagttttggaagcggatccctctgtaataaccgaagctgctttactgttacagatgagcatggagaacgctacttcgcttctcggtatatgtttagcgttttggataaatggtttccttcctttttgtgtacatgtatttacaattcgtctcaaatgtttgctttttcagtacctttgcaagtcaaactgaaacttggaagaaaatggggttctatggaacctttccagggggataagtaggggagaaaactcttctccctgataccaaaatttgatcagaacaaaccaatgtttagtaatgctggtgagatgatttacagccagttttcccagtttatgaatgtcttgtttttaagttcgattttcatacaacgggaattcatttcaaattgctaaaagtagccaaggagaaggatttctgcatcatcttgctgcagattttgcttctatcatgctcgaaagggaacctcgaagacttgggctcgtctgctctatccgtttctgtgccagttcttttttctgggccatacagagttatattttagataaagcaagggcgttccactgtccttgcaacatttcgttcgggtgtacagaaactgtcgaactgacctgttcgaaaactcttcaaagggagtgataccgaaaaactatcctttggttcgggtgtgcagagacttttctttgatggtgttagcactgacattgggacaagaacagcatcgaaagctgagttactcgtagtaaggatcgaataaatagcgacaatggcatttcattcgattcgagttctggctcaaaatgcaggcagctgcagttcagtttcacatcacatcttattgccaagatcaattgatgttcgattacttgtttctcttttatagtaagcttagctgtacatgatgaactccaaaaaaaagtgattaattgtcctttattctttcattcaattattttttaattaacaaccatgattcatttcagccactttgctaatgtag

SEQ ID NO: 33383 - DNA, 2095 bp, Cannabis sativa
gtcaatatataaatacataaattaaatttatactttcatatcttatcagaataatatatttattaaaatttaatacgaaattaaagaaaatatatatacaaatatatttgcaaattttgtttatattttataaatagtgtatatatttattaaatatttgattaatattattaatgtgtataatgatattattactctagtatgtttattatgataatgttcaataaaatatgtataatttatttattagaagtttataattttaaaagtaaaacatttatgtttttttttttttgaaataagtatagcatttatgtttatttaattatttttttttgaataaacactcatgtttattagttattcaaaaatgtatttataaaaatatatgaaactgtaattaaatgtgacattatgtaagacatgtttatattattattgataatgtttattaattattaattttatatgtttataagtggaatggacttttataattttgtgactttaattttgtattgttgggaaagcaagggtgagtttactgacaaaaacaaactctttagtgagtagattatataaggttggctattttcccaggggtaattttcttttagcatcccttgggaataatccaaattttgtgtggaagagcatctttgaatcgtaggagcttcttaagtctgaggtttgttgggcaataggttttggtgcgaaggttgatattttgcattagtcatggctttaggatgatgtgtgtccttttattacttcagatgcctaatatttggtgggccatatggtgagctcgttgatgtgtactgatacgaaagaatgagattaatatattattaaagatctttttaacgagcgtgatcaacaacatattttggcatttctattgagtctgaatgtagctaaggatcattttttcaggtctaaggagcatcatggtttctacttggtgcgtagtgcatacaagttgatacaagctcataaaggaaattgaattgcagttgattcttctaggttttggcgcaagctctagaatttgaaggtaccattgcaatttctcgatttggtatgttgagttacttcaaattatttgcctaccttgactcaattaagtggtaagagagtccaagttcaaatcatgtgtccgatttgttaaaaatgtgagaaaactatttttcatgcgaatatttcctatttattcactactcaatgctggcagaggcttttggctagggttaggccgattattgctgctgatttttgcaactggtttgatcaaatttttcaaaggtgcactaaggacaagtgtggggagattcttatgttatgttggggactatggaaggctcgaaacgattcgatttggaactaaaagtatgttacggtagatggtattcttatctcatttatgagttgtcttgtgcaatggaagtcgatccaaaatagaggtttagaagcttcttttttagtttttgaagttgatggtggagttgaattttaggttaaagtaagagaatacaatcaaggtagttgttgatgccgcattttccatgatcgagctgcatttggttatggcatggtcgctcgagagtctcaaagggaattagtgatggctaagttgggcagttgtactagtatagatgctctggatttggctaaagcaattggtataaagaaagcactaagctggattaaagctcaaccataacggaaaatggagctagagtgagattgtttggtagcagtacaagctattagaattcattacctatgctttcttcttttgaaattattctgtcgtaaacttcttgcatctttaaataatattttcttgttttttgttaaacgatctactaacatggttgctcatagttttgctggaacatcttgttctttttcaaatcgagtgttcaacatgaatgatgttcttgttaagatacaatcttatcttttgactgatttaacaaattaattaaacttctataattactttaaacatatattttagttgttattgaatatcataaaaaaaaaaaagaaaaaaaaagacaattgatattttaataaaatagttgtccga

SEQ ID NO: 33384 - DNA, 1222 bp, Cannabis sativa
aaactgagttggatacttgcaagtgatcttgagtatctttggacttaggtgataaaaggaacacacttcccgaattgctcctttttggagtcaacattgaaatctaattcctctcctctggtctgggtatatggcaagaaagatttcatacgtgacaactccacttggttggtttaccccaattcaagcattgatatttggcataactcatggaatttatcagatgatattgatatattagtggtggagagcttagtcctttgattcaaaccaagttgcatctcaaagatatcacaactgattcttctaacaagggatttggataacatcaaatctctctttacccagactacaatgtctaaatttgaggctgtccctcttccttctttgcttgatagtgacattctcatttggaagcctaggattgtaacttaactctaaaatctgcctattgggccataaatagtgcaatattctaagctagaaatgagatatgtaagtttttgtggagatccaagcttcatgattgattaaaattatttttgtggaagctttatctcaattcccttcagcctagagaaagacttcttgctatctttaatagtgagcctggtccgtgtatgttatgcaaccaggtagatggtaacttcattccccatttatttgcctgatgacaagaatcatttggttcatgtctaaatgtggtattcacttagaaaattttaaccagtcttttggaaggcatttagtcatttggatatgccaacctccttttttttgagataaacactgatatggagcatatacaagaattcttgtctttggttgcatgttttaattatagggtgtggcagtaccgaaatgtgtccaccagctgaaagtttttcctgtagagtctatgtttaatatcatagcctgagattttcaagctcattggagattttttatcagggatccttccatcgaatctcatcaatcggtagagaggcctcaaggatgatcaagatcaactcatgacaatctacgcaaagaagattgaggtgggggactctcttgcaagtaagatccagactatgcttaatggtatgaaagcaatgcaggagctccagattgtggatgtcaaaattatcttggtctatcaagttcttgtgagtgcggtagcaaagagacagaccccaaactggtccattgtgattttgttctctaacttatgctatatata

SEQ ID NO: 33385 - DNA, 1561 bp, Cannabis sativa
acaactacctttaaaatgtattaattggtatctttaaagtcatttacaacacttttatctgtttgcagcggttcctcggagaccagttcctactcttgaaatagccgagcgccacagaattctacttaatcttccatatgggctacgagcaacagacttcttattaaatgagaagaatctgaagaacgttggccttcttccttcacatattatcaattccttaaaatattatccatggttctaggtaattaactaaattcattataatataccttcacatgatcttatattatttttgtataaaaatttattggtatttaatggtttcgtgttgtgagaattatattggtgcaattgatggaacacatgtgttcctaaagataagcaagtcagctacagagatcgtaaaggtgtagtaacacaaaatgtcttgtgtgcttttaatttttacatattttttacttttgtatctgccaattgggaaggtaccgcaaataattcgatggtatttatagatgaaattactaaaactgaatataagttttcattgtccaaagaaggttttgaaagcttaatattgtttttttatattatgtgatgatgcatatactaattattatttttggcatattaggtgaatattatttatggattttggattctcatgtacaaaaagttttcttcaattatatcgtggcgaaagatatcacttgcaagaatatactaatagaggtaatccaccttgttgtaagaatgaactgttcaattttaggcattcttcactaagaaatgtaattgagcgatgttttagtgtgttgacagtacgttttgctatactaaagatgatgtcacgttacaaattgagtcgacaaactatgatagttattgcttgttgtgcttttcataattttattcgttaacaaacacatcatgatcatatctttagagaatgggaagaaaagaatttgaggagaagacaacatagaaggagttagcaccagtgtatcaagatcttaagatctaaagtgaatttatctaattattctgctgtagtaatggcacgttgtcgggatcgtactgctcaagctatgtggattgtttatacaaatatgaattagtttactatattttaatatgggagaataattttagaattaaaagtatcattttagacatattgtacttaatgacaattttagattaaatatttagattaaatatttttttttttttaaaaaaaaaactatacaaatgttcatttttttttgtgtaaggaaatatttattcctttagttatataaaacttaacaataaataaatatcttagaatgctatttttttaaaaaataaactagaaaacaaagcctaatagttaaaattaaaaaaaaaaaaatcgaaaacaaattactttacatcattcaaatatgattttttttccatttttttgaaaaaccattttgaagaaacattagtcaaattactttacctttttaaaaactacaaaatattaattttttttttctgagaacacaattttaaaagagaaatttcatttaatata

SEQ ID NO: 33386 - DNA, 1842 bp, Cannabis sativa
tatactcaattttcaattctctcttgactgcgtccttaagtagggttgggtaattcaatatctcaaaatttaattccattactaattggatttgattttttttaattgaatatttaattacacattcaatttttaatattaacttaatataaagaagaaaaaaataggtaaaaattaaatatcacaatttatttgttctattttattatttagcaatggtgatataaaaaaaaactcactaaaaatatatatagattaatactgttattatatataaataatttttaaatatatagaaatgtaattggattggactgatttttagtagatttttgagattaacatctaatagcctgattcattccaattagaatctaacttttaacatctaatcaaatccaattagaaaactaatttttttgtaattagattatattggatgttgtccaccactctacccttaagtattaaactcttgttttactaatagttttaattataaattataatattcagtgttatatttaaattttattatcgttatattttatttataattaataattacgtatttattacttttattattatcaaattaagaagttttttatattgtgttttgttgggcttgtcataactgttatatttgttggagtaatttattcgtatatatatatatcgtgtcttttgaatttgtagtgttgtgacatgttaatttgtaatctcgtatgttatcatgaacaaacttatatttcttttcatgtttagttgtgctcgtgactctcatgttaatgtcgattttgtgtagtgacaaaatttaactttttttcattattattttctcttttatcgaaaacactaattaaattatttatttattttaattttaactagtttaaattaaactttctcctatttaaaaaaaaaaaaaaaaattaaactttctccactccactaaataaaaaaaaacactaattaaatcagattgcataattctttaaaaaaaataaatcagattgcataaattatcgtacacgtatgcggtagactattgatctgtgttctgcaaaactgatacatattctcttccccaaaacttccatttcagtgccgtctcccgaatacgtcgtcgtttccgtcatcgtctccaccctctaggctctaagccaatggatcctgccatcccaattgcggccctttcgctcattctcggtgctttcatcgtactcctcttcttcgccaattacttccgcaaccgaagagccgatgttcaatctcttgccaaaccagagctccaacccgatcccaaaccccgatcgtcaaagcctcaccaaactatctccaaaaagtcccactccaaacctcactctcacgcttctgacaaggtacgctacctacttggccttcttattcactctcttatttggttgccgagaaaatgaaggaaactagtttggaaaaggacgaagctaaaggtacagtacaagtttgatcgagtctagatttatatagaaattttttgtttttgttgagtactgtaggaccaaaataagaagcatcacccgttggatgtaaatactttgaaaggtcatggagatgcagtgacaggattatgcttttcatctgatggacgaagtctcgctacaggtaatggtgaatcaatcataatatttgctgaattatgggccaatcatttttctgcttgtggttcgcttttacatttaatagttttaatgtatatgttttttttggttcgcaaacagtttgtgcagatgggatgatcagagttttcaagatggatgatgcttcgagcaaaagtttcaagtatgaatttcaactttt

SEQ ID NO: 33387 - DNA, 3766 bp, Cannabis sativa
  modified_base (29)..(33): a, c, t, g, unknown or other
aatgtaaaaaaaaaaaaaaacattctttnnnnntaaaaatgtaaatattttacaaaagatagtgccttatgtaattattcatatttataacgatggtagtgagctgtagtgagctttagtgagcttaaacaaaaaaaaaaaaaaaaacaactttttcagtgtttaaactatttattgtctatttaacttttcaatatttttttcctcctttcgttcctccatcagccccctcttttttcttacctttttttttttttgtcattcaacttcttttatctctattttctcaaatttcaaaaattatatctaatcacatcactactctattaagcataagaagatatcattataatctactcttgaatgtgatcattttgagaaacatatataaatatatatatatatatttttttttcttcataatttacaaaattaaagaaattatagagttactcataataccaatcatatactaattagttaatattttatatatatttttatttaaattcacaactcaagtttattttttaaaatttgattaattggacaactaattaaattctacaataaatttaaagttaccaaaaatatatcataaataatattaaaaaaatcatgatatgcaattttaaaataaagattggtaatctagatatttacaaataagttatttaaattattttattttattgtaacatattagtttattagtttcttaaataagtttgaagatatcccctgatacgtttggttgtcactctgttttgagtgtggtggtgtgagattgttcgagtggtggctgtcatggcgtctagcagtagtgaaggaagggcaacgggggatgttgttattctggaggaagaagataatgaagtcttacgggttccagtaggcagggctgaagagatagcgatcggcacaaggtggtgcttggtgggcaaactcctaacaggtcgagtcttggattttaatgtttttcagaatgtgatggctttcctatggcaaccgagaatgggaatgtatgtcaaggaactcaatcctaatctattcctttttcaattctatcatgaagttgatatacaaagagtcatcgatggaagtccgtggacttatgataggaaaccttttatctttactagattaaaggagggagagaatcctaggcttgtcgaaatcaatcatgttgatatgtgggttcaacttcataatttacaatctggaaatatgacactcagtgttgttacggctttaggaaactatattggaacgtttgttgaatcggatccgaacaactttgtgggtgtttggagggactatttacgcgtccgggttcagattgatgttggcaaaccaatcaagcgtcgtatgaagattatcaacgaggatacatcatggtattgggtgaactttaagtacgagagactgcctactttctgtttcatatgcggtatcatcggttactcggaaaagttttgtccaaggttgttcttgaagccgctacacctccaagagaagccatacagcttggagctgaaagccttgacacaacgaagacaatcaacctttggggcgcagtggctctggtcagaggcggcgatacgagatgcatcacggcatgaagaccaacttggcaaatcagatcattcagcggtgttaattcctagaaatccggaggtgatgggggaattagttggcaaatttcaaggctctgcaatcactagtaatcagccacaaaaagagggatgtggtaacattaaggagaatatggtagctaatggagatgagtcaacattaaatgttaccaataaaggaaatttctttgattcctatattaccaacataattgattctaaaagaagaaggcctgatagcatggggggacacgtgggctccttggaaaaataatttaataatgctatagatgttatggatcatgacattggaaattccaaaaaatggatctttggcgggctctggtttccaggctcgcccagagccatgagttgcttaagttggaattgccgtgggcttgggaacctgcgggccaaacaattcttagcggaccttgtgttccaaaagaagcccaatttgttatttctttgtaagactttgtgtagcaagacaagtatggagtttattagagtccaattgggctttgatagttgttttgtagtggaggcccgtgggcatagtggaggcttggccttattatggaaggattctagtgatgtgataattcaggggttttctttcaatcatattgatgctactgtacagttgcaacactgtgttcaatgaagatttacaggagtttatggggagcctagaagagagcttcggtcaaacacatggaatctctttaggtctattaaagatgctagctctcttccttggtgtctaatgggagacatgaacaacttaagctcacacgatgataaacgaggaggaagacagtacctggatcgactcattgatggattcactgctgctttagacgactgtaatttaattgatctgcccttggttggttacccttttacttgggagaaaggaaggaatggtgataactgggttgaagaaagacttgacaaagcattagtcacacacacatggctatctctattcccacagtcgattcttcacaacctggaagtttcaacatctgaccactgccctattcttttggtgttcaaaggtgtgcctcctacaattccttttaattctttttgttttgaaaatgcctggattagagagccactatgcaaacaattagttcaggggtgttgggagggatcgggttctagcagtatccaagaaaaaataaaaagatgtggggaggtgttggggaagtggggaagggagatcactggggacttcagaaaacgcattgataattataagaagctgattaggaattcgaaatggggaagggaccagagttcaattcaacaacaccagcaagcgaaagccaatctttctgagattttggcctagcgagaagctttttggaagcaaagatcgaagcaattttgactaaactctggcgataaaaacactaaatattttcactccgttgcaagcactaggaagaggaataatggtattgggcaacttaaaaatgaaagtggcaggtgggtgaattgggggtcgggtttagaggcagtcattactagttactttagcgatttgtttcattcgtcgaacattgacttgggtaatattctgaatggagtttggcctactgtatctagtgaacaaaatgcagaacttttgatgcctattacagatgacgaagttagaaatgctctattccaaatgcatcccgacaaatccctgggacctgacggaatgaccccggcattttatcaaaagcattggagtatagtaggttcggatgtgatcaactttgttcgggatttcttcaataatgtcatcttcccgactgatattaatgatactcacatcgttttaattccaaagaagaaaaacccgtctcaagtgagtgatatgaggccgatttctctttgtaatgtattgtataaaattgcctctaaggttgtggctaatcgaatgaaaggagtcttggactatgctatctcaaacactcagagtgctttcgtttcagggagggtgatttctgacaatattatggtggcgtttgaagttatgcactatttaaagaggaaaactaacggaagaaagggatatgtaacaccctaactatcttaggcgtattacgtgatgtttaaacgtactgtgcagc

SEQ ID NO: 33388 - DNA, 1337 bp, Cannabis sativa
tgggccggcccatagtatttttgtaatttttttttctttttttgtatttttttgtttttttccctattttttattcattttaaatattatcttaccattaataatatttatatatgtatttattataaaatgatgagagagagaaacaaataataaaatataatttagctcataaatagtatgagttaaatctagagcaccgagagtgatttgagataaaatatatgtactttaaagtacataatggaattagaattttttttttttttttttgaaatattaccatcaataaatagtcttggtaagcactcatcacatcaagcgatgagttattttatctctattttacattactaaaattctatacattagcttttctgttttatattatcaaaattatattttattttttttattcattttaaatattatcataccattaataatatttatattatttattataaaatgatgagagagagaaacaaatagtaaaatataatttagctcataaatagtatgagttaaatctaaagcacatttgggataaaatatatgtattttaaagtacatgatggaaaagcttttttttagctatattttatacatttagctattatatacctccagatgtggatacttaaatgaattagttagtttgcgctgttcaaattaagatttcagaatatatatattatataaatcatttcacttaatatataattttgtagctaatttgtgatgaatgcttcgctaggtgaaatatataataaaatttagagctctattgtaggttgtataaggattgtattgtattaaataataaataatactatgtttggatagattaatgtattatattaattattaggaacaaattttttaatacaatgtaagttatattatttaatacatagcaaatggtccgtattaacttgtattataatatttacaggtcaaccccaatttccgacccggaatcggacctgaacccgagacccagacctagacccgaactcgagactcagactcgaactcgagactttggacctggacctgggaccgaacccggacacagacctagacgcgaaacctgaccggttgggacccgaacccagaccaggaacccggacccaggagccggactcggactcaggaacggatcgagactcgggagccggaatcggtcctgggaccccggacccaagaaccggacctggacacgggacctggaccccaggacctacccagaagcggacgcagacccatgatccacccggacccggacgcggacccaggacccgaactcgggacatggatcatgtatatcctactca

SEQ ID NO: 33389 - DNA, 2806 bp, Cannabis sativa
  modified_base (27)..(27): a, c, t, g, unknown or other
cacaacatagaaataataatttataantagtcacaactttttcacttttagtcacaaattttgttgtcactaaaaataagattttttttatagtgtactccacttaacataacataagagcattgctataacataatgtcttcaatatgtatcgaccgatgtgtcacattatgaatgatattaataattttatatattatttatctaatcaaaacatgtgaaatttgataattaattaattgcgccaataactcttatggtgcttgacatcttaaggtgtctagcattattattagatatcatattgttattagtacaattggtattactatttcactttgataataattacaatactttttctttttctttttgcgtcggtataatatacattggttattcgaactaacacaataagcgtaaatgtcggttcaaaatcgatgctaaataagttttttgcaataatagttgatcataactcagagtttgtatggttggcactggtagtggctctatgtggtctaagcctttagaggcacataaggtgttagaacttaagataagatatgcttaaggtgcatagagttctatctcaaaatcaattagcaatatggaaataatttattcatcttatatatggtattatttttccacacatcagctatgtaggactatttctaaatatatcctcctcacgtttaagcctagagaatataggtatataatgaacaatctttaagagaccacagggtcgaacttgacatttgaaatcttacaaagccaaatcgagaaatttgtgggtgtacacgtcgagaaatttgtgaattttttaaaataggttaaagacccccaacactagaaactgacatacattggcctgaagttcccaaatagaggtcaaaggtgaagacatcgagagcttttttttaatttgctttgatatatcgagtgagaattttggataaggtacgttattctatctcaaagctaattagttaaataagaggagcagctcattcatcttatatatgatattattttttcacacattaatgatgtgtcgctatttctaaaacacacatcttcctttggatctagaaagtataggtataatgaacaacctttaagagaccacaaggtcaaacatatacatttgaaagaatcctacaaggccaaaacagaaaatttatgagtgtaaacattaggaaatttgtgaattttttgaaacatgtcaaagattctaacgctaaaactggcacacattagtcgaaaggtcctcaatgaaggcctaaggtgaagacaacaaaagattttaattgttcggagagcatgttagaatttaggatgaaggtacatggagttccatttcaaaactatttggcaaatttaatactaatttaaattaaaattacattatttatattttatttaattaaacaaatttaataaaaaaaatataaaaattattttttagacacattatatagcgctggcaaaattattttaaataatttttaaaaaataaaagatgttttgccagtgcagttacatgtgccgacaaaacttttttgcaaaagagaaaacattttgtcggcaacttatcttgttggcaaaacttatacgacagggctcaatcggcgactaattatcgatggctctagtttcactaatgacttgattcgctggtaaaatactgtttttcgccggcgaatcaccctttcctgacaaattatcaccagtaactttttttggtaagttttctcgctgacaaaaaatttgccagcgatttaaatggacttttttcgacacaaaattttgccgaaaaaaagtcaattttctcgtagtgtaatatttctcttttttaaagagtattgttattatttcatatatataattttatgtatattatatataaaaaaattatacataactatgaacaatcactacataaaaaaaaatttactctatatattattttttaatatttttttataatttataatttaagttgttcttgttgtttctatgtgatttgttatgtgaattttaattgcaatttaggttactccgttagttgctatgtgaattttcgtgaaaatacggaaaaaaaaactacttttcaagtgtaaaaataataaaaaaaccaaaaaaaaaaaaaataattaccacatttatttttgtcccctaaccttattaaacttttctcttgattttttttttttttgaaatcagatttttattgttttgaaaaacaaaatttttctaattattgcaaatcttcctatgcaattgcattctgtttatttctttaaaataattgttgtaactttaatatgatgctaaatcaaaattaattttatattattagttcagccgttcaggtttatcgggttaggtttcaagtccaagtctaattttgggttcgggattcaagttagtttctaggtccaagtcaagttttgtatttgggatcgagatctagatcctggttcaggtctagggctatgttcaagtttgggtttagagttggtggtcggggttcagagctcagagcctgagctttagcccgaggtttggagctcagagcccagaacctaggggtacgttcatccaattcaatatgcactattttgctcatagtggtgcattcgacgatctatctgcactaagttgcgaattttatattttgaatccaatctaatccgtataatagctcaaatctaatccaatccaatatataaaagtgcatattagatcgattattttgaattagttaattttcaatattaaattttttaatatttat

SEQ ID NO: 33390 - DNA, 1649 bp, Cannabis sativa
gatatatcaaaccatctaattaactatacttaataattacttgcagcctccaagtggtgcaccacacaagcagctattatggaaatatgaggtgtaccccagcctttgtagctccccacctaacggaatactcccacacagacgattataacttacattcaacatttgaaaattcagttttgtcaacccagccggaagggtcccattgatcctgttatggttaaggtccagccatgttaaggtcctgggaaacctaaccttggacaattcgaactgcaacatgttcctcgacaagtcaagagcgcgaatccttttccttcgcccgaacaaaaacgatgcatctccttcgagcctgttccgtgataggttcacgtcgttgaagtcaagcttgttgcccaatgaggccggaattctaccgctcagttgattatgagagaggtgtaagtcaaaatcacttcccgaaaactgcccgaaagaggctgggattggcccggtcagcttgtttcggttaaggtggagggaggtgaggttgggtatgagagccaatgagcttgggattggtccacttagggtgttgtaagaaagatcgatggaacgaagtctcctcatctggccaagaaagtttggtattggtccagagatgttggtggagctgatggttaagtagctgagccttttgagtctagatatggttggtgggatggaaccttccaagttacgatgtttgagaaggactagggtttcgaggaaagagaggtcacctatctggcgtgggatttggccttggagaccgcctgagatggtgagggagtttacacggtgcgtttcgtggttgcatgtgacactattccattcgttgcaacagtctgtgcttgggtcccacgaatcaaggacggaagggttcttcaaggctctcttcatacggagaagaactctcttgtctttagggttacattgctctgctgagaaagaaggttggaagatgatcatgaagaagagaaagaagagggacacaatggatctgtttaacaatggagtttccatattgttttgttgggtggcaaatgagcttcagcaatggtttaatttatataagtcttttgctgcgccatcaagagtaatataacccaagtaatatagtttataatttttttttggtaatatcttcttgatttcacttttatttgcaaaccaagtatgggttaaatttcatcagtcaattcaaattatttaaaataaaatttataatatttgaataattaaaagtatttggaacaataaaaatatgtgtaggtacatagaatggtagcatcaattgatatttaaagtgaaatttaactgatgccacgtatttgcaaatagaagtgaaattaaaaaagtattgctatcaaaaacaaagagattaagggctcgtttggaacgccgtattaagttgtattgtattatattgaattttattttatgcaatatttttatataaaactatatgtggtattaacttttatagagacttaaatatataatataatccaattcaatataatacaatacaacctaatacgacgttccaaactagccctaagtgtataaactggggttattatttagataaattcattacccacttatattttatatatgattaaact

SEQ ID NO: 33391 - DNA, 2390 bp, Cannabis sativa
atcaccaacaaaacaacacaaactcaagattagaaaagagcacaatgtggagttatctcctcttctcttccaatcaccattaacccttttcacttaagacacatatatatgtcacacccctctaaccataatgggttatttactaattgggcttaagtagttcaataatgtatactataatttaatgggacaattatagttatgagggtgctctcatgtacccttaacataataaattattattaaccatcctattatgattgttgataaatattgagcacatagttaatgattgtgtttatggtattaagcttataattatattagtctacaatgataattctaacagtagggtccttgtgaagccctcagatattcttaagtactccacaaggatattaaaatgacaagtataagttggccttggatatattaggtccgggtgaggaggatctctttgttataagtgatcatgggtatatcatcattgaggatgtcgctggataacttggccatttgggaccaagtgacccctgttggtcacagatgtctcatgcatatgaacatggtcggacctatgatagggcataaggcaatagtcaccccttagaaaaaaaaattgagaaaaaatatgggaatatacatgtaaatgtaaaccaaaaaattcgacgaaaatataaccccccaattaacttgaactaactcgaacaacccgattaagaggattatatatatttatatatgttgttattatatatatttatatatataatataatttatatacatatttaaaaatatatataagcttgaactactatgttggaggctagccagccctaggccaggcaactgtccatggtcgatcaaccatgtgttaggcagggcctggccgcccatgcttctttgactggttggtggagcatgtgcattgacatgggatagatcacactaattgttggagtttggtggatctagttgtctgaagtgattgtcttcactcctcaagttgttattgtcttgggtgtttccacccattcttgggcctagccagttaaagattggcctttgagtggctcgcttctctcagtggcagagtgtactcccctggtcggtcaaaggtattcttgcaggtggttggccggccaaaggttgttgataggagctgttgttgagcttgagatccctggccagccccctatgctgttggttgctaagatctggttgttctcaccattagacctttgtgggaaggcttgtcctcctttgagtaggggaaggtgtgtcctagttcctgaagaaccgggttggtcagcttgttgacaaaccctccctgatctatcaactagtcttccttagagtggacctttgatgagatcctggcctcttccactggttctctgattgagctgccttatcaggtcattggtttctctattacggtgatccagctccgcctagtaagattaaaggatgtactcttggtcatccatccatctcaggaatttatgtctctactgagcaaatacattgcgatcaacagcgcatggcagacgacctctctcagtctggctaactcaagatcttctcctaagtcagtctacacatggggctcgccaattcttgtcctgtctctccaacatagtactggagatgagatctagttgttcttcctgggggttgttccccaagggtccttcctttagtgggaggcggcagtaaaaagtcctccctgaggcaagggcctgctgtttagatctatcgggatatttatgtcactctggccagttgtagtaaccagattcgaagtgcttgccatggtggcaggattgaccacatatgaaatattcatgggaattccaattgtggctggaacatggacatcgagatctatagtcagagggtcttgaggaagacccaatgatagagatagtgcaaccaaagttcttcttgtgttaaccatggtgtttgatcatatatgatatcaactcgctctcaataaaagtaccaaattattgacctcaaaaattggccaaccgacagcagagtcgtattaacactacttgccatgtgttacacaattagagctagaaagtaaaagaacacaaggatttttgtaagcgttcaacccccttagttagtagataatgacctactcccattttagttgtattaatacctagagataatactattcatatcagtataggtaggatttgatatagctctcttaaggttacaatgtatgaaccagtaggaggtctctaatgagagagagatagatccttgaaggtgtgtgagagagagggagagaaaaaccctttgggcgtgtagaagagatagagaacaggattagggtttcagacttagagctttatggcttaaaatgag

SEQ ID NO: 33392 - DNA, 2012 bp, Cannabis sativa
gcagtggttgcagttgattattttaccaagtggattgaagccgagccattggcaaccatcacgtccaaaaaactgcaagacttcatggtgaaaagcataatttgccagttcggagtactatacaagatagtctccgacaatggcaaacaatttgtcagtcaatccttcactgttttcagtgcaaaccatgtgatcataagaagtttctccgcagtggcgcatccccaagaaaatggtcaagttgaagtagtcaacaagacattgaaggacaccctaaagaagaaacttgaagatgctaaaggaaattgactagaagaactcccaaaagttctatggtcatatcgcacaactaaaaaatagttactggacagactccatttgccatgacatatggatgtgaagctatgccgcccgtaaaactcgaaccaccgtcccacagaagattaacatatagccaagaggccaatcatgtactccttgcagaatcacttgatgaggttgaagagaaacaaaccacagcaaacttaaaactgatagcccatcaacaaaaagtagctcggtattttaacaaacaattgatagcacggaaattctttctgggagatattggtcctaagaagagtatttttaaacaccgaagacagtacggcaggtgtgctcggaacaaacttggaaggaccatatcaagtgttcaaagttctagaatcaggggcatacaaattgggtaagtatgatgaaaatatgcaactcgttctagtaccaaggtattggaacggggaacatttaagaaaatactaccagtaaaagtactaggtcagatgaacatattaagtacgaaataaaagaacatttgctcttaagtgaatggccttctaagcggaccaagcccaaaggttcacataaaattatcaagtactcaagtcggatgaccacctttgaaagtacgatttttgttttctgtaatttgctttgtttatgctaagctaaagatcagatcagatcaacataatagctttgatgtaagttaatacggtaacaaacatatttccaaccaataaatgaataaagatatttatttgaattcaaattgagtctagttcattagcatattaccaatttaacacccagtgcgtacaaaacgtttggtcatacccaaaactccgaacagataaaaaagcatacttgtaaaaaagaaacaagtgaccaagagtcataagtctgctctgtaacttagggggcacctatacctgtacaaagcatttggtaaaaaacaaaacggaacacaatttcacgatgattataaacaaaggatgaaattcattaagaataacaaaagcatttaagcccaggattaaaggctgttcggttagctagttgttcgaaaaatgaaaaatatattccaagtttaaagactgcttggtcggtcaccttgtctcaaaagaaggcctattaaccaaacagacatataaaaaaagatagtaaaaggaaagcaattaaacggttgaagtcccaggctctttgtacggatcaactggtttgaaggggccagaagatcatcatttttggcagaaggagcctcaacattctaatcagaaggagaggtggaagtggtcgcctggggctccctgtaggctgcctgagcagcgcagtagtcgagaaaaatgtcttgcgcccagataatcaaagttttcttcgggatcggccttccaaaagtcataaaaaatctcgagaccagctgtctctaaggcatttaccttctcccaaagcctcaccacctcggatttatgtttctcaacctcagccccaagttcctcctccttggtcttcttctcatcctccaagctacgaagaagagtccagagacgctctctttcatcctgaagactagtaacgtcccgggacaaagaaggatatttgcctcgagatgctccgttgatggcgtctcctgcaattccttggttaactcagcaactttggtctcaggcgccagaagtttcttgttgacctctccc

SEQ ID NO: 33393 - DNA, 4624 bp, Cannabis sativa
  modified_base (305)..(307): a, c, t, g, unknown or other
gttgatcttaggtcaataaatcttaatctcgagatagttaggttctggcttaaatgtattatttgtgttctttgacttattcgttaaagttgaccaatggaattagcctaatgcttatatcttgggagcatggtagtataattgagtgggagcgcaatatggaatttataacttctataactataagaagtaaaacgatgatttctttcgagcttggcttaacacgataaatgattgaggtctcatttcagtaattatattagtttactaaatatcatttacaattagctaagtgttttaaggannnaatacattgaaaggtaaaataataaatttgtccctagtcattatataaaggatctttgactatttggattaaaataatgggtaatcaaatcgcatgtatttttagtaatagagcgttctatgtaattaagagttcaattcgaacaatttatagagttagaattaaaatatgacgtttgtgaaagaaaagataagttgttaaataaaatagcaaaattaaaactagtagggctcataatatgtccgaccacttaaggtttattaaagccatttttttttctttttttaattatatttaaattctaaacttaaccatagaaggactcctataaataaaataagatatcttttattttcaaaacgtacatcagtctcttttgtcagacaattagaaaatagaaaagaacctctttctattcgaattccttcttcctcttcctcaaattttcgaatcccatagtgaattgagagtatgcctactcatgtcaaagcaacacctaacataataaggaagactatgtctaaccaaattgaaggagagaagatttatattcagatcttcataatgttctgctacagacaggaatcaagggctagagatctgaatggaatgagctattattttccgttgccatcaatgtaaggatttcttaatctcttatgtgtttatttcattgttttaaaaatttatatttagaatgttatattataaattataatcaaatatacatgttagtaaatttaaatcctagtaaaataaattataacagtgtccacgtgtcacccttttattattggactaataaaagagtgacacgtggacacttagaagaaacgaagaggtacctacgaaaattttaggagtgtgacagaaggtatttttaccgccaaaaatacgacttaggtacttctctgctacctgacataaaatttaagtatttataccgtaaattattatttttttcaataaaatattgacataaaaaaattgattgatttataaattcttaaagactactaacataaaataaagagcattgttattgagccaaaaactattatataaaactatatgaaattcaataattaattgcactgtattaacaaataaaagaataatagcccaatacttaattgcactatattaacacataaaagaataatagagacaactagtaggcaaagctgtaaaatatcagtagatactatgacattatatatataatctctttctactctcttctgtcacaatctctttgtttctctctcttaaatcttctcaaaactcgagaattctcagcgtatcaatataaaataccatacaaaccacctccacctctctttctctctccatctctatctgaagcttgctctgaaaagggagactgaagagaaagaaggagagagaaagagaggttgctgatacacacgtagagtgtagaccagagcttgaagtttcagaggggaacaaaatatggctggaaatgattggattaacagctacctggaggcgattcttgacgtaggtccaggattagacgacgtgaaatcatcgttgcttctcagagagagaggtcacttcagtcctactcgctactttgttgaggaagtcatcactggattcgatgagaccgatctccatcgttcttgggttaaagtaattagttttctttttttttttttgatcgataatgttttccgaattcggagtctcttttttcaaattttgattcttttgataggcttcggctacaaggagtccccaggaaaggaatactagattggagaatatgtgctggaggatttggaatttggctcgccagaagaagcaggtttgataattgtgtttttgatgttttttaatttgtgcattgttcattgttaattatcttttagttgagttttgctagattttgatctgtgtatattaatttcatgtgtagatagttggtaatactagatcggaatccagatccttcaaatggatctttgctgttttggagttcaaaattttgctggataagtgattatagaatcttctatgtttgccggggttagaaggattgaaacccagtctagtctcaagtttagagtccacagtaacagaaaagattatggacatttttatcaataattcttattgcaattgagttaaatacggatcggagtaattactctaacaaagttgatatgcttctgatatttgcaaaacatgctttctagccaacacaatcttctcttacggtaaaatacattttaagatgacttgaacctgtaccactcacgccacgcagtcaatctcttacactagcttcaagtggcagtgttaactagtcttttcatagtattacatgtatttattcggtaaaggaggaaattctgaaatttggattgcttgaattaggcagcaaaataagtgatgatagcagcattcaatttctagtttatgctatgctctaaattgattaatattacctttatgtcaccttttatttagcttgagggagaagaactacagagaaaggctaagcgtcgtatggaacgagagagaggccgccgggaagctactgctgatatgtctgaagacttatcagaaggagaaaagggtgatgcggtcagtgatgtgtcggttcatggtgaaagttccagggggagactgccaagaattaattccagtgatgctatggagatttggacaagtcagcaaaaggggaaaaaaacatatattgtattagtaaggtaagaactaagcttctctactccaggatcctaataaatagatatagtcccaatcttggaaagtatatgaggtgattgacaaactgatgatgcattttgcattttgatctaataacagtgctaaaatagtcgtatttgtgtatggctgagcattctaaccattctctaaactttttttaattaaaggcagaaaaacttcataagaaaattaaacgcgtcttgatggtaactagtatgaatctatctccaaatgtagaagtacctttgctgtatggggtgttttctaattgtcttctaacaagaactatccttgcagcattcatggtctaataaggggagaaaatatggagcttggtcgtgactctgatactggtggtcaggtaagatttggttgtcatgggttttgttctgatattttaataataacgaaacctttttggtgttgttcttaagctccacttttgcatggtttactgatatgggcatctcaatattgtttggatggatttcgtttaggttaagtatgttgtggaacttgcaagggctttgggctccatgccaggtgtatatcgtgttgatctgctcactaggcaagtttcatcgccagatgtagattggacttatgctgaacccatagagatgcttagcccaagaaatgcagatgatttctcagatgagatgggtgagagcagtggtgcttatatcattcgtatcccatttggtccaagagataaatatattcctaaagaacttctttggcctcatatccctgaatttgttgatggtgccctgactcacattatacaaatgtccaaagctttgggtgaacaaattggtggcgggaaacctgtttggcctgttgctatccatgggcattatgccgatgcaggcgattctgttgctcttttatctggtgcattgaatgtaccaatgctctttactgggcattcactaggtcgtgacaagttggaacagcttttaaagcaaagtcattcttcaagagatgaaataaactcgacatacaaaataatgcgtcgtatagaggctgaggagttatcacttgatgcctctgaaatagtaataactagcactaggcaggagatagaggagcaatggcgtttatatgatggttttgatcctatactggaacgtaaaatacgtgcaaggatcaagcgtaatgtgagctgttatggaaggtttatgccccgcatggtggtaagtcctaggatctttgtttaagtgtttttaggaatgttattggaatgcttaatgaattgactgagagtgggttgtcagaaccaagaaatacctactggaaaagattttgtatttatctttttaacttaaacaattttatggtctgtttaaaaagtcttttactttcttggtttactgctcatattccttatgctggcttctttggtatggtaatttcacaattctaatagtttctttgcagataattcctcctggaatggagttccaccatattgttcctctagatggcgatatggatggcgagacagaatctaatgaggatcatcctacttctcccgatccacctatctggactgaggtt

SEQ ID NO: 33394 - DNA, 1204 bp, Cannabis sativa
tagttgtttttttttttattttatagaaatataatatttttgtaatttaaaattttcaacatagtatttttgaaaacttggtacaataaattaatattttaaaaaaagtgtgagagtaaagagtttttgaagctaaactctctcaattatcactctacttccacttaataaccctctaagctcaaattttgatggtaaaacactctaaactactaatctgtttgtaaatttaaggtgacatctactttccacatttaactaccgacatagactgcttatctgtacactcttatacacgtgatacgtttatattagtacaaatattgttattatttaaaaaatataaaaaatatttcaaattttataatattttttatttttttatatatatatttttaattttaaaatgacttttgaaagtaatttttaaataataatatccggtgtaccaatataaatatgctacgtgtataagagtacacacataagcagttcatggtagcagttaaccggatgacacattaaatttgctattgttttagtaattttgagaattttatcgtcaaaatttaattagaagattaaatataagtgaaacaataattaagagaatttagctactaaaaatttgaaggtaaaaatataaaagtgaccaaaaaaattagtattttttgtaacataccctattattattttggagataaagggtgaatgaaataatgatgtgctatttctaagaaaaaaaacataagagagagaaataattattgatgtcaaggtgtttgaaacggaaatggattaaaaaaatagtaaatgagatggaaaagataaaatacctggcaactacttattggagggacaggtgattctttccacctctaagttgtaatctggttttgtttattttattttatgagattatagttttttttttaaaaaaaaaattataataacagtgattaaaaaaaatatattagaaaaagaatctttatttttgcacaacgtacatgttatcttgaagaaaagaaagctttgatttttccttttttttttctctctctctctgcctgttctacctaccaccatcactcatttttacaatatgtttctcgtgaactattcccacaagcattcataaaagaaaaaaagaaaaaagaaaaagatatcttgaaagggcaggggcagtggcagtggcagtggcagt

SEQ ID NO: 33395 - DNA, 2695 bp, Cannabis sativa
aagcagtcccaatccttggagagaattttatcaaacctgaaggtggtgagttgaagattctgaaaaaacctacgtattgcatgaaccctaatattgacccaaatacacttcaaccctataaactactaaaaccaaatgagatggcaacgatacaaacaagagatgcagcaattaagcatgtaacaagcatgtaagatattaagaagagaagttacttattgtttgaggttggggcttgggacgatatacaactcttcggcctgtgaacctttgaatgcagtaaggatctcttcaaaaatatgaagtcggaagaaacttgcagaaaaaatatcaaggacagagatggcatgcgaattctcgagcaaactcgatgctattccttaacaaagaagcttaagagtttatgaggatttctaaaatggaggaaatagtgcaaatttggtttctttttcttactttatactcatgatatcaactttgtcggatcagaaagatatttgatcctacggacagaattcaaagtagaagtggaaaagatggtcatttaatgttgatgtacctcgagaccgcaaaactgctaaaatcagaggacatgcattttttttaaaagggatcatgacaaaaataccctttgtaatcattagaaagcactttttaaggggcaattgttatacccaaaattcagctagcacatcagagaaagacacgtgtcaagctaggaagaataagaactcagacacgtaatcataattacacttgagatggaataactcgttaaaagtataattaacagaatatatttacaactcagctgactgaatagtcttatgcgagataaaaatatataaagtgttgccttgtgcctcgatgagaaaccatgtaacttcaggtgtataagacgaggcactaacctcaattacgtggatgggatatattatctgtgaagacacttagcatataatgcacagtataccaactaagtatagtagatgggtgaacccaagtgatagcgaggcgtccaccttgccataagaagagatgcacgcgaaaaagataatctcgccaccagaaactacggttgtcagattcaaagtaaaagcgacgagacttgcattatcaaccttggaaagaaatatgacgaactccagcttgctatcaagattgactctactctatttctagcgagaccattccaatacaaggttacaacatatttaatacacgttcattttgacccagtaaaagcaggatattcacagttgtgtgatattcagataaccgcatttacttaatgtgatatgtaatcagatcccataattttaggggataatcgttgtaaaaatatcactcaaccctgtaattaactgcctactatgtgattataaatagtggcaagttagatcaaaaaaagtggacgaaaaaaatcataagaaaaacaggcccggaaaagctatcagaaatctaataagattgacttggactatggagaattttaactgcaaaaccacgtaaaaattccttgtgttcatacctcttactttactgcttttatttttttgtgtgagattatcactattaggctcaaatttggttagcgaaaatctgcgttaacagtagccttatactacatatttctttttcttttatttttctcaaaaataaattgtataaatataaaatctcactatattttattttcccaatattattatttcaaaaatataaatttattttttgtaaactatttttctcaaaaataatatatttaaaataatactttattattttactatgttgaattaattgatactttattaatctattttactatgttaaataataaccattattatttttctattttacgaaattttttgtttatgttatcaagctactcaggggacaaatggatatgtagttttaagctccaacaaattacttatctcattaacaattacttatctcactaactcttggctcaataattaatttattaactatgatgttagtccactaataaatcatagttgcactctcagaacttacaatttattttatttagaagcaattaatcacattatttatgtccattgatatagtcattacatgagttataatcctccactaaatatttataattagagttaggtatcttcgtatgttaatctctctaattatatgtttatcaatcaatgccatttatactctaatgaatatttaagtaaatcatgtacaaatgaaatttctattctctaatagaaatcaagtgctctttgttgaagtacaactatcaatactgaataaaatatttaatatgcaaccaagaattgggtctatgttctttttcataaattttattcgatatattttagttgcagaagagaaacaattacagagaaacaaagagaatgaaaatctcatttcattacattcaaaacagaggaatgaacaatatttatatacaagcttcagctctaattgcctaaccgcaatcctaactaaccaattccacaatataacagaaagatacaactaactcaacaccttataacaaatcactctaatactcccccttaaggtggagagtatatgttacaaattctcattttactcttgagaacctcaaattggctaggaagcaaagccttggtgcaaatatctacaatttgatttttgctagagatgtgggcagtct

SEQ ID NO: 33396 - DNA, 2483 bp, Cannabis sativa
catttgcaccattttatcaactttacatttttaggccaatttaatagttctagcttgttttctttatagtttgtgtttgttaaattttatatattctcaactctttattttatttttgttgaagccactttgtgagtaattagttttataaattaatttccaattttcaatccctgtggagacgatactcgatttatcactttattacttgttacgattgcgtgcacttgcgtttacgaattttcacaacaaccagcaaaactgggttaataaggaccactctgcctgcaaaagacaaaatgtctagaattccaagttcaaatcctggcaaccattttctccacaagtattgagcactcttttcaaaaaaaaattcttgcggtagattagaacacccagagatatctaaaaggcacttttcatgtcttttgaaaccagaagcatctaggattctttgaatattagtatcacacatattattgtagtagacagaagtctgagaaggattagggaataaacctgatgtataggaaaatagcttgagtccttgtagaataaaataaatgcttttgtaatccccattgcagaaaagttgaacatcatcagtaaaactaagatgatttagcctcagctccccacacctctcatggtatttgaaatccttctttgaccctattttcttcataatcttggatagatactccatacccaggacaaagagtaagggtgacatgggatccccttgtctcaatcccctcttggccttaaagaatccatgcatggattcattaaacatcaatgagaattttggtgttcttacacatatcataataagcttgatgaaactttctggaaacttaaatgcatacaatatttcttccataaaatcccattccttagtatcataggctttttgcaaatccatcttaatcatgcagttagccttgctagctttcctcccataatgccttatgagatcttgacatatcatgatattatggccaataaatcttccttgaacaaaaccactttggttttgtgatactaggtcaggtagcacaatcttcagtctttgacagatcaattttgtagctgctttgtagagcacattgcagcacgcaataagtctataatctccaactgagtttggacacttacttttgggaataagagttaacacagtggattcaatctccctaagaagcttacccgagtgcaaaaaagatgttacaacttcacaaatatcagttccaatcaaatcccaattgtcctggaagaagaagatagaatagccatctggtccagaagctttgttgccaggaatatcaaagattgcttgcttgacttcatcaaaagagaacctcttagtaagaaattctgcttgagtattagaaacagtagagccttgcttgataattgactagataacacttctgctatcctgcattctgctgccaagtagaatcttataataatcaagaaacattgctgaaattgaatgaggatcttcagttcttacctctctaacatcagagatagaaagaatacaattttgactccttctagctctaatgctattatgataaaatgatgaattggtatccccatctttgagccacaaacgcttagccttctgctgcaaaaaagacaggtaagttgcatgtaaagatgcatactgacccctagcctcagcttcctgtatctgcaaggactcatcaaatggatcttggcgcaaggcactttgacattcatctaacttaatctttgctctatttgttgcagcaggcagatcaacaaaatgtcgagaatttagctatttgaaagtagcttttagccctttcagctttgttatgacttggaacatctttgtgcctctctctcttcttgcttccatctctctgaaaccatattcatatagttaggatgaaaagaccacatcctaaaataacgaaatgattttttcactcctggtacagcctcatgaatagttatcacagctggggaatgctcaaatattccctcattttaaaaaaaaaaaaaatacctcaccaactgggtgattattcagccaagcagggttagcaagaaccctatctatcttggaacatattctctatttccttgttgtttattgcaccaagtatagaaatttccaacaaacttaacatcttctaagtttcagtcctccacacactctcgaaatgcagtagaacttttttaaatctgaccctgctccctatattcgttcatccttggcaagaatgtcgttaaagtcaccaagaaccatccatgcatttccactattaagttccttcaaatccctccataaatccttttttaaatcctcatcattgaaaccataaacaaaattcacaaagaactttgttttttatctatggtctcaacaaaaaggtgaatcatttgactagtacactttacaatattgacaataaaggagttaggattccaactaacgataatcc

SEQ ID NO: 33397 - DNA, 1790 bp, Cannabis sativa
ttcttaaagaaaaaaaaaaacttacaatttttatataaatattaattgttattttttttatattaaaatatatgtaaatgttttttttttttttcatttttattcttaatatagttaattcttttatcaacaaaaagttagtagaataattatattaaaagtagtaatggcacaattgtaatacattagaatagcataattagttattaagtaaaaataactattgctgaatatatgacatttgtcatcacattaaagggagagtgcaaaagagagtcagatagagagttcccttagcactcctctaaagagaaatacctaacactctttttagtatgatatcattattacagtaagagaattgctaaaatgtattaaaggtgtctaacatttttttcggtgtcatactgttattagtgtaattaagtttaagagaataatttttaaacaatatcgctaactaattgtaaagtaccacttatgaaaggtgttgggcaccacttgtgcccaatagcaatactcttaatataattaaacattgagcctcatataatttaaaataataattttttaagaagcattagtgatgtctagcacctctagacatgtagcattgctttagttaagttattatatttaattatatgagattcgatacagttagaccaatagcgatattgacacataaaaaagtactagacactatcttagcatttctcaaaaaatatcgctaactaattttactgtgtcacctctaaatctaagaactagtaatacaaatgatccccctctcacctcttaaatggtcctcttgttgttcttgtttttgttcttttatttgattgtcactattatctttagaataaataaataataagatataactttaagacaaaaataaaaatcattctaggataaggacattgatattgaaataatttaaataaaatcttataggagtgctactcatgagtttaatattgttttaaaaaaaaaataaatcatcaacttttattaattgtaattattagagattacatgaaaaacaaaaaatcaagagaaatattattgataacgcgataaaataaaatattcaagccaaaaaaaaaataacaatatttgtaaatcgtctaataaaaataatagaaacatcacctaactctaacatcttacaatctaaaataatactctcaaaataaaataccatatgaataaaacttcataatacttgtacaactgtaagattgtcggcttcaaacacgacctccttccaagattttttttttaatattgtataatttaattgaagacattactaattttacaacttcataattagttaaattaaaatattcaactaacattctattttataatgagattcaagttttaacaactaccattccatatccaaatatatatctttttttttaaaaaaaaaaaaaaataatctattttaagaagatgcttcactaggataggctcaatcttatcgtgactattttttgtttttattatttatttttaaataataataataaagaaaatacatgagtcacaaaacccaacaaaaaagcaaccaaaacaaactacttctaccattagcactcaacccgcgacacgtgtccaattcccattcgctcttttcactaaccccattccctaagcaaaatccataatcatccactacaacaaggtacaaaacaccgacaaatctaaaccacaaaaaactcatcatttcgttgatcacataaaagaaacggttcagattcattttacagataaaaccg

SEQ ID NO: 33398 - DNA, 2145 bp, Cannabis sativa
ttttttatggaatattttaaaatatttctattattaaacaattaattatattcaaattatttaattatttaattacaataaaagtcttaaattaatttatttgaaactaatttaatttaattagaaattaagtttctaattatatggtggtggtaaatagagtatggtgtgaaatttctaaaactacatggatggacaacaagagagtcaagagagagaagaagaagagcacttaaagagtagtgatattctagtgtatcttattctttttatttcaaaggttgtaattttaaaaatactcaaaatttactccgctcacatttcatttagttattgttgttaaatacttgtttactaatagttgattagtacatgcattttgtatgacatacataaaatttcacacagtttgatattttgataatcatgcatattattctagaaaaatgattatttaggattgtcctatatattttatgtgtattgtatttagtgaaatgaatacacataaaatgctatttaaatagtttaaataacttggtaatttaccctagtgattaacttctaaagctagtcactattttttaaccaacttattctaaaaaattttgaaaattattatgtaatatggtattaattaaattatttttaggactatatttagtaatttaattaatgtattacaaagattaaaattagaaatcaaaatcttttcagaataattttttatgcattaaaatagtgagtgggagagagttgtcatttgttatgaagtatgtgatctccatcattagtccaacactgagggtgtggggagggtctcgagacaactttatgttcgtcttcctaaagaaggtgttgaaccatacattgtcaaggttggcttcctctttaggataaggcaaagtgatgtattttagtgataccgatcctaagctgtgttagtaagttaagtcatagaatctaaaataatgaattacactcacaaaataatgcccatgtctttgaagttaggggacataacttgaccaaacaagggacattttattatgtaaagaaaataagagttattctagttactattaataaagacaaaaacaagtcatgtagattatttgatattaatttgactgaccctaaggcgaaactttaatctttggataatcttatcatgaaatttctaaattattttttatattttaaatgtgcccatgcatcatatttagattccaaacttgatatttatattttcatatagcattaaaagaattaatcttgaaagtcaaaattaaaagtttgatagtcataaccattaaatacaacaaaagaataaaatttaattttagaaaaaaaataaaatattattaattattgtagtaagagtatactactcactaaaatagtattggattcaaaataattattattattgttcttaattaaaataattaatattctttataataatcatgaatttaagaactacaaagatttcaataaataagatttattgaaatatataatatacatggattggtttgaatatccaactaatttaaattagtgattactttataatttgaaaaattaaatcatcatgagaaagaaattaatgagaaagttaagactttctaatttcaaatgtaggagtcaaaatatgattattcaataattattcattaatagcttcattaaaaatatttaacacataaagatgatattacataagtaattttaataagtgataaattttaattaatcttatgaaattgagaattgattatgataatcaatgaggtatatgtgatagttcgaatctatatctaacaaggatacaatgacatagtcgttgacttccagatctagatgtttgaatttatatatgaatttattaatacataaatctcaattatgagataattgaattagggaagtatagataaataaatataaattaaacacaaatcattaatcatttatttgatatattgttgttagagaataatgtggatgatatatatcaatggcaaataattacatgactgtaatattattaaatagagatttaataaagtaaacatgataattgggaatgttaaccaggtattgaataaataattaaaactgtattcataatatgggata

SEQ ID NO: 33399 - DNA, 1151 bp, Cannabis sativa
atcataagcatcctcactcctgggtacatatccagtagtagtattggtttcttcattccttccttctgggttttgattattaccaccatggttccttcttgaacgtgttgttccataagtgggtgacctttgagaacccattggttctttcccaggacgatgtgtggtttcttcaagacgattaccatcgttttgattatgatcagccatggatggattttgtttgttaggagagattttttttgagttttatcacgtaggctctaaatgaaagcaccaaactattaatgcagatttttgttaaccaataataagcctttttcataataaatttaacatagaaattataagaaattaataaagtataataagtataataataacacctgatatttttatgtggttttgcagttaaatttgcatactccacaagtctatcttattccagttattttttgagtgttcaatatacaatataataattcctctctcaaagattctctaaaaaatcatatgtccccttatctgtgggattctgcccctatttaaaagataatatgttggtaattattttacaattaaattcaaatcgtaaccgctttatggaacgtggttagttcccacgtttcattttgatcacgtggggataacaataagtaacagcataaccgtgtggtatccttatccttaaagatagtcactgttgatatggacaattgcatcttgcttaacctgtagacggttaatgctgatttgaataatagcatgtcttccagcaatgcatgagcaccggtgtactgagtaaacttaagaactgctctttgactataacgccttgcagactagacgatcatgtctcacatatttctcaattgttatccttagctattgtaatgtgaaaaatacgctaaatgttgataaatgacctgtctcgttaagtttcttatgagtagcgaggtggatgcctcgctatatatcgtttgaggttgtattgagtaacttcacttatttctttcgaataaacgaatcttgtcctcggatctgtgtattctgaggtaggttgatgtctcgtcaatagaggtattaatggcccgtttggtacgcaagactggattggattagacagactaatttgtccaatccaatgtttg

SEQ ID NO: 33400 - DNA, 998 bp, Cannabis sativa
gaatggagggctaattttttagggtatttgtttccaagagctttggagagtaaacttttgaaccagattgggagatttctacaaaaaagaacaatccgaattcctagatgaaatttgttagaaaagaatatgataaacctaaatcatgcctaaaccctaaaaattacccaaaaaacgtaaacccgaatcgctaaacgtaccaaatagaatgacaagatgtaaactaaatgatcagaacccagaaaaaaaaaaagaaaaaaggggagaaggatgagacacttactgtttgaggtcgagtagtcgagtggtgaaattttttgcaaacagagacgggatgaacgacatgatgagttttttgaacacctgaggtcgaaaggaaaatctgagtaaattcgcagaaagtatgtcaaatataaggtgggcatgcaagatttcaggaagctgggatgaaattttttcagaaaaggttgagttttttaaaagacaaaaatgatgaaaaatggattctttaccgttttatactttgaacttagtaaccatcagatcaaaatgtagaagatccaatgaataaaaatggaagagaagtggaaaggatggttcattaatgctaatgatgtccctcgaaaccacaaaaccacaaaaatcaaaggcatgcatattttcaaaatggattatgacaaatataccctcaataatcatttaaaaagcgcttttcattgaaaaggactttttcaggggcaattgttatacccaaaatttggctggtacttcagaaggtgacgcatgtcaatctcagggaatatgaatcaatgaatatattgataattatattaaaaatattaaatggaataactaattaaatgcagaatcaatagagtatatttataactcgcaaattgcatagtctttagggagacaaggatgtacagactactgatttacgtattgatgagaaatcatttcacgtccaacgacataatcccaaggaggacatagat

SEQ ID NO: 33401 - DNA, 2388 bp, Cannabis sativa
agaaccgatttaattggctaattgaaattaattggattggatcgaatggtaaaatttaacttctaatatataattggatcgaatctacataatactaaaaatattagatgtagtccaataaaaaaagtagctcagtatacctcaaaaggaaactcttgattttatttagtagtttatatttatttaagataaattattaatttatgagtaatatgtttttttttttttttttgaattttaagtaatatgatttttgtttccaaataatatatcattatcaaatcatttcattgttaaaaaatttcttttaacttccgggaattccgttcaaatttgactaacataaatttgatgtgacattgttatgatacatcaatgctacagatatttacatctacagacttttttgtcttcataacatataacatattattttttttttttttgaaaaacttgtaaaattagaaattaggtaactatatatagaaataataaaataaaataaaataaatatttcttttttctaacttaaaaaaaattaattacaccgctaatttagtcttaaagattatactattgcaatttaatgttgaatataattattttgagatgtgaaaactatatattttcttatcttctttagaattaaagtaattatttaattgcttataatactaattatatactcattagttttttttttacaagatatatactcattagttaaattacaataatgtatacaaataattataaaagtaaaaattttataaataagtatcattagtcccagctaaaaatttcaacatcacaatattttttaaatcatttttgtgctgtgcacagaaaaaaataactttatagttacttttaagtttcattttaggtatcacaagcaactaaatagttgatttagttgctttttattatgatgacaaaggaaaaatatatttcttacatgtcaaaatgactctatttaagagtagtttatttctctatttagttagccaaaaaataactaaatttttaaattaaacaaaatttaatatacaaaccaaattcaaaggttgctaaaatatacttttaattcaaaagatttattaacttaataactaatttatatattaagatgtttacgaataattttttaaagtaattaaaacaaattttggataatatgatataaaaataaagaaaccatttttttttttaaaataaatacataaaaaatggataacaaaatgtgtagttttaatatgttgaatgactacaaagtaattttttgatagcatgataatttgtttattagttatgaaaggttactaaaatgtactttaaataatataagatacataatataatttaaatgtaactaatttttaaaataaattttagaaataactaaaatgtatggcaaataatataaacataaaataaacttttataattgatcaaaaattagtgacggtgtatatactatataatttttttataaataaattatgtatgataactttgtgaattatataagtatctttgttattatatattgtaatttattagtttctaagtttgaaaagaatacaaaaatcaaacaatttataaatttaagcttcaattaattaattaaaataaaattgcttgtatagatgtaattatattattttattgatataataagtaatcaattggtttattttaattttgaaaacaatgataaaatatatactttctacattttaaaatgatgaccttaaaaagcagattatgaaagtatcatttttttagctcaaataataaataatatggtcagaattattttttgaagttttaagaagtgagaaagaaagaaaaaaaaaatctggatggcttgtttaagataacaaacaaacactaaactcagggatgtaattaatttcatttaagtataaaatagttgacgtgttactataattgtgtaatattaattttgtatgtcataatcgtaattgatttaattattacatatgatataaaaaatttccattaatattaagcctatggcagattatatttgcaccggcaaatattataattatactctattactaaatttactccaattaaatgtcattttttataaccccaccctaccctatttaccaaaaagtattattttatacacatgaaaacttctcattttaagttttattttatttatttatttatttattggaaaaaaaccctcaaagaacggaagtacttcgcaccattaaattttctacattcaccaaatcgtccctctgcattctccaaatccacaatttttcattataggaataatgtaaaggcacatttgtatatactagatgagagttacgtggcgagccacgtaaatattagttatat

SEQ ID NO: 33402 - DNA, 1478 bp, Cannabis sativa
  modified_base (621)..(622): a, c, t, g, unknown or other
tatggtgaatgaaggtgtgatggaggggatggctatggtgaatacgctgggttctgatagggatttttttttctcttttttttttttttttaactaaacataatgtaatacgatctatatacatatatgcttttttctcttgtttttttgaaaaatataaaaataatgtaatattaattaatatatatttttaagtaaaaatattgtaatatgtaatatgtggatatttcatctcgtactccaagtgagattacgcctgctgcagcaaaatttccacaaaaattcagcaaaaatctttgttcagtgctcaaaattttgctagaaaaatgctgcagcaggcggaggttctccaactcaacgaaaaattcttttgtgctctaaagaaatgctgtatcaaaatttaatcaaaaatttagcaaaacctctaaactttcaaatcacctccaaagctccaaattgtgctccaaaaacacctgaaacatcaaaccaagtataaaatccacccaaacacttaaaataaaaatgaacataaaataaaataaaataaaaataaagaaaaatacttttttttttctatttatttttcctttctattttttttcaaaaatatttacaatactnnttcttcttccaacattgggttgcctcaaaatagaattgacaatctgaacagaaggcaacccaaccaccttccgcttcatgcatcctccaaagtgattgaggtctttgctcgatcgacctcaccaccaaaataatactttagacgttgcccattcagtttaaattccctttcggattgctcattacaaacatccacaactccatgaggataaacttttgatatggtgaatgggcccaaccaactggacttcaacttacccagaaataacttcaaccgcgagttaaagagcaaaacttgctgccccttctcaaacactcgaggttgaattcttttgtcatgccacttcttggtattttctttatagagcttagcattctcatacgaaaacaacctcatttcctcaagctcattcaattgtaactttcgagcttcccatgccgctttgagatccatattcaacttcttcataacccaataagctttgtgttccaattcaactggcaaatggcaagctttatcgtaaactaaacggtaaggagccaaaggagttttgaaagcagttctataggcctaaagagcatcacccaaccattgagaccaatctttttgagtaggatttaccactttctccaaaattcctttgatttctcgattagaaatttctgcttggccatttgtttgaggatggtaagtcgtagctatcttgtgcttcacactatacttagccaaaagaggtgccaaaactttgttaacaaaatgagttcccccaacactaatgagagctcttggagtcccaaaacgagtgaagacattcttgtgtagaaatttcatcaccaccttagagtcattggtggga

SEQ ID NO: 33403 - DNA, 3441 bp, Cannabis sativa
tccatggcaggtgatctttgagcttggaggtattactccaaagttacatatcagagcttgaagatgttgagttcagactgaagggatttcagtatcatcttcttcacaagatctgaagggagttcagattgaagaagtgttgaagagagctcatcattcacacaaggggatcttctgtctccaatcaagggtcttggttggtatgggtatagattcactgtattttgtaaaagagtgtattgtttacaatattgttgttgtttgtaagatacatctttgaatatagtgaaagttattatcctggttcggggaacccaagcactagccccgtagaatgagttcctagggcaggtgaagcttgtaaaattctggtgttgaatctttgattttgttctttttatactcaagtttaaatcaagataaaatcaatctaaatatgaaaaagataggttagacaagaacttggggctttcaaactactagaacgtggaacatttgtgaccttattaccagtaaataaatgatataactcacattgctgatgtaatattttaatttcagttatgaataaagagaatcgtctctttaatttaagtaattacaaagctttactctttaaagatacttaaggggcatctatgtatgattaaccgagattcatttgaaaatacctagtataatgcaaacccataactttaatttttttttaatgtttttgatcaaacctttctgacgagaaggggatcaaaccactgatcaaacctttctgacaagaaggggatcaaaccatcgtaactttttggtttaaacttgtctgacgagaaattaaaatctaaagttataagtgagaaataactcataacttgcgtacaaagctgaatactaacggttcgcgaaacataggaaagtattaaatgagacactgagacgtcttgataaaagtatttaaacctattgaacggatatataatttaaatattcatacaaggaatcaaaaatgtataaaagtgataaaatcattaaacgtatattcaagtttgctaaagatagattataactgtcattgcatggcagagttgataactattcaaaaatcaaatgtttggtagaaaactaactacttaaataggaaagttacaagcaatggaaagacagaaatgaactttacatttgaactaaatatagttgtttacattgtgaataaaaatgcaagcacacacaattatattaagttcgaatgaaaaagtacaaggcatttaagataagataaaatccaagttggtttacaaacttgtctttacaaaaatgccactaggggcaaacctttaagccatattcctaaacaaagaatacaaggttattcatggggggttgatgaactcgagaaagaccgtctacacatatctcaggaaagattgtctacgcgtaaaaggtcttgacctctgcatagacctcattctccgcattagaagatcccatttcctatagccgagacctcattcccagcctcttgaaatttatcaacaccagagtttggctggtttaaaggttttcttgtgcaagcttgggtcttgggccatttgggttctttagtagaatccatgacctcgccaactaggattaccttcttcctggattccttgtcagcctgaggaggatctctgaacttgctctcaaaatctatgtcaattcttgtagagacaaagataaaagatcaacgaagaaacagtaaaaaatatatatataatagtccaggacagaccactgttcgcgaaggatgatgcttaccctcaaaaatctcttgtgaggatcgcccatagtgatcaactgtatctccttgaattggatcaattggaagatctttagtttttgaatccttcatttccaatttaaactgtggtttgaagtttttgggaacaaacagagaggaaaaatggttggtatattctggtgttacgaggatggagggataagtttccgaacttgaatgagacatcttagcaagataaggaccttcaaatttctagatgaaactcatcaaaaaccaagagcatatggaacatggaaagcccaagccaccattttatactcagaatccagtaacaggaaggccaaaggttgggaaatcaaacggttgggagtgaggcagaagatgaaaagacaattcatttatatcaataataacactcgaaattggggaactgccaaaatcagaggacgcattttatcaaaagggattatgacaaaaataccctttgtaatcattaaaaagcactttttattaaatagaattttttaaggggaaattgttataccaaaatttggttaccatttcaattaaggacacgtgtccagttaaggggaagatggatcgatgaatgtaacagtaatcacatttaatggaataactcattagatgcagaagtgacagagtatattggtaatttgctgactataaagtcctatgcaagataaagatatacaaattgttgcctcctatattaacgagaaaccatacgacgttggatgcgcaaagcaaggcataatgactgtgaaaacacttagcgtataatttacaaactaagtataacagtcgggagaacccaaacgactaatggcgaggcgcctatctcactacaggaaggcatgctcctattactttcaccaatcatctttagacgtctttcaataagacttatagtcttgacaagtcagaagctgacattcaaatgatggctgctggagtactccttttgttatcaagaactgggattgtcaaaatgaagtggtatgccttcaagagaagaaacaacgaggtgtacattatcaacctcggaaagataggggaaaagctccagctcgctatcaaggtcattggtattgagttcctgtcgagacatcccagaacgctatgatttaaaatgtttttaaatacacgatcattttgacccagtaaaagcgggtaaatcacagctgtgtgatattcaaataataactgcatttatattacatgatatgtaatcaaaccccacgatttcaggggataatcgttgtaaagattacactcagccttgtaattaactacctactatatgattattaatataggtaggatatactaaaaaagggacaaaaaaatcataagaaagaggccttaaagaaaaacaatcagaaatgtaataagattgactcgtggactatgcagaattttaactggaaaaccacgtaaaaatccttggtgttcatacttttctttcctttattgtctttatttttctgtgcaagtttattattcaggctcaaattttggttaatgaaaattatcgttaacaatgccaataccaattatatttatatgtttatcatgtttgtatgtgtttgtgttttacaaaatctatggtatattattctctgcatagagataataccacataaacactt

SEQ ID NO: 33404 - DNA, 9443 bp, Cannabis sativa
aaaatgtattatattgatacgtatgtcttttaatttattaaaaaattagaataaaatattctttattatctaaaatattattgttaccattaaaataaattattttatctattatgttaatgggattgtaaaaaatcccacttgtatctaaataatttcaatctagacttcatatcataacactaatttttttttttttgagtaaagcaaagtaataaataatgatctaactaaaatgtacattaaacaaaaaaaactaataaataatgatctaactaaaatcaaacataaaacaaacagttgaaatttcaaccgtcagatcttaatctaactccttgaaccaacggttatccttctctctctctctctttctttctttctttcacaattggcacaacccaagagagagaaaaagaagagagagaaagaagaagaagaagaggaggaggagagagaaaggaccaagaaaagaacctccttttttcattgtgggagaagagggagttggttcggttcctgggaatctgatcaaaccatcttctccttccttcattttcttgttcttcagttagtaaaggaaagatatagaaggcaatttccccacaaaaacccagaaagaaaaatctgatttttctgatttgggttttggtttttgattaggagttttaatttttttagataaagttttgattttgggtggtgggtggtttttggttttggttttggttttgggttttggtttggtttgagttcttttggaaatgatggacatggatagcattgaatgtgtatcatcttcagatggtcttgatgaggatgagatccatccacaccatactaccctgcaccctcatcctcatccccatacccatcctcatcaacatcatcctgagttttcttcctcaaaatcccgtaacaatggcactaacaattcctctattactggtccaaacgccattgcaccagccaccagcgtccacgagttgctagagtgcccggtctgtaccaattcaatgtacccaccaattcatcaggttttatattctttcccactctttctctgggcaaaaagtctattacttttcactctatgatttggctctcataggtttttgattatgggtaatttttcaattccaatatggatgagtttaggttggttttgagtggatttgcaaaattgggttttttcagtgattttatgacttgtacacatttgaggcttgttgtgttctttgacaatttatcttcttcagttgccttttgtggaactgggtttattttaagttaaaaggttttaaggaattttttgttgcgtggttggtttatggtcaattactgattgtgttcatgtgatttatgggtgagcattgtttgattagtcacagatctataatgggtctaaagtgaatcaaagatatgatattaacaatgctgatgtaagggtaatgcttctcttgtcaaaaacttacattcttctgtgtgatcatagccacgtgatcacttttgtattgacttgatttaaatcttattttgaattctagttctatcctaggttaccaaattttatgtggacttatctgttgtgtttttatatgaacttaattttttgtgtttttgctcaaagttggcattatggatcgactaaagcttgaccattatattgcccccaagaaacttaaactgtatcaggagcctctattggttgttggcctctacttctgttggtacagattttgttttttgtattcaaatatccgatccctttgttcgcaaccttttggattagagtgaggttgttgtaaattgcatatagatttgatttcaagtctgaacactggactattgtatgtgctggttttataaaaattgtgcaatatactgtcaccattctaagatagtgacttgtttttgcagtgccacaacggacatacattgtgttctacctgtaaaacaagggtgcataaccgatgtcctacatgtagacaagaacttggagatattaggtgtttagccctcgagaaagtggccgagtcacttgaattgccctgcaaatattataaccttggatgccccgaaatatttccctactacagcaaacttaaacatgagtctgtgtgcaatttcagaccgtataattgcccttatgctggctcagagtgtgccaatgttggggatattcctttcctagttgcccatctgagagatgatcacaaagttgacatgcatacaggttgcacattcaaccatcggtatgtcaagtcaaatccccgagaagtagagaatgccacttggatgctcacagtaagtctgatattgcatttagatccttgattggatactttgcagggtggctatattaaagtgtgatgtgtctagtcttgatgttgaattgttgatccatggtattcatcagttttgatatgtgtttggataataatgatttcgggctcactgaagctgtctgtagaacagaaacagatttctctacatattaataaaaactgaaatctgtgttcaactattctttctgaaccaccttcagttttccatttgaattttttatccagttttcaatgcaaggttgtgctttctgccaaatatcttataccaaatccaaatcccatgttagttacatccttgatggtgattagttgttttctccttccattgctttgtaatcaaattcagctttatgcatgctcatacacttgcacatactacttgactgtcaacataggtaacatctttagtttaagtttttgcttttcaatagtcatatgttagttttctcaaacggttgctgtagaaagctctgcattcagttgatactcgctctgtgattgtttgtggcttattgaagttaaggctggatccatgagcgataagctgagtcgtaggtgttcgttataatccttaattggttgtctttcctattattcctttgtcaggttttcaactgtttcggacaatacttttgccttcattttgaagccttccagcttggaatggcccctgtgtacatggcatttctacggttcatgggtgacgagaatgaagctcgaaactacagctatagcctagaggttggagcaaatggcaggaaacttatatgggagggtaccccacgaagtattcgtgatagccaccggaaggtgagagatagccatgacggtctaattatccagcgaaatatggctcttttcttttcaggcggcgataggaaggagcttaagttaagagttactggcagaatatggaaggaacaacagaatccagatggagtgtgcataccaaacttatgtagctgagatgatatgatttttgaaggcatttttacagtttgtgtgataaggacactgctgtgtgtgttctatacctctgttcctagtttttttctggattgtagcaaaagaaccaaactgttgaggcttggaagtctaatgattattaataaattgtataataagcaggctttctttcttcaattaacctaacaactaacatacttctcattgaagggtacatctcacaacttctcgagttgagacttttctttcttaaaaatggtgtcttttttatgaagtgccaattttaggtgtcatgctttgtcatatagcagccttgacaaggtataggtaattaagatggcaatttcttcagcagaataataataatattaagtgcttgaaaaaacatcaagattcaagaacacttgttttttactttacaaagtcaattcatgctagaattaagtcaaaatcgaaccttgtgaatccttcaaggtataaggtacaaataacatcaagaatcaaactttattttttaggaggaaacatatattgattgtaacacaaaacattctcgggtgcttcacagctcgagttcaataccagagagagaaacctgtccagtctcattgactcttaaagttaacccaaaaagactcactaatattcatcattccaaaaaatttatacttactcgttcttgaataaagaagagatgacatcaagttcatgcttcatatttcaacacaaggatgaacatttagacccaacaaattaacagccagtaatatgatcgacaagctgtagacttggcttctgtgtccactgtatcacctttcttctcctgagtctgaagtagaatctgaagaagagtctgaagtagaatctgaagaagaagcttctttggctacttcggtgctctctttatgatcagcctgagtttctccatttgctatggaagcctcagttgtatctccattggcctctgaagattccaactcagattctttatttccaaacaacttagatggaagtaaagaggacacggcagctctcgcacttttctttgctgcttcagctgcttctgcttccttagcctttgcttcagctttttgcctttccttctcttccataagcttagctaagtcatcctctctcccttcctttctgagctcccctttcacgaattcctgcaactcctcgctaaattcaactccatcatcatccagcattgtatcaaccacattaagcacctcatccaatttccctgactcactcaatgccttcattataaactcatagcttggaatatccatcttgagtttcttcaccatcagatcaaaaaacgattttgcttcatcaaccttccacaccttaaccaacccatcaaccaacttaccataaacggctaaattgggcctcaacttggaatcaaccatcttcctgaaatactcagctgcatcatcaggcctgttctccttaaaacaagtatccatcaacagagcaaatgtaaactcatctgggttcactcccttttctcccatttctccataaagctcctcagcttcagtcaacataccattattacacaactgctcgagcaaaacattgaaggataaggtatccggaaaacatctataatcacccatcttcctaaagacctcaatggcatccttatacctcccctccaagcaataaccttctgccataacattaaagcttcccaaattcactgccagacgccttggaggattatgctcctcgatcattctatcaaataacttcaaggcctcatcgaatttaccattcttgctcaaagaatccaatacagaattataagctgcagcattcatcttcacttttgaattgaccccaacagcctcttcataacactccatggcctccttctccattcccctcatgaaatatcctttcatcaagctcccatacacaatcccatcttctaaaactcctcccaacttctccttcaattcctcatataacttaaaaaccccatccacatccgagttcctaacacaacccaccatcaaatggttataaacaatgggatcaggctcgaaacctttgacatccatttcctctttcaactccaaagcccgctccaacctgttattatccaccaaccctttgatcagaatccgataagtagtaggggaagggttgaaaggcgcatcatttatcaactgcttgtaatgctccatggcagtatcaggcttccggcaatccaaataagtctggaaaatcaaattatgggttatgatattcggggcaacaccggcctgggttatgaaccggtgaagggaaagaaggtcagcgtacttggactgacgtaagagagcattgagaacagagttgacagtaaaaatggtgggacgacagttggaataaattgagtggcgagtgtatagagcagcttcctcgagatcattttggcgaataagagtgagaattttattatgtagattgaggcgattaccagtgagtacagaaacgtgttctgggagtttaggggcattggggttttgggttttttgtggctgagtttgctgttgctgctgttgttgttgggagcgtcgaagagaggagagaggtggttcgatacggaggcggcgcttcctgcgacggcgctcagctgcagcttcttccggggtggcgaaggagaggaatcgaacggagagaaatgagggctgggggtaaaggcggtggtggggtttagctagggttttgaggtgggttaagaatgtgggtttggacagagccattttgggattgaatttgaaaatgggaatttagaagaagaagaaaaaggaattgtgttttagggtttggatttgaatgtgtatagattgagagtgagattgaaggattgggttgtagtagagttagggtagaaagagatagggttctaagagggtttaccaaaaatggccattgacgcagaagaagagagactacagagatagaaagaagagagagaggaagttggtttggtttgggtattcctttgcccaattaacaaaatgggccgcaagattgggcttccacctgggcctttaactatcttataatgaccaggcattttttcacattttatatttaagaaattgattatgataactcataagagcattcctatttttgcttagtattagtaggaggtgacattttatgattgtaattggttagtaatattctataaaaattattatataggactcgatacttaattacacaaatagcgataccttttagcgtatttttaatttctaaactgttagcaatactcattctgtttttaatcgaggttaatgttgttgtcctttgaagtggttacaattgttggtagcaataaagaaagccaccactttatgggttcttacatttcaaagtcactggagaaatacagttgtgaccgtgttacttgagaatttcgttattggtggctaaatgtggctatacaaacaatatatcattatatattcttatatattggctcgattttatgctatttgagagcttattttatttagttggctattttggtaaatttttgggttattttttctgaaaaaaataatggaaatatggtgcgataggcacttgattcttagataaaggaaggccaaggccttcaaagtctgagcactaacactaagaaaaacatgacaccaaaaaactaagaaataaaaaaaaaaatacaaagaaacttaaacatttgcaaaaactagaacaagtccacattaaccatcatttggggtccaattatagtcctccaacaaatacgttgttaaacatagtcttccaactatgtttaaatctcccattaatcccttcttactagcccactttaggacgttgtgcgctatctaattgcacctccttgaaatatgaatgagatcctagcaggtaagagagctacataagcacagaaaattgcttcttgcagcaatgaggttgctaggaattgtcctccaatcggaagctttgaatcctgtagcgactctaatattatcagtttggaaaagcacttgataccatcctaaatcagatgcaaactttgctgctaggaccaatgcaagagcttttctcaattgtggattagtcactttggaagtcataacttaacaaccaccacatcccttttatgatctctaataacgacgacaaggatggagccattatgagaaatagatatatctgtgttgaagtaacaccatcctaacggtggaggtctccaagccatttttcttcaaagtagcatcaaaatcttaatcattgggaggtctgatcaccatgggttctcttatttctctccctccaaaccatctccacaatacaaagggtaatgaccatgaattcctcaaaaaaagtctcccaaggtctgttaaaatacacttaaaactaggttttcctttccttccagttatcaaaactaatcgaatttgatctcacaaaccagaaagctttagcaaaatggcattgccaaaacaaatgcattgtggtctccattgccatattgcataaggggcacaaacaagattagatacagataaaagaggctagtttacctcaagttaagaaaccaccataagaattttagacgaggttgtacctgcaagtgccaaaggatcttccaaacaaggttatcgatcaagttattttcaccctatataatcagtttacatgttgatttaatagagaatgcactgttagcctcctcagtccacatctagttgtccttagtatcacgctcaggcaagtcaatattaaaaatggtagctcatcttctcttgtgaaccactctaaaaccatagggaccttccactgcttgctcccgttgatgaattgtccagcccatgcaacagcattagttgcactttttaagggagttggaaaattattctcagaaggaacccaaagatcaaactacatgaaagtatttagcccattgccaatcttcctacacaaaccttaagagagaagggagcttgagcgaaggattgctttgcacatattagaatctccactcttcaaaattaatgtcaaggaagtttcttctattgatgtattttacatttactaaattactccccagacttttattatccgtaagggccttccaagcccatttcaatataaagcctttgttgaatatctccacacttcgaaagccaaaccctcaatggagcttagatcggtaaagggagctccaagacattgtattaatagtcttcttttcctccgtgtcattccaccaaaagtcccatatacaattatccacttttgttgatactgattttggtgtaatatctgaggcaaccatgtaagaagcaagataggattcaatagattgcattaggcaagcccttccagctttggacagtagcttaaatttccaactttgaacccatttaaggactcgagttactagtaattgcatatctttagttctctagagagatctaaaaagagggaggcctaaatatactgcatcttttttcattctttttatattgagaatctctgaaacgactaaggctttattattggcagacccttagagaagaagaatgtggatttcttgaaattaactgcttggcccgacaacaaaccatactactctggacatctcaggaaccctttaaccttgaggcatttctaaataggataacatcatctacaaacatgaggtgggtgatttgagggccatttcttttgattttgaatccgctaatataaccctcctccattcaacaggtaatcgacctagagagtatgttagctgctaggatgaaaagagttggagagagagggtctccttgtcttagtctgcaagatggttgaatatctcattgaattaagctattgatgagcaaacccattttcttaacctcgacacattgctgaacccatgtaaggaaagggtcagtgaatcctaatcccgtcgaaaacctcaatgataaagtcccaatccatcttatcatatgctctctccatgtctagctttatcattacaaagcctttttttccttttttcttgctcatagaatggacaatttcccttataacaacaatgttcttaacaatgagataatccttgacgaaggcgtttggcatggcaagataatggag

SEQ ID NO: 33405 - DNA, 1510 bp, Cannabis sativa
  modified_base (858)..(860): a, c, t, g, unknown or other
ttttaatattaaatatataatgacaattttatcctttaaaatatgtcttacaaaataactaccatataatatagtttaactcaaaaagagaatttagtcaatttaaacactccgattacgttttctaataaagtaaacaagataaatcacagactattctatttccaaaaaaaattagtaaataacatattacaaatattaattccaactatttttcatttatttcgttataaatcttcattactttattccgattctgaatattgtataataaaagtacctttaaggtattgttaccttttcacttttatttatcatttcaattttcaaccaaaatatagtgtaatttcaaccaaagtatagtatttttttctagaagagagtctcaatcactaaataccaaaagcaacactctaaaatagtggaggcaggtgaaatttattaaaagatatcattcactattaaattatactactttgttaacgcacgtttcaatgaacaaatatcatctaaaagatcttgtttttaaacatttttctaatgacactaacttccaaaattcaaatctattatttcttttttttttttaaaaaaataaaataaaatctgaagtcctttcattcaaccgttacaaagattaggcaaatctcctagtaaattagagattaacctcatcatcaattcacatatataattggctaatattcaattataatattcgacacatatagtatattaattaatattcaatttaaagactgtaagatcactttatgaagcagagacattaattaattaatggtgcatggggtgatttgaattttttgtttatatatataaatataataataataatannnataataataataacaataattaatatatatttatatatataaatacaaggtcgaacattcctaaatttctcatctcaataacacaaacaaaaatggcttgcataactgttcaacaccatttttcttcattactccctaatatttgcagtagtactaattttggtgtattttatagaccaaaaatatatactaactataatattattaatggtggtacaaaatcaagattatcaagtgcatgctaccccatcatatgtgctgtggtcaatagttctaatgcaattattgatcgacgatctgccaactttgagccctccatttggtcttttgattatattcaatctcttacaagccaatataaggtaattaattaatataattaggaggaatgatcactttatatattattttaattttttattatttttttaaatttttacgattgctccaataattattatataaaaaaaattgcctttgaaatataaaaatgaaaaaaaaaaaacaccataattatttcttagtaatatttttttttatcaatcagtgaaatttattactccaaaaaaatcgatttacatcctattagcatgcatctttatctgaagatctgttttccttctatatatacaatccttgaataataatgt

SEQ ID NO: 33406 - DNA, 1782 bp, Cannabis sativa
atgtttttaactaaaacaataaacacgcacgcatatctagttagtagtggaaatatgtgtattgttattggacactagtggtgcttaaacacctctacacatgtgtcttgtaattggttaacgacattttttaaaaattattatattaaattatatggaacttgatacttaattattaaatcaatagcaataataacacataaaaagatattaatgatatcttttaacatttctcagtaaatatacatgattaaaatgactagaaataacaaagacgaggcacataaaatgaataattaagtgagaagatatcattaaatgtaaatagttaaaatattaagattaattatcggtcagaaaaaattgagtacacaaattgttcactcaactaaaaataacccagatttcatgaaaaaagtaaaggtaaatactattttgaaattttttataaaaattattaatttgactttttattttattaaataataaaattgactttttattttttaaaataataaaaataagatcataaacaaaataagatcataaactgattttttttttatgattttttttttattaaaataaaacttaataataatctattcttatgacaaaacgggttagataattaagtgagaagatatcattaaatgtaaatagttaaaatatttataataagattaattatcggtcagaaaaaatagagtacacatattgttcactcaactaaaaataaccctgattccatcaaaaaagtaaaggtaaatactattttgaaatattttataaaaattattaatttgactttttattttattaaataacaaaattgactttttattttttaaaatggtaaaaataagaccataaactgatttttttttttgttaaaataaaatttaattataatctattcttatgacaaaactggttagataatttggatctgttcatattaaaaattatttttaagttaattatattaaaaaataaaatagttaaaaattaacttaaagtcatatttttactattttgaaaaatataaaatttattttattatttaacaaaacacaaattcaattgctaagcaaaacatttatcaaaaagataacgataaagtaagaatatgtatatatagttgtatactaaccactataaagcctttgatgatttcgtcagtatagtattgaggatcggagagttgcaaagcaagcatatgatcgatcatagtagagtctgccttcatactccgacgttcatcgaccagctcttgcatgaaagcatccattctcttagcagcccttttcaccttcctctcatacccttttcccacccaactcaaagcccaaggcaaaaaatccgccgtggttgccactccgccactggggattaactcctcccttatcctccagaactgcagggcctcctcctcgtcgctgacgtcatcaccgcagtaacgtttcccggccaccattctcattatgatgttgtaagccaagttcgaaaacatcgtcttcatctccactttggcaaacccaaactccttattattacccgattcacggagggagttctcagcgagtttactaatcatacgcttgatctcgtccttacgtgtctccaagtgtgattttagccggttggccgagtagatctcgatggagccgatgcggcggaggttgcgccagtggtcgccgtaggaggaagccacgactgtggtgtagttatagccggcatgtttccagagtagggatcgggtacggttggccagaacgatgt

SEQ ID NO: 33407 - DNA, 2815 bp, Cannabis sativa
gtaatgggttttatttagggcacaaaacccaacacttcccaactcaactcccttatctcaaccacaccaacctacactactacaaactttaatgccacggcttatcttggacaagaaaatatctcgccaaatgtcatcccaaaacgacaaagtgaaactatgtcagttcggaaaatgctcaaacgaagccgatttctgaatggttcatcatcaactgcttctgaagatgatgtttttgtgactgatgtttctgcaaatgcagattcagaagccacctttacttcaacagcggaggttggtatgcaaccccgcccctcgccatgaaaatcttaagttggaatgctcggtgtttggggaacccgaacgcatttagaaatttacgattgcttgttcaacaacaattgccccatgttttgtttcttatggagggaaaactcggttctaattcggttactcgatttcgtaatagtcttcattttttgaatggtttagaggcccctagagttggattaagtggtggttgattgcttttattgaaggataatgtttctgtcaagctctcccatcttggacatacttttttttttattgttctttggcttttgaagatggcccctcattccacttcacggatttctacggtgcacctgctacacaagacataatggcttcttggactctcttgaggaggcttgatgatatttctcctcaccagctgtggcttgtaattggagattttaacgagattctatctaatgttgacaaagaaggaggcccattgcgaaatgaacgtttgatgaatgacttccgtgcttgtcttgaccattgccatttgaatgatacaccttatgagggtgattctttcacctggattaaaaatcgtactgctgccacaactttaaaagaacgtctaggctggtgtttcattaatcatctatggaacaatgtgtttggggtcccaaaagtaatttggactattttcactctgatcacagagctattactgctgtgtttgcagctcatggtgaatcagtgcagcagcccaaaagaagaagtcgctttcgctttgaaaagctttggttagttgatgctgaaagtagggacatcatctctcgttgctggttagatcaatcttctcataacccgattgataatgtgctgaacaatcttgatgcttgtgctactaccttgcaaaaatggcacattgggaagtatggccatatgaagaaaagagttgctgaagctcaaactcgtgtgaatgatctcaacaatacattggaccgatcgcataacatcatggaagagctcaagacctctgaatcgatacttgatgatctgttagaacaagaggagatatattggcaacaacgatcaccagtggaatggatgagttcgggtgactgtaacacaaaattctttcatgcaaaagctttagctcgccaatccaataacagaataaaattcctaattgatgatgctggcctcaaagtgcatttgcgttcggatttggtctctgtcttagaagcatattttctgaatatttttcaagctgctccaacagatgatgctgctctgtcctctgttcttgacacaattcctattatggtctcggctgatatgaaccacggtctcacacagcctttcactcgagcggaggttgatgcagcattgcaaagtataagtccggataaaagtcctaacattgacggtatgtccgccatgttttaccaacaacattgggatttagtgtctcgggaagttctgggagttcttaatgatggagctgacccaactcccttgaaccgaaccattatcaccctaattccaaaaaataagaagcctcagaacatgaaagattaccggccgattatcctctgcaatgttatttcaaaactcattaccaaagttcttgttgcaagatttaaagttgtgctcccatatgtcatttcagaaacgcaaagtgccttcttgcctaatcgcctcatcacatataatattctagttgccttcgaacttgttcatgcaattaagaacagaactgcgggaaggaaggggattgtctctcttaaattggacatgagtaaggctttcgaccgagttaagtggagctttattcaagcagttatgaggaaaatgggcttcgctgaacaatggatcaatcttatcatgacttgtctttcaacaaacactttctcttttaatgtcaatggtgaggtctctggatctttgattccaactcgtggtttacgccaaggctgccctctatctccatatttgttcctcatctgttctgagggcctttcgagattgttacaatttgaagaaaatgaaggacaattgactgggttcaaactcactagaaatgccttaccgatttctcacttgctctcgctgatgacagtctccttttctgtcatgccaatgatagctcatgtcttgctatcaagaaagtcttggacatttatcaccgtgcctcaggccaatttctaaaccatgataagtcggtaatgtctttctctccgaacaccaccttggcatcacaagtttttttccacagacatctctccatgcccatctgtgaatgccatgaaaaatatcttggtctaccgtcgtatactggccgagacaagtagcacctgttgagtgacatcaaagagaagatttggcgccttatgcacaactggaatgaaaaaatcttttcagctgggggtgtgaagtgcttcttaaagctgtggttcaggctattccaacatatattatgagttgttttcgacttccagcctatgtagggaatcagctagaatctatgatggct

SEQ ID NO: 33408 - DNA, 2205 bp, Cannabis sativa
ttttaatgattacagagggtatatttgtcataatcccttttgaaaaatgcctgttctttaattttggcagttttatagttccaatacacatcaatagcattaatgggctgtcttttccacttttcttctattttcatccattagatcttccatattatgatctgatggttgaaaatatagagtataaaacagtaagaatcaaactttctaccattttaatcttctccaaaaaatttaagctttctgaaacttccactcgagctttttgaatatgtgcatgccatccctatctttgacattcttcatgcaaatttactcggacttgcctttctactctcggtgctcaaaaaacttatcccgtcggtcgtcacatctccattcgcagaagtctccagaatccagcatttcgacttcaaatagtaagtatctttttctcccttttcttttatttgagttatgacttgtcttacattccattacttcatttcgtttaacaattaaggttcgtatctcctgggtgatttttagggttagagatagtttaggtttgttatattccttaagcctctcatttgataaatttcatccagaaattgggattgtctttcttttgtagagatgtcccaatctggttaacgcactggagtatcctaaacatatagcttgcccacataaacccataaatttcgaacctcagtccaaattagaaataaatgatgctaggattagagaccatttgattaagttgaaccaagaagagactgcaagtcgctataggcaattcttgcaagaaatttttgaggacaagcatcgctttttgcgagacacgacctcgcttcaacccatgagtttatcttctattccactcgcaagaccaatgttttacccaacgtcactattacttttgaaccaggtgatcttgagtttgaaatcatgtctcataagccccgcaaatcaaagacccctcaggaccccaatgttaccttcgaggcagaacttatcgagtccaaggttaggtctattggggcctacattggtggcatcctacagtcttgaggcattaagcagcgtaaagtgtgcgttataaggtcagtggcacttggggaattcagctgttttcctctagaaagaataatacgcgaggagtgtagtggtcccagcacgagtaactcttcgggtgttggagcttagagcctttagcatgtcaatgctggagcgattcttaccctcaacgattactttaaggactactgcaactacctcaaggtttccccattccagctaaatcccacctcatacaggatccttgtgagcctcaaggttctgtatcacatcttaggctggttgtgccctactcctttagagatagcctacttttactctgtcaaagccgttcctacgagaaagaatgctacggggggcttctattatcttggggcctatactggcgaccgcaagctcatagttagttttcctaacaagacagattttaaagaggacttcttttggacgaggggtttatctccaataaacactactgccttccgaatcatacgtaagttcctttccttgcgaaatcattcatattaacttgtagtttttaaagttgcttactgaatttttatttgtttccaatggttcctcggacaccagttcctaccccagagatagtcgagcgtcacaaaaccttactgagcctgccatatgggttgcgagcagcagatttcttgctaaatgagcagaacctgaagaacgttggcctccttgcttcggacgagtatacttgcgattataaaatacccaagtataccttgtggcaaaaggtccctgtcccagaagaagaggaaagtgatgactttgtggctcgcgcacactatctcgagagagtccctcctcgggtagatggaagatcctgaggtaatcaatgtgggtggtcgcccacagtgcttagggctaaatggaataccttagtcccctttcgacgtagtcggtataattttttcatttggaaccctctcctcatagatcgcatctctcataggttcgatagttggtacccacaatttcatgttcaaattggctgtaacagctctttctatgggattgtcgaacagtatggaaccatgttggatagagcgagtcacatagattcaagctaggacttagatctactaaaccctcatgacatatttaagatcacatgat

SEQ ID NO: 33409 - DNA, 1581 bp, Cannabis sativa
  modified_base (1000)..(1001): a, c, t, g, unknown or other
aacctgggtgctaggcccagtaccaggtcaaccaaggttgggccctgtttctagggtctcaagtctgtggttttctccccgagtttgcttgaatctattatttgtgatgaaggaaaaaatttatggaatacttttttaagaacttgattggaaatagcctaggttgacaatatgataacgagggcactgagcctagtgctaggtgttaacctaggcactgggtcccagttttggcccttcgaaaattttatttgctccacaaaactagttaaatcttactctttgctaaaaacaaagaagatgcttagaagatttctcagaaaatatcatcaaaatattggcctaggttgacatcatcataaaaaaaatgtcaacctgggtgttaggccagccccaagtgttaacctaggtgttgggccttgattttggcacccacgaaatgtttttcgttccctaaaagtacctaattccctattttttatgaatacaaagaagatgcaaaagtcggatcatcgatctgatacttggaaggtgcccagattgacaaattgccaacctgggcgttggatgcccgatgatcaggttctccgagtgctcaaaaatgaacttgcttcaaattttattttaatgcctaaaatatatttatggtatgtctagttaatgtcccaatgtaatttttgacccatttgcactaagacggtcctgaaaattgaaatcctagttgggagtgtcaacttgggcactacgtgaaaccctaggtgcccaagttagctttcagggtataggttcgtgtaattttagctctcaaggcttggatttgaattgatccatgtctctgtatactaaaagatagtgagttggattcaagctattgaagtctgaacttccatcctgaagctcctagagtcaacctatgctcagggctagggtcccctcccaagtcgactactatgactaaggtctactcaacttcgtgatgtcatctttcttgccacatgtnnaacattgatgtccacatcaccagagaaagtttttggcttagcatttactccccaagttaacttcatacttgtgtggagttgacttgatgacgtaaaccgagcctgtttctcttgaaactaccatatggacatcaattttgacattcataggcaagtgtctctgttcttcaagcattcccaataaaattaggactttggattctcttgttttttccttgggaatttttaaaaattaattaacgaagaaaaagagaaaaaacttttttttttctcacttatcttttatctttttctgtgaaaatttgaaattttcttgtatttattatggcattaggattaattggatttgaatcttaatccttttttgataattccatttgaaaattagagagagaaagaagaagagaaaagattttgatcttttacttattatttatctttttcttttaaatctcttatttttcgtcaatcttagtagcattaggaatggatgttaccttttaaatttaaaaaattctattcctattactataggaatttttgaaatttagcctaaaagagaatgaaaaagatatattta

SEQ ID NO: 33410 - DNA, 17353 bp, Cannabis sativa
  modified_base (1069)..(1075): a, c, t, g, unknown or other
  modified_base (1970)..(1976): a, c, t, g, unknown or other
tgcacttttcattctagccgggttcgcatataattggattgtctattttttcgttgataaattgaatttggtagtttcgacatagcagcagtgttcctgcaaatagtgatgtattttcattttttattatacctgaaatttggctaccatttcattggaggacacatgtcaaattaaggagaatatggattaatgcgtgtaacagtaattacatttaatggaataactcattaaatgcataactgaaagagtatattttcaacttgtagactataaggtcttctgcgagataaagatatacaaactgttgccttgtgtattaacgagaaaccatacggcattggatgcgcgaggcgagacctcaacctcgttacgtacgagtagacgtaagcgagatataataactgtgaaaagacttggcgtataatatacaatatacaaactaaatataaaagtcgggtgaactcaagcaactaataagcgaggtgcctatctcgctataggaaggcgcgctcctattactttcaccaatcaacttcagacatcttttagtgagatttatagtcttgacgagtcagaagctgacattcaaattatgttaactgctcaagtactctttgttattaagaacttcgattgtcaaatgaagtgttgtaccttcaagtgaagaagcgacgaggcgtacattgtcaacctcggagagataggggaaaaaagctccagctcactatcaaggtcattggtactgagttcctgtcgagacatcttagaacgttgtgatttaaaatgtgtttaatacacgattatcttgacccagtaaaagcggattaatcacaactgtgttatgttcaaataataaccgcatttatactacatgatatgtaatcaaacaccacgatttcaagggagaattgttgtaaagattatagtgaactctgtaattaactgcctgactatgtaattataaatagaagcaagttagaatgaaaaaaggacgaaaaaattcataagagaaaagaccctagaacaatatcagaaatctaattagattgactcgtggactatgcannnnnnnaactgcaaaaccacataaaaaatcctttgtgttgatacttttttctttactgtctttcgttattctgtgcaagtttgtcactgttaggctcatatctggttaacaaaaatctgcattaagaactgtcacatcctctgcgcctgatacatgctctaacaagtctcttgttccttcacctacctcggttataactcccataatgcctacacctccaccactgccttagcctcctatagtgtacaccaggcgtccccctcctccacctcttgtttcatgtcctgcacctgcatcttcgtcatcaatttcggaactcaaatatgatctttccattgcactacgtaagggtaaacgccaatgtacttttttttattttttcttttgtttcttataatcatctctcctcttcttcttgctcttttactgcttctcttgattctatcactattcctaaaactattcgtgaagcaatgtctcatcttggttggcttgctgcaatgatagaagagatgaatgctttagttgcaaattgtacttgggtctttaatttaccttcaagaaaacgggccataaggtgcaaataggtgtttacggttaaatcaggatggaccaattgctcgcttaaaggcctatcttgttgtcaagggttatgaaacctatagagtggactactatgatactttttctcccgttgctaaacttacatctgttcaactgttcatttccatggcagctactcatcattggcctttgcatcacattgatattaaaaatgcatttcttcatggagatcttgaggaagaagtgtatatggagcaacttcctgggtttgttgctaagggggagttagggcgagtttgtcgtcttcgcaaatctttatatggattgaaacaaagcnnnnnnncttgttttggtaaatttagtcaggatgttgagaaattttgtttattgaaaaataagtcagatcattttgtgttttataaaagatcaactgctggtatcattttgttagtagtgtatgttgatcacatcgttattactggaaatgatactgaatgcatctcatcccataagtctttcgttcatactcagtttcacacgaaagatttagggaagctcaagtatttcttaggtattgaagttactcagagtacacaaggtatttttctatctcaaaggaagtatgtacttaatttgttaactgagacaagaaaattaggaacaaaaccttgtagtgctctaatgaatccatctatgcatcttacacgtgatgagaaactatttgaagatcctgagaaatatcgcaggttagttggaaagttgaattatctaactgtgactcgtacagatattgcattcccagttagtgtcgttagtcagtttatgtcttctccaacaatttatcattgggcaacactaaagcaaattttatgttacttgaaaggagcacccggacgaggtatagtttacaacgatcacggacataccaagattgagtatttttttaattgcagattgggcaggctccaagatattatatatttgttgggggcaatctgatcccttggaacagtaagaaacaaaatattgtctagatccagtgttgaatcagaatataaagctatgacacagtctgtgtgtgaggtaacatggatttattaacttttgattgaattcgagtttaaaacttctattccaacaaaattgtggtgtaataatcaagttattcttcatattacctcaaattctgtattccacaagcgaactaagcatgttgaaattgattgtcattttgttggcgagaaaattcaacaaagtctgatctccacagaatatgtgaaaaccagagaacaattaagagatatttttacaaaggctttgaatggagtgcgagttgattatctttgtaacatctatgctccggcttgaggaggtgttagaatattaattgtatattagttgtaaaaattaaagtaacttgtatttagtagtttcctatttgtacttagtagtttcacatttaatctcttaactttgtatataaatatatactattcaatggaatataatccacaattctattcaccattctctgcgaatatatatatactctactccaccaaccagtgaaaaaaaaaaaaaaaaacccttcattgctttacttctatactctgtaaaacctaccaccctgggtccataatatcaggctactcaaatgttataacactttttttttcttcctccattctatttacttcctaaatcaaaggaaactacactaataatacaaattggagcaatgaagtcagtgagcaattgacccattgctggcagttgtactagaatcatctgtttgtttaataacaaagtggtcaacaatcttaacagtatgaatagggtcctgaagaggaacagcggcactccatttgcttggaaatcttctgctatggctctgctgctgtggcagctttggctctctgtcccagtctgggtccagcttccattcttttggaacctgcatgttaaaatggcaaatagttatctctgcttctatgtgctctgatatcatctttaagcaggagcaattgaatagaattggccataaatatatcaaatagtgcagggaaacacaaaccataaagtgacttcttatatcttaccttatctactgcaagcgtataaacctcgagatcaccatctttagttatgtggaaccgagtgaacgacttatagtttgcaatgcggagtgaggagaaggcttcatcaaagtgtatatgaagccagttaatgcagatgtacaagtagctaccaaataccaaggagacgattggtgttgaaaaaacccagaaataaaggaagacagaagcataatatatgacagcacctcctctggagagagaggccatcccattcttacaaatgttgcttcgtgtgacagccattacctaataaagtaatcatagatacaaaatataacaaaaataacagaaggcaaaactaaaatagaaaagaaaaatcactggtttgttatacctctggaacgtcaaatgcagacataagatacttaatacatgctggataaagaccaaaggtccattgttctatacgagctcgaagaccagttggatctggaaagtgctcactctccacagtttggtaccactgatataaagtgtgatagcctagaataaaaagtacaacatcatcaaaagtcacataccataaaacttaactaacttgtaaatcaacaagttttatcaatagcattaagtaacaaataatttagctgacatgatagtcacatggttaatacagcatatagtcaaaacaagatttaacatacatttatataaaaaattaactaaatgcagtccacatagttttcttttgataaggcagatgtaaacattgtgtaaaaccttttttattttttttaaaaaagaaaagggggcctataaatactgagagttagtcttgtgggagggtggctagttaggattatctgttagtcagcctataaatactgagagttagtcttgtgggagggtgtgaattttgtgtaaaatatttagattaaaatattactcatggattttatcaagtttctcgaataacttggaatttgtatttgttatggctcttagcaataaactaccttttcatagttctttcaagaactaaattgtgcacgagtgtgcatcaaatggtatcagagcaatggtactgggagagacatggcgttaagcaaaaatttcccatttaaaatattaaaaataaatgcaaaatataattttacctgtatcaattctataacataaaattttaattaatttaagttcgacacatctaagattataagaataatctctaaattacaatccttttgtttgaaggaaacaccttttaattccaattatgatgatattaattaatttagatgaacttagggaaaaatgacgaaaattgaggtgaggttggaattgcaactaaataccttctttgtgaaggatcaagccattgcagtttagaatgtagtattttaagatttcaatagaaaaattctgatatatgaccattttcaagaattccttataatttaaaaatttagaaaaattcctaggtgaatgaccttttatggaattttgaacttttgtgttttgtactattttgtggtattggcgactgcacttagtcttagcaattaagttgtctacttatattgtatataaatcaagttaaacataattccgaatgagttgtccaaagattttgttgtaatttaaaaatttacaaaaattcccaagtaaataacattttatgcgttttatattgttttattgattttggggagggaagataaaaccgattacataagagtcaacctgcctcctttagacaaaaaggagcctttccacccatccaaccttttcgcacaattctctaaaattggttcccaaaatctcaacttcctaggtgatccccctagaggcataccgaggtatgtcattggccaacaacccacttcacatccaactaaggaagcacaatttgacactgcttcatcattcatacacaatcccaacaactggctttaacgcaaattaactttctgaccagaaatggcacaaaaggcctccattaaacttaccgacctttttagagagttttcatcattttaaaaaaaaaaaattgtatcatcaacaaactgcaagtgactgatttgaaccttctcttttccaaccagaaacccaaaatatttgcccgagttcactgccctatctaccatcctgcctagaacatctgctactagagtaaacaggaaaggagagagaggtctccttgtataagtcctcgtgaaccttgaaacttttcccttggtttaccattaatgagaatcgagaaagatgatgaggagatgcaccctcgaatccatttcctccaaatctctctaaaacttttcttgcgcataaccaagtctaaaaagctccactcaacccggtcgtaggctttctaaaaatcgattttaaagactaagccacttttgcctctacttctgtagtgttctcctgtttcatttgcaatcaacaccgaatccaagatttgccttccttcaacaaaggctgattgatttttttgtatagtctcccatagaaatcctttaagtctgttagctaggacctttgcaataatcttatatacgctagtaataagactaatagatcagtaatctctgaccctacaactattgagtttttttggaattagacagataaatgtctcgttgatgctacctgggatattaccatctctttcaaaagccttgaaaaacttccattagatcttctttaattacctctcattgtgattgaaacaaagccaagctaaaaccatcaggaccagaggctttatttccttcacaactaaaaacggcattgtgaatttcgtcttcatcgaaaggtctctctaagtgacttgacgagaaatctgaaattgcttgtcattctatcccctcaatacttgtaccgattcttctctcaaaagtatacagcctagcaaaaaaatgcggaatctcttagactatgtcttcctcattttcgataatctggccattttctctttcgattcttaaaattctatttctggctttccttgcattcaacagattatgaaagaatctaaagtttgcatcaccttcattagcccatttgcatttagcttttaattatacacttctttcttcttcaaagactaatctctgccattcttagtatttcttctctcctcaactagtattggattccacaagttggttgtctccaatctatcgagttcacccagtcttctttccattgcaatcttcatcaaatgattgtttccaaaatttgttttgctccacacccttatgttttcctttactgtcttcgatttgctcatgaatttggtacctgaccatcccaaagctaccacagaccaaaattcttggagaaaagactatgttccagccatatgttatcgaaacagaaggggctgggaccccattttgggactatgatccgagacgatccttaccaacatctcttgtctgacataaggaagcgcactgttccatgcgttggtgaagaatctgtccaatctgctacaaatagactttgatctaaaatttgaccatgttaatcttctgttatttaacagggagtcaattaaattaagttctcagatcaactcatcaaaaatcttcgtactctttgtgttcgagttactattaaatttctcttggaccctcctaaccacgatcaaatctcctcctaaacaccatgaatctccacatattatactcaaaccagccaattcctcccagaagtctgatcataatttgtatgaatacgggtcgtagagccctgaaaaccacccaagcgttgatcccttcctcttgaaccaagactgagataaaaaaagtcacctaccaaggagtctaacacaatgatacttctagtatcccagatgagtagcgtaccccctaatctccccatggaagggatcaatatccatcctttaaaacgagatctccaaatgcttcaaatgaagttcctatcagtcacctccttcttcacttcttgtaaaataaccatatccggattcgccttgcaaatcgtcgcttttatggctcttcttttcttttattcccgctgcctcttatattccaagtaaggatcttcattggggtattatactacatccctcttttgtctttctgctatcataattaatgttgaaagtcaaatttttaagttctctgttattccttcgaccaccttcaacttttgcttttttctgagtatcttcctcttcattcaagcataattccatacccatttctactagcgtctccacagattcgattcagccttagtcaggggcacaatctcaaccacctcttcattactggagactctagtggccttactcaatggttcaatttgtttcagcgatgaatcctcatctacacagatttttaatatgatccaaaatctcctccatctcaagtatcttcttcaacaaagttatcatcttcctcttctgataaattgctttccgagctaaaatcagcaatctctccctctttaggatcttcatcctcttccaatatattcattgtttcacccccgtgaggttcgaaagttcttcagagaagcttgtggtaaaagatttcctttttctggagtagattattatctgcattttgctttctgcttcttcctctaagtcgtgttcatcatctacgttcaaaacaaaggcccttttcctcccttttgttgcctcaaaattttcccaaaagcaaattattgaagctctaaaattatctctctgtttgggtctcacagctttgattactccttcaaaaaatatccttgatgacctgaattggatttttcttcttgagaaggcccttttcttccgttccttgcctgactcgacttcctgtcaagttatttaattttgggaacaaagcaatactgctacaggccgacaatatgctattggttgtgctcaatgtttctaagtttgtgtcttctaatttggttgcctagttaattatttgttagtccatactataaatagtgagagttagtcttgtgagagtgtgaattttgtgtgaagtatttagagtaaattattactcggggagtttaccaagtttctcacataactaggaattttgtatttgtttttgctcttatcaataaactaccttttcatagttcttccaagagctaaattgtgcacaagtgcgcatcactttgtagtttgtacgattatttgatccatacgcacagagatgaagaaataatcatcaaaggagataaaaatagaaaaactgacctgaagtagccagaagattgtgccttatacatgtctccacacccagttccaacagtaacataagaactagagctgcagacaggtgtgcagagacatgaataatgccaatcattaccctcttctttcgggaaactttggagggaacaaatgtgattgcagcaataagcaacatcaaagcacctacaaaagacacataagagcgttccaacaagtatatgaaagcattccacaccgtgccaaagaaactccccaagtgaccagaaaatgaatcatcttgcaagatatggccaagcttacactacaaaagggaaaagaagcacatgaataaacacttgggtataaagcaatcccttactaaaaaagtaataattactgcaataagtaactaagaaaatgaatgattaaggcaacagaaagtattaaatcataatctattcaattactaagattagtaagaaagcaataccaattcagagagagaaagagagaaagtacggtaacgattttaatttacttttatttgtcttaggccccgtttggatctcaggattggactagaaaagattaaattggattggactggataagattagattatgctgaaaataatcatgtgtttagtttaagaatagactggactattttatttttttcctttttaaaaaagaaaacttaaattaaaataaacatatataataataaataaaaataaataactctaaaaaaaatgaatattaaaaatatttaaattcaaaaataaattaaaataatatatcaaacataattaaatatatagcataaatatataataaaataatttatgatgtttttatctaataaataattaaaataataaaatataaatacttgaataatataaaattatttatgctaaataataatttaatcacaaatttaatataaatattagtttttttaaaatattgatgatataaattttatagtaatttgaaaagaatagataatgttattatcatattttttctcttagaatcaatttaaataactattgcttatttaatattattttaaattttgaaagcttatgtataaaattataggtgcgtttggtagcatttttttaatcagttttttgtttttataattagaaaagtgaaaatattttctaaaatcatgttctataaaattgttttcactttccaattttttaattgaaaatcaattttaaaaattttgaaaaaaaaaatcactttcaaaacttttttaaataattttttttcttaattaatattttgtactctgactccaacctagaccttggaacctatcagaccctggccccgaccacagacccaggcccggcccccgatctcggctttagacccaaacctaacttaaaaaaaatcaacaaaggaaaatcaaaatgaaatttacagaatacacttttgttttctgtttttaaaattgaaaaacaaaagtgattatcgaacgtatttttgtttttgaaaattaaaattttaaaaacaaaaaatttactttaatttttgtgattaaaaaatttagaaataaaaatgttaccaaacgccacctatacatttttactaattttaatgaataaatttttgataaaaaattctataaataaatttgtaataattcttttatttaaattcttattaaatttaaaatatattgacaaaatcgaaattaaaaaaagaaacgataaaaaaaattcacttgtatgggattatttatcgcaccctgctggatgggataaataatcccagacaaatggaattagctggattagttatctaaacttccagtatgcccaaacactggactagacaaattagcctgtctaatccagtctagtcttgcgtaccaaacgggcccttagtgatcaaacaaaacttacaaggacaaattgcctgggttcgtagaaacttcaaaataaaaaagataaacaagtcttgagtttagctagcatgaatattgccaagttggataatcaactaacctgtggaaacatagaaaatgccagtaagaaatatataatgccaccaataaaatcaaattgccagttcttctttctaaacttcaaaatatttcctagagcaatctgcattgaatagaaaacagcatcccaccatggttaaaagaaaattatcatgttgtgtctctattgaaaattagtacgaggtaaattacaaacatcaaatataaataaaataccctgcttgaatcttcaaaagaaggataagcagccttgcagtcatagggagtgccatataacttgttaaaactagcaaagacatgagttggatgtaaaaaagccccaccacaaccatttacaagtaaatgttgcacatggacaggccccagtccatctgatttaacaaatgaatggcgcatataatgatgcaaatctccagacattcgaagtttacaccgtcctttcaaataatcacaaatcaggtgtgatacattctttccagaaacatcattccagtaccaatcaagaagccagttcggttcatgggtcataatgatcacagaatcattatctccaaccttaatatcacatggagagatgaaaatgcaaaagttgatcagtacatgtttcaagaagctacatatcacaaataaaagataaaatataaatgaaagcttaggtgcaatgcaacgtcaatggcataactatgtgcgcacacatgtatcaaatgtatcaacgtcaatggcataacgggaacataggaatcatatcattataatctctccaagtcttgagaaaactattgcaacaaaatttgaagacatctccagttttacaaacaacgtaagatgaaagtggctcataaaaacaaataatgtcttaagttgattttactaagtgtgctgattcttatgactatgtggcctgatcataaactcgtagaattacaaaaattatatattcatcatcacttctgcagatgtactaattgaccagcacattgaaagtaattccatgagaatgagatggtgctacacttgcataaggctaggaacatacaatagtgaatctttttttgttttttgcctaactgtattggaacattaagaaagcaaaagaaaattaccttttccttaatcagttctgaaaagaatttgaattggtagacatcaatatctccatgaagtgccaaatcgagaccaaatacccaccatccttttggaagttgcaaagcaaaataactcttcttttgaggcataaaccacccacccaaccagcttttatgacatatatacctcataaaggtatgaagaccatcaaaccaatctgcaatgcacaaaagagttgtccaatcgttgattcaattaaaattatctcctgtgatgtaaaaatgaaaaaaaaaatgaaaagaaaaaaaaaaagacgctgataacaaaaactaaccatgatttccaggaataacaaaacactgaggcccattgtactccttcaatccagacacaccgggaggaacctcaggcttatttacagcaatgtgtacttctttataccatggaggaggctggagagcatactcaaaaggacaaaataagcgcctttcatatgtgaatgctgatggatttggatatctgtatatggtggccagtaaatattatgatttattaatcaataaacatgcgaaaagacaatacaaaaataacacacatgtttatgcttattatattactgttagcaatgaacagtaaattgcacaaaaattggtcaagctctcattaataactatatgaaaagctggaaaagattaagaggaaactgtttgtagcaaaaaacataattcttatagaaggcatgatgcattaaagaaagctccagagtgattggtccatagacatgccaaacaaaactccattgaggcattcaaaaagaaaacaacaacaaaatccaggagggagagggaggggagagggggaggatcagaagttacagtaagagcagacagaaatagaatcaatgaagtgtagtttgattcataaattgaaaattatgtacacggctataaataatacttcaaaaattcatactattcattagaaaagcaatgtctactcacgcaagatctcctccaataagaagtaagtcgccacgtggtaggttgagcgctgaatcacctctattgatattaatagaaggctgagcaagtaaacgagcaactgaataagatgagtttccaccatcaccagtatcagccatgaaatcaaaccataagtcatccttctcgccaaattgatcgtataagagatccccttgttgacttccatcattgaccctactcattgctgcctaatggtgcaattttttattagaaaatcacttgttgccattaactatattattcaattgtttattaacaagatacatgaaaaagttatagcgggaaagaactatcttttgtaaagttaaagcaaaaagaaaatagaagttgttatgcaagtaagcccatactgtagtaagttctaggatcctaacaatacaacgccctttaaagtaaatgtcgcagcccactccggtcctctcctaggaccgacatcactcatgaccttgttgtaggtacttcaccaaggtcgtcacttccaaggtgtcaatccgacaagaagatgttgttggctttgataccagcaactaggtagaactcactcgaaaaatattaattgtgcgcaagtgcctaagtggaaatacactatcaggtacccctagcctacacttgtcaatgtgggatcctgacatttatcttaagaaattaactctgaaattataacataccaaggacatgatgaaaagagatggattgtatacatatcaattcttctgtataactattttggatgtctgatgtatccccaacaaaatcatttaaagaacaatctgttaagattgtttgtctgatgcaactgtgccagagttttcttttaaatgttataattttttatattaaaaaccgtaaacatggaagttcctagagcataacaatttaatcaaatcacaataataatttaggtaaaaaagagaaaggtaaatcatacttgcatcattcgcatatcaaaacggccaacaaagacagttactgatacaagaagatcaaaaacagtcttgaacaaatcagctgatgttctgcaacatatagtaattggtaagttggaataataagctatacaaccatttgtagacaaaagggaaagaaaaaagaatgaaggtaaagattataccctgaataccagggaaccatatctagaaaaccaggcttcagttgcttcttctttaacttctcatactcttgaactgacaaagggtgagtaagagcccacctttcaatttatcataggcagagaaagaaaagcaaaactcagataacagtatttttgtataataataaagatttctttaaaaccaccaactcaaattgaaatcatgctacaaactaccactcaccctgtggatctttccaccacataattggcaatgtaaaggccaataaatgtagcccatagtgagtaaataggagagattccatctgatgaaccatcacatgagccattgcacgctaactaagatgtcaaaaagaaacaataaatataaaataaagacatgaactgtacattaacaaagaaagaatctatcagcttcaggtagtagtacctcgccataaataacccatttggacaaaaggggatagtctttagcagacccaactggagcaaaccaagatgagcaaacttggtctttcagttcattcattcgaagaaattttgccagccatgtgtttctctcttcttttttccagaaagaaaaccaattcgagttcttgtgctcaaggcgtctctctcttacaatagcactgttaccacagtggctataaaatacacagcatgccatgctaagtacctacatgtccaaaaaggaatgaaaacaatcatcagaattcagaagcaaatgccaaaagaatctggagatttaagagattgtgtttcgaacttacagcacagttttgaagtatagtcaagattgcaggccttcttccagcaacacgcgaaactagaccaatgtaccaaagcccaagaaatatgatgtgaaatactagaagaaatagaatagaagagacataaatagtcaaaaacaatgatagattcattctcatgtcaactcccattgactgaaaactaggaagatgatacagagcagctactaaaatccacgctatgtacctgcaaaaagaataattttctcagaattacgaacacctattatcttttctagctcccatcaaccaaacctcttataaacatggaagccagtattatatgtgtcagaataaagtatgaaagcaacggaatagaatgtggaagaaacacttaccatctactaaaatttgaataactcggcttgatagtcttcccaataaatggagacgaaaagaaatagaaaaaaccaagcaaacaagaatacatagaccaccattttacattcttgtccaatttttctacaagggtatgaatgttgtcggatgaaataaaaaataggcaacccacaacaactgcaattacggcatggcgtgagtgctcgtgggggtaaggatatctatgagttaaaatcgttctaaccctatccattctgagggaatccaatataccaactgattgtttattagagctcatcaacaaacttggcacaattcaggttctccgggcagtccaacaattccagagtcctgttattgaacttaaataagttactgcagtaccatgttataaacaacagaactatattaactataaaataaaacgaattgggataagtcacatgtattccccaagaaattttaatacattatgtcagaacaagaaagcctcaacttgaattttaacatctaacatagatttatcaattatgaaccgaaagagatatttaactattcacccttccgtcccgaaaatacaatttctatcaagcagtaaaatcatactacgactcgaacgaacaaatcagaaccccgcattgttattaagtaacatgataaccataatcataaccactctatgaagatgttcaactaattataacaaaagattaccaaatcgaactaatttcgactcagttgcataattgtgtgtggcacaattatttcaaagaccagcggaaccaaaaaaaattcgaacagaaaccaacacacacacacacattactcaaatataatataattaaaaaaaaaaattgggggtacggtatataagaaagagacacaatcattactttcttttcttttcttttcttgttttccttttttgtttctattcacaactaaatttcaaccacacagaccccctataataacactcaattaagtgataatgaaaggacataagagcacaaatccaaaacttcccgtagagagctagggtttgtatcttcaacttacccaaaataagaaaagaaaagagaaaggtcaatggcagaagcatttgcagaaagaaaaaaaaaaaaaaaacagaaccgacgtagggaaacccaataaaaaagcaatcaatgttcaatcaaactagactccattgctttaaacaaaatcttcaaagcaaaagagagaatgagaaatcaaatgaaggatgaggtacctgagagagagcaagagatggaacgggaatgaataaggtaataattatattatattaatatatataaataaaaaaaaaaaaaaaagaaggaagaaaagaagaagagatgtctgtgaagaacatagcattacaacaatggcatattctctttcatcttctccatcctcttattttatttgtttatttttattattattaatttttaattatttttttcttaactaacaagaaaaaaaatacgtgtcagaatgaagtggttgccttgccttgccttcaattaagaaacgaaactgaaatttgggtaacaattgggttggggaagttgggctacaaatgaatgttgtaatttgcaaagtaaagtagtacgaccaaactgccctcaaaagcttttgccaagtctactgttttagttttagactattcaacaattgattccttatttgttcaaagaaaaagaaaaaaataaaataatttgtatttactaccatttatccgttattgacagttggatttggactttctccatttgtgagctgggctttttatcgactttgatacacattggacttaatgggctcaaccccatacctcgtctcttgtagcaactaagaccatctctcgcatgttatgaaaaagaaaaatatatatatataatactagcaaaaattaagtgcgaggcacgtatactaaattttatgctaatttttttctatgttatttgaaaatgatacaattaaaaattaaagaaaaaatattagt

SEQ ID NO: 33411 - DNA, 2172 bp, Cannabis sativa
atatcatcaaaaactcaatggtaacaactccacaagatcagcactcaattccctgcttgcaactttgattaacacagatctagcccgctttcttgaaataattaattccccattaggcaatagggttccaaatcccatctcaaacacattgaaatatgtagtgggatgttgttacaagtcctctggttacaagtcctctttcttcaactggggacaatctttcttgaggtgccccactgatccacactgaaagcaagccctctggttacaagtctcgaggtgatgtttcttgcagtacgggcactcaggataggagtaggtctgacatccccctttactctggtttccacgaaacctcttattttaccctgaacctcctaaatgtggaaaagttctcttcttttgctcaataatggaatcaccactctcctttcagggccagaaatagggagagtagtggtcccaccagcaccaagtttttctcgggtttcttgtagaaacttgactgctccttcagctcaaagagccttgtcaaccatttcagcataggttgtagtatcatttgtggtgatgaccaaatcatgcttaatcttggcattcaaccctaccaagtacttttcctttttattagaatctgttggtacaatccctgaggctagtttggccaaacgatcaaacttggacatatactcagttactgtcatgttctcgccttgtaccaacttaacaaactctttccgctttgcactgcaaactgcttcattgtaatatttagcattaaaaatcccggaattcctcccaggttattttggcaacatcctttgaaagggccaccatctcccaccataccagggcatcctcctagaactgaaatgtggcacatgccaccctgtcattttcggtaactcccatgaaattcaatattctttcaatcgcagttaaccactgttcatccttaagtacaccaggacctcccaaaaatattggaggtgcttgcttcctgaacctctcatataagtgctccataaggttgccagcaacatgttgttccactggcaccgcaggaacagcagcagtagctggttgcaagggaggctttataggagcatcccgttgtctgagccttcaaatctcttcatcttgttgagtaattttggcttgcatcttagcaaacctttgctcccaatcaaacaaagactgaggtggattctcttgaccacccctaggagcacgatcgtggcctctaccgcgtccatgagggttttagggatttctaccaccccaaaaacctccggtctcaaccatttcaccatgccttctgacgtttttctgggcatccattatttaggacttagcctgggaacccacaaggcatgtaggttagaaagtggtcaaagtatttttaagactgcatttaaggttttaacaacaatttacacatatatctaatacatcttaaacagtttgcaaaaagtaaagcttacggaaccgtgagttgcgatcgacactggccttgattgtacatatcttgacggtcttcagtgaacagcctggtggctctgataccaaactgtaacgcccgtatttgaaaacttgcttaaccaaaattaatcttataataatatatttatataaccttatgggtcgggatcctgagtttcaaaacacagttgaaattacatttactaatataaaatttcataataatattttttttttacaaacgacaggtaactgtaaaatagaactcaaaatgttgaaagacggaaaccctctaggttgcattgtcgcgatatgtacaatcactgccaagctccaactcactgtttctccagcttagcttttcctttacctacacaaggtagcaaactgatgagtcggcagactcagtaagatataaataacacatatatgaaaataatgttatatcggctttatgcttaaaccgacctgagctcaacaactgagctcaccaaatggttaagaacgttctcaacggaagtacgaccactgtaccatatgcacttaaagtaccaactttgtactcgtgttggtagtgccattattatactcccaaaagttactaagtgttgtaccacatgcacgacgtaccccttggtactcgtgttggtaacactgtaactaccataaaatcctacactgtactaacac

SEQ ID NO: 33412 - DNA, 1912 bp, Cannabis sativa
  modified_base (1745)..(1753): a, c, t, g, unknown or other
tcctggtaaaataaattccaacgaaacagcctttgcttcccttcgagatttattcattggctgcttgtttgcttgagaggtacgaattacttccttttactcaatggtcggattcaaggttcctttaaaggagaaaaagatcttcgccaagtagaccccttatctcctctgctgtttgtgttgataatggaatacatgtcgaggcttttatctcaggtttcgaacaaaaaagggtttggcttccaccccctttgtaagaatcttagattaaccaacctctattttgctgatgatgtcattatcttctgtaaagggaacatgaagtctgtggagtaagttaatgaagcttttcgggaattttgccaagcgtttggtctttcagcaaataagaagaaatccgatgtttattttggaggggttaaggaaaccgaaatcaatatcttggctctaactcaaatggaagagggaacgtttcccctcaaatatttgggtgtaaagctaagaccaactaaatggaagccttttgattgtggtgtgattttagataagctcagcttgaagttaaaaggttgggcaagtaggaacctctcctttgctggccgtgctcagttaattcaatctgtgcttcttggcattcgtactttttggatgagccttttcatcttaccccaaaaaatagttgcagccattgataagaaatgtagagactttctttggggaatgaatggaaacaggagcaaactccacaccccctcttggggaaaagtttgccttcccaaacattctagtggtattgggttcagagaagggaaattatggaatgtggctttgatagctaaacacttgtgggctctatccaacaagcaagacaacctttgggtgaaatggatcaactcaatttatttaaagggacaggatgtttggtcttatctggtgaaacctgatgtaagttggtattttaagaagcttctaaagattcgaaacacaacgaatgtaaggttattgaatcttacttctcccggttgtaaattcaaattgcagagattctatgatgaaatgataggggctgctaaggtcccctatgcaactaatgtctggcacaaactcgttgttcctaagcataggttcatttattggcaaattataaatgaacatttgctcactcgagacattctaagcaggttccttcctattgcttctggtttatgtgtggtttgtgatatggctcttgagtcccataatcacatattcattgattgtatctttgcaaaaaagttgattaatagggttgaaggttggtctggtgttctgaactggccgagctatttaagtgattttcaccaaatcaaacctgcaaaaactgatcttgctgtagcagtcctaaatgctgtcatctctaccgtgctctacatgttttggaagaataggaatgattgcctttttaacgatgtttgtaacaatgtttcttcccttagtaaggaaatcaagtgtattgttaaggctagagttgttggggctcattgtaagaaccaaaagaataaagatcaatatgtgttgagtgttgtaaatagctggtaatagctcagtatctggtgtggtttttttttttttgtggtagttggtttgttcctcctgcctagcctttgtatttgttttgtcctttttgaataaaaagttccttttgttcaaaaaaaaaacattggaacgctgtgtttggctattagaatcacatcttagtacttttnnnnnnnnnggacaatagtttagacattgggaatgtcagaattagtcgggattctagaatttcccaaaataccccttagtgtcattttattacttttactgtgggaggggcaaaatggtcattttaccccatttgtcttttgtattttgtggatttaatttaagttaa

SEQ ID NO: 33413 - DNA, 1914 bp, Cannabis sativa
  modified_base (1863)..(1868): a, c, t, g, unknown or other
gtaaaataatttccaacacccagtcccagacccggtctcggacctagactaggattgagacaagaaccttaacccgaacccaaactcgggactcgatcctggacctaaactaagcccctaacctaaactgggattcggacttggacatggacacgaaccaagaccctgacccgaataccgacccagacccaaactgggatcgaaacacgggacctggactcggacctagacgcagaccttgacacaaacctgggacccaaacctaggacccaaacttggacccagactcagacctagacccagaccaggatccaaaaaaccagtacccagactcggactaagactctaaccctgaccccaacctagacccagactcggacccagaacaaacctcggacccggaaatagaactagaactgtgactaggacccggacctgagaccagaaccgaaccctaaccataacccaaactaaaaccagaacctgtaatgagaccttgactaggactgggacctgagacctaggaccgaacttggacagggacccagactgggacctggacctgacctagtcctaaaccctcattgggacctgagacccgcgacctataccaggattcagaccttgacaaggacccaaacctgaactcggacaaagactgggactgagacctggacctgaatccagactgggacttggactaaaaccaagacccggggcccaaactcgaacctggacccagaccaggacctaggaaccggatttggatggggaacctagaccagggacctagggcccggaacccagacccagatctaaatctaggactcgaacccaaacaaggacctgacctagacctaagaatccaaagtcagacccagacgcggaccagaaacttgccccggacccaaaccatgaaaggaatcaagacacaaatccataccaggaccaaacccgaacccggactcgaacccaaaatcaaactcgaacatgggacccgaactcaaacccaaaatcagacccaaacataagcctgcacccggacccaaactcaaagctagaccgggatcggaactgaggacttagactcggaactaaactcggactcaaatcgagattgaaacctgggactccgactcaaatcgagattgaaacgtggtacttggacccgaacctacaccaaaacccaggaccctaacccacacatggagcccgatctggacctagaccgagatccagacccgaacccacacttagaccaggactcgaacccaaacccaaactcaaaccccaacccaaactcgaacccaaactcaaactcagaattgcaactagaactggaattggactaggactaggactaggaccaggaccaggacctagacctgaaccctaatccaaataaaaagccagaccgagacccaaacccgaaccgcgactaggacccaaaccagaacctaaatcgggacccaaacccagacaaaaaccaagacctggacctagaattgggatagggacctggggaatggaattaggaccaggaaccaagacccgacccaaaacctggaagtgaacctaggacccagctcgtgacccgacacccaaaatggaaccagaccaagacccgagattgggatccagatctggacccggggcttggaccaaacccgtagtcattgtctagatctgggacccagtcccggacccaaacccagaccagaacctgaagccaatataacccggaccttgactaggacccagatcgggaccccgacccagacccaaacagggacctagactcaaaccgggccctggaccaagactcaaactgtaacaccataactaacataggcgtattacgtnnnnnntaaacatgctgtgcagctcgttgcaaatcaacgaggtttatggaaa

SEQ ID NO: 33414 - DNA, 1691 bp, Cannabis sativa
  modified_base (1581)..(1583): a, c, t, g, unknown or other
  modified_base (1648)..(1653): a, c, t, g, unknown or other
aaaaatgctggagtacatggccaacatttgttgattccctttatggttttcccggttggctttcaacctttcaactgcctaaacaagcaattttcagagaaataacatcagtgaaaactacgaggttatttgacttcataacttaaaaattgttttctgtcttttaaaaatgaaaacaatttttaaaaactaataggggtaatttggcaaaattttttaaaattgagttttaaaaaattaagaaatagaaaacatcaaaatattgttttcaattttcaaaaataatttttttttgtctaacatattatattttatatttttgttcgcataatcggatcctagactcgaaatcatacccgaacccgaataggttcatatcatggtatggtgttaaaatatcaatttttttagtaagaaaaaaatctaaaaatagtaaaaaatttatatcaaacaccatttaattttaaaatgacaaaaaactattttctattctcacttttaaaaactgaaaacacaaccaaagaagctctataaaaccacacatatttccttttaactcctctctccaaaaattgccaagatgaaaatgacctttttttgtttatgttgatcatgtttctattatggtttacatatacataaaagtaacaaggttcagaaaattacatctgagctactcagaactgggatatcaaatgtttgaatgcttgaattacctgccacaacagttgtgtttttatgatatataacaatgaaaataaaataaaaaataatacttgttatgttttcatttttaaattggattttcaacaaaattatttcttaccaaccaaagcttcattttgaataatggaacttgtaacaatcctcctcatttgtttaaacgacctcccatgttgagaaaccccaaacccaaatcccaaagaggggaaaccatgcggaatcgccttagaacagttcgaatgattggagtttgttaagagtatttttgggttttgggaaatgggtgtgataagagatgagaaggaagccatgaaagaaaccagatgaaacttttcttttaaaaaatgcttctattagctttgatatcgttgccattataaatgccattaataactaattaaaaagagattcctaaggcatttggaacactacaaagaaaaaaaaacaaacggagtgacaaaataaccctccttcccactcccaggatgtacactatttgtctttttgtgctatgtagttattaaaagtagtaacctcaaaataaaaattaaaagcacgtgtagatattcaattatatatatcaatatcaatatatgaaagaggtgttcaatggatcatattccatggatttcgacccaactgatttaatttaaatatttattggatgttgaattttgtcatctgatccaatctaatcgaattaagtcatccggtccgatccgatccaatgaatgtattggattggatcgttccaaccattagatgcattaactggttttctattggattgtattggatctatgcaatctattttagttaccattgatttcattaaaaaaaatatctattctatataannngtgcctatataactgaaatttttaatttatgagaaattcatggtgattttttatttttatttaannnnnnaataaaatattatttatatatagtaaaataataataaa

SEQ ID NO: 33415 - DNA, 1736 bp, Cannabis sativa
atatatatatatattagattttaaattattattttttacattaaaatgttaactgtatggaattttttaaaatattttcacattaaaatatttgtattatatgtgtggattagattgaatatgttacttttatatgtgaattaacatcaaattcgcactttgcgaaatacattagactgaataatacgaattggattaagtattttataaacacccataattaccattaaacaaaatgcgctgacgttattaaacagaagcatcaatttaatttggggaactaccccatatattatttttaacttttttgtttaatttacactttggattgctttggtggttgctccgatagtttctatgtagattgctatgtgaattttgattgtcttaagttattttattggttgctatatgggttcatatgtgaattcccataaaaataaaaaaataaaaacttctttaatgtaaatggacgcacactttgaaccctagtggggaccggttccaaaagaagactatatacaattagactttttacaaaaatactagattattttgggtaaaatttttgaattttactgccacatggcagaaattacatttatactgtcctctctttttttttcttttatactgtaagcacaaaaaaaatatgaggcctccatctttcacactcacagacggaaccaccacagcaacaccaggaaagtcggaaaataaccattaatcttggagagattgagcaaaaataataaaatcgacgtcaaataaataatcatggcaaaacaactgtaaactacaacactaaaataaataaaaataaacaaaaggataaaatgattaaaaaaactaacaatcttctgcagcacaacttcaacaccagatgtaatagcagctatatttgcaagatcagtcttgaaaaatcagaacaaaaaaattactaaaacaaattaaaataacataaaaattaatacaaaacaatgaagcagatataacaacttagaaagacataaaagaaccacacacctcaaaacctttttgtcagtgagctcatcaaatgtatttataagagaaccagaataaaaaaaatcacaaaaatagccaaagagaacgaagaataaatgtattatagcctccatcttccacacctacggacaaaaccatagcaacacgagaacacccagaaaataactattaattccggcaaaatggagtaagaatagtaaaatcaaacgtctcaaataataaataaatcattcatgacaaacaactgtaaaacaacactaaaataaataaaaaaaaaataaaagaaaaaaatgattaaaaaaaactaactatcttttgcacaacctcaatactagatgcaatagaaattatatttgcaagcaagttctggaaaatcagaataaaaaactacactcttatttttttcaaaaacatgaatgaaaatttcagaaactatattttgtcaaaaaaatgaaaagaagataaaagaaaaagaacttaacaagaaataaaataaaaagcttatatgttaaatgggaaaggatatagagaacttgagaaaaaagagagtgaaaaaaatgggttatttgttatttgttatttgttaaataggaatatacctattccaaataaaatgtggctatatagcaaaattcttggtttaaagttattttttggttttctaagttaactctaatagaatattgttaattaattttataatattatta

SEQ ID NO: 33416 - DNA, 2290 bp, Cannabis sativa
ttaagagcaaataagacaacacagggaaatgaatgttcattgttcaaaaaaaacaacacagagggatgaccaaattcatgaaaaataacattatatagatggcttcaaactcatttcataagtaaacacggtaattcatttttaccatctgtgtttaaatacaatgttttagaagtttcatttgcaaattcataaaagccaggatgctgataaaggccccccaaaaacatgtgcataaggcttagacctttaccccaagtggcgaaaatatggtgaccatactgaaatgtgctaagccaaacgaatatgaaaaaacttggagatagtagaacgtacacacatacaaagataatttaacacattacacacagagctctcagcagaaatgaaattttgtatgggagaaaatatggaaaaaaaaaccctcaaagcataaccggacctctcccagaatggcatgaaggataatacctcaaaacctttttgaagtgatctgcgcagtctttgcaagggtacattcgagttagtatcgccatctgcatgccaccagaaaatataaaaccactgaaaaagcctgattataccaaataaatctaaacacttttctaaattcttccaaaagtacaaattcttacaagcatatcactatctggcttagtcattaattaaatttcaacctcctcatgaatagtttctagattcaagaatataatgtccaggacataaataggggaaatgtatcttaccaattctttaacatctttcttctgctgccttgttggattatctggatactaaaatagatagtaaaaataaaagtttgatgagtacaatccttgaatcaccaaagcattctacacgaggctttattctattttaactgcatcttgtagtgtgaaagatgcaaatggccaacatgtaatcatttcagtttcccaactaaaattggaaagtgagaaaactgttcatttccagttaaatcaaatgtgaaaatctccaattttacaagtatttagactctgaacaaaacaacagggaaaagaaatgatgtaagaagaagaataccctggcagcaagagtgtgaagaaatgtccatgttgctcttccaagctcttctttcgaaaccggtccacctgatttttcctgaagatatcactatcattttagttctaaaaattcataaactttccttcccatattgatttgccaaagaaagaaacaaaagttaatcctttatttaatctactgctctactagacatgataatatagaattgcaatgcccacaagccaattcatgtttatttcctccaagagcagacaaaatcgttgtaactcagtcgggacttccaacaaacacttagtaaacaaaccgaagaatcaaaagctgaggcaatcagacaaataagaagacgaagaaaaagagtaccttggtgtttttgaggggtatggaagggagagagtgagtgctccaaggattttgtttggaagagtgagagagagagaaaagaggtggtttgggtgatggaagcatgaaatttgagaggtgaatttggatgaaagaggaaattttgtccatacatttgagtacagcctgcaatgggttcttctcggattccaacattctggttcgcaaatgttagagagagagagagagagaagtaaagaggaagcacacacagtatttctactacaataaaacctccatcctcttgcttattttacaaatatatccttcactcagtttttcatgagggcttttttgtatttacaaataatttcatcttcaattttttatgcagactgcggctctgtcattcaaaattctggaatgaatagagggctctctctccgtccctagctccggcgtgtttttactgctccgaccccaaaatctttatcctcaacctttgaaagttcaactgagggttggacgttagtcggtttgtacggtttattctatatattttctaacttaatttaaagttcggtttgctaaaatttaagtataatccgcctaatgtaaaaaaaaaaatctataaaccgactaacggtttggtcggattaacctgcctaaaccgaccaaactttttttttttttttttaattttaaagtcaaaattaataaaaattaaaaaaataaattaaaaatatcacattccactaaattacaatattttaaaaataataattaagtatataactttatattattatatatttatgttatatataatagggaaatttacggcaaaagtccccaaaaagttcacgttgatacagattagtcc

SEQ ID NO: 33417 - DNA, 3301 bp, Cannabis sativa
tttatgttgttcttgaatggtgttgattcaccacaaatagtatcaaagcacaggttgctattgaggaatcaagaaccgtgaagatcaaaacttgaaactcaacaatggcgacaccaagatttgaggtagataagtttactggtgtaaatgattttggccttttgcatatcaagatgaaagcactgcttgtgcatcatggccttgcaaatgccattattgaatctgttcctaaagaaggtgatgatgtcaagaaaattgcccaagaaactgaaatgaaggctcacagtgcaatcttgttaagcttaggtgatgaagtcttcgagaagttgcagaagaagagactgctctgggtttatggaataaacttggttcaatctatacgaagaaatccctggcaaaaaaatcatatctgaagaaaaagctttacaccatatgaagatggaagaaactaaagaattgagaaggcaccttgatgatttcaacaagctaatcttggacctgaacaacattggagttaaaatcgatgaagaagatcaagcaattcttttactgagttccttaccaaagaattatgaacattttatggatacaatactttatggtaaagacactttaaccatgtctgaagttaaagctgcactcaactccaaagaaatccagagaaaggttgatgacaagtcagagactagtggggaaggattaatatttgctcgaggaagaccagaaaagagagatttcaagaagtcaaagattggtcacaaatcaaactccaagaatagaaatacagtgggaaagaaatgttactattgcaagaaagagggtcacttcagggatgattgctatctactaaagaacaagcttaaaagagacaaaagcaaggaaagaggagaagtagatattgcatcgagtggttatgattctgcagatgtattggtggtttccagtgaggattctggtggtgaatggatccttgattcgggttgctcatttcacatgaccccaaagaaggatctgttcactgactttgaagaaagctcagttggtacggttctcttgggaaacaacaatgcctgcaaaatccatggaattggttaatttgtcaacatgaagatggatgatggcattactcgatcagttcagaatgtgaggtatgtacctgatcttaagagaaacttattgtctataggtatgtttgataatcatggttatactgttagaatagacaatggcaccctcaacatctctaaaggctcactggtggtagctagaagtagactcaagaatggtctttactatatgattggcactgctgtaacaggggcagcatcaccagcaataaataatgccaagaatgatatacaattgtggcatttgaggcttggccatgtcagtgagagggggctcactgagcttgacaagaaagggttgtttcaaggtggattaagggaaaagcttggtttctgtgaggaatgtgtgtatggcaaaagttgcagggtcaaatttgccactggacaacacacaactaaagagaaacttgcatacatccactctgatttgtgggggccctctataatcaagattcttaaaggtgcaagctactttattagcatcatagatgacttctctaggaaagtgtgggtatacctattcaagagaaaggatgaggccttcaatacctttgtcaattggaaaaggttaattgaaaatcaaaccagatgcaaaatcaaaaaattgagaactgacaatggttgggagtttgctctaagcaatttgatgaatactgtaaagaacatgggatagctagacatctcactgttagagatacacctcagcaaaatggtcttgcttaaaggatgaatacagctcttattgaaagagtaaggtgtatgttgaaaggtgttggtttggatagatctttttggggagaagcagttaagacaacttgttatctaatcaacaggtgtccatctgttccattaaggttcaaaactccacaagaattgttgacaggtcaagtaccaaagctagatcatttaagggtctttggttgctctgcatatgcacactacagacaggacaaactacagcctagagccctaaagtgtatgttcctaggctaccctgatgaagtgaaggggtacaagttatggtgcctagaactagggcataagaaatgcattattaatagggatgttgtgtttaatgaggaggaaatggctatgaagaaaagtgtcaaggactctacaccagaaaccagcaacctaagggaacaaattgagatggacacaatctcatctagacctattgagaacacagagatcactgaggaagataacactgatagagacacacaaactagtctagatacttatcaacttgctcgagacagagaaagaagaaccacaaaagctccagataagtatggctatgctgaattcactgcctatgctcttagtgttgctgaagacatagataatgatgagctatcaagctataatgaagctatcactgggaacaatagtgcagcatggcttcaagcaattgaagaagagaaactctctcttaaaaagaacaagacatggacagtggtcaagaaaccagaaaactataggataatcaaatgcaaatggcttttcaaacaaaaggatggtattccaaggtgtgaaggtccaaggttcaaagcaagattagttgctaagggattcactcaacaagaaggcattgattacaatgacatattctctcaagttgtcaaacaaactaccatcaaagttgtcttatccatggctgcaaaatttgatcttaaggtggatcaaatggatgtcagaactgccttacctacatggcaacctggaggagaaaatttacatggaaatacctgaaggctatgatgacaaaccaggtcaggtataccttctaaacaaatcactttatggactgaaacaggctcctagacaatggaaccttagatttgatgagtttatgatgaaaattggttttaccaaaagcaagtatgatagatgtgtttatttccacaatggcatttacctacttttgtatgttgatgatatcctgatagtaggaaaagaaagaagtcagattgaaagtttaaaatctcaacttagtgttgaagaaatgaaagacttggggccaaccaagaaaatacaaggcattgaaataaagagaaatagacctcacactatcagtctatctcaagaaggtaattgacaaacttggcatgaaagatgccaaacctgtaaccacccccttagctcagcacttcaaactgtctcaagatcaa

SEQ ID NO: 33418 - DNA, 1934 bp, Cannabis sativa
tctcagttgattgtctcgtacccaatatgacactaggagttgtggctgtgataggcagctgcaaaattcgtattagaacatttgagataaaattatgagtcgccccactatcaatgagattcaccaccgactgagaactaacgtgttcccataattttaaagtttttgaggatgtcaaaccaataacacaattaagggaaacctctacgaattaattttccatcttggtatctacttcttcaacaacctcatccaagtcatctatgcttccttctctttgttttactgaattcttaagcaataatgacctggagttcagtttttttgcaccgatgaccaggggaaaaattttcatcacatttgaaacataatccccgagtcttcttatgctgaatttaagtctccgtgagtcatcgaaatccattcccaactggccgaccttcatctctgaaatttgttgaatgtggaacaaagttacttgcaccacttccagttagccctccttggaatcgtgaaacaaagcttcgtattacagatttttacttttgttaggctagcaacttcaattgtacattttaggctgattccataacttgttccagcccacttgggcccattacggttacttcataccctatgaattcaacccattaataaaagaagattctaatatatattttgaaatccattctaaagaagaagcaagcaactcaaatctcttacgatattcatgtacaataccttcttgtttgagggaaaggaattctcgatacattgattcaatgggcagaggtcgaaacctccaaatcatctgcatcttcaagtcctcctaattcaaaaatggtgatcgacgatgttcccattgaaaccaaatcaaagcctctccctccaagctaattacagtagtttccaaacactcttgatttgtcatacgatgaatggaaaaataccgttcagctttcaataaccatccgtctgggttgtcgccatcgaacatagaaagttcaatccaatgaggcctaatatcccatcgtggggttgcctggttgttgcgaatcccactaccacggcttcccccaacatccatggacactctcctattcatgaacggacgaccaagtgccataagtcgggcaccaccatcagctaccattttttttccagttactgatgcatggtctcactccttctctatgggcaccttgtgccgctcctcctagcttcatagaaaatcatctaaccgatataccaaggtagtgattcgtaatgatttgtgattaatttgataatactttactagatatatttagtaatataacaattattcaaaactaataatgtatatttatttttcaatatgttttgtttgtgtttgcaagtatactactaccgtggagtgaatttgaattttatttttcttctttatttaattaattttggaataagattcatgtactaagttacactaaggtagaatttggttagagataatgaaatagaatagaatagaaaggaaataatttttattccattcctttatttagttaaagtattggactgtcattctaatagaatgacttttctattattttgatggattgactattctattttaaaattgaaagaaagatcattccattgcaagatgaataaaattttaatatttttttttcaattttttaagcattttaaatataattctattctatttttattttcattctcattcttattcttatgttttcattccttccaactaaatatcacttaaattattttccattccatatttagatgtgcctttttgaagagaagggaagttctaatttaattaatttactatatttctgcttattagtatctttttcttttgagggtaatttttattttattgtttttaaagtataataatattgagattttatgtcctaaat

SEQ ID NO: 33419 - DNA, 2251 bp, Cannabis sativa
cctgagcttattgtaccctcattatttctgatgataaaaaaattcctaaaagactttttgtaaaaactccttggaaatgacccaggttgacaaaatgtcaacctgggcgcaggggcccaacataggtcaacttaggtgttaggtcattgttttttcctccaaatggctctgtttgactcatgtgagcacttatatcttaattattgatgaaaatggagaatttttttgaaagactttgtcaaaattgcaaatggaagttgcccaggttgacaaaatgtcaacttgggcgtaggggcccaacacctatgtcaacttgggcattgggtccctattttgccttctaggttgatctgtttgctacccggaagcacctatttcctcgttttggatgaagatggagaaaattattagaaaaaatcttttagtttggtgattggaggcaccccaggttgacaaaatatcaacctgggcgttgggcgcacctggtgctctaggcaccttgtgcacttaagtgcccaatttggaagttgctttgatgcctcaaatatgttcgtaataggtctaattcaagtctagtgaaaaatttgggtcatttgcactaagacagtcccaaaaactaaagccctagcctgttgtcaacttgggcactcgtgaaatccaaggtgcctttcgactcctttaagtttccaggtttcagacttgaatttttcttgacttcattactctgaatactaaaggatggtgtctcgaaaacaacttggcgagatccaaatacccattatagtgcctcaaactcaatctaggcgcagggctagggaccctttcccaagttgactactatgactcgagttccttcactttgggaatgttttccttcttgtcacgtgacaaaaattgatttccatgtcatcagggctactttttgtgtaaaaattttcccccaagtcaaccttacacttgtgtgtggttgacttcataatgtgaactacacctgtttcatacgaaactactaggtgggcatcaattttgacaatcttagcaattgtcttcttgggtggttccctttgatttgagatcatgttaacacgaaaatgttagcactagctttgatctttggctatattcttaacattggttctcttatcacattgcttgtttaggtgatatagttgtagtctttgttccatcctacgtcgcatccttggaggtctttagcattctctagcctgtgcttaccgcgaagaaagtcttgttaatctctgttatctcacttttttcccacatgacatggcatacccagataggcaagttaatgccacgaggagtacaacctatcaataggtgagccaggttatcatgcatatcttaccaattgacgaaaggatagaatgctcaagcaaaacaaagatataataaaatggccaactatgagggtctggtcggtccacctctggccggccaaggaggagtatgtgccggccagccctagacaaggggtaggtcagccagcctctgcagggatagccagaatgaagcttgaataagtggtgtttctgcagccctcaccttggacggaccatggctcattctcaactacaaaaccactccaacaacccataaaaataggagttcaactctaaatatctatctattctttaggagcaattaaggggttatttttgtataattaattatggaaaaaagaagtaatatctcctcattttaaggggtattagcctatttttaactagatattttataagctctcacctatataaaaagcattagactagacttaaaacctaagttctaagtattgagttctaagctatcatctcaaaaccctagttctctctctcttacacgccacctacatccacaagaccctaagtctatttctcatctcactcattcgagatctggctaactattgtaatattcatatagagccacactagaaattatgagatacaagcctataatttgtgtagtattatctctcaaatcaatacaactaaaaggggagtaggtcattacccattaatcaagggggccaaacttctattcttttagggatatgctattcagacggcaaatgacattctaaatggtgctctatctaaagcagtccctaagacacccgtaaaactatgaaatggtcgtatacctagtttacgccattataaaatatggggtgccctggtcattgttggaatttattttaccaggatgttagatctactcacaagta

SEQ ID NO: 33420 - DNA, 5071 bp, Cannabis sativa
tacacagtctcaaaatcatcccacttgaccttccccaagcggtatgggattgcacagcttacctggtatttccccttacggatcacgagactagtgactctcacaaaactttattccaaaatagactacataaatttgcaaatttatttgatgacccaacacacattttatatatacaattgtgactccaataaatttccaacaaaagatttaataccaaattgatggagattccacaccaaatttgtgtaactattagagatggtctaaagaaattgaaataaaaccctaaatttagttttggaatttttttttcaatattgtatcaatacaagtagttatattgttcaattattagttcaaaattagaattggtctaaattactgttttacttttttagttatttatttttgcattagtactaattatttggtttacgtaccatttgcatttttaaattcccaaaataaaaattgtaaatcattattgtaaattatgtctaaccatttgcatttttcatattcctaaaacaaaaattgcaaatttctttattaaagaaactttaacgagtaaatcaaaaaatttaataaacataattgggagtacataattgctcaaaatttaaattgatttactaaaaaaattttataagatgtgaattaagactttatttaaccagtatattttataaagtaattaattcacatcattcgaatcataaagaatcattattgtaggaaattatgtatcaaaaatatccttacaccaacttaaccaaggtcaaaacagaccttttacaaattcacgcagaatgagatttgtaatccctaaaacaattgtgtattagtttgatataaaaccatcgtgcgaatgatcgagaaatccttcgatcttcaacatgaatccctagcagctaggtttcctccttcttcctcaagctcgatcttaagcttcaaaaccctaaacctttaacctgcaatccaaacacaaaactagagccccaaaacaaaaaggatctagatcaatctttgttgattagagataaacaaaaaacacacaatgaacacaagagatttgatcttcgagtgcatcctaaaattagagctatgtccctgtcaagctcgcctcagagatgcttgatcgttcactatcaatcatcaacaggttacaagaattagatggagattccagctacaaatcacagcaggtaatctcaaaactctctttctttgttcccttctgtttcttttgcaaagttttctctcaagctttccctctccaactctttgttttttttttcttttttctgggtctctctcctcaagctacttctctctcttacttagatgtgagtcttgatcgggtagttttgaacacgaggtctcattccttttatagagatatatgttattagtgaagagtagattaattcgttgctgagttggatagaaattagaatgttgtaactgattttgtttttgttgtagctctttcattatgtttgtaactgtaataagtagttgatagtgcttgtaagggattgcttgtatgggatctgaaattggatggatgggaaatttggaagaagtttaagaaatggaattaatgtatgatatggtgtgatttaagcttaaatatacttatattagtagagagtgattgcataatgcttatggagtggatttcttttgcataaaaatattatttattgtgtagggactaatttaaaacaaaataatttggcaagtatgggtcagttttgatacattttagttggtgttgtgatacatgtttattaaattatttttgaaaaatcaaataatgaattacaagtggggttaaaattctaaagagcatggaaatttgacttatgttggcattacttacttgtataattctcagaaacattcaagcttttgataagacctttatttagttagtgtagattagtttatattatcatgattttaatttggagtttttgttattttaatagtttgctaagggactagcaaagttcaagtggtggaatttgataagtgcatatttgtgtatttatttatgttatttttctacattattgtcatcaaatcaactctttaaacctttaattagtgtattttgattagttaggattttggaaggctaatgtgtttggagtattttggaatgattttagttggtgaaaaaggtgaatttcggagagcttggttatctaggtagaacgtaattacaaattttgacggtcataaaagcagaaccaggcttagattgaacatgaatgatttagatctcgttctcatatttctataacatcttgaattgtctaattctgaactatattgaagaagttatgattaatttactgtcagagtacgagatacatttttgcacaggctacgaccaaggttttctaggctgctacctgtgtgtcttaaaatgaggttgggccactggccatattttttgggttgcggcccacgaggactgattatcctgaaatgaaattcaggcagtgacaaacaattttccaagtggcggcccacgacgctgatttgaaatttttgtttagtttttaattgcaatttcagtgagactataagggcccatttattaggccttgtaagaatcgtattgtattaaataacaagtaacactatattttgaaaaaatattgtattgtattaattattacaaccataaattttaatttaatataaattgtattatttaatacataataaataattcgtatatattaacttgtattagtgttcataaaaattaaaattgaaaccgaccatcaaacccaccagaccgtagccgaatttttggttccacgtcatcaccgaatttggcgctcgatttcagttttggtttttttgacatggcagtcggtttcgggttttgaaaaaaaaaatagttaaaccaaaaaaatgtcgaaactgccaaaaaccgtaataaaccgccaaaaaccgtccaaaactgccaaaccgaaaaaccactaaaagttgtcaaaaaccgtacggtcggttttatatggttataatttctaaacggttaatcacaatttttctaaaataaaaatcgtaatcgatcggttggttatagaattgtaaaaattgaccataaccgaccgattttcacccctaacttgtattataacatttaaaaatggtctgaggttagggaccccagccccagtcccgaaccctagacccgtacctggaccagaccagacccgaacccatacctgccctcgaccctagaccccaaacccgaaccccagacccgagccccaacctggccccagacccctacccaaactcgaactcgaacctaaaccagaaccctaaaccctgcgcaacgaaccccaactcagacccaaaccacaaaccctggaccttaaaccatgatccctgaacctcagaccccaaacccaaaaccccatacccaagaccccgacactaacctcgccccagaccctggtctccgaacctagacccggtctcggtcgatctcaaacccagacccgaccttagtctctagaccctagaccctagaccctgaccatgaaccctgaaccccgatccggacctagacctagacagggttcggagttagggtttagtttatggtaaatataatataagtttacacaagctcttaatataagccaatatcaaactaagtaatatattaaataaattaatataatacaatactatacatcacgatacaacataacaaacaagccctaaaagagttttttaaatttaattagggcatcatcattacgttcatgtggagaaaaactgaggagctttggagaaaaagaggatcgcatcatcaaaatcatcaatctattttcttttctttctccttaaactccttgaataatgattatgtcaataattgttgattatttttatggagtaatttttcttagtgtaaaggctattttaatgtcccaaacacgattttcattgattacaatattttggttttttttttttttatttttaattaattgaatatttcgtatgttttcaaatttaattttttttattattcccttgttcttgttcttgttggtagtgattttatgattattgattatgtcaaagtagttcttaattgtgatgaagcatatgatttaagttaaatagattatgcttgttgatttatttcctagaacaatctatctatattaatcttaatgattttgctaaaatatattgtaattttccttagattttttttttataaaaagaattagtcaataacgttttccctttgattaatttacatgtgagagattgagataattactatttttcttttttgttatctacgattgttatataatatgggatgaatagtaaaaatattgttaattgatgatataataattatttagcggtggtgaattaattcttagctctcttttacaaacattaacactaatatttagttctttccttattcttttagcttatgctctttgcctttaaaattaagtcctcgtggaatcaacctacatcatctattatactaaagtaattggtaaattttaaaaaaaataattagtaaatttagtaaggcttacaacacacattagacctttcctggttaataattattatgtcatctacatacatgagatatatgacattgttaatatttgtttgtttgtaatagtaacaactgtcacagtagcttcttgagaactcttgtttcatcataaaggtgtcaaaactttgttaggaagacttttgacataagccaccaaattccatcttgtaccgtcgtaattactagtgggacacaccaactgactactaaatatcaagtagactttcaatacagggcaccatacaaatcttcaatcgtgaggttacactgaggcaaattaccttaagaggattcattcacacctaatataccacttgtcaaggatctcacggttttatttttgggcaacttctcaaaaggtctcataccaacgaccatccttatatacccataatcattctcacttctagccaatgtgagactttacttgcattc

SEQ ID NO: 33421 - DNA, 992 bp, Cannabis sativa
aaaaaaaaaaaaaaaaacaagtcaaaaacaaccttaaaacaacttaacaaaaaacatcaaaataactataaagtaacaaaaaaataactacgaactaacaaaaaaaaaataacaaaatattgacataattggaataagcaaaacaatatcaactccttaatattgtttgtattgcgaatttttttacttaattttgacaacttatttatcttttgtactattacattattttttttttcataaaatttgtagttacaattttattctttcaactttttttttgagttagtgataattaaaataataatttattttttaaaaagttaaataaataattacattaataatagatataacaaaaactaattattttaaaatggagtatataatataataggtaatatacaattaatatgtcaatatttactactgcacatcatgtcaattaaaaaaacgaaaaatcttatcattgtattttaagaaaatgtgttaaaaataaactaaatatatgtatctacatctacgaagcaacacacatacaacaaaaaaattatcaagaataaactaaaaatgtacaccataaaaagtacacatgaataaaaaaacaattgaaaaattatgaaaaccacttaaaaacaactaaaaaataacataaaaatagaaaaataaaatgcacatacatacaacaacaatattgttggaaataaactgaaaacatacacgataaaaaatgcacataaactaacaacaactgtaccaaaaaactacataaaaataacagaaaaacaattataaaacaactatagaacacctaaacaacaatataaaataactatataataacaaaaaaatagctacaaattaacagaaaaataacaagacatcaatcttgttaaaataagcaaatcattcataaattaactctaaataaactacaagacatccaaaaaaatatattactttttataaatcatgtaaaagatagaaaaata

SEQ ID NO: 33422 - DNA, 1520 bp, Cannabis sativa
  modified_base (735)..(737): a, c, t, g, unknown or other
  modified_base (1286)..(1291): a, c, t, g, unknown or other
gcaacaagtggcattattatcctaaaagagtcttttgatgaaactggagagaaagtctctttaatgccttatttctgagtataaccttttggtacaagacgcatcttaaacctcaccacattaccatatgcatccctcttggttttaaatatccatttacaaccaattggttttacaccttttgataatgggacaacttcccaaactttattgtgttgcatagacttattctctttattcatggcatcattccacttttgagagttcaaacttttcatagcctgataaaagttgatcggatcagcttccatcacacaataactttcctcatgttcctgaagatatactatgtattcatctggattagtagtattccttctttctctagtggatcgtcgcaaaggcacttgttcttgaggttgttgattttgtacatctagggtttggtgggctatgtttggttgctcttgatctaaaatttgatcaatatcaggattggaattaatcctaaacattgtcaaaagcatctattggaatagaaatcaattcatcttcaagaagagtagttgattccaaatcctcctaaaaaacaaagttccttacaatacttctcccctaaaactcaatatcctcgaaaaacattacagttgccatttaaaaaatattccttactttgggatcataaaacttaaaacccctagatagctcaaaatatccaataaagtagatgctcannnttttgggttctagcttcttttcatttggcctataaggtctagcctcaactggacatatccccaaatgcgaaagtatttaagactaggctttcgtcccgtctagagctcataaggtatttttgcaactactttagtttgtaccctatttaaaatgtaggttgctgtctaaagtgcctctccccagagtgattctggtaaggttgaatgatcatattccttaccataaatttaagagtatgatttcatcttttagaaacaccattcatgctaggtcatcctagcatagtgtactatgagaaaattcaacactcctctagatatctggaaagaagatcctcgatgttgttcacttgatccgtcatatctaccatagtattcactaccatagtcagacctgacttgctttattcttttgctaagttgattctcaacttcagacttaaaagatttgaacacgcccaagacttgagagttttcatgaagtcactactagaaaatcgggtaatagtgacacacattgagtaactctaaaagtgtatagtgacactnnnnnncgcgtcactaatgagggtgactggcaaaacagtttttagtgacacttcacacgtgtcactaaaaccttttacattcattttctacgcgtcactataggcgtatagagtcaggtttttgtcggactgaaaatgtattaaccacacacatgaagtgtcactatatcctttttttttctttttctttttcttttttattaatatttttggagatatagtgacacacaaaaag

SEQ ID NO: 33423 - DNA, 996 bp, Cannabis sativa
caagaagaggtactccttctcctccgctaatgtcctcattctcattaacctttgaacactgtccaatcccatcatttagtacattgtggaagttaatactccaaaagactaacaactttaactacttatttgttaagttagttagaaacagtttgccaatggtgtctgttattttcaattactcttttttgaatgagctatggtttataaatagttcatgtcccattaagctaacttgtaacttgtatagaaaagtctagagagagagcaagaaagagaagtcaagtttttcgggattaagaatttgagggtgtactcgagattggggaagaactgctaatattcttcatgtttgagtacagagagctctattgatatccaccattggtgtttgtacaagttctactcactcatattggattcgagatgatgattctcagctggagtatagccagggatcgatttgatctctaggaccggaaccatgataaaactaggtgttctctttctttaaattctatctttgtttgtgttcattttgttgacaaaaagttaatcactcacttattttgatgacaagcaaatatttgattattattttttactaatcttttcttaattattttgtaggtaaattcacaaaatatcaatatatacttggtaaagtcaaacataatcaaagaagtagattcaacaagtatatcaacttcttcatacttcataagagcaaaagtttcatcaaaagatcaagaattcaaaatcctatccaaaagaggacttcaaaattttaaagcaacctgaaagttaaagtcaactctcaggaaaagtcaactttggatcaaactatgtaaatcaagatattaagctcatctacatcaagactacacacaatcaaatggtataagtttactttgtccttgttaaagtgatttgcatagtacactaggatttataagttcaaagtttggctcgctaacttgtgcgacaagttatttc

SEQ ID NO: 33424 - DNA, 4209 bp, Cannabis sativa
  modified_base (187)..(191): a, c, t, g, unknown or other
ttttttttttgaattagaaacaaattacataatctatattagttttgttaaaaaaacattattttaaaattacgtcaatattctatgatttattgtgtgttgttggtatataaattttgttgtacgttatattttcattttattatatggtatattattattcttagatggtatttattttttattnnnnnatgtataatagtagtatataattttgttagtataatattgaaaatattttaatatgtgtatctaattttattggcatgctacatatacttaataattatttttacatattttaattatatgatatattaattattttcatattatttaattaatttctaatttattatatacgatagtagtatataattttattgtcatattatatattttaattgtgtagcatataatttgaacagaatatataatatatatattagtaatatatatttttatagtatatgtataattatacaatatatcatttttttatagttctattttttattctacttttgttgacatgatatatatattttattagcatgttatatatttttatttttatttattatatatatattattgtaatgtatgtctcttgttataggttttttaattttaatgcatagtatatcattttattttagattatgcatgtttagtttttattttattatatataaaggtgtgatgtttaattttataagtatgatataattattttatgcctgtatataattttgttaatatagttatatataattttttttttaataatagtatattatattattttattttattttttattgtaggtatacttgttttgttatatggtatatagtttttattgtgtatagtatagtatttatttaaaatgatatttagtttctattttattatagataatgattatgtataaatttttcggtatgtatatatattttaatagtagtatatataattttgttattatgatatatattttttaagtattaatttagtatttttataatttatttgttgtatataattttattactatacagattaatttttagtgatacgatatatgaaatattattttatatattaaatgatctaatatatttatttatttttattactatatactaatataaaatattaaaaaaattatataacttaatttaattattataaatttttttaaaaaaaaatcaatatgtagcaaatgtatttttactagttaatttattaatttagccattttattaattattttaaaaaataaatatttattaacttaatttctaaatttaagctaattttgcatgccccagaaaaaatatgtactgttactactgtatctaaaaaaaatttattaaaaggtgattattaattttttccaaaaaaaaaaggaaaatatttttttgtttgaatttgtgtggcaattttaataaatatatttattcttcttaaacaagtcttctcatttgtctcgttatcatgcaattagtaatatatatatatattttttttaatataatttgattagttaacaagtaaacgtaaagaaagattatattatactacgaaaagggttaaagctttgtttggtgtgattggtttatcatgttcttagacagggaggggttggggaagatattgcgtggtccacccttaattgattaaacaagactgatcagagcttgtccttcaatctatcgacaaaatcatacccaaaaaaaattgattaaagcaagtggggtttgtcttttggtcaatataattatacatatttgtatatacttttgcagatattcctacacattcccatttcttgacaccaaaggaatagttaatttggatgatgagagagtgggtcctctttttgagcataccttccctccctcacttgctccttctctctcctttataggcattcctaaaaaggtacaaccttttccttctctatctgcctctctccttatgaggtttatttccccaaagaactctaatatgttcaaattttgtgacttattaagggctacaactattgtttaaggataggaatattcaattgtataaaaatagaagttgaggacctaaatgtaaaaacaaacaaaaatgaatgttgagttaatttgaatacgtagtatcatttaatagtaattactaattgtagtgtttttatatgtatgcagataattggttttcctttctttgaatctcaagcgaaatggatagcacaactgttgtctggaaaaagaagattgccatcatgggatgatatgatgcaatccatcgaggaattttatcgctcaagggaacttgctggtattccaaagccaaatactcatgatattgcagattttgaggtatatctttatattacatcaccacatcacctcactacctttgttttttgttgagtgtagaatacaactactattatatatgattaattaatttttattagtacaattaatgcaccgttgatatcaacactttgtcacatatgcttgacttcacttcttctagtgatcttattattaattgaccccaaaaaaacgtaggaagcatttgaatgttattttcacaaatctattcgaccttgaaaaaatacttttgttatctagcattttctgctttatggtctaaattaatatattatttataatcaaaatgttagacaattatatatattgcaagaaatgaaaacatcatatttattaaaatgaaacaagtaaaccccaccaaattaattaacaccatgaacaattttttctttaaatacttaagagtgcagtagaggttgtgtgactcgattaactttgttctggactaatttgatgattataattgaaatagtaatcacgagtatgaatatatatatatatatataaaaatatatatactagtttataattaaagtgaattgaatgatatatagcttgcattctaagctggaaaatccttttatttgcagtattgtgacagatatggagactatgttggatttccacacttagaagaatggaaaaaacagctatgcatatcatccttacaaaattatcaatccaacttagagacttacagggattcatatgatcaagatcaagagctgcttaaggaggcttttcaaagtccacatttcactcagtttcttgcagatcaccctcaacttcttgctctctgaagatgttatagtgattttttatttggttaattattatgaatactatttttgcttcaagaaaacattttcctactttttgtacctttctcaaggaagttggattttgggctatgggtttgttagtagactatatattaggaccattggcttaaatagaatattgcagcaaaagctagaaggcaatacatttagcatttgcttattctcttcaagaacgacgaagaaagaaaaagaaaaaaggtccaagtttcctatatctaaaaaggtccaaacctctatatgtttgttataagaaattaaaataaatctactgtgatgtgtttgagatttgattaaatgtagtccatggaatgatttaaattttatgtatgtgagctaatatccaagtaccgaaatattataaattggttatatatattataaattatttattttatccaagtaccctaatctcataaataaacacctataaattcataatgtggtttcaatttacataaaataatgagtcaattggtgacaatatactagtgggtaatgtgatctatcttttactatatgaaaattagcctatttaagattcagttcttgtccaactgttaatgataacagcaattatattattatatttcatttattaattattaagacaattatgaatagttggtaagatttaacatagtagctggtttgcccgagaggttaagggggaagacttaagatcttctgcacacaagtgcgcatgggttcgaaccccatagccagcaatcccacataatcttctgctttgccaatctatgttatgtcaacgaataaaatttctgtcactatttgcagaagtttagatggtcttttgatgaagtattggtggcttgagaatttttttagctttgaagtcttgggatagtatagtatatgccaactgaaatgtgtgggagggtgatccttgttggttcattttccatagtcttacacacattataattgattaatcaaaatcaattaaatgagtctta

SEQ ID NO: 33425 - DNA, 1678 bp, Cannabis sativa
tactgaactttgtggtgaagacaccctaaaatagaatacataatttggctctagtttatgtaccatattgtagagctcgcgataagctttaaaacggtatatagaacgtctaaaacggataccctagtgaaaagttatggccaaaatacgaaaattggccttccccgatactgtcaactggaattccggttggaacagccctgaaccaatcggattgcggttgtttgggcagatttaacacaaaaattctcaaactttaagcccccgaaacctactcaaatcttccccaatcaccaccaaactttccagagcatctatataccacataaagaatatataccatagcttaaacacaacaaaaaccacatgaatcaaaatccaccatttgagagcaaagcttgagttcataaattcaaactttctctagacttgcttcagctgcaaaagaaatccaaaaccagctactacaaccgaaattcaacctatagaatagcttctaactaaaaccaaaatatatagaacctaatcccccaatttgaacctaaaaacccaaaaaaaaaatcctcaaataacttagtagaacttgatagaattaaattaaggtgttaccttgaggttaagctcctagatttcagctagataatccttgaaaaccaaagatattgcaatgaaattgtgctggtcttccttggccgaaaatagagagaggacaaacaaaaatggagtttgctcttcatttgattgttcataattattacttggtttaaatgaattaatgataaaacctaaattatattttatctacaccagctgccaagaagaggacatgccacctatccataacaccacaatgaaaaaaataccctcactaacatgcttaaatggtaaagtggcttaagggtaaaatggtccaacaccatagccccgcctaatctcgatattcaaagtatctcaaatattttttcccattaagaattaggctctaaacttacccatgtgactctaatggccatccatcgcattttctatcgtcaccgaacaaaaattataaaaattgcataatttatatctaggataaacaatactcttagagtttaataaaatctccaaaattgagaaattataactctaatgcccacttctaaaaatgaagtccacaacaataaaaaatcatatataattataaaatatcaataattaatgctaattgcctttactaatccataatttaacatgtggtcattacagttactatttagtaaaaataatattgatgtttagttttatgtttaaccttttattgcattattgcttgatgtataatgtcatttctaggttctacataagattaaattatttattttattttcaagaacttgtatactcaacatataatgaactttaatgttacatcatttgtctcaactttgtgaatcaaaggtacaaaatagctaaacaagcatatggatgactcttaaaacctttctctttttaccattgattacacactttatttgctttcttataatatttattaccaaaacaaaaattctcaaactcattattgcttgtgtttatttttttacaaacgtttttacctataatcacctccctgtggaatcgaccgcccgatctatactacatgtaaagcccgcttagttaatttagaaattagcag

SEQ ID NO: 33426 - DNA, 4341 bp, Cannabis sativa
  modified_base (57)..(74): a, c, t, g, unknown or other
tgttttcgtgttattttttggaaaaccgtaaaaatgtaaaaaaaacattctttgaannnnnnnnnnnnnnnnnnttacaaaaaatagtgccttatgtaaatattcctaaatgaaaagtaaagtatttgatagggctatttaaaaaatattgggaaaagaaaaagtagagttttgatatatgtatatgtatgcaaattaaattgtattaaaatatggtatcttttaaaaaactaaaaaatttaaaaaaatatgtgataaataatcatagataagaagtattaaccttgacaaattgtcaaatgtaattttttaaattattagtgttatactcaaaaaaatcactaagtataaaattttgaagtacacttaaaaaagcatattgacaagaaagcaaaatcgactcacgtaaagggacaaattgatacgaggaggagtcaaggctcgggttaagctccttggcgaggagctccccacccctagctccccgccatcgctccgcgatctgagtgtgtccaagggagttggagctccccgctcctgtcactctccacacgcaccaagggagctccccactcccgtcattccccacatgcaccaagggagctccctgctactccttctctctcccctctccctcactcactctccccgctccctcactctcactctctccttgctccctcactcactctccccgctccttcattctcacactctgcctgctccttagctctctctcctcgctccctcactctcactctctccccgctccctagctctctttctccccgctccctcactctcactctctccctgctccctcgctcactctcccttgttccccgactcgcctaatcatcacctaacaccacctactccatacaagggagcaatcacattcagtgtatgtatgttacaacggagtgaccaccaaaaaggtgggggaaggagttgctaccaagattaaacaacaagactcatctctcataaacccatcacttagttatttctcctaagtgttatactcacatcatgaatttgctaaagcatgcaacctctaaagaagtagtagttgcacgacaagtacaagtaatggagacactatttatctcattcagagtactaactggcacccgacaactaccgcaacactacctgtctgacgtgatgatcttaatgctataaaagtaatcttgtcccccaacttttggaacacttgtattttgtagctattagagctccctataaatacatctctcttccattgaagaagtggttggaaaattattcttgtaaccgccatattaagagtaatagaaagttttcattttatctctactttgagataacaatttgaatttatatttcatctttttcttcatattaattctgagtttgattttccaaccaacaagttagttgacgagttctcatcgtcaatagtttggtgtcgtttgtgagaacgataagatctagctacgttagttcctaaaccattcactataagtttaaagatgtcaacaaattgccatcgtctctaagaaaatggggttcactcaaaagaaaaccatccggccactatagtaagagaacgtcaacctcctatcaccgaagagggccaaagaaagggtaaccaaagtgtggaccaccacacaaatactcaaaaagagcccacagaactacgtgactcgataataacatcagtagctaactccatagatataattattcaactatcgagagggccatatgcggtacggtgccttccaccgtttgtgccaccaaaccctgacactttgaggagtaggcccagaaaggaaaagaaagcatactcagtgagttcaagctcttgagcttactgctacgaggaggaaataagcaacctctgttggaagaataagagattagaaactattgtgactggtatgcaaaaagtgttgagtggcatactcaaaggcaaaggctaagcctcacactttcgtcacaaaagccaccgagtggggaacgagatctcaactacatatgttggcaaaggtgattccatgtcatccactaatagcaacccgagagatgaacacggaaggagcctgttgcgagacaaaagcttaacaggccaattgagacaactcgagcctacccaccatgatgggatttcgctgagagaagcaccccatagcctatggaagagacttcacccaagaagtctattgtggtatttttgacacgcaagtatacgtatcgtaaacaagtaatagactcacaaaaagtaaggtcgatcccacaagaattgtagtcaagtactttaaaattaaatttttacttctgattggctatatcaaatttaagagaaaatttaaaactagaaagaaaaaaataaaaacaggatgcaagtaaattaacgatgattaaaagttagagtttttgattttaattgtatctatcgactatggtttaacatgattcaatttctattactaaattatatgcaatagcaagtttagtcaagtaattatagtcttctcagatatataaatctcaattacatgcgaattttctactctcgtaatataatgcattaaatacaaaaatcatataagttatccaaaccatataggtactctcatccgatatcaaaatttggttctatttcactatagcataattgacgctcacttctaagattttgcatcaaaatcataaatatttaattggtgatcaagaaattaaaagtaattaagtacgaataaaatagaatacatagaaattggaagaaaattaaatcacattaaaaccataaatcaatgtcaaataatatccatttaatccctataaattatttagctactcatgttcatcatagcaaattcacacatattaattcagaatagaagaagaaaatagagaagaaaggaatgttaaaaacctcgttgaaaaagccttcgtgattgattttgctctccaattttcgtactcctcaattgcttctaattaagagtttctacgttttttgagctctgaaaacctactaaaaatactaataataatgtgtttatataggctaacaaagttacctaaaatatactaaaaatatttaaaaatttaaacttaaaaagaaaatcgtaactctacttgaaaagctatttttttttttttttgggtatctttttattttattttttaaaaaaatttcatgctacgatagctgatagtattttggccataactctctcgatattgctcaaaattagatgattcaagatgctccggaaagttaaaagagaaatctagaatttttatgttttgactttttccaaaatctgatcaaaatatagtcgaattcaagtttcagctttattttctttcacaattttctctattttatagatcatctttttcggaaatttgaccaatttatacattccaagtgtcgaagtctgaaattaacgaaaaataagtgtaattatattccaaaacatgacaataaagaagaaaattaactctaaaaatgacataaataataggctaaaaatatcctaacaaggtctcatactagggggcacctcacctatggctccccattaagagcaagataagcggaaggccttatccgtcagctttggtggtaagtcacacactattcagataagaggagtaccttccacgagccctatgcaaaccacacaaaatacccaagttccacttgctaactcttgggggaggatgagcgaaaagatgaaggagttggaggcggaaatgcaagacctacatcgaaagatagctatcgctatgaatgggggcttgaatgatgacgaggagtttgatgaagaatctcctctctcgagggagattcaaatggtgccacttccaccgaacacttcaaggaaccacagatgacaccatatgatggtataactgacccaaagtaccatctcgatgagcttaaagagttgatgaagatgaaaaaggtgtcatgtaaggcaaggtgtcaatgttttgtgatcacattaaaatgattcgcgtataaatagttcagatggctaggactaaggacgatcacatcttggaagtaattttcagatgaatttctctaacaacatgaggttgcatgcgataacattatgcctgtgacaagtgtcactaatgtgaagcaagggggcaagaaagtttgcgaagctacatccatcacttcaacactgaagttaccaaagtagggaaggtatataaagatgaactcaagtttgtcatagtcgttggggtacaccctgggagtggactgtgggagaatatgttgaaaagagagttggatgtgttgggttttgtgccctaaataaaacccattac

SEQ ID NO: 33427 - DNA, 1984 bp, Cannabis sativa
  modified_base (1040)..(1047): a, c, t, g, unknown or other
  modified_base (1096)..(1097): a, c, t, g, unknown or other
ggcgtggactatgccagtgaggaacttactgtcgcggttcctcatagaaggcaaggtaccttgggtgttaggtgggtgagccctccgtctaaggttactaaggtgcgcctgcaggatctcgaccaggatggctactggggtgaattgaactgttacattcccacccacaataatcgacccacaaaccttgaaaagggaatgtgcgcctggtcaggtgctcatgcctagcaaggggcattgttgcctttgcactcgtactttaagaatgtgaaagacttcttccacctctacccgacccaatttactcccgagagcattaaatatctgtccgccctcttcattctttatgcctcctagaagtgggagatgccttctctgcacgaagttagctggtttctttatttgaagtccacccctaagcaaggctggtcggggtacttctatttctgtcaatcggacttcaagttgttgacgagcaccggggataaggccatcagcaaaattgggcattttgttgatgattacttcatggtttatggcatgggacaacccacacccggttctcgcagatccccacatatcaccgccctcccttcactattgctcttagtgatagagctcaagagcttgctcagctaccgaggcatgaccggaatatcattcaattgacctccgaggacagctttgtgaagtacggactctatccgaaggatttcattcctaagctagtgaaggggtgaagaggatatctggtgctggacgggttaagggagctcataaggagaatgagcagattcaactaaagcgtgaggctaagttgaatagaggtgtaagggccaaacagtatgatcatgagcccttgaatctcatgagcccttgaatcctatgagcccttgaatcctgaagatgaggctgaggaagagcatgtgactcggctcaaaaggaggaataaacttccgacccaatccaggtccgttaaacatgcaatgcgcattagggagcaaaggtcacatgctactttattggtagtattttcttannnnnnnnccattccaataccttggtactagaacaagttgcattttttcatcatacnnacctaatttgtatgctccggattttaggaatttgaccaccttatatggtccttcccagttaggtccaagtacacctgtcaaatcgtctttggtgtttaaaaatacccttcttaggaccatatctcccacaaagaattttcgagccttcacttgtttgttgaaatactgaggtaatttttgttgatgggctatcaactttaagtttgctgtggttcacttctcttcgatttcatcaagggattcggccaggagtacgtgattggtatcttggttatacgtcaatctcctgtgagatggtggctcgagttctacgggaagcatagcttcatatccatatgccatgacaaatagagtctgtcctgttgtcattttctgagttgttcgatatgaccataaaacttcaggaagttcatgcggccaatttcctttggcatcttcgagtcttttctttagtgtacccttcaaggtcttgttgactgcttcaacttgaccattcgcttaaggatgtgccactgcggagaagcttttgatgatgtcatggttcgcataaaaatcaatgaaggattggctgtcaaactgcttgccattgtccgaaactattttgtacggcaatccgaaacgacagattatgttcttcccaataaagtcttgaactttctttgatgtaataatttcgagtggttcggcctcagtccacttagtgaagtaatcaaccgctaccactgcatactgcactcctcctttgcctttgggtaatcgtctaatcaggtcaattccccaaatggaaaagggccatggacttggatctgagttaactcgttgggcggagctcaaggtatctttgaaaatctctggcatttgtcacatttcttaacataggcctttga

SEQ ID NO: 33428 - DNA, 1543 bp, Cannabis sativa
tgcatggcaagggtattactggcccacactgcgacaagacaccttcaacttcgcaaagaaatgccacaagtgtcagcgaatagccacatatgttaaccaacctccgagtaacttgcactctatcacgagcccttggccatttgcggtttggggcatcgacctgatagtggaattaccaaaaggaaaaggcggagtcaaatacgtcgtagtcgcgatcaactactttaccaaatgggccgaagcaaaggcactaacaaccatcatagcagccaaactgcacgagtttgtctataactccataatctgtcgatttggcatcccttacaagctcatctcagacaacggaaagcaatttgattgtaaggaaatgcgacaattgtgcgatgagttagggataaaaaaggcgttctcggcagtcgcctacacgcagagcaacgggcaaacagaagctgtcaacaagataatcaaacataccatcaaaggaaaacttgaagagcaatagggggtatggccagaagaactttcacaagttttatggtcatacaacagaactccccgatccacgactggtgagactcctttctcgctctcttatggatgcgaggccatgatacaagtcgaggttgggttaggttacctacgaagagatgttttcaacattgtacagaacgaagaaaaacagtcacttcacctcgacctttcaaaagaaaagcgcgattaggctcacctgaaaaatgcggcttatcagcagcgaaccgcgcggtatttcaactctaaggtcaaggagagaattctgtgagtaggagatttggtttttcgaaaagtaatgccaaacacgaaaaaccacgcacatggggtttttggagacaattgggaaggagcatacctcatcatagaaaaaattggtaacgcaacatagcgacttgcagaaatcgatggaactgtaattcgaagagactggaatggcgaaagcttaaaattttattatcaatagtactcgcattgtatcgtttgtactcgctatgtatttctacttagtcaatttatctacataaatattctaagtatagggggtatataacccactcactttatactattgattaatctatttcttataaacagttatgaattttttcgagcttttaaaatttttctaccttagtatttattacaccaagctataattaaaccgaaatcgagatgataaaaaatgcgagtacccgtgtacttcgaagatattataacataagtaaatatcctcatatccccaaagggatatatgttgttcaaaaaggaaataaacatatatttgtctaagtacaaattgcgagtacccttgtatcgcttaagaaagtttggcaaaagtaatattaaagtaaaaagctaagcattgggagtagtaggggcagttggagtggtagattcatctgcgaatttgctggcagcctcgtccacaacttcctcagtgttcgcagcattagcatcctcgaggaaaagatttcctccacctccttgggtctgcgtgggtgacatggctcga

SEQ ID NO: 33429 - DNA, 4461 bp, Cannabis sativa
agtgtatattatatattggtgtagaattttgagtaaaattatagataagaacttcataagacttagaaaagtataaattcatcataagtcttaagtggaatggaattaatgcatagctagagtcaatattaattacgaatgaatgagagagtgttaatgacttttttgctacttggaataattaaatgactggtgataataatgccattaagtttactttcacttgacttggatatttatctatatgtgtaataattatggtcatgagaggacttacttttttttctcaatattttctaaaatattattgatttttttataaatgaataagttaagtataaatacaatactcttcatctcaacttaaccacccattttttagaaactaggtgttattattcatataatctcatatacctaactatttagcttctttgttcttcatattagtaagttttgaatgattattatttactattatttatgtgttaaagtaatagatgatggatgattatatatgtaattaaccaattatatgtcttgttatgtaatagataatatagtttacaatatttcagagaattatatactatgattcgttattttgttaatttttttttttggttggtttcagaagaagatcaaaaacatgatttcggagacaattcctgatgaagtattaggaactattctaccaattatagtgtattgggtatactccggaatgtattgtctattggatttgttggtaggtaataagtataggctacactcaaaggaagaggaggatgaaaagaatgtggtacccaaaggagttgtgataaaaggagtccttattcaacaatttcttcaagctatggttgcaatcacatgttattatatggtaagaatcaaactacaatttaaataaaaactaacaaaattagatattagtagcttaacaattgttatttttatctaagaaacaaaagtattgaaaatatatattttttttaaataccttattaagctcatcttaaaatttaaggtccaacataatttgtttatgcccgaacctcaccctttgaaaagtctagaaaacactgcattttttttgagactgtgttttatagcattatttgtttggagtttgtattttataaaattaatgacaatagagtaatttgtggtataaatacctaaatttaatactcagttgcagataaaatttaagtttaataggggtttattgaaaaataccttttttatttatcaattaactaaatttacctttaattttatatttaattgaaacatatctctttttatatgtattgtactgaaaataccctgacataagggagtcacatggagagtatattgaggtgacaagggtaaaattagtaaagtgttttaaaaaatagataaaaataataaactttaaaaaagagggtaaaattaaaaaagaataatgtaaaaaaggtatagagtctaatttcctcttacccatgtgtcatttttttattggtatatctaaatgaatttttaaataaaaaataaaaatttaataacttagacgaatcatgaactactatgtggccattaacatgatacttaatagtcaagacacctacaaaaattaaaattttaaaaatattttaaaaatataatataacttatgtatatgtattattaccgtcaaaaattaaacttaagtattgatttacaaccgagaattaaatttaagtatttacattgtaaattactcttaaaaataaacttttagacccgactttactcaaaatattttttaatatgactatattcaaaaagcatgacaattaaagaaaaaaaaattgaggaacttctaacaagataatttgatcatactcataatttcttttggcaaaaattaggtctagaggtttactatttaaccttttaaaaaaattagggtctaaaagttattttttaagcacgaggtttaaataataataaagcatacagaatctgaaaaagtataaagttaaaaataacaaagataaaaagtataatttacaaacatacttgtgaaagcatatgtttcatattatcttttcaattgttttgtaggttaatataaatgatggagcatatattgtagagaaaaagactacttctcttattaatttaataaggcaattcattagtgctatggttgttttggatactgtccaatacttcatgcatagatgtatgcatcaaaataaatttttgtacaagcacattcactctcaacatcatcagctcattgtgccctacgctttcggagctctatacaatcaccctttagaaggacttttcgttgacacatttagtggtgcattagcatttttagtatctgggatgtctgctcgagcttccattttcttctacacatttgctactatcaagggtgtggatgatcattgtgggatatgtttgcccgggaatatttttcacgtcatttttaaaaataatactgcttatcacgacatacaccatcaattttacggaaacaagtataacttctctcaacctttctttgttatgtgggataaattgctcggaacttatatgccctactctgtggagaagagaatagaaggaggattggaagtacgacccgatggtaattacaagtctatatgagtctaaacaccattactttgtctctctctacacattcatggtgatataaaatagttttctcattttaaaatgtagtgaattagtaatataacttttctattgctacatgtgaagaagattgtttctccttcaaataatattttagtaatagggaatctatcattttagtaccataatgtttgcattaatataaacttaataccctattgttcaataaatactattttagttttatgatggctaccttcaaggtatattttagaactaattattaacaagttactatataacttataagcaaatgttactatatagttagaatcttagccaaaaatacacattgacggaacctaccttgcaaaatatcaaaataatctactcgaaaagtaggttatgatggtactagccctagagtctgaataatcgatggtgtcttaagaaaaagcttcttctaggtcttggatttacccacgaactcaccttaaaacattaacagaaatgcataggttatttttctctcgaatagctcaatccaatgataccaccccgaaccttgaagtgaccgaatctcacaaaatatgcagtcgaagccacaccaagtttgattggtgtatgcgacggctagtgacgttgtattctggcaaaccttgcattgtgaagttgtcagtagacaacctcccaatgtgatgactcatgtaagaaatagatcatcagtggttgataggtgagttttatgctcattttagtagttgatagctgttttgtgtggttttacgattgtttttgtgttgtttaaggtttggaaggtctcaataagattttgagatgtatacattgacatttatgtaatatatattttgaaattggaattcccacctaaccctacaatatttagggaccataaactataacaattgctatgtaagaaaagggacttgaactgcataaactgacatattaagtcttgtttttacattacgttagtatatgatttaaaccttagccttttataccaaatgatatcctaaccatttattaagcaaatatatattctcaccatttgatgagacaataaccaaagaaaacacaagaagaattctctacattggtcctaattttgagtagcgtcgacaacaattagcctcctaattaaaagagcattgctattagataccataataattaacatccttacgagggagcgtcctataaatgattaacagttttctataatcatcattaaagtaaaataaataacatccgatattgaactatactaatagcgatatgacatctatgatgctctttagcatttctctagtcaagacgcagagcccatcttaattaggttaattaagagtaaaaatgaacacaatagtttaaaataaacatgtctatgtgtcaaggaatagtaaaaagaaaagtaaaaccttgtgtttctaagaaaatttcataattctcactatgcttataatatgatatgatgtaggtttagaccaaaattactttgctgaaataaacagctggttcgcttaagttacctttacatcgaacaatctcacgcagtgatccgcaccacaagaggcaagctgcaaactacattcgtcgtcccttttctcggggttcctccatgctaaacgattcactgtagacacgtgacacatgacaggatcaagctgtgcaaatggtgcaacagttgcagcgggggctcctcctatagcgccatcgttagttcggtttatggatagactccatagctcaatgagtccgttttccaatccaactgctagtaaaccgttgtttctgtttttg

SEQ ID NO: 33430 - DNA, 1178 bp, Cannabis sativa
gtacctcatactgttcgacatctagaaaaaaaattcatttaattttttttatgattgtgtacgttgttatttaagacatttgataaaattttgaaaaaatttgataaaattttgaaaaattcaaaataatttacaatatagaaattagtgttaaaaaaaattctatactattcaatttaaaatttgtgtgtctccaatatagtaataaataggtatttataatttgcacaattaaaatgtaaaatttaaattatataaatttttgttagagttatttatcaaataaaaattaataaaacaaaagcataaataaaatagaacaaagagaattaggcacatgcataacctagtattttataataaaaatatcatattttgcatatacaacagcaatcaaatttcaagctagcggtatatttataaagagtgcagcattagaaagtctcacattgctaatatgtgaaaagatagtataatatataagatctataagttactcttctcattaccagttagattttttgccaattggttttgagatagtacccttaacgactatccgatccaaaataaaataagaaaatccgatccaaaaagtagagccaaaagtcaaaaagaaccacttgtaattcggggatagtgagccactaacaatccgaaaaaactgatccaaaaattagagccaaaagaaccacttatgattcagggatggtgaaaaaataatagaatatataagatccataaacaactcctcccattgtcaattgtttacgacatgcatcttacaattctaacatggagttcaatagtgtgttgaaaaaaatacaaattattataatatataaataatataaatatattcttaattaaaatatatattatcactaattacttttctattctaatagaaaccaaatacaattttatgaaaataataattgctcaagtttttatattggagaccaaattactagtcgaatatatagcttttggtgtagaatactaaaccaatacaagaaaacaattcaatcaatacagtcatcaagagaatgaaaatattcaaactaaacaataaaactaaaatcaatatcgatcagaagagagtgtgagagattgatctgataaaacaaccctttaacaatggttggtttctttattgaatctccaaagagatttta

SEQ ID NO: 33431 - DNA, 3368 bp, Cannabis sativa
  modified_base (1335)..(1343): a, c, t, g, unknown or other
tgtataaatgtttaatgggccggcccatagtatttttgtaattttttttccttttttgtatttttttgtttttttcccattttattaatagtaattagcgaataaaataataccatgcaatctaattgagatatcttttcattggagacacgttcatgattaaaattaaaaaaacaagttaaataatcagtcgtttaattctcagatcatttaacaaaaaaattaaaaataaaatcagatgaaaaaagattgcagaattacagttaatcttaaaaacatctatgttcattttttatccactgctcagaagacacaatgttgtgataattacaacatgcaagtatatgtatcgttttaacaagtatcactcacaaagagtgaggtcgatcccacgagaattgtagttaagtacgttaaaattaaactcttgcttctatttggttgaataaaagttgagataaaattaaactagaaagcaagaagaaaaataaaaattaggaagcaagtaaattaatagacaaattaacaatgaataaaagttagggctttcgatttcaattatatctactgattattgcctaatatgattatcttcctattaccaatttctatgcaatagcaagtatactaaggtaatttgtagttttcttagatatataaatcttaattacatgcaaattttatactctcgtgataaattaaacatgtaacagacattaaacacaataactctataagctatctaaaccatataggtactctcgtcctatatcgaaattcagttctatttcactatagcataatcgacactcacttctcagatctcgcatcgaaatcataaaacaattaattgatagtcatgcaattaaaagtaattaagtacgaataaaatgaaatacatagaaattaaggaaaaaataaatcatattaaaaccataaatcaatatcaaacgatcttcatccaaatcctaatgaactgtttagctactcatgttcattgtagcaaattcacacatattaactttagaaaagagaagaaaataaagaataagagaatgctgaaaacactctgagaaacgcctctagtattggcttcaatctccgaaattcatactcaattgactgctttgatttccttctaaatttctcctgaaaactattgaagtccttcttttatagccaaaagaatgataaaaaaaaagcgctgaaaaaacctattatgcttaggattagaaggggcagtaaattttctattgcgttgactgatagtgttttagccataactctctcgatattacttggaattagaagattcaagatgttccggaaagatannnnnnnnntctagaacttttatgttttgactttctttaaaatctgatcagaacatagtctaatttagatttaaagttttagctttattttcttgcacaattttctctattttatagttcatctttttgtgagatctttttatcttttttccatcttattcttttgatattttctaatcttcttctattttaaatctgtaaaaataaaagataaaattgctccaaacaagagtagaactaaattaaaaacacactaaaaattaacctaaaaataatactaaaaacaacctagcacacaacagtactgaaactattgcagcaagttcattcaacctcgtagtttgagcactaactattatgcaaggtacacacttcactattaacaactcattcagtcccagagaacttgttactctcaaccactaataacgatttgatggcgaaccatcaaaaaacaaagaagaaccaacaacgaaataaagcaaaataaaatcatgtaacacaaacaaagctaaaatactcaaaattatgtcacagatacaagactaaaacactcaaaaccattacacagagacaagactagtcacaatagtaaaaatcacatcgcaatagcgaaatactatcccgactaagccgcacctatgcttgtcggcctggccagggaaaaaagataacctcttgtagcttgttcgataaattcagtacgcaagtatatgcaatcaaatagtaataaaataataaataaagatcgttcccacaaaaatagatttaccaactaccaaaaattaattcctatatctatttgattaacaattaattgatttcaagaaaagaaaaacaaaaaagtaaataataaaaattcataatctaaaagagataacaaaattgacaaatatttcaatagatgaaaatcagagcttttaatttcatcatctattcactctgacatttcacaataactaaatcttaatctatatacattttttttacgtttccgtaataaatttaaacatgtaaaagatattaagcataaaaaatcataattactacacaaattttatagctattctcatcaaatatgaaagtttatgtctaaacaattatattaaatttaattatcacttttaagattttgaatcaaaaacttaaatcatgtacatggtgatcaagtatttacaaacattaaacataaattgcataaaccataataatgaagaagaaaatcaagaaattacactaaatcacaatcaaagttttaagaaactcaatttaaacccttgaaaaagtatttaattcatgatcatggtagaaacatcccttgaataataagaattagacatcaaacataaaaaaatagagaagagaaaaaaaaataactagttttaagtcttcaatcttgatcaatccttcacctctatccccctttagtatttttttttatgttctaatgttaatttctcacttttcttgtgattatttggctgaaaacttaagtctaaaaatcttaattaactatgaaattcctaactataaggcccaaaccatacagatttgtacttgtgtggaaaaagtttgtatttagggattgattgttgttttattgtttaggtattttcttacttagaactctcctagtaaaataagcataatttttataaaaaaattccaaatgtattaattcaagatgcgttagaaagttgataaagaaattaaaaacttatactttttaaaaaatctgatcaaaacatgattaaatttaggcttccaaagtttgcaaaaataccaaaataacaaattaatactaaaactaaacaaaatgaataaaaaaactaaacatatgaaaataaacttaaaagcctctaaactactgcaaattcaaatgatttatgatgaaaattaattctattttataaagttattatagttataaatttagaaaagaaaaaatctaattttttttaaacttagcttatgaatatataaaaaagattaggttatgaggtggaggatagatttttgtttttgtttttgttt

SEQ ID NO: 33432 - DNA, 3459 bp, Cannabis sativa
  modified_base (2099)..(2106): a, c, t, g, unknown or other
  modified_base (3165)..(3176): a, c, t, g, unknown or other
  modified_base (3392)..(3419): a, c, t, g, unknown or other
gtttgagttgaatactcctgcagatgagtctctcgtatttgtaaataatcgccttagcaccaagtctccaacattgaatagcctctttttgaccctgttgttgaagtatcttgttactcggtgttggtacgttgcattagtaatctgcgactcagtacgtttttcatcgaggagatcccaaggacaatcttaagagttcttggttttcttcttgattataaaactcttatctatgagtctagatatttacttccacaggtaacattgcttctgagccaaatgcttgcaagaatggagtatgtcccattgctgtcttcttagtttttctatgatcccaaagtacttgaggtagttcgtcgacccatctacctttggcatcatctaacttcttcttgatagtatccttcaaggttttgttaacagcttccacttgtccatttgtctgaggcctggatactgacaagaagctcttaattattttgttcctctcacagaactcagtgactaagtaaccatcgagttgagttccgttatcggatactattttcattgggattccaaacctgcagacaatgtttttgacaataaagtcgaggactttcttacaggttatggagacaagaggttcagcctcagtccatttagtgaagaaatcaactgccaccactgcgtacttagctcccccttaccttgtgggaagtgccccaatcagaacaatcccccatatagcaaatgggtaaggcgaggtcatcatcctcagtccgtcggtggtacgtgatgtatatgtgagaatctctggcacttatcacattttttgacaaattcgtgggtgtccttgttgattgttggctagtaatatccttgtctaatgatttttttttgatagactttgccatcctgcatggtccccacaaaagtcttcatgaatttctgtaagaagaggattttcctctagtgttattccttttattagaaagtctaccaaagcttggccctttatggatgttcaagggtgataagttatgtcaaactgccctagttcaattgaccattttatcagtcttccagaagcatctggttttgataaaacttgtctcaagggttgatcagttaacactttaattaggtgtgccgggaagtaaggacgtaacttgtaagatgtgtggattaagcataaggcaagtttttcaagagggggatacctcgattgtgcccctagtaaccttttactgacataataaataggttgatggtgctttccctcttctcgcactattgttgcactaatcgcgtcttccgagacagctaaatagaggagtaatgtctctctagttactggtttcgccaaaactagaggtgtttccaaatgctttttaatgctctgaaaggcctcctcgcattcctctgtccattcaaatttcttgttgcctcacagtacattgaaaaatggtagacacttatcagttgacttcgaaatgaatctgttaagtgcagccatccttcttattaaggattggacttccttaggtttggttggtgatggcatatctatcaaagccttgattttctcaggatttgcttcaatgcccctcgcgttgactatgaattccaaaacatttccggaggaaactccaaaggaacactttttcaggttaagtttcatattgtacttccttaatattttgaagcactccacgaggtctgttgtatgacttccactctttatcgattttaccaacatatcatcgacataaacctccatgttctgccaatctgattcgcgaacatttcatttactagtcgttgatatgttgccccaacattcttcaacccatataacatgaccttatagcaataaaatcccatgttggttacgaagcatgtgtgttgctgatctaggacatgcatttttatctggttatatccagagtatgcatccatgaatgacataagctcgtgcctagcagttgcatccaccaactgatcaattcttggtagtggaaagcaatcctttgagcacaccttattcaaatcagagaaatcaatacaagttctctaagttccgttgggttttgagacgagaacaggattggctatcnnnnnnnnataaaacacctcgcgtataaagtcgttgaccaacaacttatccacttcctatttgactgccccttgcctctcgaaatctaagggcctcctcttctgtctctttgctgggtagtttggatcgacatttatttgatggtagataatattagggtcaatccctatcatatctccattgctccaggcgaactgatcctggttcacccttaaaaaacttattagatgctattccattgttcatccaggttcctcccaatgtaaacacactttgtgggatttcctgggtccaaaacaaccttttccaactcttcaactggtttcaatttctttcatcttgaattcgaggatcaagatcttcatccttcttcttgccttctctagttaagactgccattagctagtgactggcttttttgtgctgcagctctatgcgatagcattcgcgagccagcatttgatcacctcacactactcccatacccactggtgtttgaaactttaggaataagtgcttaatcgaactaactgcccctagtccaattaatgttggacgacccagaagtatattgtaagccgatggtagggggacaaccaaaaagtcttgcattattgtggtggataaaggtgtttcacccaaacttaatgcgagctcgattattccttgtgtcgtgtgtaaatcctcaaagatttaccatgcaaggtcttaatttagctttttcaagccccatcttcttcagtgtttccctgtaaaggatgttcactgaacttccgttgtccaccaacactctttttatcctactgttagcgagctggatggtgattaccaatgggtcgacgtgagggtacctcacgtctttttcatcttccttcgaaaatataatcggaggttcttcaatatttactttcttggaaggttctagagaaaaggcagactgtttgttcttcacttccttcacgtacctcttttgggcgttattgctttctcctgcaatatgtggccctctcgagataaccaatatatccttgttggaattatttcaccaggatcttagatctactcannnnnnnnnnnnttaacaacctaaatatgaacttcttaaacgaaattaattaaacacatataaagtatgagaaaccttactttgggtgcagcggaataatatgtctcctcccactgagatctctaacccttgattcctttttgtcgcagagtattatcaagatctgagcccaaatgtccttctctgttgactctgaatttctgcacagccttcctcactatgattgannnnnnnnnnnnnnnnnnnnnnnnnnnntctatcacttagagggatttcgaaaaacagagaagagaga

SEQ ID NO: 33433 - DNA, 2587 bp, Cannabis sativa
cactccaggttcttgagtggttgggaagactcttcttaggactagatcgccaatggtgaatttcctatttttgactttggcgttgaagtgtttggctacctttctttggtaagctaccatccgtatttgagactcatcgtggagttcgtcaatttgatctggtgcttcttgtaataaagctttgtttgttgctgaatcatatgtcacccttctgtgggatgggaacaaggtttccatcgggaccatagcttcacagtcgtacaccattgagaatggtgagccgatgttcttggggttgtccggtaggcccataatactcttggcaattcttcaggtcagttgttcttgcaggccagcaacttcttctttagggtgacctttaggattttgttgacggcttcttcctatccatttgttggttgcagaagttggtgaattcttcgcagtcaaacttctttccattgtacgagactattttatgaggcaagccgtatcgacacacgatgtttttgataacaaagtctaatgctttcttagcggttatgatcttcatgggctcagcctctgtccactttgtgaagtagtccacggctactatggcatacattacccctccctttcctgttggtaaggacccaatgagatctactccccacaccgcgaagggtcaggagctagtcattagggtaatttcgttggggggctcttggtatgttcgcaaacctttggtacgaatcacattttaggacgtagtttacacaatctttcttcattgttggccaaaaatatccttgtctcagtattttctttgagagagttggacctccggtgtgatctccgcagaacccatcatggacctcctacatgatctgcctagcttcaaggtccgagactcaccttaagtacggcaagctgagtcctcttcggtaaaggacattgtccatcattacatattgatgcgcctgatactgtagtctcctgggtacgaccctttccttaggcaaccctcctttcgttatgtatctgatgttggagttcatccaactaggttctcgctcatttgcggctaccgtttctttgtactaatgcttggctccgcgagattttcaacaggtaccacccctagtctctctatttcactatctgatgctaacttggccaaacagtccgcgtgagcgttcttttctcttggaattctttccactttatattctgtgaactcatggagcagttccctaacaattgctacgtaagcagccattttttctccacgcgtttcgtattcccctgatacttgattgaccactaactgcgaatcgctgaagacttctacttgtgtagcccctacggccttcgccaactttaatcctgcaattaaggcttcgtactcggcttcgttgttagaagctgggaatgcaaagcgcagggctgcctggagccaaagtccactagagatatcattgctatcccagcaccagatccgctttcatttgatgctccatcaacgaacaccttccatgccggtatttgcggtactggcatacttgaactggcctttgcctcattacattccattatgaagtttgctatggcctgtccttttatggaaatgcgtggaacgtagtgtatgtcaaactggctcaattccatggcccacttaaggagtcttcctaaggcttccggcttttgcaagacttgtcgaagcagatggtttgtaagtaccttaatgggatgggcctagaagtagggtctcaacttcctcgaagccatcaggaggcaaaaaactaatttctagattaatggatatcgtatttcagcccctatcatgcgcttgctaacatagtacaccggatgctggactttgtcctcttcccggactaggactgtgctaacagcattctcagaaaccgtcaagtacagtaacaagtcttctccgtgaactggctttgacaataccggtggtttagccatgtgctcttttagttttttgaatgcctcctcgcattcttcagtccatttgaatttttggtacttctttaaaatgttgaagaaagggatgcacttgtcagttgatcgagaaatgaatcgacttaaggcaacaacctttccagtcaagttttgcacatccttgtgcttcttggggaaggcatgtttagtaaagcttgaattttctcagggttttcctctattcctctttggctgacgataaatctcataaattttcctgatttgacgccaaaagttcacttcttcggattaagcttcattccatacctctagaccactttgaagcattctgtaaagtcgtctgcatggtccatgcatgtcttggatttgactagtatgtcgttcacgtatacctccatatttcttcccaggagacttttaaaccaggagacttttaaacatccggcttttaaacatccggttcaccattctttgataagttgcaccatcattttttaatctgaagggcataaccaagtaacagtatacacccttatcggtcctgaagctagtgcactcttgatctgcaacatgcatcttaatctggttgtagcttgaatcctgaggtggcgtccaccat

SEQ ID NO: 33434 - DNA, 1703 bp, Cannabis sativa
tggatctcaatttgagtcctactctagttttccactaagaagtttctttactgtgaatcaactaattacaaacaccaattaatgtacagaatcacaaagaacgatctaagacacaatgattcttaatcacaaagaacgatctaagacacaatgactcttcaacactcaatacttgagctcctcaacccatcatgacaccataaccttgatcttcttactctctctcactctctctttctctctgtctaagtctaatggtagttgtttgttgtgtaatgcagccttgagactacatttcatgtactttgggttgttctagcctcaatattcaaggcctcgtttggtacattattattcttttacgaaaacattgatttttacatgtttctttgtgggtcaccatcgggtgggttgtggggcagtggttcacgaccaccttcatgttcgcttggtgtccatagcaaatcccgttcaagcattgatttctcctcctgctgttgaagctattgttgtcttacatggtttgatcctatgctgttgaagcattgaaatgatcttttcttctatttcaaaatagaatagtcattctaccaaaatgatggaaaaatcattctattagaatgacattctaatactttaaattgcaaccaaacaaaataatagaataaaaattgcttttttcccatttcgtcacctccaaccaaacaccaggaatcaaattgacacaggtttaattttctatctccctctctcatcggctcttgaaaaccttttatgctttcttccatgattcttccatggcagctcaattgcaccaattacccctattagctttccttcctttaacataaaacaccccttttggctgatgttttatccctatgtagtaattttaatgtttacggattttatcattgtaacaagtctaccaacactatagtttatagttcatgatctcactagattagctcttcccttggtatgctatgagttcttgactctgctttatgcagttgactattaataaatatttcattactttaaaaaaaattaagtaattacacttaaatccaactaaatagctttccaaacagtttttactctaatttcttccaataagttttaagaaattgtatttcaaagactataaatcttttaaaattgtttatgtttattttaaagtagagtttttaaaacactatacaaaacttgctataagtatctaaactataacagcgtactcggatagaaaaatattaactaaacatttaccctaccaaaaaccaagcttgaaatcctatagaagatggcctggtatagtaaattttcaacactctttccaattgagaacttcacagcacatataatccgttattggattgtcatcaattataaaataaaaataagaatagaaataaaataaaatttaaaatgtataaaaaaaattattagattttctcaagcattggaatggtattttctcggtattttctctctagtgtcattctagacattccaatactttaacatgcaaccaaagaaaggaatgaaaaatgttttcttaacattccattccatcaaaccaaaagccaccttaattccaagaaagaataacaaacgtttatataaactcatccatattaacttatatttctgaaaatttaactgttaaaataaggtaaaagttgtagcattgctaaatc

SEQ ID NO: 33435 - DNA, 2328 bp, Cannabis sativa
ggtatatgtggtgttctgttcagaatatctccttcgggcagatacggggagtcaattccacgtgtcaccaacgtgtgatgccacgtcagagtgcaaaaattgggataacacaatcctaaatatcttttcaactttatcaactaactttttaaaattatgttatttttaatatataaaaataaatatctaataagataaaatgataaataaatatcatttatctaatctcataatttaaatttaaataaaataactaatttttgaaaaattgatcattatctcgttagtttttttttttcaaaattatctagattatcctttatttaaattatatcatattttaatatcaaataaggtcattttataaaattatttaaataaataaaatataaaatatctgaccttagatttaaaataagataacaaataatcaaaattaaaaaaaatctaaccaataaagtaaatttatagaatattttttttttcacgttcaaaatctactaatatttaaaattaattaaataaattataattaattttaaactgatattagttttgaaatttaaaaaataaaatttacacaaaaaatctaccataaaatcaaaattaatatgtgttatcccaaagtttatccacctgacatggcatgtccacgtaagccaaagacagagtacaggtggagtacagcctgccagtagcagaaagggcctccatgcaagataaaacaaaaccgtcaaacaacaactgaaaagagtgaagcgagctctcaaggagttgtacctacatccttcaccaaccaacagaagcctatagggccgccaagacttacttaggaatggcaacttgtagatttggacccagaaaggtgtgaagattaagtcttcttttgagacattttgtagagcatctggcgcgagaagtataattagatgaatctgaaaatgccaaggttctttattgagcactcttctcctgtcaccttcacaaccaaaagcaatgtggaacatgtctgacttgaactcactaatcaccactggaaaacaaccccctaatggcccgacatttgttcataaaatcctggtttgtagacaggtttagataagaatacacgagtaattagggtataggctgatctgtgtaagggactagaagcactagtatcaagcaaagtgatgatgtttctctcgtcttcacaaagagaaaggatagagtgaaaagtgtttaaaaacggttctatgggaaagagaaaacactgaaaaaccagtcacaaggcaaagaaaccagaaaaaaaaaaaacaaaaagagcagagaaagaaggaggaagggggcggaaaggatgaaggtgagggaggcgggagcaacacagttacataaagcaggaaattcaaagaagagaaaaataagaaagaaaggttgtgaaaaaactaaaaatacagttaaaattccataactgaaacagacccaaaataggacacatattttaagagtttaaaaatcttttttaagttataaaatttaaaaaatgcataacaaaaataaaaactgaaaatataattaaatatatataataaccgtatgtatatatatatatctataacttaattaaaagtcacaatattttggacttttgttgttgaattacatatatatcctagaagatatatatacactcaaaaaaaacttagcaacataaataatttacaaagaaaaataaaataaaaattttatttttaatattcaaaaaatactattataaacaataataaaaaagaaaagaatataccacatcataggtttattaataatagtttaatttttgctttcaaataaatatatttaaatatttcacaaaataatattgtattacataaaaaaatttacaaagaaaataaaaataaaaattaacaaactaataaactaagtttaagggagagttttgtttattctacataaaaatataaatatatacattatacatttaaaataaaaaagtgatttatttcagttttaaattttgcaagagatcttatcatataatcactaaaatattaaaatgatgtttgattagcaaaaataaaaatataaaaataagaatgagaataaagatgacatttaaatattttaaaatgcaaacaaataaaagaaatagaatgagaatttttttcgtttcaattctattctattttatttcctacaactaaacatcactataattataatttaacacaatgtataattcatatactaacacgtgcgaagggagacatcaagaatggaatttactatctgcaaggaaagacaattgtgggaaattcgaatctggttgtc

SEQ ID NO: 33436 - DNA, 1600 bp, Cannabis sativa
aagaaattggcggtttatacattggaatatcttctttctttatagacttttccgtaggcttgtctttaagagtctcttctttggcttctactgtgtcttcaacctcaggaccagttgacttgtcttctacacccccatcaagtactttaccactcctcagtgagatggcattatattgttctttcggattgacaactgtatcaatagggaaactactattttttttcaaagcactcacaacattggccagttgtcccacttgcacctctatgttcttcatggaagaatccatattagaaatatgagtttctatgttgtccaacctttgcttcattcttgttaaacctcttgttggattctatcataaaagtacccataatattttctaatgatatcttttcaggttgttgttgtgcattaaatccaggaggtggttgcaagacatttttagtgttaccgtacgtaagaaagactctcatggtttctcaattccagatggtagtagttaggcattgaatttcaccgatagttgttattgtaaggtttattagccatatattgtgcttgttctatactgatccaaggctcttgtgatgtagatgcagcaacaacatttcctacaattgatgtattcttctgattaactaaggctgccacttgattagataaagcaaaaatttgagctgctatatttgtcataggatatactacatgtaatcaagccacttttataggagtatttctttcattaggccaatcatagctattagtggccatctcttccagtaaattaatggctttagttgcaggcttagacaataacgctcctccagcagcagcatcaataatagtcctagttggcccattcaacttgttgtagaaaattgagacttgcatccagctctcataaccatgttgtgggcagtgacgtaataagtctttaaatcgctcccatgcttcataaagttgctttgaatctacctatctgaaatgtccaatctcactccttaactgtctagactttgatggagggaagaatttcaccatgaactttctggccatgtaatcccacgtagtaatagaacctggctgtagagattgcaaccaacttcttgctctatcccttaaggagaaagaaaagagttgtagtcttatggcatcatcagtaacaccattcatcttcacagtagcacatacctccaaaaatatagctagatggatattgggatattcagtagccaagccaccaaactgattttgttgcaccatattgattaaagaagacttcaattcaaaattattagcagcaatgactggattaaaaatacctgtcacattttcataaaccataggtaagcaataatcacgaacaacacgtggttgtgcatcaactgcagcaggtgctggttggttgttattaaggccattattgttattagctgccatggtgaagtctagttttttttcgcttttaactactttagagttctttcaatctctggattcagcggtgtgagtggtgtggcacttcaatttttttgcataaactgaaccacaaagcaacaaacaatataagaaacaaaataaaatctaatttaaa

SEQ ID NO: 33437 - DNA, 3494 bp, Cannabis sativa
  modified_base (44)..(49): a, c, t, g, unknown or other
ttagaaagttcatatttacggtgttaaacaacatacttgtgagnnnnnntaagatcctagtaaaataaattccaacagatcccacctatagcaatctgctatcacaaaggggtcgaacctctataataaatcctgttgtctattattttttattcttatttgtgcacacacgtggcaaccatcaaatcttccgaccccattgttggttgatcactttttagggtcaacagcttggtgctttcattaagagaatgaatatcgtgatctgatcaaacaccatggtgagcacaagaagaactcctgtcgcaccatctgcatctttgggtctccctcaagacccacagattgcatgtccagacactcgggttccagtcacaattgggatccccatgaatactgcagacgtggtgaatcccgtcaccacaataggtgcaacaagtctggccaccacaactagctagcctgacatgagcatcctggtggatctaagtggtaggcccaagcctcgataagaagatccactattggcacctcccattgaagaaaggacccaggggcgacagccttctggaacaacaactggacatcaaatccaattttacgcttgagaaataggcccaggagtgggtgagccaaaaatttgtgagcctcatcttgacataggagaagaccttgagttggctagactcaaggaagctgtaggtcatgcagccctaactgaagaaccacgcgctgctgattgcaatgtattcgctcagcagagacgcaaattcctgagatggatggatgaccaggagtacatccttcgatatcactaggtagaattagatcgccgcaaccgggaggccaacgatctaataagacatttcaatcagagaaccaacagaagagaccaagatctccttagggatctacttcaaggaagattgtcgtcaagttcctcaagaactgggatggatcttcccctgctagagggaggacagacctttgcttaaaggtcaaacgatgagaagagccaagtcgcagcaaccagtggcttgggggccggctaggatacaacacttcctccccaaggggatcaaggtgtgtagaggtctatcttcgattgacgaggaccgagactgggtggaaacacccaaaatgacaattcaagaagtgaaattgatcacttcaggcatctagatccaccaaactccagcaattggtgtgatctacccccaatcaacacacaaccaacaccagccaactgaggacatgggcggaccctaccctttgcaggtctggccagccatggaagagtactaggcggccagaccatgcctaatgtagattttagtcatgaatgggttcttgattcaggatgatcatttcatatgtttccaatcaaagaactgttcaatgatcttgaagaaagaaaggtggggaaatatttcttggtgacaataaggcctgtcaaatccatgaaattggctcaattgtgatcaaaatgcatgatggagtgaagaggaagattcaaagtgtaaggtatgtaccagaccttaaaagaaacttattatctattggtgtattgactcaaataggttgtaaggttgaaattgatgataagtttctcaaggtttaaagaattctaaaatggttattaaaagagaatttagaaatggtctctataccatgattggtgaaattgttactgattgtgtcaatactgtttcatcaagccatgattatgactaaactaaaatgtggcacctaaggcttggtcatgtgagccaaaggggtccgttggagctggaaaacatggaattctttagggaaaacgtagtggtaagcttgatttttgtgaagaatgtgtgtatggcaaatgctgcagacagaaattcagcattggcaaacacaccaccaaggagccacttgggtacatacattcatatatggggggtccctcaaaggtttcatgtttgggaggatccaattactttctggctattgtggatgattactcaagaaaggtatgggtgcacttgctcaaaaccaaagatgaagctttcaaaacttttaaggattggaaaactctagttgaaaaccaatctggaaagaaagttaagaaactaaggatagacaatgctttggaattttgttccacatagtttttaaactattgcagagaagttgggattgagagacacaaatcaaaaccaaggactccccagcaaaatggcttagttgagagaatgaacaaaactcttattgaaagagttagatgcatgttggagggtgctggtttggaaagaaggttttgtggagaagctgttaaaataacctgctacttgctgaatagaagtccatctgctgcaattagatttaaaactccacaagaaatgtagataggtcaggttccaagtctagaaaatttgagggtgtttagatgcattggatatgtgcatgtcaaataggacaagttgcagcctagagcaatcaagtacacgtttctagggtatcctgatggagttaaaggatacaagctatggtgcctagacaaaggtttcaagaaatgcatagtgagcagggatgtagtttttaatgagaaagtaatgaccatgaaaccagaaaacaaagatgagattagtactgaggctagacaggtacaagttgaagtaagggcagaagtaaaggcaagtgacaatgttgaacaggaacttgtagaagaaatagatcagactcaagatagctctcttgatacctatcaacttgctagagataggatcaaaagagaatcaagggcaccagctaggtttggttttgtagattacacaacctatgccttgacccattgtcagtgagattgaaaattctgaacctgccacttatgaagaagcgatcaattgcaagaacagagacaagtggatgcaggcaattgatgaagaaaaacaatccttgttaaagaatgaaacttggacttttcttttaccagaagggtgtaaattgatcagttgtaaatggatcgtcagagaaaaggaaggctgtcaagtgatgaatgcaagaggatacaaggccagactttgtggccaaaggattttactcaaagagaaggagtagatttcaatgaaatcttctcacctattgtgaaacatgccttaattagagcagttatggccaaggcagttttagaagatctagaaatggagcaaatggatgtcaaaattgcctttctccatgggaaattagatgagatcatttacatgaagatgccagaaggttttgatgaagatagagataaggtctgcttgctgcaaaaatctctctatgggctgaaacaagctcctaggcaacggaatctcagatttgatgatttcatgatgaaaagtggcttcaccaagagtagtgcatgatccatgtgtatacttcaatgatacactctttcaatgttgatgacatactgttgatagggaaaagtgttggaaattattttaccaggatcatagatctactcacaa

SEQ ID NO: 33438 - DNA, 1740 bp, Cannabis sativa
ttatactaaaatattatatatttaggagttcataaaagttaataccatatttagttttacataaaaatattgcatgaaatataattttgttagaatattagttgtaaagaaattagaaaaacttgtattttagtagtttcctatttgtatttagtagtttgtcatttagtctcctagctttgtatataaatatgttctattctatgaaatacatacacaattcgattcattattttctacatggtatcagagccatacttagaattgtgatttgatattcaaaattcgaaattaggattcataaaaaaaaagagattagggtttgagtttagggttctttttcaaaaaccttatttggagtgcgaatttattctcaccgcccactcaggagtgttgcccagccgccgatctaccaaaccctaaagttcagtcgccggcttcctcgtacgtggggctcacgcgccacctgaagtttctgcatactttcccacgcaccagcgcgtggaggcacatgtgacagcatcttcgactgcgttcttttgccggttctttactcagttcttttaagcaccatctgtttaaggttgtaatttggtatttttttttgtcttcttcgtgtttgggggttcattctttggtgttccttttctctgtcaattgctttttgcttttgagattatggcagagataaaattagattagaaatcaatcgttatttctgatgtggttcccgtgatgtctaaaatcacggatcctaaattgattggttcgaattatttggaatggagtaagacgattcgactgtatttgaggagtattgacaaagatgatcacttgactgacgatcctcctaaagaaaaagacaattcaagaaaaatatggctccgtgaggatgctcgcttgttccttcaagtttgaaattctatccgtaataaggtattagtttgattaatcattgttaattagttaaagaactaatggattacttagaatttttgtattctggcaaagacaacatatcttgcacatatgatgtttgcaaagccttttatcatgcggagaaacaagataagtctcttatgagttactttatggcatttaagaaaacatatgaagagcataatgtgttattgccctttagtcttgatgtgaaagttcaacagtgccaacgagagcaaatggctattatgaattttcttgcaggactctcatctgaatttgactctacaaagtctcaagttctctctggttttgatgtctcctccttacaagatgtgtttactcgtgttcttcgcacaaaaactacctctttaactcctcttaatagcgccttggtgagtcgtaataattttgcaccagaaaaaaactctactccaagtggatacaaaggaggtaattcacaaggacctgataatcgaacaccaaattctgggagcatcatgtgcaactattgtaagaaaccatgccacaccaagtttgagtgtaggaagttacatttcaagaatcgacaacaacactctgttaatattgcaagcactagtgatgcatctgacaaatcggtccttatttctgctgatgaatttgccaagttctcaaggtatcaggaaacacttaagtcttcatcttcttctgtcactactagtggttattcaggtaactctaatgcatgccttctttcaaaatcctcaaatgggtcattgattctggtgccacagatcatatgacaggtaattccagtct

SEQ ID NO: 33439 - DNA, 1186 bp, Cannabis sativa
atgaaagaaaattatttggcattgctaaaattgttcttataaatgtaaaagggttgtaagtttctcttttgaatggaaatctacttgtgtggatgtaattgactcggtttgattaataaaaattatctttcttgataaaaaattaatttaaaagataattataatagaactatgtatgtaaacaaattggtagcaaacatacttacgtagtcaattttgttatagtttttttttttttaacaaaagaaattttttattcaaaattgaacaagaaaaaacaacaaaggcaaacagcccccaaccgaacacacacactaccattcctcaattacatttataatatacttatcactattttttacattggaattaaaaatacccaaaatacgccatttcactagatattttatctcttcacaaacaaccttaacgaagctacaaacacaatcaaagacacactatttctatttttctaaatcatgtaaattgttgaagcaataactgcatgaataactttgtttatcagaccaatttgcgtttttgaacaccaaacaataagctccaacttgtttctcggccaataaaacttaccagccaagagccaatttcatccactattttttttagtatagatgcaatccatatacaaatgatcacgggactcaacttctaaatcacaaaccagacagtgagatgagaggatgctcgttattctgctcaagtgatttctagttaataaaaggttattgattacattctagtaagtaaacatgtgcttcggcgtgatgagcttgttctagatattcgagttataatcaatcttgttccttgtgagcaaggtgttgtaagaatgcttctctttgaatctccctcctttttcggcatgaaatagattaaactcatctatcttattatgaagattaaggagttttcgaaaataccagctcatatcttgcttgatctagatattccagatgttctgaccctttaagtaaatggtgttaatccatttaactcaaagattatccttctttcgagctatggcccataagaacttagccatctgagcaatgttccactttcctccttctcgaaaaccaatcccccataattctttggaagacacacctgctcccagtgatggactcatgatttttattttgtgggagcttatttatcataaaaa

SEQ ID NO: 33440 - DNA, 2973 bp, Cannabis sativa
  modified_base (1052)..(1056): a, c, t, g, unknown or other
  modified_base (1941)..(1952): a, c, t, g, unknown or other
  modified_base (2021)..(2022): a, c, t, g, unknown or other
aattaagtatcgagtatcatataacttaagaaataacttttaatgaatatcacttattagtaaagtgctacctataaaaagtactgtgcaccgctaatgcttaataacaatgttcttaaaaaaaatacacttttgtaataataattaataagaaaattagagaataaataagttaaatttattccagatcaatttcttttacttattacacataagtctctttatatttttgtagagagtatttttcaggtttttgctaaaatttttagttaaatttgataaaaataattggcaaaaggaaagtacaagttaaatgttgatgctacaataaatcttaaggcaaccaaaattggattgcaatgattgattatgcaattcccttaaatactgaattcaactgtggctgaagctatagtattcaagccttatatgaaattgtgttttgccataaaaatatgaataggtggaatttaattaaaaaagggtagtgaataaaatacattcttcatcttcatctttagctctcacataattaataggcatttagaatggtaaagactaaagagagaatttagggctagataaagagaaaatatagaatggtaatattctaaatttgtaatgtgtaactagaactttcctgattgattagtgcaagttatacatttatatatatatatataaaggtaattttatttcaaaaatatttattattaaaaaaattcaaacaaataatatactggaaaatagtatattccttttgaacttgcacccaatttttctaaattaatgttagagcactctcaatagatgagctaaaatagcttaatttttaaattatagaaaaaaaattacaaaattaagcttccaacaagtgaggtaaaccttagctatcttacatattttttttaacttaatgaatagtgcttagctaaatgtagagataactattgattgaactaaacatattttaatattattttctttaactaatctacatatgcgtgtaatattatatgaattactaatataaaataaataaaatatattannnnnataatatttaaatgatatagagaaaaaataaagaaactgatgtatgatataatgtaaaagtttgaggtaaaatagataaagtaaaattttggtgatgtattttaaagaatagagtagagaagctgttgggagtgctcttatactagttgaacctatgcgcgttgcgcgtgtctatatttttatgtcattttaaaatgagtaatttgtggagaaacctctttataatttttatatacttagtctttttttattttatttttgtggcaaaactacgttaaatttatttttctttgtaaatttgacacgccagttaaatattaccgttaaatatcaactggatgactactatatatgtatacacttgtgtaaatgtaacagtaaaatctcaaaatcgatacagtagtaattcagttggaatttaacagtaatttctaattgacaccttaaatttgcaaagaaaggtaaacttaaagaggttttgccattaaaaaaaaaaaaagataagagagttaagtatataaaaattaaaacataaagggatttcgctgcaaatatctcttttaaaatagatatttatgacataaatatttaaattttgagtttgtgattgatataaattcaatgatttttctagagacataagtacccaattttaataaaattataattttcgtttagttttatcagggacatatcggcgactttgttagtatattaaacaaaacacatgtaagacttaaattttaagttattaggtatgaatggaaacatatagtatctgttacttctaaattttctttcactttcaataaactcaaaaactaatacctctacaaaaaatagttacttttagtgataaccttttagtcacaatataaatttttnnnnnnnnnnnntgacttttaatcacaacaaaatattacttgtaactaaaatatatcatttagttacaagttgtcactaanntagttttagtcacaacaagtattgtgactaaacacacatttagtcacaacaaaataaattgtaattttgtgactaatatctttagtcacggacattttattcataacataaaaatgatgttttataattagtcacaacttttttacttttaatcacaaattttgtcgtgactaaaagtaagaatctttttatataaaaatataacttatgtattattacagccaaaaattaaatttaggtatttatttgtaattaagaattaaacttagttatttatgctacaaatcactcaaaacctaattatttaaatataaaagttttaagatcatagggtgattttttttaaatggaaattcttcattcaaacaaaattgttagtgttaatatttataataattattaaattaaattatgcgagaactgatatttacatacaacaacttagtgtcttttagctttgtaaactattatatacccctttaattttgttttttcttttaaggggaaagatttaaggtttaatatcattatatctcaaaatcgtaataggtaaagtttagggactaaaaaagaaataaactagaatttagggagtgaagttagagagaggagtatagttgaaggactaacaaaatatctaactcgaagcaagcaaccaactttgtttggccaaaaaaggaatccaagtgttttcttaaacaaagtatttttcctatgttttcttatctctttcctctttctctttctctctctcaaaccattggtgactttgaatctgggtttttgcaaagtgtcagttccaaatattaaaagcaaatactcacaactctagtcttgtcaaacccttaacaacaacaaaaaaaaaaatcaaaaaatcaaaaaaaggtaaaatctttaaatccaatttcatcacatcttccttccttcatcaatgctttttttttttttttt

SEQ ID NO: 33441 - DNA, 1281 bp, Cannabis sativa
aaatacaaaggggtcctcaccctctggttaaaaagttaccatctttcttttacaaccaatggttatgttgtatttagcaagccaatccatacccaaaataacatcaaaatcttccaaatttaactctatcagatcaactgacaactcggtttcttccacaactacaggaagggaccaaacccacctactggagataactagctctctattaggcagtaaagtttcgaagcctcttgaaagtacatcactaggcctattcaagttctcaattaccctatttgaaacataagaatgcgtcacaccagagtcaatcaatacagttaataaagtaccaacaacaaagagctgacctgtcacagtggaagggccggcatcagcctcggcctgagttagggcaaacacttgagcaaaagcaggtgtatcatccttcttctgttctggtcgtagtagttgtgggaaattcctcttcaagtgacccactaccccacattgaaagcaggccttggcctgacattcgccttcgtggcgcctcttgcaccttggacattctagaaaagtttcttagttttttgtttccaccacgacgaaaaccttggttattttggaatcttttttttaggcctgtagctgatggttcattagatcttttcttgcgatcaccagggtcattacccttacctaaggcagcaccagatgtctgcttccatgaatctcttcttgcaatatttttctttcgtatcttgtcttctacaccctcaataactagggccaattcaactatctgtgcataagtccgaacaaatccaggttgtttggccgcaactattacatctgcaatgtgttcatccaatccccgaataaatttttcttttctagcagccttagtagctacttcatttgaagcaaattttgccatttgatcaaacttgggggcatactctgtcacagtcatactaccctgagtcaatcatataaactcttctgcttttgctgcccgtatagactcattataatacttctcaaaaaaataatgttcggaaagcatcccaggtcatgttacttaggtcatgaccctgagacacgatctcccacaaaattcaggcatcttctcgcagcatataaatggcacatctgacccgatcattattctcgacccgcattaaataaaaaatggatgttatctaataattatagaaattagagttattttcacatttttttttaactaaaattggcttagttcttaagtttttaattattttttgaatttattagctttat

SEQ ID NO: 33442 - DNA, 1605 bp, Cannabis sativa
ggcggcggtcaaccgaatccgcccgctacaccgagtccgcccgctacaccttcacccccctcagtctgattagtcaaccatgcgagtctacgttcctttcatactccgcgttgcatcttagtatattcctcctgccttagacttagtcgtacgtctgttattattgttattattctttttaattattattattattattacgtcacatggtccctttttcttttctcatgtcttttttgtaagtagcttggcgaattttgggttttttttttttttgtgtatcattgttacttatcctttatatataaatatctatatgcattcttcggataaattattattattttatttatttgcttcgaattttgtagtgctacggctaaattttgcttaaaatataatttttttaataatagaaattttagaaaatagagatttggaaaaaaaaaataatggataaatgataaatttatataaaaaaaattatcctatgattttaaaatagttgttatcactcaaagtccatgttattattgtatcttacttataatacccactatcattcttaataaatttgttatacataaaacaaattgatcaaacaataaattaaatactcacttttataaaaatgttaaaaattaaagaattcttactaaaaaaaagagatctaacaaaaaaaaaaatatttgataaatctatataaaactattaaaataatacattatgtagtcaccaccatattaaaacgttatcactataatactaagtaaatctatatttttttaagaaaataaacacaacactcttaaatattgagattattttacaaatatacaaaaattacaaaaatacttgtatgacattttaaatatttttacgatttttattattttatttacaaaatatacgatcttttgatgtatttttatgttgtattcttattaatttgttgttgattttttattctttgtatgttatctttttgttgttttttacctgttacttatttgtagttttcttgttattttggtattatttttataagacagtgtaaaaaaaaatctttgaacgtaaaaatgtaaaaagttttacaaaaaataatgtattatttaattatctcttagaataatattttgggagaagttgaagaatactctcttttcttatacattaacgaaatttacttctaaataaaatttaattcaaaaatatatttttatgagtattgtacccaaattatcctcacgcacccacataatttcaaatataaaagatttatattctttgtagatggatgtgtaggtttgtgggaaagttgttagaaaattttaattagagaagaataaaaactatcgtaaagtgataggatgaaattggtagaatgattgaaaaaagagataaacataagaaattaaaaaaaaaaaagtataaattaaaggcatcaaattaaaagaggtatgtaatgtaatttattctagtatttttgtgagtatctactttcaacattagaataatgtcgaatctacaaattaaattataaaataattaattaataatattttacatatatataatattttataggggaattaccccatatac

SEQ ID NO: 33443 - DNA, 952 bp, Cannabis sativa
gtaacttgaagcaattcctagctgtgatctcctcgagctcaacattgttgtgtattcttcaggcgagaagcaatgctccccaaaccccggcatgaggctgcattggcatagtctttatcaactcatgagcttctttcaataatcctcccctgcctaaaagatcaaccataatcccataatgattgaccgaaggcaatagcccttgctccttcatggaatcgaaacacttgtagccttcttcaactaagcctttttcatctcttcaaacaactcgattgcctcggttgctttaccattcacaccacagctcgatatcattgcagaataagcaaccaaatgtttgtttcttaaaccccgaaatagctcgaatgctttctcaatgtttccacacttagcatgcaaatcgataaaagagttcgccaagtgatcatccaattgaatcccattcttttcatgtatgattcgatccataacccgaattccaaataaccaagctgtgaacaagcagatacaacactagttaaagtcatctcatctggctgaatgttgaaatctgttttaaccatatgattaaacaactcaagggcttcccttggttgattgttttgttgataacatgctatcataacctcttttcgagtaccccgaaatcatgttaatccaagaaacattatttctaacaggcattgcatcaaaatagcttcttgctaactcaacactaccacaattcacataaccactcaacaaagcattccaagaagccaaattcctctcaggcatctcttcaaacaaagaaatcgcccgatccatatctcctgttcttgcataacccgaaatcatcaaattccccgaaacaacattcttactaggaatcttaacaaacaccctctctgagcctcttccaaattcccaaacctcaaacaccccaataacacaacattccacgaaacca

SEQ ID NO: 33444 - DNA, 1637 bp, Cannabis sativa
ttcttgaaggcatctgtaatgatcgcatatctagacatggatattagtagcttattggtgatttaattagtgtttatagttatatatgtgcattagtacaaaatgacaccctcagctttgcaaagtaaatcttggatatatttctgttgagacagaatgataccctctggtgtgtgaattatctgaattccaaggaaaaaatcaatgacaccaagatcttttaaggcaaatttggagctgagagcttggatgagctttgagacttgttgtgaatcactactagttatgaggatgtcatcaacatagatgagaatgtagatgacacatgttggtgtgattaaggtgaataaggaatgatctgtttttgctgaagtgaatccaggttgtagtagaactaatgatagcttttcaaaccgattaagctcgaggagcttgtttgaggccatatatagccttatgtaacttgcaaactttgtttggatgctcaggatcaacaaaccctagtggttgcaccatataaatttcctcataaaggtcaccattgaggaatgcattattgacatccaattatcttatagaatcctttggatagagctattgtgagcacaacaccaactgttacacgctcaaccactagactgaaagtctcatgaaaatcaaaacaaacttgttggtgaaaccccttggcaactaatcgagcctttaacctgtcaactaatccatctttttttctttcactctaaaaacacatttgcagcctatagattctctgttgggaagcaaactgacaagggtataggtcttggtttttctcaatgcattgttctcttcagacatagcagcaaactattttgcatcttttaaagcactttttacagaagcatgatttagagacgccataagtaccttgggttttcgaacacaagatttttctctagttgtcatggagtgcttattgacaataacaggagttgtaggagatgtccctacatcagtatggctagtagtaggagcaacatcaggtagaattggaatttctgcagcagcaaaatcaaatacaacagaagtagttgtgtgagcaagttgtagagcatttgaatttaattatgcatgtgtagtgttggtgcctgcatgttcaagtgaagagctatttgaagcaacagtagaagtagtgataggagcaatggcagcatgtaaatgacttggaggatcattggtctgagttagcacaggttgagaattaggggcacgggtgcttgtgaaacaggagtaggagcaataggggtacgatgatgaaaaccagaaggagggaaaggtaaagtggttctatgagatgaattttcagtggggatagctgcagaaagatgtttaggcatgttgtattaacttgaatttttagctgccttagtagcatatgggaaaatgagttcattaaagagaacatctctagagatatacatttttccttccttggataggcatttgtagcctttatgagaaagactataacctatgaatgtgtaaggctgagacttatattgtaatttgactttattataaggtctcaagttgggataacgtaggcattcacagaccattagagatgaataggttggtttgacattaaacagaatctc

SEQ ID NO: 33445 - DNA, 1240 bp, Cannabis sativa
atatatatatatatattgtaaagtgttggaaactattagtattcccacagattgaaaaatcttggggcaaattaaggggatctcgatcgtattatcaaggttaaaaattagaatattattatttagtactttaaggtgcctaacatcatacaaatattataacatcttataattagttagtggtatctgtgtttccaagtaaatgacacgtgtattttaaaaagtccccaaatcaattcatgggtctagttgataggcccaaacaaattaatgggtcagcctataagcagaatcagactatagctccaggttcaactataaccttatcttgacaaagttggacctattagactcgaaagaataactttggttcaaagaagtgaagactcaaagaaacacagtcgggcaccctcaacccggaagagcaatcgaagaggtctccagaagcaatcctatgtagcacctctctaataccaaatctcacagaattaggggtttgtcccctatgtcaaacctaagaaaggcgcacaatacaaaaaaacaaactacctttttgtccaacatccactaccttgacatttactgtacacaatcaacgaggcatgaccacctgtcaacatcagattgtacgaacttgtacaaataacgaaaaaacctccaactattaggcctcacctaccagaccctgtgtcaatattacaatgtgttttaccctatcaatgggcatatttcacaaaacaaatcgtagcaggtctggatttatccgaaaacctaacttcaacctataaataaggctttcacccttaaggagttacgaatttaagccacagacactggttagaaatttggcaagaaaacttgtgtaaaatactctatagctaaagagctcaataatattaactcgtggactaagactcaatactgtcctaaccacgtaaaaatttgtgtgttaattctttatccttaattatttttctttaagctcaattttcttaatcgattttcgaatatcttaataaatagttagtaagtttttatattatttattaaattaaaatgtgtaaaatatgatactaaaatataccaataacaatatgttacatcgtaaaatgcctgataattgtgctccttaatatttctctatataaatatatatgggtgcgctcttaatggatattacccatgaatgggtaatattagaaaattttgagtttttataattaatttttctatttaatta

SEQ ID NO: 33446 - DNA, 1535 bp, Cannabis sativa
agcatcatcacttcgactaatagaattatcacaatgatttttacccttccgagtaaaaggcttcttggctttagcattagtcttatcaaactgtgtatctctacctctagaattagtttggtcaccttgctttgaagcatgagttcctatttttttcttttgagattggcttacagattttgatttcttttgctgttcattttgggcagccttcttgaaagtttcacctacttttcctttctatttgtctttgtgaggatcataagttctttgagttttgggatcaatcattctagctagcagtgttgtcttttggagccattttattggttctacttgctgccgtcaatgccttgattatggcctccattcttgccttttctcgtgcatcaacaatgagaattgctcttccaacgataatttatcctcatctatttttagcttcctgaccatgaatgtagaatctgattcatcgaaattaccctcattttcaatgttatcacccacaggcatatcttgatgattgtcctcacgcgcatcttgattatcttcctcacgtgtgtctcgatgatcatcttcaagatcatcaaaattattctcgtcggattcatcgtcttcagccataggatctctaggattaggtttgttgctagttttaccctttttatggaaattaatcacctcagttggatcttttgcatctcacatcttagcattgggaccatcgtcacccttcttagggtcagtataataccaaattgggtttgggtgagtaccataattactaatagtaatcgtggatggtatcactgtttttgttagctctcaatgaaagcacaaaaatatttaccgaaatttttgaaaatgaattatttcatattagagctaaagaaaatacgtttagaagaatgaaataggaagagaacactcggagtttttatgtggttggggcgttaatgagccttagtcaacgagtctgtattatgatgagatacgctggaaataacataaaggatcacaatgaatatgaacactctactctcttctcaagcttatgagttaagaaattccaatcctttgcgtgaattattcaatacgtatttatagagtagtagaggtcaaatttaggtaccctttccaactaatggagattttacaataatgcatcattttgggctagtgaagcctagtccatgggatattgactgtctatggtatgttgattgcggtcatagctattcataccgtgtccataattaatgcgatattaataattttatctttaattatgtagtttcttattttagcatgatatttattctctaccagagatctaatgaaggtaatttcattattctgcacgtaacagcaaagggaaaacttcaaatggcttccaaatacacgctaaaaagttcttcaagatacacagagctataggatcattccaaatacagaataaccttggcagaagctgttagtttttatgccctaaataaaactccatttcaatgtaatctattttattcaacatcaat

SEQ ID NO: 33447 - DNA, 1919 bp, Cannabis sativa
  modified_base (605)..(609): a, c, t, g, unknown or other
tacaatatcagggtaataatattactttctcaaaattccccgtccctttttttttataaaatctacccctatttatgtaaatataggttggcagttatttacttaggattagtttataatgtataattattcatgaaacatagacaattctcacgttttatttaattgcatgtaggataatatttgataactgctcaactgtcgtttgttcttatccttttcgatggttaatgttgatttagacaatcgtatctcgcttaacccgagttattctccttgtccatcttgatgtggaaaaaatactaagtgttagcagatgattcacctcgttaagtctctttatttgagttaagatcgcgaggtgaccgtctcactatatgtaatctgaggttgccatgattgtatttattctacttcgaataaatgaagatcttcttcgactacgtactccgaggtaggtgcgcgtgtctcgtcaatataagttttaatagccttttatccttatctcgcttaagactatataatcagcgagttgtaaatattttctattaaacctttcttgatgagttattttatcttgcctttaatgatataactttattatnnnnngtggttcatattccactgcaggacacgtgtcgacttctaaagtgcagtcgaatttcgagtataacaataatattaaaatttcttatttttactttgttttaaaaaatattttatatttatttttttattattaaaaaaccacatcaacctagaatgattttataagctatattttttttttcaaaaaaaagtgataaaagaataatttaataatattttaaattatttatatcaaatgcatataaatttatactatgaaaaaaaaataattaaaaatatataaaaaataaaattttatttaacataatttttatatatttgtgattataatgaactagattacaacattatctttattataatagaatcttaacaactcataacactttagaatttataatttaccaaatacttagctcagcttttttccacagttctgttacagctgtttttactcacaacatactataactactttttccaacatgctaaattggccctatatatacgtttattcttcttattctttgtatttttttttctatctccgaaaatccctattatatcattgataattgattaatttacatgttatgtttatttttctttgtatacatgttatatattttcaatgcagacattgtttttctaatatatatgtttaattggatcacaagaatgattatgagttgtcaattttaatagcacccgtgaaccttaaaaaccatatatttatttcttgcaaatcgagcacttggctcgcctttggatccatttttatcacaaatgccggaaacaaaatgatgcttaattaattatatatgaccaattagtgcaaataattattacataaagaatcattaaatataatttggtacgtagacgccataataattaattattagcatgtagtcttacactacaagaggtatactagctaatattttaaacttattgctagcttaattagtggatttagagttcatttggcatgtattattaagtggtattgtattttattatattatataaaattatattttatattttatttgtatataatattatattaaatgttaatttatattaaaatattgtatatttatacacccataaaagttaataccacttacataattttacataaaatataatttaaaataatatacatactacaaaaaatctcttttagtcacaacaaaatttgtgactaattataaattgttttttctatattgtgactaaagatattagccaccaaaattacaattgttgtgactaaatgtatttttagtcacaatacttgttgt

SEQ ID NO: 33448 - DNA, 1615 bp, Cannabis sativa
cgagtaaccccgacattctaaatgtctaactatcttaccccgctaattcttagatactctaccatatctatgtgactcaaattggccaaattgtgacattccactgttgtcgggcataaaatatgaaaagcataatatttcacatataacatacataatacacctagaactcaaatatatctccatcaaaagcctatttctaagaataagtcctaattatctgctaattcccataataaaattatgtggtcattacaattatcccccgttaaaaggatttcgtcctcgaaatctaacctaaataactccggatactgagccctcatatcggaatctaaatcccaggtggcttcctccaccttaccatttctccagagtaatttaatcaatgctatagtcttatttcgaagaactttatccttcctatcaaggatctgtactggttggagctctagggtttcataactcagaatatgtgttggatccgagacatatttccttaacatggaaacatgaaatacgtttgctgacaaagatgggggtaaggctagacggtaagctaccaatccaaccttttcaagaatctcaaaaggccctgtaaagctagggcataacttgaccattttcccaaaacacttaacccctttcattggagatacccgtaggaagacatgatcttctacttgaaattctatatctttgtgtttcggatctgcataacttttctgcctgctttgagaagcaagcattctggccttaatcttctctgtcgcctcattggtccattgaactaattctggacctaggtattttctctctccgatttcatcctaatgaattggagatgtatatttctcgtcgtacaacatctcatagggagccatccctattgtactctgataactattgttgtacgaaaaccctatcaatggcagatacttcctccaggagccttcaaaatccatcacataggctcgcaacatatcctctaatatttgaattgtcctctcgaactgaccatctgtctaaggatggaaagctatactaaacttcagctttgtacccatggctcgctggagacttacccaaaacttggaagtgaacttcagatctctatccaaaataatggatttcagagccccacgaattcgtactatttttttacgtatagttctgcatattgatctattgaaattgctgttttcactggcaaaaagtgtgctgacttggtaaaccgatccacaactacccatatagaatcaaacataccggtagttttgggtaatccaaccatcaaaactatggtgacatcctcccatttccactcagaaagtgtcaaaggctgcaacaactctacaagtctttgatcttcaaccttaatatgttgataagttaagcatttggtcacatattccaccacatcattcttcatatcgcaccaccaataatagggttttaaatcctagtacatcttggtggtaccgggatgtaatgaatagggagtagtatgagcttcatcaagaatctcctttctaagctcagtactacccggaattcaaaaatggattttataaagtaaactccattacctgtcagtgcaaagtttttaactggg

SEQ ID NO: 33449 - DNA, 1298 bp, Cannabis sativa
  modified_base (213)..(217): a, c, t, g, unknown or other
ataataataataaatattaatttaattttttattaatgtaaataaaattttgaaaaattctacattccctgatgatctattttgatatttgaaaaaaaaaatagtttatttttttatgagttttttcatttttacactttaaaatatcgtataaaaactcttatattaattagcgttgcaaccacttttgaaactcaaaccgtaaatttaaannnnnaaaaagttaaaaaaatagtataaggggtaattttttttttattattattatcgtttatgttgtagttatttataatattttaataatttatgtttattattttgaacatttagttaaattttgataatatagttatttatgctgtagttgattaaaatattttgtaatattttaagaatatcgtcatttatgttgtaattatttgggtaattttataaaattttgaaaaatttataaaaatttaacacgatgaaaatagtgttcaaatagtctattgtaagcgagactcttttattttatatgcttatgaaatagattgtttgaatttatttttgacgttttaaatttttttaaaatttttaaaattttacaaaatatcttaaataactataacataataaattaacatacaaaaatttagactaaaaaattttctggtagacttctttttgagaatgtagatgtagaatttttcaataaatactaatattattaataataattaataatatagttgtatagagagaatggaggaggtgacattggattgtggaggctaagctattaatgattaattaattttgatttaattaatttctagaatatatttgacattgtttgctttctctaccgtccaattaaattttaggtaataaggtattttgttattttgatattttcttcaatttttttttttttaaatttcaaatactatatagaatagaaagatttgaatttttgttcttccttcttctagtaggattgtgcatcaattttttttttgaaagaactacttgttcattaattaagaaagtggacgggaatcacagggggaattccctccccttgatacaaaatggccgaatcgctagtatttctagcatttttggctacaccatccgcaaacacgtttagagtacggttaataaaatgaaaattacaaattacaaactacaaactgtttagagacattaataatagagaaaaaaacgtttgaaaccctccaatcaggactaactcgagcagaattcaaagcttgaacagctaatttcgagtcagatagaatgagcacctcttccca

SEQ ID NO: 33450 - DNA, 1715 bp, Cannabis sativa
ttgaattcttgtaaatttcccaaaaaattgatgaagaaattggttgatttcccctggtactcttagggtcgaattgaggagagagagaaatgaagaggtggattttctactcctatcctaattttcattaattttgttttatctctaagtataagctaattaaaaattatggaatactctaataattccactaaaggagaaagcctaaccccttgggcaaaatgaccatttgcccttacttcaagcttaagaaatcttaaagcttagggtaaaatggtcaaataccctaatctcgcctaatccagatattccaaatatcaaatatacttgccccactaaaagaaaggttttacactaaacccatgtgactctaatggcccatccatcgcatttctattattaccgtacaaaaattataaaaatataacattgcacatataacatatataatacacttaaagtttaataaaatctctaaaattgagaaattataacccaatgcctatttcttgaaaataagacccacttaatagattattcacatataatcataaagtataattaattaatttcaatttccttactaatcctattctaagtatacgatcattacaattatccccccgttaaaaggatttcgtcctcaaaatataaccaatacaactctagatattgagccctcatgccgtactctaactcccaggtgacttcctccaccttattattcctccaaagtattttgaccaaagctatggtcttgttccgaagaaccttttcatttcaattgaggatctaaactggttgttcctcataggacacatctgattgcatttctagggcttcgtaactcaagaaatgagtcgggtctgatatatacttcctccacattgaaatataaaaaatattatctacaactaatattgcttgttacgccttacttgcttaggcatactatagttatttactaattactatacacgctttagcaaatcaaaggatttttcaaaaaagatacacattaaaaccttaaaattaaactttaactttaatgaatacataacttttcataacttttgggaaccccttttcaaaatttaaaactataatcaaaaaatattttatcaaaagtgatgcccatcgtttataaaatagaagcctatgtcgtcccgagaccgaacactctatgcctaaccatcattatatgtacaatcatcctcaagctctggagtcactgatgcttaacctttgactttcttttacctacacatgcaaacatatctatgagtcgacactcagtaagaaaagcacaaaatatacaaaacatattatcgactggcatctaggcgcccatacacctatctacaaggattaagagatgatcaagaatattcttaatgaaagtacgacctctataccacatgcactaagtactcatctagtactagtattggtaggactgaatcgcacctcgagtacaactcagtcttgtaccataggcgctttgtactcgtccagtactactattggtaacgttgtatcatccccttaacaatatatattgtaccatgcgttccgtaccacaactgtactagtgattatagtatccaaatatataattcagcatgcatattacatacatatacatacacatttacatatgcatatcttatactaatcttacctcatacctagattctagtgtgtgtcagtcatct

SEQ ID NO: 33451 - DNA, 1599 bp, Cannabis sativa
atattattttataacaataatatatattttttaaatttttaattgtatcacttttaaataaagtaaaaaaatacttagcataaatttttaatatacgtgtctcgcacctaattttttttactagtatatgtgtatatatataaagaattttgcaaataattctttttttttaatattatgtcaagattatgagcaaatattaaaaaggctaacaataatgagcatatatatatgatagcgatctcggccttatcccctcataagtcataaagccaaacactttatcatttatctaactaaacgaaagagtttcaagtctttcactacaagtgtagtgccctctaaaagaaaaagattgtgattcaaaataatgatcagatgagctcattaattaatttcacatgcaagctacatgaactcaagtacaaaaaacatgtgtatacataaattgaattatgatatattgctttgtggcatttatattacatttataggatatttgttatatgatttggacttaaagggagtagaattagcctgtattttttttttgacaaatgttagaaggtacttagattaagaaaaataaagaactgaaatgtcagatttacttagaaatacaaacctctttaacattctaatttccacaagtctaatctcataccgaacattatgttagtagctactaaatcttaattccataataaaaatttgataattgaataaatattattgtctttgatgtaattaaatttatcaaaaaaagatatattggtctccaaattctctatttcacctatatacaaacaaagtccaaatcaagctagaaagagtacgaaaatgtatataaaaaatgtgaacatgtttaatcttagattcaaaatcttacctcgataatatgtagaaatttaatattaaatttaaaatatacaaaaaaaagtgctaataattagtgttgagataaactttatacttaccctaccatgtgccatgtagctacttagttctagcttagcttcattatttaggagagattattgatcaagttcgttatcatagttacttgccactttatattatagctttataatttgtcaacattttccctaatttatatgtgtaggaattttaattgttttaaccctacaccaacaaacaccaattatcagtatgcaaggtcaatttagaccaaaacggcaccacctaaccaaaacgaccacagttcttgtatcgtttaacctaaggccaaagagacttttcaagaaaagtctagaaaccctaattcagcaaacacaacacacacaaacacatttgtattgaaacttgaaaccctagcacaacaagttcttgagaagaacttgctcgatccaaagttaaaaccctaggatcttactcacacacacacagaaattagtagaatgaaaaataaaaagagaaatggagagaaaacaccagaaattattttagagttcgtaccccatagaaattaggctacatctctgtcaagctcatctcagagatttggcttgagatccactatcaacaatggcgatttataacttttggagcttcctatcacaagatttgatcaggtaaggc

SEQ ID NO: 33452 - DNA, 2091 bp, Cannabis sativa
tccagacagggtctgggatgtgttttgatgcaagccgacagggttatagcctatgcctcccgtcaattgaagggatatgaacagtgttatcaaacacatgatttagagcttgttgctgttgtgttttctctaaagatatggagacattatctatatggagaaaatgcgagatctacataaaccacaagggcctcaagtatttcttcactcaaaagaatttgaatatgagacagaggcggtggctgaaattagtcaaggattatgattgggagattctgtatcatcctgggaaagccaatgtagtggcgaacgctttgagcagaaaaggtcccagacaagtttttagtaccgtaataatagcaccgcaattggcttcgaagatggttaaggctagaattgagtttgtggttggaaaattacataaccggacatttagacagatttgctggaaagaattagaaaaacataattggaagatgttgagctaattaagatttaggatgaggtattagcaggtcggcctaaggacttcttgatctcggatagtggaatactactttacaaagcaagggtttgtgttctaaacaactatgagctcaaaaagagatacttgatgagactcatattacaccttattcgttgcaccagggaaccaccaaaatgtattaggatttgaaattctattattggtggtgtggaatgaagaaagatatagtagattacgtgtctaaatttttaacatgtcatcaaatcaaagtagaacatcagaggctggcagggttattgtaaccattagcacttcctgagtggaagtgggaggatattataatggacttcatggttggattgcccagaaccacgggattgtatgactcagtgtgggtcatagtggaccgtttcacaaagtcagcacattttttcccggtaaaaataacttatacggtggcttagtatgcaaagctgtatgtaaaagagatagttcgtctccatggagctccaaaatccattgtttaagatcgggacccaaagtttacatcaaaattctgaataagtctttagagagctatgggtacgaagttgaagtttagtatagtttttcaccctcagactgatgggcaatctaaaagaacaatacagatactaaaagacttattgcgagcctgtgtcatggactttgaaggttcatgaaataaatacttgtctttgatagaattttcctacaataacaggtatcaaagtaccatagggatggctccctatgaaatgttttacggtaggaagtgtcgttcttcaatttattgggatgaaacaggggaaaggaagtatttgggtcctgagttagttcaaaggaccaatgaagcgatagacaagatcaaggctcggatgcttgctttgcaaagtaggcagaaaagttatgctaatccgaagtgcagagatattgcacttcaggcacctacaagtttcattaatgagaggtatcagacgctttggaaagaggggaaaattaagccctaggtttaaagggccatttgagatactcaagaaggtagggtaggtagcatatcggctaaccttaccaccaacattatcagttgttcataatatatttcatatttcaatgcatgctgagttgagaaaataaaatatgatatgttttcagaccgacccaactcatgtcttgagttatgaagccttagaattgtaatcaaacttatcctatgaggaacaaacaattcaaatcctcgataggaaagaaaaagttcttcgaaagaagaccataattttggttaaggtactctgaaagaacagtaaggtggaagaagccacttgggaactagagtccgacatgagggcttaatatcaagaattattcaagatagattttgaggatgaaatccttttaactggtggataattgtaatgattgcatgttaggttatggattagtagagacaattaacattagttattgacattttataattatatatactttaatatttattgtgggccctatttttagaagtaggcattagagttataatttctcaattctggagattttattaaactttaaggtggcgtttggtt

SEQ ID NO: 33453 - DNA, 1380 bp, Cannabis sativa
aaaaaaaacttattaaaatataattaaaaaaaaattaaaaagtagagtaatatatttaccatgttcaagaaagtcataagcttgagtgcgtctaccgtttttggactcaaagaacttgtaaatgaatctaaaaaacgaccactagtactagtagcagattcagaggccacagtaaaaataaaataataaggacatctcttgcaatcaatgacaaaatattatacctcctagcattatccttccaccaagtaaggacatcaaatgaagaagccattggattaatgatctcatgtctcaaatacctctcaatatcattcaccttctcagtcaaacacttcatcatttcttgttgcaaatatagagataataatttcttttttgaatttgcttgatctgactctttggtggtgatacactaccattgtctttctcaccattaatcttagatttattctccatactatagcaagtatacaaatgttgaagggtttgctccaccttgagcacaatctttgcaacaatttcagtattataaacactctcaaaataatatttaagatacttcatcttatacctaggatcaagcacgacagcaacaaacgacataacgttaatatttttatattcccctaatatttgttatactttcttttcatactgattgccataacagacaacaaatgttcatcacttgaggccaaatcagacaattgagtgtgaatttcataaatttcatgataaaaagtgtttgatgtaacaagtaaggtatcactaaactttagtgtgacttcataagaagagcgtataaacttgatgaatatcttaacactctcccaatcagtactagtaggcggtctaactctcttcttcccactttcattttcattgaagtaactcaagaatatatcatcttcctcctcacaccttgaaaatgcattctcatctcaaagataatagcaaaatctagcatcataaaatttgagttccaccttgtaggcacatctaaaactaaacaccctttataatcaatcttttctctctcaggacaagctttgaatcgaatgtacctcacaacattacgaataacaacaattgaatcatgcaaatcttttaggccctccttcacaataaaattcactatgtgagcagaatatctaaatgcataaaatcaccatcaagaacagaccattttcatgcattgactctcctcttaacaaaactaacagctacatcattggctaatgcattgttcacagtcacgacaaacaccttctctatttcccaaccaacaaacacgattcaatcttcttactaatggtatctcttttatggtttagaatttgacaaaaacttataattcattttttcaaacattaatca

SEQ ID NO: 33454 - DNA, 2609 bp, Cannabis sativa
  modified_base (2562)..(2563): a, c, t, g, unknown or other
atcttcttgctccattatctcctccttcgaatcagcttcctctagacgagttcacttaggcataaattatgtacaaaagaagaaaacccatgtagttagctaccctaactacctagcatagaaatggagttaggggtcatcccccataaattgcttggagaggtcccaactagactaactatctagaaaaaagaacttccaagagttactcgtcccagatagcaagtcaggaacaatgtagagagaaagatgacaaagattaatgacgaaccataaactagaagaattttgggcgaaagaaaaactttgctagcatctttgctgccaatcaaccaatcccaagaatttctaaacaagcgattcgagaaataatatggcacatgatacttaaatctacttaagatggtaatcgcaaaaacaaaaaaccctaatctcaccccaaaacagatcatgcaaatacaatttgaaacgataaattcaaagaacataatccataaatgaagaaacaacctacctgatattgataatagagatgttaagctcatcgtcgatggatctggctggggaagttgatcgcttcacgaaggtgagatgctagaacaattagcgaatcgattttcacgtcaaaatccaggctcgtaatttcttttgctatgaaagtccggatcactggagatggaaggtgtgggaactcttgtgccctaatcctcagcaacaaatgaaggcaaaaatccatggaatttttcaagttgaagaagctttattttgaagttgattcgtagttctaaagattgagagaaatttgtgcgctttgaagggttgacaatttaaaaaatggaaaaaagtagtaactagaagttacaaggggtatttatacccaaaaagtaattcacgtgaagaggaaatagatggccacgatcccacttccagaaacatatgtcttcatccaatggttgtggagtccaacaatctacgtgtatccttgcaattaatgttccccagaaccaaggcgtagatcaatgatgaaaatgctattttttaatttttgtaccaaaaaatgaacagctgtaaaaaatatagctatttttggaaaaagactcctcgataatcacacatgttcactcgcatccagttgacacgtcgacagatcatcatcacagatggaagccaccttctacggtcgagtagcactggaagcttggaggtaaatgttatctgggatttcagtattggacacatggactccaggtcagcacataagacccattgtggaccctcaataaaggtaaagtgggctaagcccacctagatatgtccttctaggaacatatcttggttccgcactcgcaaagtcttctgccctcagcgagccgtatccagaagtatgttcagtactacaagactagagagatgagatagtgcattctcgaaaaaccatccggttcccctttttatccttgcacacaaataagaaaacttattgtcaaattacaacagagtatcatatcaagattaatgggaaaacttcctataacaaatattatgcaattaattcagattaattgctcacaatcagtgtacacgatgttgactagatcaatccaaatctaatctgcctagtcaacagatcatcttatttatgggttggacttcatgagatagcctaagggtattatttgctataaactccccaatagagagaaaaggaaaacctaatgtaattctcaaactactataaatacccctcgaatccaatggattaagggttgaactctcttgcaaactatactcatgaaaacttgagaacctacattctttgtattctctaaggcatttacaaggtaaagatctattgaataatattgacttgtggactaaggctagttaatgccccaaccacgtaaaaaactgtttctctctttttactctttctcttttgattatttgttcttcagttcttatatctatagtttgtttttaaaaatctcagtaaacaccttccacaaacttaatcttaacaagaatttgattaatcctttccccactatgttactttcatctatcaaaaataatacccctacaactgactatagacaaattagattttcaggtatatgtaaagacttcaggccagtaatcctactgataatactaatgtacctgcaactataccaaaacaacatgacaatactggagaacaagctgtagcagcaccacaatctccaatcgaagcacctatagttccacaaaggacaactaaaaacataaagccaccaatatttcttcgtgattatgagtgcaatttgatcatacaagactaatcttctactccttatcctttccataaatcgatatcgtacataaacatatctcctgctcactaagattttatttgtacaataacagctcactacaaaccacgcaaattcaaccaagtcattctgcataaattctggaatgatgcaatgcagactagttatatgcactgcttgccaatggaacatggactgtaacaccctaactagcatatgcgtattacgtgattttaaacatactgtgcanntcgttgctaatcaacgaggtttctggaaaacgtgattaattaaaat

SEQ ID NO: 33455 - DNA, 1157 bp, Cannabis sativa
ttttcatattattatactcatcttcattaccaagtactctatttaatttatgcggctgtagaaaggaactatatgaactacataatttcttttggagaaattcaattatgaactatagaattctgaataaaagaaaaatagatgagtcttttattttgtaatgttattgagtttcaaatctgtagtagttttctatttctgaagcgaatctttaatgatgcttttgttttcatattattatactcctcttcattaccaagtattctatttaatttatggtgctctttttatgcccatcttcagctgctcaaacacgatttatagtgattataaatcgttggacatttgggattgaatgcatatctctagaagatacaactttatggcacaatttggcaaagtggtcaagaaagatggaaatatctcctggatgttaagagagtggctcttaattaaggtactagatagctactagaaacagagttgacattggctgacttacttgatgactggttgctggttttggcagtgattcatgttccatctgagttattatttatttttatatgttctgtttaggtagtgatcctgcttcctctgttctaattcatttttctgttattatttagtctatttgtgtcttgtttttagctttactgcatcaaggattggtctttggtttctatctgctactctaaatgttagttttgtattattttgcttaatgaaatgttagttctccttttacatttaatttcaatcatacaattattattcttctactttttccagcaaagtaataaagaaacatatttattgtggagtcatatatcaagtacttaaaaattttgtttatatttacttgactaatgtgtaatgggaaagaaaataaaaggtgtataaaatatgcccatgtcttttttggaggttagttttcctttacttttaaccattttgttgtatgttgtttctattgctttagtttgattttttttttatcaatcattctgtatttgtttttattttatctgttgtatatcaaattttcccgaacttcctattcgagacctttgtcatatgttttatgaatatgatgaacagggtttaatgcctccaagcaacatgttccttgcatatccctaaattattgaatatct

SEQ ID NO: 33456 - DNA, 1308 bp, Cannabis sativa
  modified_base (601)..(637): a, c, t, g, unknown or other
  modified_base (677)..(677): a, c, t, g, unknown or other
atatatatatatataaatatctcatacccttataatcctaaagagttattcactaaatgggcttaagtggttcaataatggtatactacaatttaaagggccaattatagttttaagggtgctctcatgtgcctctaacataatatataattattaactatcccattatggtagaaaacaaatattagccacatagttaatgattgtatttattgtattaagttcatgattatattagtccacaataataattttaacactactgtccaacacaattttataggtggcgccctataaatagctaacaatattttttaaaagctatttttttaatttatatgagactcgatacttaattatacctatagtgttatgacaccaaggaaagtactaggtaccaataataatttttagcaattttcttttattttgtctctcaaatgggataaaataaaatatgatatctcctactttttttacggtttagtataattttacatgtctgataaatataatttaattaatttattttttttaaaaaagtaagggaaattttatttacactccaaaattttttaaagacaccctattttaataattnnnnnnnnnnnnnnnnnnnnnnnnnnnnnnnnnnnnnagtttttttaactttttttttccaattcatattcttaaanaatatacctatcaaacaaaaataaattatgttttaaatattatgacaaaaaaattatatgaaattttcttaaaaaaaaataaaaatatatataaatgagttagaaaaaagtatgaaaataaaatcaaaataagtattgaaattaatataaaataattggagaatttttttttaagaaagtactttttaaaaatgatttaagtttatattttttctaatgatagagtgtatttatcatttatggagtgtaaatataactccccaaaagtaattttcttaagggtataagtgtaaattaattgtttgattatatgtaatttcagtgaagctatatgtttttatataaagaacacatgtatcatgctaaagaaagaagaaatgtattatgcaattatcacgatatgtatgtttagagcatataacatacggttggcttggaaatgaagatgcatgcaaaatatgttaggtggggccacactcatatatttagagatgagtgtattgattatggagtaataatgatattcttataatgctctcaaatatagagaaatttacatggtatattaacttttgtcatttttttacaaaaatactgccaggcggtatttttttatttttttactgtattt

SEQ ID NO: 33457 - DNA, 2566 bp, Cannabis sativa
ttatatctatcttatactacttttcgcttacaattaagactcaatgtcgttggccaaaagtcaggtcaatattttggtgctttcattgagagcgtgaactcaagcacgctctttacttcaaatctaatcataaacatgatggtggtatagactcctagaggcgtagttgatctagtaaatccataggcagtggatcccgcactgtagaatccagggaatgcaagggtttcaccagccacgaatcctgaacaactgtcaactgtaggtcaaggtgtgacgactcttttgagtggaatcgcgcctggtgtgcaagagaatagaaatacaagttcagtagttaatcagggcattttcaacattgaagttctactcgcaacaaatgttcgaacaaccattagagatgacaccgagatccagaacctctgtgctgctcttggaatcatgcaaggtcataccaacacctttcatcatgattaggaggaactccatgctgcggggaatctcacatttgaagagaaaaggcgtatgttcgctgaatggagggataaagagatggaaaagggctcagcaagtagccattgatgactgaacaagataggccagcgtgctgatatgaagagcctatcaggctaccaatccacaacctgcaacaatcatccccctgggcgagttagacgaagatctagcagtgaacgcttctcaaaccctgaatggtcagccgcccaatcccagtcacaagttctttctatgggccaagcggtaggtggacagaccttatctagtaattcgtcaggagacgtcatacccaataactccgcccaagttaatggttttgaccaccagattggtaaaccaaccagtcattgagacagcctggtgtatccatatttaatatattgggaatggctcatgatctcagagatgattagaacagaaggagagggctagacgagtagcatgtcgcgccagtcggtcagctcggcacccatgttcaaaatcccgctcaaagagatgctgacgtgactctggtcagccaagacactgagcaagttaatccagctgtgcagtcacagttggatgaactaagaaatatgttccaaggcctggccggtcagaagaacaatgtcctcgagttggaccgagcacgtggatcccctttctccctagggatcaatatcctagagttgcctcacaagtttaagatgccgaccttgaagatgtatactggaaaggaagatcccctatcccatctcaagtattttgaaatgcaaatggacctacaaggagtacgaggagatgtatgttgtaggatttttcctgccaccctcttcgaagctgcccagcagtagtatttcaagttgacactcgaaaggttcaactcatggaaggctttctcctcagaattccatgcacaattctcctcttctcgccaactttcgttgcacttaaaagacctgatcgaactgaagcaaagaccaggagaacctctccgagcttacatcagcagattcatgatggaggcaacaaaggttgcacgattgaccgaagacgggaaattgtccgcgatactagggggcattgaagttctcggggaactttggaaggatatcaaaagagacggaccggtagattctatgagtgatttccttgatcgtgcagatggcttcatcaagcttgaagaggccactcagcgagcagaagtcgagcgtaaacttggccagccaaaagctctctctgctggaacatccgtccagctacctcagtacccaagtagttcaagcttgggtggtaaactgtccaacaacaacagacaaggcaatgggaaaaagcaaaagttcgttggtaaaaccgcacaggtccctagggaaaatcctaccaattttattgctttctctgtcctgacagaagatttagagactatctacatggctacatagtcattagctccgtacaagaagcccgctcccatgaaaaaggacgtaagtaagagagacacgacaaagttttgtcgttttaatggagattatggccatgacaccaacgaatgcaacaatctaaagcgggaaattgaattgttgataagaaagaataatccgcacgtgcaaaaatatgtcaaggtcgatcaaaatctaaaggccgataacaatcaagacttactatcaccaccagtagatggacatttgcaagtcattattggaggtccgcacataggtggagattcaggcaaagcccgagaaaggtatgcccgaacattacaacacgagcaagaagaagtggttatggtcgtcaaagagaggaagccaaaaataccacgggcaggggagcccaccataacattcaatgataaggatgctgtcaagattaatttcccacacaacgacccgttagtcgtggaagtccagatagccaacaagatggtggctcgaacaatgatagataatggagcctctacaaatatcttgttcaagacaccgtatgaaaagatgaggctccaattcaaagacttaactccttgtctccagcccgtgtatggtttcttcggccagagtgtttcacctctaggaca

SEQ ID NO: 33458 - DNA, 1225 bp, Cannabis sativa
acagaaaattatgatctttcaaaaatatattatttatttatttgttttttctgatagggaccactagatatttatagactaattacagaatcaattttggatatttataagttagtccctcaaaaaattataaattaacttatggtatctataaattattttcatgacaattcaatacattttgatacccacagcatatttagtcactttattttgtataccatactttataatagcatctacatatgtgcccactaaatatgattttaatccaacaatccctacttggacagtatatgctaccttataaatgtgtaaccttatgaactgatcaaaatttgctattatataaagatattcataacaatctactgcatcaacgatatccaatgggataaaagcagttttcatcttatcaatcatgactaaagccatcaatagtcacctatacaaatatagccaaagacatggatcaatcattgatacgtaacatgaaaattacataatgtaaactggacatgtctatttccaactgatcctccctaaacttaagttatgtcatatataaatatcttagaaaacatagagcaatcaaataaatacatactcccactaaattatgatctccccaaacaatatatactacacccatgagtaaaataccttggttggtaatccttttgtgagcagaccagctatcatggagtttgtctcaatttattgtatgaaaatttatttactttgtactctttctttcacaactagaaactttatgttaaaatgctttgacttagatgggctcatattgttattggaatatagccctgctgaattcttgtcacaaaataagttgtgtgctctttctacattctccaaaatacacagccaagtgtcaaaacttttcacccatattccatgatttgatgctgttatagatttcgctatatcatagttgaagaagctacaagtgtttgttcgatatttgtctagaatatagctccaactaacagaagaatgtagcctgaaatgtacatattctagtatcttggcgtccagcaaaataagaatatgaatattttacgacctctaaatgatttaattttttatatgtgagcatctaattatatattttttctcttaagatacctcataatccttttgactgctatcaaatagtccgttgcttatataccttacatcacaactataataccaagtttaatat

SEQ ID NO: 33459 - DNA, 1410 bp, Cannabis sativa
agttacagaagtgcctactatattccaatagttttggtagaacatggcagacattccatcacaaccggggcttttatcaggactcatagatttaagagcatcatacacttcttgactcgtaaaaggctggattaaagattgattcatgtcataactgatagtagttgggacagcagcaagaacttcttgcaaagaggcatgatctacaccatctgaagcaaacaaattatcataataagcacatatggtgttggtcatatcagtcttggaggtaacagtgacgccttgggaattgataagagatctgattgtatttttggacttcctagaggtggcgtgagcatgaaaaaacttagtattctggtcaccactttgaagccaatcgactcgtgatctttggtgccaatatgtctcctcttgtgcgagtaaatcgtccagtatagactctgaatgttgtagttcaatcatgtcagccgaagtggctgctgcattatttagcagtgaaaccttcttttgcacctttgaaatttgttttttgaaattgccaaacttggatacatgccaccgttggagtgcttctgtgcaagcatgcagattgctcatgaaaagatcaatattaccactggaagttgcagaccaggacgcacgaataatagcagcagcttcaggttcctccagccacaatttttcaaatcgaaatcttgttattcttgctggtttttcctgaactgaagtagtgtacaacacattgacagcaatggcacgatggtctgaagaaaaataatccaaatgtgagattatcatgggtttaaaaaaggtactccataagtcatttgtaaaacaccaatccaaacgctccttgattgcattgatattgtgtcgacccttaatccaagtataaggatccccttcaaatggtaactgagaaagagaacaaaaatccaacaccacccggaaatcatccatttgtttctcattccttaaacatcccccaagtttatcttgatttgaaagaatttcattaaagtcaccaattaccatccatgggagttgaggagcaacatctttgagtcgtttcaaaagagtccatgttaaatgtctattgtgaatagctggagcaccataaaaagctgaaaaatgccatttgggaccatttgcaacagccatataaccatcaaagacatttgaattaaaatattgcaaagttacatcaacatcatctttccaaagtaacattagaccaccacttaaacctactctagggacttcaagtccattattgaaatgtaaaagacttcgaaaacgagaaatagaattactaactagtttagtttccataataaaaagtacagtgggggtttgctctttgacaagcaaacgaagtttgcgaatagcactcgggttccccaa

SEQ ID NO: 33460 - DNA, 2187 bp, Cannabis sativa
  modified_base (2105)..(2140): a, c, t, g, unknown or other
aaaaaaaaaaaaaacaagagcaaacattctcaaaaatccataaatgaagccttaaatatccgtggccatctctaaatccaaatgggtaattataagaaaatgagagattaacttaagaacaattagtggatttgtcgtcggatttttgccactaatattaatttattcttgacttttgacatattattgttttgtgatgaaattacatgttatacccactttattttatttgtttttattttttcctctattttcatattcttaagatatacccacttttaaaaatgatatcctcattcaactccttaagttaatgcaaattatatactagacttaagtaaatagtgagggtatattgggcaacccactcaaaaaagtgggtatatttaaaaaaaatataatataaagatatttttgattaattgaaataaaaaagagatatttttcaacttatcccttattttgtccccggccgtatagggcaaaataagtattattttatcctctgagttttgacatatataatattattttggtgacaaactaactattattttactcttatctttaacatcgttaaaattaacctttaagctaatatttttatggacatattaatttttttactataattaattaattaaggcaccctattttaataattaacataaaatattcttttaagatttatacttactttagtttattttcttaattttaaaaaactaattattctaaaataaattttgcatgttaaagaaaaaatagttcaaactattcattattttgtaaaaaattataaaagaaaaataaattaaaatgcgtaaatataatacgaaaaataaattaatagtgtaaaaaaataataaaaaaagtattaaaaataaattttaaaatacaaattagtataatatttttaatgaatggggtgcctttatatatttatagggtgaaaatatattcactctttttaaatctataataaaagaaaaataatttgagattttacaaataaatagagtatattgatcttgtttaaaaaaaacgaaaaaaaaaacaagagtgcattgttccaaaaattgtgattagtggggcccatcattctcatccaagctttcaagcatttaacctagttttttattttgtcagacaactagaaaaacttgagatcctccttcctttactaattttgaaatcctctctctccctcttcataattttcgagcctatagtgaaagagtacatgcccactcatagcaagtcaagtactcaatcatagtgtggaaaactgtgaagaatccaacacctgaaggagaagcaggctcagatcttgttaatactctacgatagaaaggaacaaggattagagatctgagaggaaggagacatattattccgctaccaccaatataaggtttcttaaatttatatgtgtttattttcactattttaagaattcatgtttagggtattagattatagtttatgatcaatatacttgttattaaatctagatcctggaaaaatatatttcaacagacggtcgttcaccccttttaaaagcaatggaaaagctcgataggacaatatagcttattggcgcaagttggcgtgggggaggtgcaaagcaggccaggacctctacgaagtatggattaagagaaagagtagtgccacacaacaataattggtcactataagcaaccctaccagcctttggagaagtagccatttccctatcatcagctagtgacaaacaaaaggagacattgggaaaaataatgtaggtgaccataatgtcacgaaggtcagctacggtgatagagttagtaacatcgacaagagaaaataggtctgccagcattagcaagcttggaatcattaacttcttagaagacatacctttagacataaggaaatgattgtaagcatgggcttcacattaatttatgatttctttcgagaatcctacaagctcaagtcttattttgaggtaacccaacaagaaatgaacgagagttaaacttcgtcccacaatcatcgggccgggcagactcaagtgaaaggggagaaataagtgttggaagttattttaccaggatctnnnnnnnnnnnnnnnnnnnnnnnnnnnnnnnnnnnnaatatgaacttctaaaacgataggaaattaaacaaataagagtatca

SEQ ID NO: 33461 - DNA, 1555 bp, Cannabis sativa
  modified_base (467)..(477): a, c, t, g, unknown or other
tccttcaatgtcttgttgactacttcaacttgaccattttcttggggatgcgctattgcagagaaacttttgatgatgccatggttcgcacaaaaattagtgaaggacgggctgtcaaactgtttgccattgtctgagactatattgtatggcaatccgaaccggcaaattatgttcttcagaacaaagtcttgaacttttttggatgtaatggttgctagtggctcagcttccgtccacttagtaaagtaatcaaccgtaaccactgcatactgcactccacctttgccattgggtaattgtccgatcaggtcaatttcccaaatgacaaaaggccacggactttgcatctaagttaactcattgggtagagctcacggtatctttgaaaatctctagcatttgtcatattttttaacataggccttcgaatcctcaatcattgtcggccaaaaataaccttgccnnnnnnnnnnnttagataaactctgcccggcagtgtgatttccacaaaatccatcatgcacttcagacaaaagttgtgcagcttcttcttgggtaacacatctgactaatggcatggagacctcgtctgtacataatcccctctactatgatgtaccgtgcgaccttccttctcatttttcgagcttcatttcgattatctaggagttccccagtgttgaggtaggttgctattggcatcatccagtttggaaaagtgtcaatcatttcaatctcttccgttccagtgatgctaggttcttctagaaactggataggaaccaaatttgctttatcacttacattactactcacaagccgagctaacatgtcagcagtcgcgttttcttcccttggaattttctgagaacgtagcttttgaactgtgtgagcagatcatgtattttgctccaatatattatcatcttttctccctaagccttgtgttctccagatacatgatttaccaccacttgtgaatcattacagattttgacatgttcggctttcatctcctgggctagttttagaccagcgatcaaagcttcatattcggcctcattattggatgctttaaatccaaacttgactgcagcgtgcaggtgttgcccctcaggtgtgacaaggccgattcctgcacctgacagttgatctgtagccgacccgtccacgtgtagtttccaagttggcttgtcgtcattgttacttggctaaggtatttgtactggctcagggttgccttctgatatgctttcttccttgcctgtgcattctaccacaaagtctgctcaggcctggcctttgattgttgttcggggtgggaaagtaatttcatactgacccatttctactgcccacttgagtaaccgtccagatgcgtctgacttttgtagtatatggcgtaatggttggtcagtgtacacccgaacaggatgagcttgaaaatagggccttaacttccttgttcctagaatcaggcagttagtgagtttctctatcaatgggtatcggcctttggcctcaatgagtcttttgttggaaattattttac

SEQ ID NO: 33462 - DNA, 1569 bp, Cannabis sativa
gaacaaagctcctgggccagatggatatgggagtgctttcttccaagacaactggaagatagtggggaatgatactgtagaggctgtattgtcctttctaaactcagggaagattttaaaggagatcaataccactactatcactctgattgcaaaaacaaaatgccctaagagtgtagtggattttaggcccatttcttgttgtaatgtcatttacaaggctgctaccaaagtgatctgtaatcgattgagaaggattctacctgatcttatagcaggaaatcaaggaggatttgtacatgggaggttcattgctcacaatgtgatagtttgccaagacttggtaagattatatgggaggaagaattgcaagccaagtagtatgatcaaaattgacctgaggaaagcttatgacacaatagaatggggctttattgaggagatgatgagagcacttggatttcctagtaagttcataaatctcattatggaatgcatatgtacacctaagttttccttgctactgaatggtactatgtgtggattcttcaattcaaagagagggttaagacaaggagatccgatgtctcccctcctctttgtattgggaatggagtacttttcgagaattttcactaaggtgagtgattggcttagttttaaataccatgataaatgtagtcaaatgaagttgaatcacttgtgttttgcagatgatttgttagttttctgtaacggtgatttcatctccataatgctgcttcttaaaggtctaaaattgttctcctctacttctggcttaatgccaaatgataaaaaaaaacagcaatatattgctcgggaatgcctgaaaatgaagtaactagaattcttgaggcatccaattacaagagaagctctcttcctttccgataccttggcatcccaatctgttcaaggaagatatctagagctgtatgtcaatgtttgctagaaaaaatgactagcagaattcgatgttggagttcaaggaacttatcttacatgggtagggtcaccttgatcaactcggtgttgcttgccatactcacatattgggctcagattttcattttgcctaagcaactcttgaaggatatagaagcaacttgcaggtcttttctttagaaaggcacacaagaggcagcaagacctggattagtggcatgggaattcatttgcagacccaaatctgctggtggcctaggatttcgaaatatacaacaatggaacattgcagcattgggaagatacgtttgggacatagcaagcaagaaggattgtctttttgtcaaatggatacacatggtgtacctgaaagatcagaactggtggagttatgctgcttcacaagactgtagttgggcatggaaaaaaattgttgctgtgaaggataagtttcagcaaagaggagacatggaaagctttgtacaacagagttatcgagtcaagcaagggtacctagatcttttcccagagcatcctaaactcccatggtgtaatctggtttgggacagactaatcattcccaaacatagattcattctatgg

SEQ ID NO: 33463 - DNA, 2878 bp, Cannabis sativa
  modified_base (48)..(70): a, c, t, g, unknown or other
  modified_base (632)..(634): a, c, t, g, unknown or other
ttttacataaaaatatttcataaaatataatttaatataatacaatannnnnnnnnnnnnnnnnnnnnnncgttccaaacgagcccttaattttttttttttttttttaatttttcttttttattttagtgataaaattccttttgtttgcaaatttaaagtatgtattaaatgttatagttaaatgccaattatgataccaactagaattgctaatgtgtgtacatggcatacttttggtcaaaataattttaattatttttaataactttcaaaactaatttaataaaattcaaagtattttaaaattgcaaaagtaattaattattggtcaaaaatatatctttcattatcagctttctttttcttctaattaatgtctacaccttcttctttgtgtagatgtatttattgaatcatattcaatggatttaaactcaaccgatccaatctaattatttattggatattaaattttgtcatccggtccaatccaatcgaattgagtcatccgatccaatggatgtattggattggatcgattccaaccattcgatgcattgactagttttttattgaattaaaatggatccatccaatttatttaagctaccatttaagttgatttcatnnnaaagaaaaaaatatatataaaaaatataatttaaaacttaataatccaacatacataataaacattagtttagtccaacctaattctcatgatttcataataaaatcactaaaaaaataaaatttatttaatatccatctgtactgctggccatgttttcttcattcctaaatctacacttcagccatcttctgtgggtgatgatcatggtccttctaatagtgttgttgctgaagaaaagacagtttctactgatgtttagggggagcaagatgttgctcatggtcaaactggatctactactgctgctattcgggggagcaacttagtgtacgtggttagaatgattccacaacagccaatgtctagggggagacatcgaatgctgctcaatcttctgctcatgttggtgatgttaccatggtacatagctttgctgcctctcttgttgcctattccagcagcgaataattatggtcatcgagggggagattaagtactttattttttgtataaagactgttcacattgtccatattttgtgcttcgacttttgactggttggttgtgcttcttttgccaaactttaccttgttgtttgttggattagtcttttgttggtttttgtgtgtttttgctattgtgtctttttctgtattttgtgcatggtcgttgatcataatttgccaagggggagattgtaagtgcaatagtttgtgtatggcaagttatgtggttccttgtttgttcagttttctgactttccatgtttgttgtcttagctttttacattggtcatctaagttatcatcaatttcatctgttttgtcttggtaatttttattgttttccatgtcagctttcaccttttatattcctttcttgtataagtcagttccagttggattcagctggggtggttagttagccgagccgttttgttttcaaatgagtatacaatattctgttgttgccttttctaactaactctcatatttgatagaatcgattttgattcttgctctgctagggaaatttttttctctggtgtttctgtgttatatgcaaatgaaaaattcagtgaatcttcaagaggttgaagaagaagttcgaatctgcattgttcgaggagagttcagactgaactgctgaaggatcttcagcttgttagaacttagaagcaaggagagcttattttcttggatctaagtgtgcttagatcagttatcttgattgtgttcaagaattaggtaacatcgtgtaaagtcatttcagattatgtagtttgatttgtaaaattggaactggtgtatgtaattgaattgattttatagtggatgttactttacccggttcttggggacccaagcactacttggtaggaatgtgtttctaatgtagaggaagcttgtaattctggtgttcattgatttagctttcttatcttaattcttcgtgtaatatgcatttaagttcaattacttagctttcagagatattagaactttcgaaagcaatcaaaaaaacattataagccctcattccattacatgattcctctctctcttataacacttatttttttataagagaaactaaatacaataatatacatatatatatacacaataaaagaactcttctcatgaataccaacaccctaaaacaaaaaaggttcaaacaaaatcatcaatcaactaaccctcaactagctacaaaaacaacaaaaccaactattcaccttagctattaaaaaagaagaataatgcaaaaaaaaattataataataaagagacacgcactttagagcacgtcaaaactagaacacaatccaaaatggaatgggttgtcgccgatgactttagaacaatgtcgacgctaggcaagaagaagaaaataaaccagtagcaattcactaagaagaagaagaaaaataaaaggaaaaagaagatgaagtaggcgtattattgatagaagaggaatgcagagaaaaaagagagataaaaaaccttaaaatggggatgccaatattatacatgaagttatatcaactaagagaacaataacaatggtgaaggagaaataaaggtactcattacatgaacatgaaaagataactcctattttaattttaaaaattatatatttttttaaaaaaccataaaaatcagattgaaaaaaaaaaaagatttaaaattattaagttaccctttaaaaattggggattgttataaatagtattaa

SEQ ID NO: 33464 - DNA, 2036 bp, Cannabis sativa
aaaaaaaccaaagaattctctcagactatgtcattcgacataactgtataaagaaatttgttcaaaaataaacaacattttaaaacctattatatattcacaaattaatttatttaaattaaatatttattaatctaaaataaatataatttaaattaaattatatatattaacttaaattcatttcatgaatgcaattaaaaaaaataacaattatattacacaaatattttaaaattagttcatttgttaacaagttaatatatctaatttagtaaacatgtaaaaattacaaattaacataaaaaaataagctacggaagaaaaattcttatacatttcagcatcaatcgtccaagtcttggtgaattactaccaacaaatattctatccattatcgctgtaatggtaacaattcagtttttacatcgtatatctttttttccccaaactgtaaaaagaagtaaacatttatattagtatatatatatattactatttgttaatataataaataagataattaataattaaaatttatagatttttgattgttgcaggtatgacgatgttattcatgtatttcaatacataaaaactaaattcttagtttttaagttctctttgataattttatcgtgaaattcctaaccatgccccaataaacacatttgatctccctaaaatatcgtatgctctgttttaaaaattatattaacatatatatatatatacctaacttagtttattaaaagatttgttacataaaaaataattaaattattaccttttaacattgcacggatttattgaggaactttgtggccatctagaggatctaaatagataatatttcttagtgcaacaacttctagcatccaatgtacactaaaatatatatatatacatgtatataagatggtgtaaaaaataatttcaaattataataaagaaaataattttaaattatctcttaagtagtgtttactcgaatttcaaggaataacaaacatttggtgttggctattcatcaatgataaccaatgagccaatccttccaatgcaaccctaaaagactctatcttttctaaatcattgttaccatgcattgcgagaagctttgggtcataaaacttaaaaatttgtctcaaatcatgtaatccctcccaaatgtgcctgcattaaattgttaaatattaatattttataataatttcagtattataaattgatataaggttaattaggttaaagaagagatacatcattccaaaaagtatttcctggttgccgatgaagtcacacaacaccacctgttggaaatcttctccaaatatcgttatttgggtaccaagcgctatgaatccacatggtacccaaattgggactattccattatttgccttgattctcaaaaagtcttcaactatccatctgattgccttagggattagtgccatgatctctggagtgaattaatgatctacttgatccccactgccttttcgacaaggcatgggacctttttccttcgacacatcatgtcttgatagtggttaagctagtggaccctatacaaaataccatataatatataaaagtttttggcagcataacagttgtaattggacgttcctaaaaattttaaacatgcctaacaacaaacaaaacagataaaacaatacaaaacaaactaaaaaacgttaacaatataaaaattatccacccatctgacaatagtacatgtattcgcagaacctacttcactatggttgaacatttaagatattcaaactccactaagcattcataattaattaataataaaatttacctcggatgttaaaattaggtatttaggcaaaagttacctcaattaagattggaatatcaacaccatcttgcagtatttctaaaataagaacctgggcatgtgaatcatgatagggaaaagtgtgaattgtgatttgaccctcatcttcgtacagataatctcgggccactatgttattaatgttaatattttctgagtagag

SEQ ID NO: 33465 - DNA, 1965 bp, Cannabis sativa
  modified_base (1445)..(1448): a, c, t, g, unknown or other
tagtcacaacaagtattatgattaaaaacacatgcacttagtcacaataatttgtgatttttgtgactaatacttttagccacagactttttagtctataatggtgatttgtaattagtcacaactattttacttttagccacaaattttgttgtgactaattaaagtaagattatttgtaggaactgagactaaaggtataagtgacagtttaaaactgacaccaaaagtgcagtttgtagtagcttctttgaattttgttaaattgtcttttggtaaacgttctgtaagcaaagccgctcattgtattgcttgtagttcttgtttgtattcagatatatcgtagttttagaacggagaatagtttaactgaatctttatctgttgtaatagttcaagcgtttatttaataaaattaccatccctttccaaaaaaaaaaattataaatggccggtgacaactataattttttatttatttatttatttttccaggggtgacaattataattgttagaaattttattaaatatgttgaaacaaccttgcatatcatctttctagttttccttgtcaaacatatatcagcttgttgattgaatttttttctttctcaacaaaccaacatatactcgatttagataatgagtactgtatacatttttctaaaaagtcaccaattagctagagaatcttgagtacatattgtgaaattaattatttgctaattaaagtgtgcacacattaatcagattcatgtattattttgttcaccaatgtctatattctatttctaattaagtatttcagattgacccaccatggaatattgatctaaatatatttatgtataactaagtttttcttataatattttcattgtacgtaaatatttattgtcaatatgagaatatcgtaattttcatatatttgactttaacatactcgcttttagactttagctaggaagatattataagtgggaaaagtgattctttttgaattcatttctagtgtgtacatatatttggactggagaatctataatttcttctgtttcatttatatatattcggatcatataataattataagtgaaacaagccacagacgaaataattccttgaaaactaaaattctaacgcacaaaattacgaatgtaatgacgcaattatcttatgtaattagtgtaattggcacaaatacccttgaatttgtgaaaaaactaattttagcaaaatgtcaatgaatcagtttttctctcaaataagtagaattctttttaactctcaaataaatattaaaattactaactagttataagattatctctcaaattgtaacattacgaaaaaatacgtagttgtagttataattttttagtcataacaaaaaaaaaattataactaaatgaaatttttaatcacaacaaaaagttacttgtnnnnaaaatataatatttagatacaagtattgtgagtaaacgcatttagtgacaacaaattttgattttcgctacaatataagaatatgatttataattagtcacaattttttatttttagggacaaattttgttgtcgaagtaaaattttttatatataattatccaatacattttgacagggttacaaattaaatttgttgcaaatttatgagcaaaaaatatacaaagattctttttggatgaaaaaaaataatatacatatatagaaattaagttaaatcttaatcaagaattaaagtttacttctctaagtacaagtgcattcttctttttctcgacaattaattgtaaacgttcatttacatatataatcaaaaaaatcaattaagatgaacaccagttcagtatataggaataccttacttatattacgatcaatcttatatggcaacaaactcaaaagatcatttggatatgaataattatgatgctctctataaattataataagtactgtt

SEQ ID NO: 33466 - DNA, 1387 bp, Cannabis sativa
  modified_base (520)..(539): a, c, t, g, unknown or other
attatatatgtacatgtataagtacttaattaggagatagaattagaagtctaacatgtacatagggcaaggtaactatatacatttgatgtaatgcactaatattcaagtctgagtagaaatttttatacatatttgatctgtatattatatatacttgtgtttcatgtttaatgtttaagtgaatagagttgtttcaagtgaataattattgtttttattgaagtataaaaaattgtatatactatttgacaatttttaaatgaatcaaagagtggtatattaacatcaattttacaaatacaatctacatataacactacaaaaaatagttatttttagtgactattttttagtcacaacatgaaatttttgtaactatatatgacatttggtcacaacaaaaaactacttgtgactaaaacatagtaattagacacaagttgtcactaatttacttttagtcacaacaagtattgtgactaaaatcacatttagtcacaataaattgtaatttttnnnnnnnnnnnnnnnnnnnncggaccttttagtcacaacataaagatgataattaataattagtcacaacttttttacttttagtcacaaaattttgtgactaaaagtaagattttttgtagataagattttttataccaacatattgaaattttaaacttttttacttttttactgtggagtagaattttttttaaaaatactgtgtaagttttatatgtgtactgtgttaagttttcacagttgttttaattgttatgttttgctgttttatgattattttataaaaagatagtatttttgtaaaaaattctgtgtgacagtaaaattgtaaatatttgtccaaaatttagtatttttgtaaaaatctcatctatatacagcctaaattcaggcctgaaaatgcttttttattacaattgatcaatccaatctctaattttacatgtaatctctttcttatccattcctgccactctacttttaatttttgttttgataattttggcaatttcagttcttaaaaaaatacctataaaataaaaaataaaatatattttaaatattaagacaaacaaataaaagtaaaaaattacatgaaattttattaaaaaaaatatacatatttttttttaaaaaaatgtgcaaataaaatataactagtattaaaagaaaataatgtgaaaaagaaatttaaaaaaatattaaaaataatttctaaaaaataatttaagttaattattttttaatattgggatacatttatattatggagtgtgttgctatatttttaaacactacgcaagtatacgcaatcaagtagtaaatctcacacaggtgaggtcgatcccacagggaattggattaa

SEQ ID NO: 33467 - DNA, 1543 bp, Cannabis sativa
  modified_base (140)..(149): a, c, t, g, unknown or other
  modified_base (236)..(236): a, c, t, g, unknown or other
ctgtcagatcctattacaatgataacactacatactacacttgatcttgacatcaagatgacgagattaattgaaatgcacttttagttttatattagtgcaagtgtgagttttttaggattttataccctaaataaaannnnnnnnnntataatcaaatttactaattaatagagtatcaaaaattattttatgttgcatatttcacatgattaatttcatgattatatgtttantatataaattctattaaatcttgaacatatagttattcatgattatagtgttgtctacatagtggaaaataatcatgattatatgcttcaaactacttagtcccacgatttatcaatgcactagatttacattgacgtcataatcagcgatgtgatttacttacacttgtataagtagaatgtccttccaggtcattagcaaagtaaactagtatcggatgtatcgattatatatcgaattggaccgatattgacagtggaaaaaaatatcataaacttactgttatgtcttttctaagttaatgtcacttagttgatcttaggtcaattgatctcaatcctaagatggttaagttctagcttaattgtactatatgaggtctttgacttgttcattacaattgaccaataagatcgacccaatacttacatcttgggaactcagtagtttaattgagtgggagcgttaatcatagatatagaatctatagcttctattagaagtgaaacgatgattttcttagagcctggcttaacgcgatacatgataatacgctcatttcagtaattatattagtttactgaaatatcatttgtaagtagctaagagttttaagaataaaatacactaaagggtaaaatggtaaatttttccttactcaatataaactgtctatagaggatcattgactatttagattgtaacaatgaataattcaaagcatatctatatttggtatataaagcgttctatgtaatttggagtgcaattccgaatctatagtggagttatgaggagttaataagttaagaaatttacttggtaaattttgaatctaattattaggagtttggttacataggcctatggtcctcatattgtctgggatgatattatcttgtagactcaactaattgatttaataagtcaattagaatttgaaatagactaagggtcagtttggcacagctgtgctgtgggaaaaagcagctgtagttgtgctgtgaggaaaatcagctgtagcagaactgtgaaaaaaagctgagttgagtgtttggtaaattataatttttaaagtgctgttacttgttaagattctattataataatgataatattttaatctagttcattataatcacaaatataaaaaataataataaaaaaaaatctatgttatataaaacttttattttttatgtattttaattatttttttctatagtataaatttatatgcattttataaaaataatatttaatatttttaaattatatttttatcacttgtaaaagataaaattgt

SEQ ID NO: 33468 - DNA, 1512 bp, Cannabis sativa
  modified_base (1472)..(1486): a, c, t, g, unknown or other
ctatagagataaaaagaggagaacattagcactttctcaagcaacttatatagataaggtgctagaaagattctcaaaggggaatttcaagaaatgacagttacgtccaaacatggaattactctatgcaaggatcaatgtccaaaaactccttaagaggaagaggaatgacaaagtacccttatgcatcagtagttgagagcttaatatatgcaatgttgtgtacaaggcctaacatatgctacattgtagggattgttagtcgttatcaatctaatctaggtttggaacactagattgctgtaaagcacattctcaagtatcttcggagagtgagagatctcatgcttgtatattctagttgagagttaaatcctactagatatacttattctaattttcaatcagacaaagatagtcaaaagtcgacatttggttcaatatttactattggtggaggagttgtagtctggagaagcattaagaaaactagtattgtagattcaaccatggaagccgaatatatagtgtgcttgtgaagcagctaaggaagcagtttggttgaagaaattctacatagcattggaagtagttctagaagtagaaaaaccactagtgttctactgtgacaatagtggagcagtggccaactccaaagaaccaaggagcaacaagaaaggcaagcatattgagaggaaatacctactaaggagtataatagagagaggtgatttgacggtcttgaaaaccgcttcagaacataacttggcagatccgtgcacaaagacgctaccagcaaaatcttttatgggtcatattgctaatatgggactaacggagatgcctaatttgcttttagggcaagtgggagattgttagggtttatgccatgaaaagcttgtaaacacatttttaattattaaataaagagtaaacttttgatatattatgtgtgtgaatgttgaattgttaatatttattgttgaatattcatatatgaggttgttgtggcttgtagttgtgcagagaactaagaccacttagctatgaataaaacagtcagcgacttattaaagttacagaatctttaatcaatggttgctagtatggttcactaatgaccgctcttcagtgcaattaatcttggttcagattacggatgtagtgagacatcaaagtgaagatactgtatataatagaaattatacatgacaatgactgatatgaatataattgtctttattaacatgccttttatcataaagacttaattcatatcataacgataatcaatactagattcacctaaatcttgagttatcatgaactcctgttcatgtacaattataaaatcttgactttcctaacgaatcgaatgttgtttccgtttaagtgttaattctggaactggataaagaagtaaattaatgaaactaaaggataaagaagtaattgttggaaatattttaccnnnnnnnnnnnnnnntaccatgtatgtttcattaacatcct

SEQ ID NO: 33469 - DNA, 2322 bp, Cannabis sativa
  modified_base (795)..(804): a, c, t, g, unknown or other
caattaaagatcatttaaaggccggtacgcttccgctattccctaattttattgtttgattctcttgaattaattagggctatatatagatttacagtattctaataaaaaaaattgagggatttttagcactaattgataaagatacttttgtcattaataattcatatgccaaatcagttataccttaactctttattacaatccaattcaaccatcactttagtacagcacatgagtccctaatttactcattgatttggagaagattgcattacttttacactaggttggtccactccattgaaaataaacatatatataatagattctttgtacttacaagacaaaaatttgacgctctcgttgtgatgtgagtcactacattattcattagtttttagcttttcacaaactattttgattttgacttagaacattacttgtggtgttaaaactttttagtaccacacacattacttcattgtataaattatcttgctagttcgctgaattttttttcgtcacacgtaatcttttaaacatttttcttcaccttccttttcgttgtccatacaatgtatttaggtcaacgatttattcttttttttttttcgtcctgattttgcattatgtcatttgagggtgttgcaaatgaagtgggataacgtatgtgttagaccgaaattaaaaaataataaaattggaaagaattactgatagaataatctggctgagtcgcgtacaatgttactctctttaagacgtttcgcggctctgcccgaagtgtgcacnnnnnnnnnncaaccacggcgtccccagaataaaacagcctttctaaacgcacgatacgttctacaccgaactgtatcactctataacaccctaaaatttgctctgagaaaaatcgcaaggaagaaagaaaaagattttttaatgttggaaaagatatgttcttacgttgttctgatacaacttatatagaagtcgatccaagaaaaaacggtaatgttatcgttagtggaggagttggacataaataaataaaaaataaatctttatttaatcaaataatttttctttaaaaatttaagtgacacctcacccgccaaccaacccaacccgggtcggacggcggcgacgcgctcgtgtgtggtgatccaatgtgtgagtcctcacccatgcacacaaaattgggtaccccttggagtccaaacctatatctcaaacttgcacttatacacttcaaatgaagtgtttctatcccatgtggaactcctactcacacatttcacttttctatttttacataattttacaaaaagttccaacagtatgtacactgatctcatatagatacataaaattttgacaaacttgctaagaaatttgtaattgttaaggattcaaacgaaaaaaaaaaacttaaaaattgaacagaagactatccgaaacttaaatggagtaagtccaccatgcgaaaaattcttggaaaaacatttcctttaaataatagtaagttgagtcaatacaaaattaagcaagggaaaaggaaaagctatgaaatgcttgactagctccctttcagaaaaaataaataaaaaataaaagaagcttgcctagccttggcttgttctcgaaaaattatactaatatattaggtcgtaatgtcgaaactaacaacccgtggatctttttcgtcaattaaactaatcaaccatgtcttgtactaattaagtatacgtaaaccatttttttttactcttttaagaaaagaaatgtgtgttttgctgttatttgtcaaattatatacctaaatcttgtgttttttctttgtttttatttccaagattacattatcttgaagttaatatagatttagttactatttattatatatgatttagttatattactgttatagacgaactcaaaaattgtagacaaacatctatccaaacacaatctcctaaactagtaatagagatcgccagtgtgtgggcacgctattcgccgattgcaaaatggcgctacaagaatcactgccaacaacaattaataaagaatagatatatctaataaaatagtctgaaaattaaaattaatatgaagcttattaatctacccaattgccacagtaaaattactattaataatgtagaacctctatgttagaatattctatttaaaaataatttttaatttattataaaaaaaatacagtttttaagtcccatattaaaattataattaaggatattggcggctaaactacttgaactttacggtttgtaacacttaaccacaaaaaccgaaattttg

SEQ ID NO: 33470 - DNA, 1774 bp, Cannabis sativa
  modified_base (975)..(987): a, c, t, g, unknown or other
tagatgtcaccttaaatttgctaagagtttagtagtttagagggatttgccactaaactttgagcttggagggttaagtgcaagtggaatgatagttgagaaatttagccgcaaaaaactcatatatatatatacactcacttacaaccttgagcgtagattagtagggatcaccatgatttgaacaagatattatatttttgtccaaaagtttattatttcttcttatctctaagcactaagggaactcttatatatgaaaataactttgggaattatcaagcattttaagatttctagcaaagtgatttgttgatagaaactttttcatccaaatgagtacattagacttctttatatagtattttaggtgatcacactaagaattcaaacacaccacacctcatttttctcacatatatgagtcttaatctattttataacaattatatcatcataattttgaattccttaaattaaattgtgtaacagcccttttattacactacttatgtgtgaccaacacaagtgttacaagtgacaataaattgtaactcgtctccaaattacaacacgtaaattacaaaatacaaattaaaactataagttacacatttatttattatacatttaatatatatggttcacacaataatatatttatctcattttaatctatacttattatattatcaaataatataccatacacgagctgaaagaacaatctcaaccgttgatgtacttttattccgccaaaaccaccgtctcgccacaccgcccaagcaatcatggcaacctcttctcgaacaccagaatgagcaacatactgctgcattaagtaggggtgttcatccaatctaatccgtactatagctcaaatccaatccaatccaatccgcaaaagtacggatttgatcgattattttggattggttacgattattttaaattggttactttttaatattaaannnnnnnnnnnnnatgaaaaaaaatattttttttttccacataactagcaaaaaaataaaataaattattattattttatgtcttcaacaacaaattagaataaataaaataacaaattcaaaggaagaaaaaaaattgtatgtataaaaaaatgtttaattctgttttacattgtatttaaaaaaaaattatatataagaatggaatatacatgtgatttattaagttttgaaatataattgtattatatgtattaaatttttaaattactattttctttacattaaaatattatttatatataattttttaatattatttataaatatatgtgatttggattggttacttttatatgttaatcaacatccgtacaagtgctcaatccaatccgtaattacaatttagattggatcgactattttataaaaaccctaacattaaacaactttacagttttttttaactaagtaattgagaattgtaaaaaattatttctcaatgagtagtgtttctttcgtttttatttatcgatttacctttttttttgggtgctcatagactaatatttaaagtgtcacatatgccacttgcgcgttaaaaatgcccttaaactacatgtcacatatgtcccaacgtgaaattcaaggataatttttcaacgaaaagcacaatttttgtatatgccaagtgcagaaatataaaataattaacttttatctataactactataaaagtgagaatatttttaggctttctctatataaattacataattaaccttcattaaatattaaa

SEQ ID NO: 33471 - DNA, 1533 bp, Cannabis sativa
  modified_base (56)..(56): a, c, t, g, unknown or other
ggttcactctgggcgtgcaagaaactagaacactagtactcgaaccaagcaaactncccccggtactagaatcccatttgctacaaattcttaaaggccaatcggtgatgacaacgaaccacagatttactggctacactagggcaaatacaaggccacaataacactcttcattacgattagcaagatactagagcagctataaattttgcttttgaagaacaaaggcgccagctcaaggagtggagggatcgagagatggaaatcatgagagcccaacaagaagtgattgacaatcattcaaggcaggccaccgtactaatcaagagagtctattaagtcatcggccaacagcgagtagcagatacttacattcccactagacctcggcacgggccagaagggtgttcagataaacacactcagcaaacccaagttaatggatcatccaattcgagaccacgaagtcaaactatgggccacatggtagacgagcaagtttgccaacccgttacttgggagggaatgataagcataacatccgtccttagacggaaataccaagccaaccggtatcgctatttcaatgtaacctaacatgcaatcataaacatgcatactaaacatgtaatcacatatgcaaataattatactaatcttacctagtttcctgattcaagtgtgtcggtcaacctgaacaaaaattcacgtgctgaatggaggccctatgtcacaatgtaaaatggataagtgtttactatagaacactactctaatgcccgaatagatactagggtttttctactgaactataaagtgaaaacacccttataaaaaaaatacatagtttggctctaacttatatcccatatggtagagcttatcacaagctttaaaacggtatatagaatgtccaaaacagacatccgagtgtaaaattatggccaaaatacaaaaattgattccttggtaaagtcccattatggaagctcctccgatcatggaagcttctttctccgatcatggaagctccttcgatcatggaagctctctgctcatggaaactcctctgatcatggaagctcttcagatcatggaagctctccgatcatggaagctcctacgatcatggaagctcttccgatcaggaagctctccgatcatggatgctcctacgatcatggaagctcctccgatcatggaagctctctgctcatggaagctcatccgatcatggaagctcctctagatcatggaagctcctccaatcatggaagctctccaatctcggaagctctctaatcctggaagctctccaatcgtggaagctttccaattggggaagctctccaatcgtggaagctctccaatcgtggaagctttccaaatgtggaagcttttcaatcgtggaagctctccagccgtggaagctctccaatcgtggaagctctccaatcgtggaagcttctccaatcgtggaagcttttgttgggttttatgccctaaataaaaatcatttcaatataatcagat

SEQ ID NO: 33472 - DNA, 2091 bp, Cannabis sativa
aagtcaattactttgtatttttgagatctatctaatgaatcttttctcaaggcgtggccccgtggactagtaacaacctgaaaggattcttgaaactacgtacaaaaactgtgtgtttttacttttctgcattttttatttttctggtttcttctagagttacagagttattttttgtagctacggaaaaactgttttcagtaccactttcattattccgcatttaattaaaattttaattaaataataaaactaggaatattaaaataagaaatttcatgttttttcaaaaattagtgtaatatagaattgattaaattattttttggcctataatatagtaatttaattaatattaaaaatgattaatttcaaagattaaaatgtattttttcaaaataattttaataatgaaagagacattttaaaatagtgagtgggagatggttgtcattcattatgaaacctatggtctgcattattagtccaacacagagggtatggggagcgcctcgacacgactttgttttcgtccccctaagaaaggtgttgaaccataaattatcaaggtttgcttcctcttaagaataggacaaagtgatgtatcatagtacgatatcgacactaaggtggcgtaactaagttaagtcctagaatccaaaataatgggttacactcacaaagtaatgtccctgtctttgacattaggggacataacttgaccaaaaaagttgtactttattttgtaaaaaaaaaaaagagttattctaattacaattaataaagacaagaacaagtcttgtagattattcaatataaatttcaccgaccgtaaggaaaaactttaatttttggataatcttattatagaatttctaaattattttatgtttttttctatgtgtgttcatgcatcatatttatattctaaacatgatgtttatctttcatttatagtacttatattgtgtttatatcgtattacttatatctcgctttatttatttttattttagtctaatacctaaaaaatagtgaaacaaaacgatgtgaatttatttttgttataatataactgaatttgatggtgactttcaatttgaatgaagaatcgaaattgaacttcttttacgaaaaagaaatctatttgaacttgtcactatacatactccctggcataccatgcgtgaacattctgatttcacggtcaagagagcttatcttcctgacaccaaaataatattcgtgctaggtttatcttcctgacttcatttagtgcaaagataagagattggtatgactgtttagtctatgatagtgatatttggaaggtagtacataatcaggaagtgtcgcttatgaccaattggcttatgagagaaatactcatcctaacaagatggatattttgacagagttacaaagctagagaaggtaaatatgatttactttttcatcctgtttgtgaaaactagtggattgaattgttcttaactacttatattacttttctcttgcgtgcagattcgtgactagaagacgaagatgattcgaggaagtgagacttcttcaaagttcttaatggtagaaggatcttagaagagcaagaaagaagtcattttagtttaattgcacattgaaaatttattttatttaaataattttttttggaacattttattgatttattaataatgtttaatttaatttcaaacttatgtgcaaagttaactaaataagactgcaatgctcatagtataattgtaaaatctaatttaaatgtttagacaatttattttgaataaacattagttagtaattgtttggtatagtaacttctgaaaatttctacaattaagtttaaaataaatttaaatatgattttaattctatattattaaacttagaaaataagtgagatttaattaattttttgaatgatcactattacaaaaaccccctttagagaaggttttatagccgtttcagcatcgattttggcgaaattcactaccaacgctgatcagggcgacgctaaagggttataaacaaccgccaccatatgtaccctatgacgtcggttattagcta

SEQ ID NO: 33473 - DNA, 2624 bp, Cannabis sativa
  modified_base (1724)..(1759): a, c, t, g, unknown or other
taaaaccgtcgcctatactataggtgacggtttaaaactgtcgcctcctataagggcccaataaattttacaaatttcaattaaaatcatctcctattcttttaattactgttataaactgtcggaaatactaatttttcccgatggttttaaacagttacttaatttttttagcgacggtccccaaaaaaaaacctttctaggaccgtcgcgaattctgatttttgtagtagtgatatctcacacatatataacatatatataaactttaatatacatgcatgatatatattatatacacataatatatattatatatgtatgtctcatataaatatataaaaataattatttctacaaatttaatcacacttatatatattatatcacatgttctacatatatattatcatatatattactcatatatatatgcagagatacattatgcattcgggtggccctggctcctcctcaatttatcacaaaatagttgtatgatatgtgtagttatctaaaggaaaagtaaattaatattgactttatatttattgaaaaatactctttatatatatgaacatcaagtgttaggattatatacacaattagctttaacttttgacatgtaattaaaaaaaatattggttgacatcagttgcaattttgcgcactcatgctggaatctttcatctgctaatgctggtggtgtcgatgaaagggagtttagtagctggttttgtgacattctgatgcacaatcgtaagtctgtagcagaggaggctgctatgattatgtggcgtatttggatggctcacaataatctattatggagtaataaatcaaccaaagtttcagaggtgattcagtcggctaagactaatcttgaaaattggcaaaatgctcaatcaaatggttccattccattactaaatgttaatgttagtaatggaagagagcattggacgaaactagtttttactaagttcaagatcaatgtcgacggggccctctttaaagctgagaatcgatttggatttggcttcatagttagagacaaggatggtaagcttgtcgaagcggtctcaagcagtaaaactggtgtggtttcccctgagattgttgaagttgtgggtatgaaagaggctttgagttggatcaagacgaagcacctaactgaagtagaaattgaaaccgattctttagtagctgtttaggctattaatggctcagttcaaatgccatctcagtttgggttacttgttcaagattgtcgtttgcttatttctgaattacaaaatgtctttatttcttttgttaaacgatatgctaatagggttgctcattgcattgcaagacagtcttgttttatgtcagattgtatgtttgatgagttttctgctccatcagatttgctttctattgtaagggatgatagcttttcaagatgaataaatttttaccccttttcaaaaaaaattggttgaaatataattataaatactgaatagttgtcatcatttaatgagatatgtaattaaatattgaaattcactaaatcaaaatggatcagtacataatattttcttcttcttttttatgaaaattataatagttgttctgtaatttctattttctctacaataactacaaaatctttttgaattaatggttcatacactttgtaataaaatatatatttttcttttcaaaataataataataannnnnnnnnnnnnnnnnnnnnnnnnnnnnnnnnnnntaataataataataataatagatgtttttgactaataatatacctctcattcataaaaagaataacaataatagatgatgccttttgactaatatttttagaggttgagttttgactaactaattgatgtgaaaaaatatatttaaaaaatttaggacaaatttaattataaatattttttcttgaaattaaactcttattaacaacaaccaagagtttaatacatatcaataagaaaagaagaataatcttcaatctaagctaattcaccatctaccctaagtgcatgcacaactaattcatgagaaacgaacatgaactagggatgccttaggaaaattggaaagcaaactagtaaaaaacacaaaaaacctagctcatttttaaaaaaaagagcgttattgaataacagaaaccaaaactaaataaatacactcaatataacaaagagaaagaacaatgtgtaaaaccaatccaacactatcattaagactgaagcttcagcttgaatgactaagaagtaaccaatgagttcagatcttctgcaatatgtgaacttttcgtgtgttaaatttagtctataagtaaattccttacctcaattataaataattttgtaacttgaaatatatgtaaaaatgttttatttaaaatataaatttttaataattggccccttacgattgaatcctccctccacttttgtatacatgctatatattaaatccctccacttttgtatgcatgctatatattatatatctcacatatatatgtataataacttaaacaagatattttcaaatttgttccattattttcgaatttattttttgaatttaaataataattgaaatttaattaa

SEQ ID NO: 33474 - DNA, 2948 bp, Cannabis sativa
  modified_base (34)..(62): a, c, t, g, unknown or other
tttatacgggtgtaaaatagactgtttgaacatnnnnnnnnnnnnnnnnnnnnnnnnnnnnnttcttaaaattttgtaagatatctaaatagatataaacatatatgaatatgaaaaaaaaattaaaccgaaaaattcttctagatgccgaaataaattcagagtgcatcagtatatttcttttaaaaagatacattataaaattcttctatatttttaaataaagtgtaaatttttaacattattaaaattaaaagatgttgttattggagatgatcttaacaaaagaagacactgagcctttgatacaattatgggggttttgatcttcaaacaaatcaccccacaacagagggaagttcatgtatattgttttattataaaaataaataaataaataaaaactatcaactaatgcttctttattgtttctggatacttttttaatttttctttttactcgacaacaaactttttatcaaaaaaaaaaaaaagaaagaaagaaaaaacatgacaaacttagcaaaaataaagaaggatggatatgttttagtggagatctccaatgtttacattcttatcccaattcagtccctcatagattagccagttagtattatcaggtcagaaattccagtatgcctcagacacaaggtaagcaatctccacatgacacgtcagagacacgtggatactacccatctcatctccatataaccgagaacagtccagaataaacgtaaataaatataatatttcattctagatttcacaaatcttctatttctcctcaatatatgatactctttaataatatataagagatttcgttcgttgttcaaaaaataaaaaagtttgttttatccatttaaaaaatatatatataaaacacaaaaactcttttggttatctcaaaccgtctttgcatgtaacacaacacgtagtctaaaccatgcaacgtgtcacattacaatgcaaacttcaacacgtggcaagctaaggattcgcctaaagctttacgtgtctctgttcttggtcggtcggccattacatatatatatatatagatacaattacaaaccgaggaaagtagcaacaatcacgaaaacgaaatcaaaatcgatacatattagtattattattataagcttttacacatattgagaattatattttactgcaaaggttctttctttctaatttagaagaatatttacgacaatggcatcccgatcgacaaatcagcagaaggttgaggaagcagaggcagcggtgaagattgcagctgccgatctagaaggaattcaaagagaacaaaaacgacaagaagaagaagcggaacgacgtcgtatgagtaccggtaataataggatgacggaaacgacaactgatattcgtctacgacaacaagatcagccccaaaagcctggtgttattggctctgtttttagagccgttcaggacacttacgagcacgccaaagaagcagtcgtcggcaaaggcagtggtacagagacgtccagggaaggtgaagattacgctaagaaagataagatgggagagtatgctgataattccgccactcagagggcgaaagagaataaggattctgcggttgagaagaccaaacaggccaaggataatactctggccaaggctgccgagactaaggatgctgcggcggagacggcgaaacatgccaaagatgctactttgggcaaggctgcggagactaaggattacacggcgcagagagtgaaagaaactaaggatgctgcaactgaaaaggcgaaacaaggcaaggatactactttggagaaggctgcggagactaaggattacacggcgcagagagccaaggagattaaagatgctgcggcggagaaagcgaaacaggggaaggatgcgacattggggaaggcaggggagatgaaggatgctgcggctgagaaggccaaacaagccaaggatacgacattggagaaggcaggggagtacaaggattatgcggctgatagggctgttgcggcgaaagacactacggtggagaaggctaaggaggctaaggacttggctgcgcagaaggcggcggatgctagagattatgcagcggagaaggctggtcaagggaaagagaagcttggtgagtataaggattatgcagttgagaagggtgtggagactaaggacttggctgctcagaaggcggctgatgctagagattatgcagctgagaagacgggtcaaggaaaggagaagcttgttgagtgcaaggattatgcagttgaaaagggtgtggaaagtaaggattttgctgctgataaggcgaagcaggggaaagatacgacagtggagaaggtgggagagtataaggattacacagctgagaaagccaaggagggcaaagataccacagttggtaaacttggtgagctcaaggattctgctgcagatgctgctcggaaggctcttgacttctttgccggaaagaaagaagagactaagcagaaggtggctgaaacaggggacaaagctaaggtaaggccaaggccttttatcatcttcatattatatcatatttgatcttgtagaatgtataaaattgatttgatgtcatttgcaggagaaattgaatgaagaagaggaagaaaccagacgaaaggtggaagatttgaagttagaagggtatgagactgtccaaaagcccagtgaaaccaccagaggtcctagttctgtaacgtaagatttttatgtctccatgtatcttctcctatattttaatttaaatgtcgtttcttactctccttttgactaatgtggctcggcaaattgttgcatatatgtcgttttatttgataaatggggggttttatcgtttttgctgctttccagaccttctaaggtggtttgctctgtagtctttgctagctaaatttcatgttgctttt

SEQ ID NO: 33475 - DNA, 1923 bp, Cannabis sativa
  modified_base (335)..(346): a, c, t, g, unknown or other
  modified_base (1620)..(1629): a, c, t, g, unknown or other
tgccacaaggagatggcagtggtctctccttacaaaccatggaaggaaaattatttaaatgggttccctcaacaccaaggagtaaaaaataagtgagacaaatcatttcccacctaggaatccctagccgaccactgccataagggaatggcagtgctccccaattttgatgagcactgccataaagagatggcagtggtcgaccaagaagaacggaagtgagattcttttccaacaatgcattttaatcaataatatgtcaaatccaagtgaaagaagcaaccaagtggtaaaaaactacttggtcgaccactgccataagaaaatggcagtgnnnnnnnnnnnnggggagcactgccacaatggagtggtagtggtcgctacacaagaagttggccaaattacatttccaacatatatgcatcaagtaaaaatgagaaaagttacccatggctttccaagttccatatccgatcactgccataaggaaatggcagtgctccctaaaattggaaggcactaccgtagtagagtggcagtggtcggctactacacaaggaaaagggatttattagccaaattgtatgttcaatatccatgtatcaaatacaagtgagaaacaccacccatggcttcccacaagcaatggccgaccactaccattgtttggctccaactagtggcagcggtctcccgttagggtttcagacatccaaatgaggtttttgggtcctgagaaccccaaaatataactcaccatcaaaaaaaaacaaatcaaaacacaccccgaggggtgcgagagcatgcacagccgaccattggcatttggctatgtcagtgctcgtaactagtacaagacagaataaactaccttcactcaaatgggcataactctctaaatttttatgtaaatgacctagtttaacatgtattggaaagataatttcaagacggatcaaagtgtatctcacaaacatggctcagttctgaagttatcggattcaaaattagctcacaaggcagaatggtacaattttactcgggaaacaagtaatgcggctaagtgagagttgttggaggacactgccatagcacatgtggcattgtatgcgagcattgatactccaaaatatatgtttttcagcactcatcaccaatatcacatttctaggagagaggtgacatcctatcactccatttcaaattggtgcatcctcaactgaaaataacaactttcccaatttgtgggatatttgcctagaaataaggagatttttataaatatttattttcttgtaatatgttattcttaaaaaagagtagtacacagaatcttgttattctgatctgacattttggacttcaaacttttggaccctcttctctctttttagactctctcttctaaaacccttatcctagaaaatcacttgacagcagccaagaacagcaccttgattccttcaccttttttattgagtccaccatactcagtcgacaccagtcctcaaaacaccattgatacacacctttctttacaaactattggtttatttttcccaaaaactttgcaacctttaatttagatcagattgatgaatatcaagcctcccatgagcnnnnnnnnnntaaatctcgattaagatttcacctataaattctttgctgtatttttatcatcgcgacataggggtgaactattataaatccctggtatccatttaatttattgcagttttattagtcagattaattcatcatggtcctcttttattttacgatcttcttagatcagttgacaaaaaatcgcgtcaacatatagattaaaggcatccaccatagtaatattttaatggagtttaccacaagaaatttataattttcttagtagtcaatatagataatagagatattatggatgag

SEQ ID NO: 33476 - DNA, 1391 bp, Cannabis sativa
gttaattactgtcttgttaatgtgcttatttctatgtttgatttcaatgttacgcatgctcatcaatattgtttctttcattttattaacaaacaaatgtcatcaattaagtttggatattttataaatactagattaattgtcacttgcaaggcacgtggttagttagttttttttttgggggagtggtgccctttagagagaaagaaattccttgagattacacgggtcatcaccaatccaaatggaaacttcatctaaccccttggcccaagaagccaacttataacgaatgtatttgcggtccggttgacgtgagagactaaggcgccggggaggagagacaaagcaacacgaatttgattcattatatcgccaaagtaagagagatcctctttgggatgctcaagagcatccgtgatagccttacaatctgtttccacacacgtaacgtgaaaacattcctcaatgcaccattgcaatgaaagaaggagggatttggcttccatagtggtgacgtcccctcctcccacataagggaacgcgactgcagcaaccaccaaaccatcgcagtttcgaatgaatccaccaaaacccgattttaaagaatctttagtaatcgcggcgtctacgttcagctttaagcaaccgagatcaggcggtctccaggatgatctcgagggaggtcaattcgtaagtgctggtgatttttgagctgatactgatgctttgtagtctgccagaaagctctgcgctaggtatagcatgggtctgatccaatgattttcctctaatagccctgttcctgtgatgccaaagaagccaagcaacacataggaaaagttctacctcttcctcggttagagcagcgtaaatattataagcaatgtcatgaaacgtaacattagggggagaagaggaaataaaatcatagaaaaccgtaccttttcagactcttcgaacgcttttgcagaagaaaagagcatgagaaacagattcaatatgggttccacagcgatcacaagaggaggattgagttattttcctaaaagctagatttttattcgtagggagggttgaattcgaggcgcgaaaagcaaagtgttttactttaggcgggatattaaggtgccaaagatgtttccaccaaggtgaaagggaggaagaggaagggatatcatgaggggaggtagaggagagactcaaatggtagcaagaattaacagagtaaacacctgatttagtgggctcccatattaaagtatcacaggagggttgagtgggaaggggtatggagatgatttcctagacaatgtgggacgggaaattgtttctaaaaaggctaagatcccaggtcatgtcgttcctgataaagaaagataccttgtccg

SEQ ID NO: 33477 - DNA, 2041 bp, Cannabis sativa
ttgtaatttttgtgactaatatacctttagccacggactttttagtcacaatataagaataataattgataattagttataattttttcactttcagtcacaaaatttgttgtaactaaaagtaagattttttgtagtgatgatatgtaagttttaaattctaaattagtaaacctagaagaaaaccgtataagttattttcaaatcttatttaataaattcaaaaataaaatttgattacaaatttaagacattaacaaaatttatattaatagtattagacaaaaattataattttactaacataaaatttataccactaaaaaatttattaaatttactaaagcactcctaatagatgagttaaaataattcaatcttaaattttagatattttatatatttttcagcttaatgaatagtgattagctaaatataaaaataactattcattgatctaaaaatattttaattttattttcttaatattttaatataatgtaaatgtttgatataaaataaaattttaataatgtattttaaaaaataaatattagagtgctacaaactcaaaactaaaattatttatactaatttagagaataaaataaagagttttttttttattatttttacatttcaatatgatttttttttttgtaattcttataaaattttacataataactcacataattaataaaataacttaaatcataattaattttttcttaaaaaaaactactaatcaataatatatgaagtaattttgttaaaataaatagagtggtgagaagagagggaggggtccaagtggaaggagaaaatgtaatttaaatatggtggctccacgtaatacaaccaagtcggcgggtcaactcagctcgacagaacgcttctgcggtggatcgaccggatccaactctcagtttcggtcggaatttgtccgccttctcttttcgaccctttttaaatcatattctatttattattattattattattattttttatataaattaatattacccctcttttctctctctctttctgatttttttttttcttttttttaacattatacacttgataatatctatctcataattcataaggtcaaataacacacgcttgcttccctttgattttggccacctcttctatttctcttctctttacataggattccatgattgcattattcctctccttcatttttcaaatattatattatatattttaattgtttttttcccttctcccatatttactcttttgtcttcttccaccaaacatcccattttttatttttcataaattacagaaaacctttataattaatatatatatctaaacttttgtcttcggaaatagtatagaatagaaataataggtgtaaataagcttgcatcatgttaatctaatatatatcatattaaaggctctagtctttccaatatgatttttatcaagagtaattttgtaagaatgtgattaagaagagataagggcaagctttttttttttttttttaatcttaattaattgattgcattgttaagtaattagggtgcatgtagactagtcatgaatgttaaaagatgcaaataacaaacgaataggtacaaatatatggtgtttggattcatttgattagttgaaatatatcatcaaagctgataatacttcataacaattagtctttaatttcgtcaattgataattatttcttagctaaatagatataattgaagtatagctttaattactaattaatgtctttttgtgcccatttccttatgcttgcttgatacagctctccccacataacaaaccttcttcttcacttcacacattacattaatatcactacaaaaaaagtacttgtaaaacagtaaacatttcaatgaaaagctcatcatcatgacaattgctgaatgaaacacatgaaagaaaaaagtaaaagaaaagtctgaaatgaaagcaaatttactaagacaaaccccaaggaaagggacagctcacactttgctctgtcatt

SEQ ID NO: 33478 - DNA, 2138 bp, Cannabis sativa
  modified_base (412)..(412): a, c, t, g, unknown or other
atactcgtgcaaagtagaaaatgtatcaatttaatatacttttatttttataaataatatatttacttatttttacttgcctttataaggaaaataaacatgaatacgagaatatgtacaagttcttgagggtcaaccttttgaccacaacgttgttagttgttacttgtgctaatcctaagggtttagatacacttactccttatcagcttagattttctcctttttagattcaggctcaccctattctttttgggaaaaaatcttaccagctgatgatgtaagtgattttattgaagtggacataaccaccatattactataaatttttttacttttaatcacaataaaatttgtgattaaaagtaaaacagttgtgactaaaaaattcgtggctaaaagtattagtcanaaaaattacaatttattgtgactaaaaatgtttttattcacaattaataatacttgttgtgagtaaaactaaattagtgataattgtatctaaatactatgttttaatcataagtaattttttgttgtgactaaaagtcaaatgtagtcacaaaaaatttatgttgtgactaaaaaattatctttttctttgtagtatatttcaagtttttgatcatttccttcgcatgagagttctcaatgatttttctaaacctattaaaaaaggaataatttagttgagtttaagagtatttcttggaaaaaatagcttaagtttaaatatgagaatctgcttaatatatatttttattgtggaatgtttgatcacattctaattacgaaagtgtatttggtatatttatgaagaaatgctgaataactaattgtactcaagttgaggctttggccttaaattctgttttgtgctagtgtgttgcatattgctatattgtagattctgattttaagaaggttgttagtaaaatgaattgtaataataaggattactctgtgttttctgacaatattattgctaatatttgtaactctttatctacttcccctaataaggtcactattatatattagacatgcatgtcgatgttcctagctaggcaatccaattattaatgttgatgctcacatcttaattagcaaaacaggctttataaggcttcataaagagttaattaccgtgatacgtatttcatacttctttgttgtacactaacttaacttactcaaagtttaattatttatcctaattaattaattataacacaatgtgaaaataaatgcccttatgagtagttcggtaattaataatacgtcaacttacaagactcaattacttatacaacagaaattaattcgatcagttacaactaaacaagtacaaataacaaagtttgagaccgttcatacaaaaccagttatatatactactaatttgtagagcttagcaatcctaaccctaatctctaaatattgaaatgtaaatatctatatatacattgcattattaaatattaattagtcatattgctttgctgtatggttagctagtttatatagaatagaatcaatagatagttataggtcaagtcaatatacatatatataaccacgtttataagtcatgagttcacacacgcatatatctatctaatatgcacacacatatatatgtacaattaatctataataatgtagcttcaaaacattattgactatatatacttgagcatataaatatatatgttacacattatcaattatatataaaactgcattaacttcttgataaagacttgaaagtgttaagagtcttgatttcacatgttatggttaatgggtatatatattaatgctaataatatgtaatatacttctcctccatgtatatacaataatttatccctgcatgtcccctcccctgtaccaaaaaaacaatttctatatatatatatataaagataatattcttgatattatatgttgtagttaagtgggctttcctccaccactgttctattctaacctacttaccagaaaatttattttgtaatgaccgcaagatttaaatgcgctttattaattaatgatgagtacacttattttcagaaaaaaaaaataataatatcctacacatttccacttactgaattattattttatttgtcaga

SEQ ID NO: 33479 - DNA, 2633 bp, Cannabis sativa
taatattttaattctttttcttttgtacatagaaaactttggtatagagagaaaataaaatgaattttggtggaaagaaagataggttagtggtgatactattatcgtttggtgagatttatagacaatagttaaaaacgttacaacaggaatcacatcactataaattacaatggaactcttcatacctctttgtcatgaaaatttataaatgtagtactgctctccttctaacgacaatgtaaccattaaaaaaagaaatgatgaggagaagaagatataggtaatggaattttttaaaagtttatttggctttgattcaaaagattggatttagctatttacaccaaattacaaagataattgaactgaaaagatcttgcggttgaatcgacacgggaagatatataatctatatgtatatatatgtgtgtgtgattttagagaagaatacttttccatgtacgtgactcgagttgattgagtggcagggagattgacagtcctttcctgcgccgagagatagattgaagagagatgcaggcgatataggaaatatataagaaaaaagaagagagaaaaataatttttttttaattttattttatgaaagagagaaaaattaattagagtttttattttactttaactgccaaattaataacaattgaacaaattagaaaaaaaaaaactaaaagagagagagagagagtctgtagagagtgaagaattaaattatgagatgaaagggtttgaaatttgtaataaataagaagctaaataaatggtgtaaattattaatttttcctaacttaatgtaaattattaacccattatacattatatgttaaagatgcttgaactttttctctatattaactaatgaatacatataagcggttactatatatttatgaacattcaatattatattaaaagatacagtaatgtagtttaaataattttatgaatagatagtaagagattaagtgtctcctcatcttctaaataacattattaagtaagtgaaacagttaattaaatttaaaaatagaataaaaaaaccataaaaatagataaatcttaaaaaaattcataaaatagaaaaataacaatattaaaataatagaatgccatgtcacataccccaacaacacaattatatagatataacagtaatgtagtttaaataattttatgaatagatagtaagagattaagtgtctcctcatcttctaaataacattaataagtaagtgaaacagctaattaaatttaaaaatagaataaaaaaatcataaaaatagataaatcttaaaaaatccataaaatagaaaaatgacaatattaaaataatagaatgccatatcacataccccgacaatacaattatataaatatatagatagatagatagatagatagatagatattgatagtttgttagaggttgtgaatgtagtaaatcaaatgtgcttattattttgctttaaatggctcttaatgtgcttattagtagctttgtataggtaatacaaattcaggatctattcttaaataccattagtttattaaatattttcctgtacgattatcattcccatttaccttgatttttcatttcagaattacaagaaggaacctatggactagcttaagttgctcaattgttgtgaacagatatcttcttgtattccaaatttcttgtaccttaatattagttaactttcttttaattatgtccagctaaaagcaatagggctcccaacaatatgtttcccgtctgaccattcgagacgagcaaagctggttgtacctgacggcaatgaaggggcagtgaatgtcacagtgtatgttttcttctcatattcctcactaaagctcagtaattctggctgaaccaagattttaattgatgaaatatatgaagatactttgaccttatatgttgctggcgcaccaacatttgtcagagttcttgtgtatcttgcactgcttgaaacactagaactactaccaagtgctgtttgaaaaggaactgcaaaagatgggtagttaaaatctccaaggttgtactttttggttacatcacaagtgtagtctttgttggtgacaatcttaatctcagttgcactgtaatttaaagcacagaggaagcttatgtagtcgtcaatagtagcatcataaacaagaccggggtcaagagctgccactgggtctacatggcctgatccatagtcaaatggtgttgatggatttccggtagcaacatctattatagttttaccattattatacattgaataggcagtagtcataagagctgatttcacagctgcaggactccattctgggtactcagccttgaggagggcaaccagtccactcacatgagggcaagacatggatgtacctgaaatgatgttgaagcttacacgcctcttgtcattgtctaatccagttggtgcagctgcgccagtccacccagcaagtatgtttacccccggtgctatcaagtctggtttaagtatttctggagtgattggatttggtcctctagaactgaaagctgcaactactggtgagggttgaactcccaattgtgtcgctcctttggagattgtggctggggg

SEQ ID NO: 33480 - DNA, 1552 bp, Cannabis sativa
  modified_base (1121)..(1124): a, c, t, g, unknown or other
  modified_base (1517)..(1519): a, c, t, g, unknown or other
aaaaaatcaaaatcaatatataatctaaaaaaaaaataatacaaatacaaattttaaaaactagtttcattaacattgaaagaaactaataatttcattatgagaataaaaaaatagtttcattaacaaaataatgatataaattataatctaaaaatacactctttaaaaaccagtttctcaatattaaaagaaataagtaattatttcattaaaagagacaaaaaaaaaaaaaaataataatttcatcaataacataataaaacatacacaatacttaataactaaacttttacaaacgataccaaatttaaaaatcagtttcgagcatataaattttatatcaatacttaatactaaacttctaacttcattctttattttggcatttaattttttatttatttgctagaaaatcagagttaatttaagcgtgcaaatataacaaagagaatcgaaaattaaaatcaaagagaaaaaaaaaagaaataacgaaaattaaatagacaaaaataaaataaaattataaaagaataataaaataaataaaaaaatagtggaatgcgagaaactagattagttaaaacaaccaaaataaaaacaaacatataaaaatcagtttcttaaaataattaaataaaaaaattaaaatttaaaactcaattatgaacaaaaaaaaacagttatgaaaactagctccttaaaaaaactagttatgaaaacaataatataatatgtgtgtcagaaactgattatttaaaataaaacaaaaattattgttcaaatatcatacaataataaactgattttatacaaactaaaaattatacaataacatcacaaaaatgaagcaaccccataacagaacagttaaaacctgtgaaccagtttcggccccgtgaaacaatttttgacgctatacaaaatcataacaaaatataaatgttaaataataaagttaactgaaactaattttatcagacaatcaaataaaaaatgaaaaaagaaaaacacacaaaaaaaatagtaattacaaatataatcaaaacagcacacaatgcatattaataatttgaaaacaaaatataagtgtaaatttcaaacctagaaacaaaataatnnnnaagtaacttaaaataaaaaatttgtaataacatcataaaatagagcaactctattacagaactctcaaaatatgtaaaccagtttcgaacaataatttagaaaaaccactaacaaatataatcaaaaacaaaacacaactataatttaagaacataatataaatgtgaaaaccatttgcaattttttttttaaaaaaaatataaagaaacttaaaataaataaatcataaaatgaaacaaccccattacaaaactctcaaaacctgtgaaaccagtttcgaccctataaaaaatcatataaaatctatgaaatcagtctcgatcctataaaaaaagaaattttatttacattacaaaaacttctaaagacacctcattttaataatttttatnnnatataaaatttatatatttaattggactaagtt

SEQ ID NO: 33481 - DNA, 2540 bp, Cannabis sativa
actataaatacttaattttaatttccagttgaaaataaatagttaagtttaatttttgacggtaataatacttaagttataattttagaacttatgtatgtacctgactaaataaattaccacgtgacaatccttgattggtccaagtcattaaatttttattattttaaaaaaattagttcaaatatattaataagaaaataacacgtggatataatagcttaacatttaacagttaggtacctacagagttccagaaatataacttaagtattattactgcaaaaaattaaacttaaatatttatttacaactaaaagttaaacttatatatttatactacaaattactcgtactataaatatataaaatatatctaatgtgtgtatgtaggaaagttcatatttattgagatataaatcgtattagcataagggtctatcccaccatcatatatgctatatgtacttcaaacaaattaaacaagcttatatagtatatatatatatatatatatatatatataaatatctgtataagatatacatgaaatatataggtagacaaattgttataattaaagtaacctatagatatcaataaaattaattagctaatttagtgagcatatatttatatatatatatattatagtttttgccttagaaatgttcatatattattgaaatttctttcacgagagaataattggcattatatatagttcattcaatagagacgtacgagaggaaaaatcatcacacaactaacgtagatgctaagtatatatatcatctttttcttttataaattttaagagaattattctcgctaaatttgatctccacaaaccatatattataaaaaagataactatagtataaaacgtatacattatatatctatctatatatatatgcgtgtgtgagtggagaaagagagagggtgctggagggaacacaaaaactaggtacagaaaataatataatctctcattattataacttttattagtaacaaaagtaattttctaaaaccaaagtaatatagagtttgttttttatagccctatttatttatcgatattcttttttattatttatgattttaatgagtttaagtatttgttttaacacagtgggcacattttcctcacatccactttgggctaaaactggatggcacaaacaacaagcaagcaaaacttgacaaaacaattgcaggagatcatcatcagggaacccaaaagaccaatggattctactgaaaaacaaatggtacttctgtgaatatatatatatagctatatatatagctagctatatttagctagttttgtttttgtttttggtttaatttttttttgttttgttttcatttgtaagaataatttgaataatatatatgcattatgtatgtgtatgtaagcaccatatatttggcaaattatgaggttgttggtgacgtttcctaataactatttaggaatatggcatctttaaaaaaacctttagacttttacgtgtgctcactctttcttttcttttcttttctttcccctttcaaacgttgtttatgtatgtatgtaattcaatttaactttatcatttttaagtaataataatgtttagatgtctatatttatattattcccatggaataatgtgcaattttattatttatttatctataatattataatgtatagaggaatgtatattcctttgctttctcttttctgacgaattcagttgctttgtatgtatggatgataagacattccatgatttggggatcccacccaatgagccgtgggtttatacaatcaatcttctcatatttggaccgactttattatgttttgacagtatacccctgcactgcacacacatcaccaaaagctatcaaaaatttcattataatttcgtataaatataaacaatatatacatgatacaatatacgtaatgcctagcaataattataatatatatttatcttattattaatctatatgaaggaaaagaaataagtgtcataatatgtccaattttgctcatacgtaacatcataatggctatcatattaaatatttatgatgaaatgatagtttactatttgttataattaatatttgttggttctttgataagttcatgtagaataagatatatggtgactctctaatctcttacctttcgtatcaaaaataatcaatgctattaggcatttaatgtcatactgatatagcgtattatatgtggttagtaattttttatattatttattaaattaaaatgtgtgagatttgatattaatttgtatcaatagcagtatgtcatctctcttctgattcttttggtgcttggagttgttttgatctattagttgtgtaattatatatgaattggaaatggctccttgcaacgatgtgtttattttgtgaaaaaatcagctgtgttttgggatacgtaatagtgtgtcatcagatcagtagccccaattatcatttctttcatactctgaaaataatggttttgg

SEQ ID NO: 33482 - DNA, 9043 bp, Cannabis sativa
  modified_base (131)..(145): a, c, t, g, unknown or other
atagtcatgcgtacaacacactgtttgaacgcacttttcaacgtgttaaacttttccaaatttcttaaaatttacaggatgtcttcaataaccataatttacatgaccatgaaaaaaaaattgactaaaannnnnnnnnnnnnnntaaaacagatagagatgtatcgatatactccttttaagggggtgcattatagaatttcccaaacatatattatttccactaaaatattcttcctaaaaaaaaaaaaactctcttcattttctttattttaatttagtcttgtacaaaaagcagtttttttttttttttcttcaggttcttcttcattttttttgtttcataaaaagaaaaatagaatgaccttcatattagagaactcatacaaaaataaaaaaagaaaatagtgaaatttatttctcctcatgtatcttaattattttgttagatatattaattgattattgaagatttgtaaaatcatttgaggaatcaaattataattaaaactcataaaaccaaatccacatggatgaaaaaaaatataaaagcaatactatgcttacgaactaaatgaaaggagaaacctgcaaataagagcgaacaaacaaaaaccttcacatgaaagagatccaatcaaaatcagacaaactcctctctcactctcacggttaactctatttaaatttaattttttttaagtaaaataacattaaagattcaatgtgatgaggcacacaaaatataatgtacatatatattacaaccaattgccttttgacatttagggtgtctactgataggcccaattttaaggtgtctattgtacatttttataaatttgttccttaaaaaccataaaaaataaaaattctcctatattttattaattattttaatttttcttttacatatgaatatatgtatatttgaaatgaacaaaatgaaagaaagtgaaatatggtgatgtattgtgatgtattttattgtgcaatgtaaaagtttaaacaaataaaaaaagtaaaaatttggtgatatattttgaagaatggccgggtatagagaagctgttgggggagagtactcttaggggatggaaccattaagagatatatatagtctccactaacaaaaatattatcttttaagaaattaaatgtatattttttaatttaataattataagccaaaatagtagaaaagtcctcacaaaattaaataaatttagtaagagtgattataatatagctataaatatattttttttttatgataaataagcttccacaaagtaaaaattttaggtccgtcactgacacttagataaaaacataatgtattattataatacttatttaatttttcaattaaataaaaacataatagtaacaattttgaatatttttttatgataaatattataatattctggttgaaattttgaatatttttgtttagatatatatgcacacatataattggtcgtcaaaagaattttttttatttcttttaacaattttgaaaattaaaatttccaatttatatgtcaattatggttttctttctttctttcaaatttgattagtagtattatttctgctttaatgtattattataatatttagactatttatgatttttgttcttcaaattatgacttatgtattagagtaatttgcgacataaatacttaaatttaacttctagttgtaaataaaaacctaagtttaatttttagcggtaataatacttaagttataattctgaaacatttataagattacagtattaagtaaattgtcatgtgttaatttctaattggtgcaagtcatcaaatttttatttttttataaaaaaaataatttaaatataccaataagaaattgacacgtggataatgacttaaaatttaacgatcaagtacctacagagttccaaaaatataacttaagtattattaccgtcaaaaattaaacctaggtatttatttacaactgggagttaaacttatgtatttatgctgcaaattactctatgtattattgtgccccccaaacttttcagtcaagttttgtcacacgtagcaaacaaaatgatagcatgtctgcttagccagtttccacttcaatgtcatgtgtataatttaaaattaaaaaaaataaaattatgtatttttaaaaaatattaactaaaaaaattaatgatcaagaaaattacgtaaaactaaattaaaaaaataaattattttttttaatttattacacacgtggcatccacatagcagtgacgtggcaattgactaagcagtcatgttatcattttgtttgccacatgtgacaaaacttgacaaaaagaccaatttacaatactagaaatagttcagggactatttttaacaggctaaaaggtttaggatgtacaataatatatagttcgggagttaaaaatcttaaatagcctaatattaatttagctttaataatattgctacttgctaacatattattcaggaataaaatggagacctggaaaaaggtttggaaagaagtgcaaagacaacttctattagcaggtccagtgtctttggttactttgttgcagatttctttacttatgatatcattgatgtttattggccacaatgatggaaagttggctttagctggtgcatcaatggcaactgcatttgctgcagtcactggttattatgtcctggtataattaacttttgtacattattttaatattatttgagctctactactatattatatattatatgtacttattagaggtaaggaacaagttcgtctttagggtggggcagacaggcctaattaggccttacgccctgacattttgggagtctaaaaataaaaaatttgtgagtttattataaagaaattaaatgagaatcaattctaaatttctaagccagttacatttcatgatacaagttggattaaacataaattatattatgattttttgattttacatcctatacacaattttttttttaattttgggcctccaaaattatggggccttgagaggcctaaaaagaccttattttaaatttttccctaggactcgcccgtcccacccaaaacataagctgaaaaggcttcatgtaaacactgttaactaatacttagttctttgttaactataggattagttaatcgtgttagttagttaaggtagttatatggttgttatttttagttttgtatttgtatcataacttctctataaataacattgcctttgatgtgaggttcagcttttgctgaactgttttcttctatctttctttctctcttgtgccctgtttctctacatggtatcagaagtcttgacctacgaccatgtctttgtctacttccaatcctcaggttcctgccatgaattttgcggttcaagctactcaggcccttgccacatatctagctgctcttggattccattctcgaattcttcgtcttcatctctcacaattaagcttgaccatgttaacttcttttctaggaaatcttaggtcattcccaccattatcggacatgatctcaatgagatcttgttcacaggggtccctcctcctcagaatcttgttaataatactgccaaccccgagtatctccaatggcgacaaaaggaccaacctcttttctcatggctgcgatcatccatgtctgagaatgtccgtgcttcagttgctaactatacagcctcctactctgtttggcgtacacttgagcagaaatttgcatctcagatcaaagctcatcaactctagctcaaaggtcaattctcacatgttcaaaaaagaggcttatcaatctctgaattcattgacaaagttcaagccattgtgaattccccagccattgctagatcacctgttgatgaacaagatttggtgttacaagttcttaatggtcttggacttgaatttgatccagttgtctcggggatcacttcaagaagcgatgtcttgaccattgaagaagtgcaggctctccttcttttgcatgaaattcgtattgaacatgatcttgaaataaaagatctctcagtcaagatgcaagaaaatgtggcatttggcaatggcagatctagaggtgttcgaccttttgccaattccaattctgcaactcaaagtagtgcacaagcaccaacagatcgaggcaggggctatcccaggttttctaatgagagggttgtctgccaagtttgcatgaaaattggtcacacagctgctatgtgccattaccagtttgataaaaattggacaactccaaaactaggtaactttgttaatcgtgcattcctcactgatcttaaatttgattgtgatcctcaagcatacaccaccaccatggttcaagattttggagaggatagttcctggtatgtgaactcaggagctaccactcatgtcacctttgacaatgctaatctcgacacctcaaaggccttcactagtactgagactctaaccattgaagatggtaagcaactattcatctttcatataggttttgtctcaattccctctcttaataaatcttatcccttacatatgcattcagttctaaatgtcccgtccattactaaaaatctggttagtgatctaaactaactaaggataatgacatttttcttgaatttcataaaaattattgctttgtcaaggacaagacaatagacaccgttcttctcaaagggaaggttaaagatggcctctatctccttggtgatgcctctcatcagtcaagccctacactacaatgtcatgtttccacttctgccaactctaataatgtctactttaaaacaaactgtacttgtactactgagtgtgttcacacatcaatctcttgttatacaatttcaataaatgaaaatgaattatgttcttcttcttcttcttcttcgtcttcttcttcttctaagtattctactttgcatgtttcacaacctgttaccattaacttgtggcattgtaaattaggccatctttctcattctacattacagaaactattgccctcccaaccccatactatctcactgaaaaacattcagttttgtaatgcctgtcaacaagggaaaagtcatagacttcccttttcaacatctcaatatcaatatcgtgcaaataaaccattataactaatacatacagacctttggggcccctctcatgaacctttcaaagatggattcagatattacatccatttcttggatgaccatagccggtttactttgatttatccactaacattgaaatatcaggcatttgacatgtttattcagtttaaaagtttggtgaaaaaacagtttggattgcctattaagagatttttggctaaccaaggcatactattctctcatccctgcctcacaaccaattccccaaccagctccacaacctgcatctttacctccacaaatatttacacaccagcctgtccaacaacctgacctatttgacccacaatataccaatacaacagaaactccttctacctcaaacccaatagccaatgttgtccctgttccaaatgttgaacctattttagatgttgtttccgcaattcttcatgagcaagctcttgctgctcctggccccaatccctcaacttgtgtctcaggaaacacatttctgccactattgctcgtagatctcatcctatggtcactagatccaagaatggcatagttaaaccaaaagcttatttggcccccaagcaccctttaccagaatctcttttaccttataagccaagacctcttcaagcagcccttaaagatcttcaatggtttaactcaatgcaacatgaagttcatgctttaaaaaaggaaggtacatggacattggttccctataaacatgtcatgcacatcattggcaacaagtgggttcatagaattaaactcaatgctgatggttcattagaaaagttcaaatcaagacttgcagccaaatgctatttacaaactcctggtattgactacgaggagacattttccttagtagtaaaacttgttacagttagaacagtcttatctctagctgttacttcaaactggtcagtgactcaattggatgttagtaatgctttcctaaatggatcactaattgagacaatttcatgcaacaaccttaaggttttgttgatcagtctaaaccagatcatgtttgtcttcttcacaaggctcaagctccaagagtttggaataacaaactcagaactagtttacttcaatggggctttaaggcatccaaatctgacacatctctatttgttcatggtattggaaacaacctgcttatactccttgtatatgtagatgatattctggtaacaggtccaaacaagtctgtcataactaaactggttacagatcttaacaggcaattttcactcaatgatcttggtgaggttcactactttcttggagtggaaatttatcgagactccaatggcatgttcttatcacagactaagtataccactgatcttttagtcattcttcacatggaaggagccaaaacttgctctactcatttaagcagtacaacaaaactgtctctcaatgatggagaaccatttgaagaaccaacactgtataggagcacgattggggccctacaataccttactctcaccaggccaaatgttgcctctgcaatcaacaaactgagccaatttttgaaagctccaatagtgctgcattgggaggcatgtaagaagttattgcgatatctcaaaggcactatctcaaatggattatttctcaaacctaccactgtcatgacactagaaagctactccgatgctgattgggccaactgtattgttgacagaagattgacagggggttatgtggtttacttaggtgataatatcatttcacggtctgcaaagaagcaataggttgttgcttgattaagtactaaaagtgaattttgtgcttaagcaaacacagttgctgagttgaaatggattgtttctctgcttactgagctacaagtcactcttcgacaatgccctgttatttgggtcgataatcagagtgctactactctagcagctaacccagttttccatgctcgatccaagcatattgaaatagatttgcattttgtcaaggatcacattctagacaagaagctctcagcttgttatgttccttgtttcgatcaagtagctaatatgctcactaaaccactgtccaaagattgatttacctaccttaagtccaaacttaaaatggctaaatttttttttcgtttgaggggagatgtaaacactgttaactaatacttagttttctattaactataggattagttaattgtgttagttatagttatatgattcttattttcaattttgtatatgtatcaaaacttctctataaataacattgcctttgctgtaattttcagcttttgcagaactattttcttctatctttctttctctctcgtgctttgtttctctacacttcatacttactataagtttattatattttgttatcaattctattaatttattcatgcatcttttttactagtactcattttgtttgctattattatttttttgattagcatggtatcactattacattttacttgacttgtttgaccaggtgggatccactaatgcattggacactttatgtagccaactatttggagcaaaacactatcctattcttggcatagaattgcaaagagcaattatttttagttcagctactagtgttatgatttcaatcatatgggcaaatgcaactccaattttgattgccatgcaccaagatcatgaaatatctcatgaagcaggaagatatttactatatttggttcctagcaattttgcatttggtctactccaatgctttcgaagttttttgcagaaccaaaatatagtaaatcccatagtcttgagctctgtagtagcaactattgtgcatattctctgttgttggattatggtttgtaaatatgagtggggaagcagtggagctgcagtggcaacctctatatcgtattgtgtaaatgcattttgtttggccctctttatcaagttttcttcaacatgcaaagaaacttggaatggtttttcaaagcaagctcttcacaattttcttccttatatgaaattagccttgccttcggtactaatggaatggtaaataagttgatgatgaaattatatatacatatacaattaattttctctttcaattaatgtatatatatgttctgttaacatatatacattattaatgttccattgattcaacagcttcaagacttgggcatttgagatattaatcatcttttctgggttttttcctaatccagtgcttgaaacttcagttcaatctatatggtaggttcaactttttaccttattaatcttatttgtattaaatacatgcatattttttgttgattcataaaaactattatttatcaaggaaggtaaaatctgtttctcttttcccagtcttaatacatttggattgatttggtctatccctgctgggctcatggtcagtgcaaggtaagagtaaataaatactactcattaggcttcttattaatttttaatcaaacttttacgtgattgtcaattgtttcttccttagcacatattgatgaaaaatgaacaccaatcctaatatataatgctggttacatttgatacatattaaatgttgggccaaattaattttgttcaaaatatagcatgaccaaatttgatcgaaaatatattaagagcctaatttggtccaaaatattagcacggtcaaatttgacctaatttactaacatacctctcgtatttatgtaatttatttgtttttgtatggatgtactttattaatttaaaaagctttttctaattatgttcaaaaaaaaaaaaagctttctaatttatattttattatattgtattattttttttttaatcaaacatttatatattataatatataagttgagac

SEQ ID NO: 33483 - DNA, 2829 bp, Cannabis sativa
  modified_base (43)..(50): a, c, t, g, unknown or other
  modified_base (444)..(455): a, c, t, g, unknown or other
  modified_base (1015)..(1017): a, c, t, g, unknown or other
attgttttagaattcatatttggatgttaatgaaacatacttnnnnnnnnatctagattctggtaaaatatttccaacactaactcctaagataccttcggtacaggtcatgtatttcctatttcatatctgctgggaatatgtgcccctatgaaactaacatagaaagacaagtgatccatttctagggatccccccagaaaaacactataaataccccacaaatagattgaaaaggggtcgaacgatttggtttaaagaatcgaggagagaaaataggagagaaatctaccaagaacattctatgtaataaataatctcattaatacaaaagactcgtggactaaggatcattaatgccccaaccacgtaaaaatctcctgcattaaactttctacaactcttcttatatattatttaattggttgctgaaaacctcggtcnnnnnnnnnnnnctttcattgagagctgaagaaagtgtctttaacagacaacaatctaaaaaagttaaatcaacaatggtagaaactcgcaacagtacatgttagccccgtcctcctcaggatgctcaaagccctgagaacgaggaagtggcctcaagagtgaatgtgggctccaaggagcgagatgaggccaacgacgaagagtacgaagaaaactttgacgagtatgatgcttacgacgaaagtagctatacagctgagttgctagtcttaaagcaaaagggtgctgatcatgaagccgagatcgcagcccaaaaagagaaaaatagaaaaatgcaagaggtgatggtcgccatgaaaaaagccatggagacggcagggattcatatacaccctaaggccaacccagtaggactcgaggaaacacaagaagagtcctcaccaaacactcaaaaacccaagaccagggaaccaagtcctatacggtacccttccgaagaaaaccatgggaaaaaaccccacttccattcctgggagaaagaaaaaagtgcaggatccgcgaaaggtccgcnnngatttcccgaaagggaaaggtccgtagaggggcaagctcccaaaagcgagtcttggccctcaggatcgagaggaccgaaagagcgtatctgtacaccaagagcccggagagagaggaaggaaaaactggagataccttccagttgacttaagacaaaaagtcaacaaaaaaacacggtgatctacgagatcacctagacaagaagaaacatgtatcaacagtctctgcggggacactaaatgaaggaattctggctgagttggcaacactgcacaaggacatctctcgggtctcccggaggcaaaagggggacgactttgattccaattgcgaggaccgagaaccatgcgcctagcacatattggaggcagagctccccaagattattaagatgcccaagatggcagcatataccagggacttggacccaggtgatcatttatcctgtttcaactgggtaatgacagtcatgagggtcagctatgatgccaagtgtttgtgctttccattaacattaagcggttcctctgaggaatggtttaaaaagttggaaccaggatcagtagactattggaacaaactacaagtaagcttccggaggccgtttgtcgttgcaaggaagattaacctcgaagtcagcgccctaactaagataaagcgattgtctgcagaaaccttaaagaacttcataaaaaggtttaaagaggaagcttaaaagaccaagaaggttgatgacggacaacagcttgcacttcttcaagttgggatccatacggggaccccattctggaacgaattacaacaggagggaacaaccaatctccaagatttccagaagagggtccaaaagtacatcaatctggaggaagcccagatagtggcctacgtgggatactatccaaccggagtatcaggatatgtactcggagctcagctctcttgagccatacccccggccactcctcaaatgagcggcatacaattcttttctacaacaggatataatcaaagcctagccttggctcccgcatcatcacattttgggaatcccataagcaacccttcggggatgagtggtcaagccccgtctcactctgctcctaccgcaagcctgacaggaccttctcaaagctcccgaagcaagaggtcctcaaagggtagcaacaggacggaggataagcgacaacaaagggagtacacccctcaatatactcaatacacagagctcacggacacgcaggagcgagtgtatttcgccacaagaaaaaatacacactaccggaagcctcctcccctgtacagggatagttcgcgaagggatcccaataagagatgcgattatcaacccgaaaaagcctccaaacgggtttctggttcgggtgtggataagccattttttttggtcgggtttaacccgtaacccgaaactatttattttttttaaaaaaaataaaattaataatacttaattacttattaatcacattcagaaaaaaaaaaactatttatttcactaaaacgctgactattggtcagcttaatactagtacttgtcattaattaagttgtcaatacttaattaatattatttattttttttaatcagattaaaaaaaaaaagactcttcaattcatattggtattcgtgactctcacaccagaccaagagttttttttggttctcagtcactcccttaaccatgaaggtaatgaaggcattacatttttaatattattatatactactgttgcccttaattttgcccaaaatacgtggaccaatatgacaacgacacgtggatctaagaagca

SEQ ID NO: 33484 - DNA, 3685 bp, Cannabis sativa
ggccgaacccaggacccaagaacaagactcggacctaggacccgaaacccaaagctagaataggactgggacccgaactcgtacctgaagccaaaccaggacctggactcggactagacccgaacccgaacccaccgggacctaggacccgaatattgatggaggaccctgacctatgaattgggccccaaaaaaaggcctagaacttgggccttagaacatggatcgggatcggggactggccctagacccaaacctggacataggacccacctcgggacttgggatccgggactcgatggttggacccgattcgttgtcgatgtctagatctaggacttagaccagaacgcgaacccaaactcttattaggaccgggacacataccaagacccagacccacacttgggaacaaaaactcaaacttgaattggaaccagatcgagatctttgaacgggaccgagacgtagacccaggccagaacccggaaccagagccagcctcgaaccctactcgagaccgaaacccgaacctgaacctcgccccgaacccgtacctcgtgacttgaaacttgaaccgaaactagaagcggatcaggaccgaggaacaggaccaggaccaggacatggacccagacccaaaactgtaaccggaccaggatccaaactcggacacaaacccaccctgggattgagtccaaaacctggacccaaacccagaccagaacctggtccaggacctagaccttaactaggaccatgatcgggaccccaacccggacccgaaaaaagacctagactcagaccaggaccttaacctgtactccgacctaaactcggacccaaacttgggatccaaacccgaacctgaacttggacctagaccgaggatccggacctagatgggagacctgggccccaaacccaaacttggagtaagaatccggacatagatgggggacttgggcccaaaacttggcctcgcaaccaacaccgaaccccaaactcaaccccagactcgagacacgggacccgaccttggacccgcaacccaggacctgactaccgagacacaaccttgaacctgaacccaaacccaaacataggactcgacccaagatctaagacctgaagttaaacaagacttagatccaataccaagatccgaatctgggccaaaggctttgacctgacccgtagttagtgtttgaatccaggacccaaacctggatccgtaccaagacccagaatcggaatcagaccaggtgtgggattagaacctagacttgggacagtaacaagacccaaacctaaacccaaactcagaccagaacacatacctggacttggacccggactagtacctgtaacttgggacctaaaccaagaccgggacctggaccaagaccgggtgccagacccagacccaaaaactggggctagacccaggacctaagaaccagagtcaaacctgggacccaaaactcgtacccacactggactgggacccgaacccaaactgggacctagactcaaatcgagactctagacccaaactcgaaccggaacacgaacttggacacaaaccgagacctaggacctgaacatagatgggggaccaagaccgaggaattgggctcccaaaccgggaccaaaacttgggcttcagaacttggatcaggacccgaccctcgacctaaacatggacctagcacccacctctgggatccgggatttgatgcttggacccgacccgtagtcagtgtctggattatggacttagaacagaaccccaacccaaactccaacttaaaccaggacccagatacataccaagacctagaccgacactcaggaaccaaaaccgaaacgtgaactttaaccagatagggatctttgaacgggaacaaggacccgaagcaggaccaggaccttgacccagacccaaacatgggacacaaaaccgaaacttgaaccagaacgtgactaggaccctggaacaggactgagaccgtgaccaggaactggacctggaccaacaccctgaactagaccataaccaagccccgaaatttgagttcagacccagtcctggacccgatcccggacccaaacaaggactgagactcaaacccaaaccaaacccaaactcatgactcgatcccagacccagaccaagcccctttataagactaggatttggacttggacatggacaagaaccaagacccgaaatcgaatactgacccagacctagaccgggatcgaaacacgggacctacacttggacccaaacctgaacatgggacccgaactcaaacgtggacgcagcccgagatttgaaaaacatgtacccgaactcagactaagactcaaaccttgaacccaaaaatagaactagaactgtgactaggacccggacctgagactagaaccgaacccaaataataacccaaactcagaccagaacttggaccaagacctcgactaggactgggacccgaacgtggaccgagacctagacctgacctggtcctaaaccttcgacgggacccagaccaggatctagaccttaacaaggacccgaactggaacctggaccaagacaaggaccgaaacctagagtcgaacccagatcgggacctagactcaacccaagactcgagacctaaacccaaacctagacccagaccaagacctaggaaccggacttagatggtggaccaagactagggacctaggccacgaaaccaagaccaagatcaaaattcagtactcaaacccaaaccaagacctgacttggacccaagaatctgaagtcagacccataccggaacccgaaacctgccctagaccaaaactaggacaggaacctggacacggacatggacaaaacccgaacccagacccgaaccaaaaatctgacctgaacttgggacccaaactcaaactcagacctagaatcagacccaaacatagacctggactcggacccaaactcgaacccagaccgagatcgaaaccaaagacttagacccggaactaaacctggactcagattaggattagaacttgggacttggaccttgaggtagacccagacccaggaccagtacccacacccaaagcctcatccaaacctagactaaaatctggactcgaaccgaaactcatacaaggactcgaaccccgacctgaactcgaactctaactcaaacatagaatcgcaactacaactggaataaaactaggactcggactaggacaggacaaggacctaaacccaaattgaaacccagataaaagccagaccgagacccaaacctgaaccgagactaggactcaaacccgaacctagattgggacccaaacccaaacaagaagttggaccaggacccaaaaacgggatagggacatgggcaacagaactaggatcgggaattagtacccgacccagacccaaacttgaacctaggacctagcttctgacccaacacccgaaatggaacgagactaggacctaagattgggatccagatctggacacggggcttggaccaaacccgttgtcggtgtatggatctgggactcaaccccagacccgaacccagaccagcacccgaacccaaacccggacctaaacccaatcctagaccaaaaccttgacccgaacccgtaccctatg

SEQ ID NO: 33485 - DNA, 999 bp, Cannabis sativa
catatttaggatgttaatcaacaggcttgttagtaaatctagatcctggtaaataatccccaacaataacaatcttctctggtaaatgtacatatcaacttatccaatttgtgtggtcgagttgtcaggaattattttgggctgcacctgatgtgtattttgatttactcttgtttatagccctttttgtaaaacttttgtaacagggaatcttcgaaacaaagttttagtgattgcatcctattcattgctatggttctactatagtgaagtttttactattatcatgaatttaattaaataatcaatctactattactaaactatgtttcaaaaatacacacgtggcccagctcagttccgaccctattaaattggcccaacctaattctgaccatactaaatcgacgcaaccttttttcaacccatatcaattcatcccgttatatttagagccttttcggcccaaatttgggttgggttgggcgggtttgtcgacccaaccctacccatgtgcaaccttactctccatcccttatactctctatcctccctcaaatctccattctttatcttctccatccatctcaccaacatagtgtttttttttggaatctgtagcttccattgataagaaattctcagtttatagttacaagatttataatagaatttagaatagtgccattctagattattttactgtccaaccttaatgctatcttggcacaattgtgagcaatatgattgaaagatcttgaaatatggtaaatggatgtattagggaaggaagacatcaaaaatttgatactcctaatagataaatgtaatcctatatttggtaggaaggatttttgagtagaagaagagataaatcatgtgtttggtagggaagaaagaagggagaggaaagatgaaatgatataattgttgggttttataccctaaataaaaatctatttcaatgtaatctttatcttttaaatatcaataaagaaa

SEQ ID NO: 33486 - DNA, 1600 bp, Cannabis sativa
aatcactgaaatagtaaaattgaatgaaattaaataaaagtccttaaatctaacaatctcaatagttcaggggaatttctaacgcccagaaaaattcaaagggcatgatttaatacatgttaaagtttaggggtaaaaattctaattaatttttttttttttgaaaagtaatatatttgatatttttattatttttttttaaaaaataattattttactaaagttgatccttctccaaaacaataataaatttactaaagttgctcccacattgtttgtagaacatctctcatcttttcttttagtttattttatagaattttacattatgtgttaagatattacctaaaagttttatttattttaaataattttggttattaaaatggagaattggagagcaagtgaatatttaagattcccaactattttgcggtaaagaaaaataaaatttttgagcaaatattatttctattgaagataagattctgattttgagtcatattactagaatttctcatcctacaaatgcgttaggaatttacccattaacaaaataatcaaaattattcctaactaaaattaagatcataatatagataattaaatatatcaaatctataaaaaccacctacttgtttaaattatttgattaattagacagtttaaacaaatccatattatttccaacccatgcatgaattgttcaaaaagtaacattaaattattgaattgtttaggtggccaccgatgttaactgttaaattatatattattttatagaggggtaaaacaataaaatagtaataaacaaaataataaaagattaaaaaagtcccttaccaaaaaaaaaaaaattaaaaagtcatagtcttatcttattcaaatcaataaaagattcttttttcaaatcaataaaagattctttttaaaaataataataataataataataataatatatttttattttaataataaaataatttgaaacacaaatacttaaatttaatttttagttgtagatatatatttaattttaattttttacggtaataaaatttaaattatatttctaatattgttaagtgtcaaattacgtgacaatttctgattgatttaagtaattaaatgttttttttattacacaaataataatggtatttttttaataaataataataatatttaacatatttatttattaatattgtatattggtagtgtccaatattttttttataaatatcataattagcaatattttatacaattattttttaaaattatatttaatatttaatatttaattaaactaataagaagagtacaacaattttctttagaatttttgtggaacatattttttttttaaatgagaacaatatgttagactttgaattagtttgacctcatatatccgcgtcgtgaagccgaccatctacgtggcaaacaaccactccttatctgccacgtggtcccgcccaacatcttggaccctatataaaaggcagctccaaatatccaaacccatttctgttgcgcttttcggatccgattcagatactcacacaaccacccttctctctctctctctctc

SEQ ID NO: 33487 - DNA, 1639 bp, Cannabis sativa
  modified_base (1030)..(1030): a, c, t, g, unknown or other
gtccaagttcatgtctggtttttgttcgtgtcctgagtcataatccgagttttgatttgggtccacgtcctggtccaggtctgagtctgggtcctagtcccctagtcttattcccatgtcccagtcagctttcggttcaacttccagtttcaagtcatggggtacgggtccaggtttgggtatgggtttgggtttgagtccgggtctgggtttgagttcgggtatggatcccgaatccaaatatagactacgggtcaggtccaagccctgggtccagatcaggatcccagtcttgggtcctagtctagttccacttctggtcctaggtcctggtccgggtcccagttcagggtccattttcagggtcaagtcctgggtctcggtgctagtttcgaagcccgagtccctggtccaggtcccccatccaggtccgagtcctaggtctcaatccgagtctaggacccggttggggttcaagtcctagtctgagttcgggttcgggtttccgatcctggtccaggtctaaatctgggttctagtcacgggttcaagtccagatccaggtccgggtctgagtctcgggttccgatctgggtctgggctccaagacccaagtcttaggttccagtccgggtccatgtttgggtttgggtcctactactagttccgatttcgatttcgattctgggttcgggtttgggtcgggtctgggtcgaggtctgagtgctggtccgagtccagggttgggtctgggtccaagtcctgatccctattagggtcttggtttgggtttggccctagtttttgggtctggttttggcttcaggtccaggtctcagtctgggtccaggtcccggtcttggtttaggtcccaagacacaggtccaggtttgggtcctatcacagtcccatgtccgagttctagtcccagtcctggtccgatcacggtctgggtatggtccgggtatgggttcgagtccaggttcgtatctagatccatgtcaaggtccgagtctgggtctaagatcgngtcctaggttcaggtctgacccgatcccggacccggaaccggaaccggaatcggaccaagactggaactagaacctggacatgggactgtagcaggacccaaacctaaacccaaactcaaactagaacccataccgagacttggacccagaccgggacctgtgtcctgggacctaaaccaagaccgggacctagacctagactcgaagccaaaaccagacccaaaaatcggagtcgaacccaggaccgaagaaccagactcggacttgggacccgaaacccggacctagacggggacagggacccaaatttggacccgaacccaaatcgagaccaggactcagaccggacccgaacctgaaccagaacacgaacttttacccacactaggaccaaggatccaaatatagatgggggtcccagagcttggaattgggaccacgaactaggaccagaacagcctcagatcttggatcgggatccgagactcgaccccagacccaaaccaggacttaggacccacctcgggacctgggattcgggactcgatggttggacccgacccgtagtcagtgtttggatctagaacttagaccagaacccaaaccca

SEQ ID NO: 33488 - DNA, 1009 bp, Cannabis sativa
cacattgaaagctgagggaacgtcaataatgacaaactatgccatcattgttcttgtggtcggattccctccaattgtgaggggtaatgtgatataccaaacaggtgcgatgccttggccaaagaagccatacatcacttggttacaagccgacaggtcagtgagttggagccccatcttttcttttgttgatttgaaaagaatgttggaggaggctccatcatccaccatgcatctagctacagtcatatttccgatttgcacattaatgaccaggggatcattatgtgggaaactgatcggtgctgcatcttctttgcgaaaggagatcatggcctccatgggcttctgttgcttagagctccgatcttggaaagctaggattttgcctttgggctcgtgagagactgtctaagcatagcgctccttagctttactagttttacaagtaatgtgggggcgtcctattatgatccctaggtgtcctgccacaggtggtggcactggatctcccttttggcatccttacgtctgtgtttggttattttgcacataacgacgcaggtggagattgttatgccttattaggtactcaatctccctcttcaaattttgacactcattagtttcatggccaaagttgctgtgttatctacagaacttttccatgtccctcttacccatctctcttctgattgtgaagggcttctagtatgggaccattccctaagtggccatgaagatggtctcaggctactctgtcaggagggtgaagcaagtatacttctcctccttgttcttttgtggcggggagaagtgttgaacttcccctttttgccactgttcctcccaaagctattggttttatgcttgtttctagtgcttttaccactaaaggtttgggcagtattgttgttgcctacctacgcgtctggtgggtatagaggatgctgggtgcctcatgactgcctgctattgacatgccctggctgttgggttttatgcccta

SEQ ID NO: 33489 - DNA, 2001 bp, Cannabis sativa
aaattgaaatggcgggtttgcattttaccatgcatttccagatcaatttcaattaatcatacataaatgctccttaagtaatttttaaagtatagaacttcgtaattacttaatataaattattctctttattcataattggagtttaaagtctacatcagtaatgcgtgttacatcatttatttattggtagtagggtcacaaatgttccatgtgccagtaattttttattagcgagccgttcactactacaaaattagcttttcccaacagtttataactgtcttttatactttttccatcagttcctaaaccgttggctatgtgggtgtcataaaaatacggaattttaaaagacagtttataactgttgggaaaagccactttaaataacagtttacaaccgttgggaaaaatcactttaaatgactgtttataactgttggcaaaactattatgtagattaaattaaattaatttctaatatattttttaaatattaaatatatataataatattaattttcataaaaaaaatataataattaaaataaaatatattaactaaaataaatcaaattaatgtattttcatatttcacaatatacattacatacaattcagaaaaaaaataaaaaaaataataaatatcaatattacaactaaatctaaaaaaaaattatacaggagaagaactaaacaaatattctagacattcttgatggagctcatctgcaccatcgcccttgcaaacttagcagcccacaatgagccatggtgggcattctactacaccattctcgatctcgactcaaggtgatcttcgaagtactcgctatcaagatgaggaggagtgcgagactcaaggggcaccgtcagatcaacaccaccgttactcgtcatcatcggaggcgaacacttgatctttaaaaaggttgtgtatctatggtccctgagagggtcttgaggatgagaatgtatgtgcaaagaaaaaatagagaaaaagaagagaagcgagagagagaagaaaaatgtaccaccaattgagataagtatattgaagattatgatcatggagaggttggggtttttgtttgaaccaatggcgttggtagtggccagatttggttttgtgcagccgcacaaagagaagacagagagacaatgaaagagggattagggttttcacttaggttttttttttatcattttctatttatacctttcaaattttatccacaaaatttattgtattttaataaataaaaatgtgatatgattaaagaccctaaattaaatataaaaataaaataccacaatttttaattaaagaccttaaattaattctccaataaaattttaattagaaataattgtccaataatattttagtccttcaataatttttctcttttacaataaatttttaaataccattaatttctaaaattatcctcaaattgaaaatatataaattctacatttctcaattttgaaagttctcaaattacaaatttactaagcaaatactaagcaaaaaaaaaaaaaaatcttttttttttattattttttacatttgaaacttttttttggtattttattttattaaatacaattttttttattaaaaacaaaaaaagtacaatttttttaaaaaaaatttgaaactctttgtttttataaaatattttcttttattaaatacaattttttttaatgaacaaagaggtttttttaaaaaaaaaaatagaaactttttttatactaaaaagaacatttcctaagagtttataacaattgggtatattaagttttcccaacagtttataaccgttgggtatactaagcattcccaacaatttataaccgttgggaatacttgttttcttctaagaaattctattattattgcccacggttcttcaccgttggcattagtttttcccaacagtttctttacttcagttttaaactgttgggaaaaatctctgcttacctttt

SEQ ID NO: 33490 - DNA, 1826 bp, Cannabis sativa
cctcactaaaaataaaatatgtagttcgctacatgaaattcaaacaagacttgcaaatcatcatgaaacagctttggatgtctcattatcaagtttacaaatctattctcagtgctgccccaaaactttagtaacctcttattcaacactcaacagtatatacaattaatttgaatatttgcatctcattgttcattcttaagaactctggtgaacaatgaaactagatttgatgaaaacacaattaaatgaagtgcagaaaaattacaagctggcacaaaagtctatacctttttctcacccctataatcaaaaattaaacacattcaaatgaacttgaaaattacaaatgtagcaatgtataataaactattctaaatcaaatgttattcattttactagctattgtgggtgacgatgttggagattcaagcttttaattttttttaaaatagcattgaatggctccatatgtattataaacaatagttgcatgataataaaaatgaaattaaacaattccaaatctctcagggataataaaaataagaagaaatatttggcagctacagaaaaagacatcataaactattttttttttttaaagcatgataatgataggattctcaaggtgcccagtaagaacaatgtcatgaaataataaatctctaaacaaagcgtcacaactaaggccacatataacttaacaaaagccaccttgtccttgaaagccagtcatgacaactaatttatttgacattaattaattgatcattatatgcttaaatatatcactatgagtatgggttatttttctgggttacaactaatttacaggagacagagaatgtggctttggcggagtcaactaatttggatcagaaacaaataaataattggttcataaaataaaagaagagacactggaagccttctgaagatatgcagttcatggttatggatggtctacacccacaaaatgccgctctctacatggatggtcaaacaatgcctattctaatttcttgcaagtagtaataaaaatgtcattactaagctatgtagtcaaacccaacgacacaacttcacaatctcacacaatgcacaaaaaagaatccataaacaacaaatattgatctctaaaattaaaataattaacaactcaacctggaaaaatagaaagtgagataagaggagattgaacctctagtttctgtcttgaagcgcgaatgagttcgagtttctagatcgaaagggaaagtgattctcctaatctgaaaaaaagaatgaacacaatcaatcaataatctctaaaccagagatagaaagaggaataaagaagaagaaaaaaaccttgatttttggcttgtgtacaaaacatagggttagagaggaacttcgacttggctgtcatgggcttcaacttggggaatcgttgggcagtatcgtcgagagttgagaagaaaggagctgccgtcgatcagatcgccaggaaattttcgacccttggggtcattggtttgaaattttcgagccaaaatggtagatggtctgaataatattgttttaatagcttcttatttttctattgtaaacgacaacgttttatgtattcatatatatactctcttaattactttaacatgttgtttaaaaaaaatactttaaaatgatactgtgctggtttattagacactcaaaaaaaatataaaattcattttggagccaaattttcgagccaagaaagattagtgctatattaaacgcatctttttctaacagtttataattgttgggaatactaagtattctccacagttataaac

SEQ ID NO: 33491 - DNA, 1992 bp, Cannabis sativa
tactatattgtagtaccctcaaagagcataagcaacactccaatagaattatacaatgggacgaaacccagtttaaaatacttctgtattcagggttgtcctgctcgtgttcttaaactaaagactgggaaaatttctcctagaactgaagtgtgtatatttgtaggatattcagatgaaactcgaggtgcttatttctatagtcatcaagacagcaaagtatttatatcgacaaatgctacttttcttgaagatgactacatgaaaagtcaaaaaccatatgcagtcaagtggtcatcgaggaaattaaaaatgagcaaacttttgaaccaacaatttcagcaccattagttgaacgatcgatagtggttaccaaggttccagaaaggaaacataggttcattgtcgtagtgggaggattgtgagacaacttgttcgctatgaacatgaagcatatgttattgtctctgacacagacaaggacgatccattgacttacaaagaagcaatggaagaccctaactcagacaagtggaacaatgccatggatcaagaaatggattccatgcacaccaacaaagtctgggaatatgaaactctacctgaagatattacatgcacccaaagggtgtaagtggatttttaagaagaagagaaatgctgaagggaaagtgagacctttaaagctaggcttgtaaccaaagactatacacaatgaggagaaggcgtgactatgatgaaaccttctttcttgttgcaatgcttaaatccattcacattcttctttccatagctgcaacttatgactgtgagatatggaaaatggacatcaagactgcttttcttaatggcgatcttgataaaatcatttatatggaacaaccagaagggtatgtgttaccaggggaagattaaaaggtgtgcaagttgcttaaatctatttatggagtgaagaaagcctctagatcttggaatatcacctttaataatactattaaagagtatggcttcgaacaaaacgaagatgaagcctgtgtatacaaatacattaaaggtaataaagtcgtattcatagttctttatgttgatgacattctacttattagaaataatgtagaaatattatcagacgtaaggaagtagttagtcgataaattccaaatgaagagtttgggagaggcaagctatgttctcaaggtcaaaatctataaagatacaaagcatagaacattagcactttctcaagcaacttatattgataaggtgctagaaagattctcaatgaagaattccaagaaaggatagttactgtcaagatatatggaattactctatgtaaggatcaatgtccaaagactcctcaagagatggaggacatgagaaagtacccttatgcatcaacaattgggagcttgatgtatgcaatgttgggtacaaggcctaacatatgctacactacaggaattgatagttgttaccaatctaatctaggttttggaacactagatagctgtaaagcatatttttaagtatcttcagggaatgagagatcacatgcttgtatattggtggagagttaaatcctactagatatactaattctaattttcaatcagtcatagatagtcaaaagtcaatatctgggtcagtatttactctcggtggaggagttgtagtctggagaagcatcaagcaaaccaatattgcagattcaaccttggaagccgaatatatagcaacttgcgaaatagctaaggaaacagtttggttgaagaaattctatactgatctgtaagtaattccaaagtagaaaaaccacttgtgctctactgtgacgacagtggagcaatggccaactctaaggaaccaagaagccacaaaagaggcaagaacattgagagaaagtaccatctactaagaaatatagtagagagaggtgatgtgacgatcttgaagattgtgtcagatcataacctggtagatccattcaca

SEQ ID NO: 33492 - DNA, 1714 bp, Cannabis sativa
tactattttctttacattaaaacgttaattgtatatttaattttttaaaatttttataaatatgtgtggattggattagatcgattatttctacatgtcaatcaacatccatgaattttctaatctaatccaatccgtacaagtgcaagtatccgcactttgtggattagattggatcgtacaaattgaattagatttgatcgtacagattgaattgaatcgtacaaattagattagaatggttattttatgaacaatcataacaaaaagtaccaaatgtgtagataaccagctattaggtaattgccttttatcttttctcaaactcaagttgattttaggatttgaattttgttgcaatgaatatttgttgtgtattgctttgttattagaaaactattagttgattatatgtttatgtacataaatagttaattatagttggatttcttaagacttttggattgttgtagccagagataattttagaactcttttttttagtgtagccttagtggcttgataattttagaactctgccatgtttatttatttatttttgggtaaaacgtggacttcattgaacttaaggagaccaagcttggtcattaagattatatataatatactatatataaatttagtgcgttgtgtgacttgttaggagttgaattttattatttggaaaattatgatataatactagtgagaatcaatggtaatggtaaagtaattatttttaatatttgtttacttattattgttaaaattaaaaaagaatgagaatacttcttctactaattttatataaagaatactatggattttatttatttttattttttaatattaaatatataataacaattttaccatttaaaacatgttttataaaataactaccatttaactcaaaaggatacgttagttaatattctattatgtttccaaacaaaataaacaagataaattactattattttattttcaaaaaaatttaataaacaacatattacaaatattaattctaattatttctaatttattttattatatttttaattaatttattttaattttaaatacgtgtcattaacttattaatatatacctccaaataatagatttaaaagtgcttatgtagtaactatgattagacctccactacaaatatgagacatgtttagctagctaactcaataatttcgcatattaaaatattatgcgttggttttgtttatttttatgtactaaatatataaagatcattgatattgtcatggggaaatatataggttatggttgtggttgttttatgacacttattatcgtgttcgtgtgtatttatatctataaatatatggctgtactcttaatgagtattatgcatgaatggataatattagaaaattttaaatatttaaaattaatttttctattttattaaaaaaatttctcatttttacattatatggctgagattggtctatcagctgaaaaaaaaaataataaaaaaaaagtttttcgataaaaaaagttgaatttgacttaaatatatttttttttctatataaatatgtttttgatatatttctttttatatccttatatattaaaaatgtctatctaacggtatttcttggttagaatattttgttaaatttaactatattaatatgtttgatctcccgttaacaaataaacccaataatta

SEQ ID NO: 33493 - DNA, 1710 bp, Cannabis sativa
agattcagattttgataatgctctactatagaaaggaattaagggttagagatctgaatagaatgagtcattattattctgctaccatcaatataaggatttcttaatcgcttatgtgtttatttcatcgaattaagaaattcatatttacggtattcaattttagattataatcaacataatattagtaaatctagatcctgataaaacaagttccaacaacatcatcgtatcacattccagcggatctccagatatgtgtacattaaatcaaaacaatgaattacaagtttataatatacctcttaaagcctatcatggtatcctcaaaacttctcgtatgttgtatcagatgatgaagaattttcaatttgaactcacaatagtgtcttccttttcaatccaccacacaaaaagaatagtgtgggatattaggataaagtatataaagttattcttgtcgagttttcaacacatgcatgagcaagaacaattgaaagaaaattctttctttctttttctctccctatttcgaaaatagcaacataaaagagtgaatctaatttctcaaatcaggctaaatagtagttaaatccctttaattaaatcatatttaattgtttgaataaataaatatctataactgaattcacttactgatatgtatgagggagggaatctctcaactacttgagagaatattgacaaccttaaaatatctataaccacttttcaaattagatatttatctaattgaattaattaaataattaattaatccaaaaagataaacttcatagggacacgacattagcttacgcgcctaccattgtttctaagacaaggttagtgtcttttattctgataacttttgtccgaataaatcttgtctcgacaaattttgtcctaacaatttttgtcttttctctatttaattaatttaaaaaatttatttattacaaaaataaataattactattttaccaattcaaaatagatttttgtgaacatatttatacaactctttatccctacccttgacagtattttaaggtagtaatttagggaccatagacctataattccaagctccattaaactagattatttactaagtctcatcaactaaataatctcttatttattaattccatgattactccactataaatatggaatttcactcttagtaattatagaattgtatttactgagtttaactatagtgtctattgatataatcaattccagtgattagccctctatgtgttggttcgtaatcagcttttgtcaaattactatgttacctttttaattacttctttatcctgtagttctattaatttactagtggaagtacaattcaagatcccatctgaatttgcacgcaactttccagtaccaaaattaacacataaatggaaccaacattcgatccattaggaaagtcaagatttcataatgtagatcatgttcccagccatctatattattagattgtaagaatcatcttctttgagacactttaatgagtgaatcaaagaaactaataacatgaataggagtttatgatcactcaggatttaggttgatctactattgatcattgttatgatatgaattaggtctttaaatagtaaatgatatgttattaaagacaacttcttcataccggtcattgtcataaataatctctattatatacaacac

SEQ ID NO: 33494 - DNA, 3920 bp, Cannabis sativa
attacttttcataataattattttttaataacaaaattttatagaaattataggttgcattatttttacttcagtccaaatctcacacactattgtaaaatctatcagtgtatgtatttttgtaaatcaatatctaatttctatatatttagagtaaatactattttggaccctgtgttttgcaaaaattaccagttaaaccttctgttttgtgaaatgataaaatagactctatattttccaaaatggtaaaattaggaccatgagcttaatttttgaaaatttagtatttaatataacgaactttaaggcaatttctaacacgaacagatactaaaaatgtaatcagttttctcataacatcattagatcaaattattattaagttttatttggacaaaaaatcagtccagggtcctatttgtacaattttaaaaaatacacattctattttatcatttaacaaaacagagagtccagttagtaacttttgcaaaatacaggattcaaaatggtatttactcatatatttatataacagaaagtactaaagaaaatgaggtgacatgctacaatattttaatctattttaagagaattttattaaatttaattcattttacatatttgtagatattgagatatatgacttagtacgtttttttttgttatttgtaaaaatcccacatggattaagaactacattattagtatacttttatactataaagaaagtattcttatatttattttgatttgtccaaaaatatatgtgtgattaataatttgatcttgctcaattaattataatttgattttttattattattttaagttatcaaatcaaatttatatatttaaataatatatccatatatttataagccaaaaaatgtgaattagcaatttattattttttttctttttatattttttatttatttctcttctaagtgatatttgatatacttatctaaaagaattatttaaaataataaattataaataatgatagaatagaatataattatataataaaattaacaaatttataattaattcttttatagtaattaataataatattttagattatatcactcgttataatataagattacaaaaatttgaaacacagcgctttccctaattaatataaaaagttgtttatacaacccattccaacagtaatcatcaccgatttaaaattgtatgtcatcatcacttctaaattttagcatgatctactcataaaattttattgttgcaaacaaataattgtagtagggtccataacttaattttggtaaaattgttatattatgaataaatattaatcgagaatagatcatactaagggttcattcatgctagaaatcatttattcccgaaagccctagcatgcagaattctacttcccatgtacctgcaaatgcaacaaccattatctattaatatattaaattattgaactaaacaaaaattgttcgtaaaggttatcatatataaattagccatggtgaatattaatcttttgttagacttatatcagaaaattaataattttacctcctaaatatgaaaatatgaacactatcatattttatatcctccaaatttttattactgccaaatttatttattttaaatgacaagaaacgtttcgacaatagtaaaaaataatcatgagacaaattataatagttttcgtaattcgaaaaatacgttaattattctaaattatatttgagtaatcaattaggaaagtgatgtagtttcctataacaaagttcaaagaataattaccttcccaacatcataacagtagcttggggattagttccaggagaggccataaaagttgaaccatcaataaccctcaaagcatcaacaccaagaaccttatattcattgtcaacaactttgccaacttggcaacctccatggtaatgccatatgctcatcactgtgtctctgcaaaattgttctagggaaatagaaggaccaacgtgtttgggcctcaaatttaaaggaactttctctattaagttcagatataattgaactggtatgtttggatactgaaacctggaaaatgctttagaattgatgacaccaataatggtctccatacctccaacacatcggtttaagtcctcctgttctttgtagtagttaaaagtcactgatgggttcttatcaatgttggtgttcttcagctctagatgtcctgtggagactggaccatccaccttttgaagaatgattccacctttaaatgttatgttattgggaactaaatcaattctttcaccaggccttgtggaggtgaaggtatggttagtgatctgcatctcatgccaaacaaacaaaaaactagaaaatgttaactatacttgtgtactatttttttttcttatcttttcataacattcaatataaattcaaatgatgtgttcagagtaatattgaattggaaaacttttttttatagattccaatcatacgcatatgagttacatcagtattgacactgatatagaattagttagtagctactacaagaattgcaacctatagcagaaaactaaccattctacaacttgcatataccataccaactaacaaacgtgccaaatttaactaactattagctaaacaaatagacagctaagcttttgattactactttccctcgaggtgtgttataaacactttgaactgtgttggaaacaatggtttggtgagaatgttagcaaatttatttgttgagacgtgagttatttttatcactcccctcttgagcgttttctctaatcaattgccaatcaattttaatattcttggttctcttatgaaaaactagattagcttctatgtgctgggaagacttgttgtcacaatgcatcaaagaagatcccttatgttcaatcttcacctctttcaaaataaaaagtaacaaaataagttcatatgttgtattagccatggccctgtattcaacctttgctaaggaccttgatatgtgcgttgtttcttacattttcgtgaaatcataactcgcctaggaaaatgcagaaacctattgttgacctccttgtatgaaaaaaattgctcaacttgtttactagaaaagaaatatctagttcagtaataattaggtactgtaatttctcactattcctccgtcaagtgtgggatgtgcaagcttttctttgtcatcctacattagcttcaaattttcttctattggaatgttcattggtttgcaacctaaaaaataaggtcttccaataactctggtgcataaggactttgagaaatgaaaactccttcctctgatcttgcaacttctagtcctaagaagtacttcaagttgcctagattctttagcttgaatctattgcttaacctagtttttaatatttccaactaatctaagttgttatcgagcaagatgacatcatcaacatacaccaataagaagataaaactagcctgaaaatgcttcataaataatgaatcatcaacatacacaattatttttgcccgagatgaagaaccctaatccttagttctggatcctagaaatcaatttccaatttattgatccccttgcatggaaggatcatattctatttatatagtactacaaccgggtatggatatacctagactcagtaggattctaaggtgtaaaataggcacatagatgaggtaaaaatacaatatatattgactttaggccaattgagtgaggctcaattcagaagataatgagcgaggacaatttgaggaggccagatgttgttttcaacaatatccgtattgagaatgtcagagaatatggtgttggacaaaaagatgatcttctttctgtggtgcacgcattccccaagcctcatgtaggggataaaccc

SEQ ID NO: 33495 - DNA, 1173 bp, Cannabis sativa
gatctagactcggggcttggacctgacccattgtcgatgtttggatctgggacccatacatgaactcaaactgagacccaaactctgacccaaagccggacccagacccgaacttgtacttcgtgacccgaaacttgaagtagaaccagaagcagactgggacccgagaacaagaccaggggactaagacccgatctcagtcctggaactggaatctgacaaggaaccaaacccagaccaagactgggatgcggacccgaatcaaaactcagattgggactcgacacgcgaacctaaagccagacacggacttggacccaaacccgaacgcaggacccaaaccgggattggagactcagacctagacctaggtccctgacctagattggggacacaaacacgaaattagaaccagaatcaggactgaggaaagggactaggacctaagaccaggccttggtctcggtcccacactcggacccggacacagaccgggaccaaagatcggaatctgacctgaacccaaacacggacctagacctagaccaggattcgaacccagacccacacccaacccttaaatcataccttgtgacccaaaattggaaccggcactagaagcagacacttaaacactaaactctaaacctgataccctaaatcctgaactctttacacttacccctaaaccctaagccctaaaccctaaaccctaaatgcctaaacaataaaccaaaaaccctaaaccctataccctaaccttgacacgggcccagacccatacccataccgagatcggaacccaagacctagacctggacccggatctaaacccgaacctagacccaaactcaggacctgaacccggaccaaaacctagaccaaaacctcgtccgagacctagatcttgactgggacccgaatcgtgaccccaacccagacccaaagagggacctggactaagactgggacccgaatccagactcaaacctgaacctgtactgggacctagactcggacccaaactcaggatccaaaccagaacataaacttggacttagactgggacctaggatccaaacctagatgggggacctgggccccaaacactactacaaaaaacactatttgcgtcggtcaacactactgtcacagagttgaccgacgtgaata

SEQ ID NO: 33496 - DNA, 4766 bp, Cannabis sativa
cttaacatagtggatcctaccctcaaataattatggctaattatgtctgggtgaaaaacatgtcatatgttttataaaaaattagtgcacatatcaatactcaggtgtgtgtctcctattaattgaaagtatttattgggtatttgaattctttaatagtatcttctgtaatcatcaatattcaacagttgtaaattatgagaatagaagtatctctgatttatgtaattaatttgtagagcaaattaaaaataacttttaataacgaactaccaacaaacaaacagaagatattattgcggaacttcccctcatgttatcaaattcttagacaagttgatggcataaaagaatggagaaatttgtaagacacttatacttacagctttagcttccttaaattcttgccttgtgtgatgcataagagaacttaacatccggacccaattcagggacaatatagtggttgcgcaaagaagatatacaacattagctgagtcattcattcaaacaaagttaccaaacttattgatagcttttgaaaaactaaaaaataaaatagagataaataaaaactaactagttggtgtcaaaccacttggttatttccatagcaggaacaatggcattacccctaaccatcaaagccaatctcgccgccattccaaccatatctcgggggaacaaccccaagcatagcagtgttgtccaacacctgatcatagtaagaaaaggtgttggatggaatgtacttgattccagcatcagccatctgatacatgttcaaatatcaaataaattattctttatctttttaaaagtattaaataataaattatacatatcagtataatttatttcatgtccttagtatattttttattttcgagatgatatttagactttttaaataatttatagttgttgcgtggaatcagattactatttttataattctatgaaatttaaaaattatggtatccaaattttaattagaaatttaatatactttatttaattagaatatatttaaaaaatttatttaatagatttttgctaataaattatttttttattaaaatttattagaaacaaaaattttaatattctcttcttttaactcttttaaattaattattttattatatttataaattttgctgtagtccatttgtatctcatatatatagactcacatgaacttacatataagaagtatactacaaataaaaaaataattaaagacttatataaatatatataagattatataaattttctataagaactgatacaacattagtatattataagttacaatcaacatttataatatttttgagcttttactaagtaaattatataattaacatgatattaaattacaactatacatacactattatttaggtcaatctcaatatttctctccaattaacattttgttattaattctttaaatttttttctttaataattttctataataatttttctttctacaaaataacttatattatgttatttataaaatacttctttttaaaaaaatacaaaattttttctatccatagaaaatgatttatttattattttatttaataaaaaaacacacttttgcttatacaagttgaagtttatatatttttctatatttaatttgatacacacaaggttctctaggagtagaaaagataggatttgtcttttttagggctttatacaaatatatttctggtcaaacaaaattaggtaagatcgtttgatgtagtagtgaagatcattttaaaagttaaagaggtcacaagttcaacattccgcaccttaatttatttatttattttttttttttgaagaatagctaaaatattattgtttagatttgaattacttagaaactgtgtaagatgaaaatataaaatgttattccataaaagtcattttaatataattaaatatattttattatatctaattctataatcttgttgaaattttaaagtttggacaagatataaaaatatgtagtcatctctcttcaattttatttatagcttcacccctgatatgagataggggagttctatttgcgctctacaaaataaatagtataccctaatattttaaaaaaacaagtttaatataattttttaaaaaatcacttttaataattttatatttttttctcatattattttgtgttaattttagtgcttattttaattttatttttatatttttttttttaaatcgtgtataattatttttttctaataaatttcacatattttttttaagtttttttttaataatatttataatataatttattttgcttaatagatatattttttaagaaaataatttggaagaaaaattaaaaaaaaaaacctaatataattagaaatatatatttaatgtaaaataaaaattattgagaagaggtttatttataagtttttgggtgtaaataaaatttctttatgagatagaattaatataataagtttaaatacacaaaattataaatttttaacttatgcaaggaaaaaaataactaacttagaaattaaatttaatggagaattatgtttattgcataaaatataaatacatatgttatattttttaaaattataaaaaaaattaattgacttatttaggtcttaagtttttgaaagatttttaaaaaattactataatattaagaataaatttaatgtagacatctaacgacattttgcgacattcaatgatgtgttgtgacaatgagaagtcgacaacatgtcgcaaaaaagtcgatagcatgtctgaacaatacatacatgcctacattgcgaataaaattgcaaattgtcgaaacatattgggaaataaagtcgcgaatcaacacaacattaaaacaaaaatattaatcaacatatcgtgaataaaatcactaaacgtcgtgaagcaagtcacgaataactaattcatattttaagcaagtatttttactgaattaacaaaaaaaatattacagaacagaatagaaacatacctgactgttgaacaatagtgcgatgtcagttgccttaacatcttgtttctgttggccctccagagtttctaatttaccattctgggaaacttggttgcgctgcattgagcatacttcttgcccactttctcaatggtttcgtatgcccagtactgaaaggcaggtacatagccactaacagtgtactttgcctcctgagcaatcttcttccccttcttcttatcaacattatccttgtaatgttgcatatccttattcaatgtctccatcaacttccaaaaagcatgctcaccccacggatacttgaaaaagaattcaagatcgttaacaaactttaacatgtcaggccaaacttggacattattctcttttgatactaatacaccttcaatgaaagcgaccagtccaaacttgtaggcatcatctttacttcgcacctctcaagttggagcataagtgaatccaactgcacagaactcttcctttcaaaatatgtctgaactaaatggtcgttggacttggctatttcctcctctgtaggggcactactcataggtaagctggtaataagtccaaactctatccgtctgaatctcatgtcattcttctttacatgaaattccaaacctcatcttcctttttagtatctacttttattttccgtaagaggaggttgtggaccaaagcgcctgagaaagtcaactctctagcttccgaaaagtacccaaaagggctagccttaaccgtatcaatcaaatcaagcttcgtaaacttggctttgatatatataaacctatttgtaccccgataggtaagacgtcctgtgaaatgctgggaaactggaagtttaagttcaggagccatatgcaaaattgtaagcatttttgttaaaaatcaataaaatgaatattgtaaaatatatcgcaatatgtcgctaatcatcgcgaaacagaatcccaggtacctagcccagtgttctgcgatattttacgataagatcgcgacatacatcgtgatacatcgctaaacaactaacatgtcatgaaaacatcgcccatagaaaaaaaaactaacaacattttaagacgaaatcacaaaatgtcatgaataatgtcgcgatatgtcgctaattgtttaaaaacccaaaactcaaacgggcttcaatgaaattcaaacaaaatcataaaaagtgaacataaaccaaataaatttctttacaatgaagcacaaacaataaaaaacccaattaaaataaaaaaaaagtttagacaaatacctttttttatgatttcggatgtgggtttggggttttgcgatttggatgtgatctggtttcacgatatcgtctttgtttgttggggtttcgcgatttctctttcatctggtttcacgatgacggaggtggtgtgggtttaggtctgggcttcgtgtttcgtcggaggtggtggttttgttgggctcgctaggtttcattgatgggtccggtggggtttcgtcgggagtttcgttgggctcgccaggtttcgttggtttggggagttagagaaagagagagaaacgagagaatgagagttagagggagagtgggagtttcaaatggggagagtattgttgggatttaagatttttggagtgttaaatttttacattattttaagaagcatataaaaacaccttatgttttttttaagcatataatgtcaaatgtatctatatatatatatat

SEQ ID NO: 33497 - DNA, 1229 bp, Cannabis sativa
tacacctatttacaaggcttaacagatgagtaagaacgttctactaagatacgaccatgtaccaatgtaccacatgcactcagtactaccacatacaccttgagtactgttaagtgttgtaccacatacaccttgtaccttcatgtactagtgctggtaacatcatgatgtactttacaaacatcatacactttaccaatgcactctgtatcgctactgtacaagtgttggtagtgtatgaatcacaacaagcatgcatctatattaacacatacctacattcgcatattcatatcacacattatatacagttcttacctcctttccagattcaagtgagttggccgacctgtacggaaagtcttgtgctcgatgaatgtcctaatcacatattaaaactgggtaaatcacatgtccaaaaccctaatccgggaaacccgagtctacaactcaaggctctactatactctctagggattacattaacctaggaaacagggaaacacccaactaagaaactgaaatggacaagaattgagaaaaatcggtttctcggggaacttgccaaaaccgattaaccagttttacaggtactgggaaaccgattaaccaatttctgcccgtcctccacaaaaaaacctccaatttgctcaaaacttgtccaattgcctccaaactttcgagagtacctaaacaatgtatacacaacatattccaaccagaaaatcccagaaagggtcactgaatcaaattatgcaattaaagatcaaagcttaggtttcaaagcacaaacttgtgaaatcattacaccatacactcaaaccagcaataagcacctagaatcaacttaaattgaacacaaaaaatgaaccctaagcacttctaaccctcgtagccaccaaaacataaaatcactacttaaaactttgagaaacacatagcaagagagtatctagggtttatcttaattgaatcctcctctaatccttgctgaaaatgcaaatttcagcaatcaagccctttgatcttggctggttcgaagagagaaaagggaaagaaagggttttccttcaattttgatctttttcttatttcctttatgttcctaaaatgacactaaggttaatcacattaactttggctgaatgtagaggctaggtgtcaacacctaaggcagccaccactcactcccttggaaaagactaaaatgcccttgatacataacttaa

SEQ ID NO: 33498 - DNA, 2243 bp, Cannabis sativa
gtaaaatatttccaacaaaaatatcatcttttctccttctaaaataccaaactacataagggaatactactctccttttcattcatctactctctctatctctcctaaactattcatccttcatcttcctcctctctcttaccaaacatacctaaaagacattattcaaatatcctaacacacaagtattcctccttcttgactacttcaatcacaccaaaaagaaaacaaaaacttttaatctccttttcatcatgatattaaattgtaaaaaaaaaaacattctcatatttcttaatagacaaagaaagtagcacatgaaagagtgttcgacaagcttgtggttgaaaggctaaactcaggcatttaagagtggtaattcgtgttcacgagtcgtgtttgtgtcatgtcgtgtcaaggcataggtattcccaacaatgttaagcacatactcaacccatttattaattgtgtcaaaaactaaggctatatttagtaggaaggagggtgagtaagatggatggagagtttaaaaagatggaaagtagaagggataaagaggacaactactctccttcctattgtttgtgttgacgctgaaaagtgaccaacatcagctcgctagattaacgagatgattaataagtttaagtaaataatttagagagacacacaaaatttatagtagttcactccccatgtcgagatggtaatggagttacgtctactttgagtttttatttctcacgagaattataaaaaaaggctaagtgtttaagctctagtttttagagagagaaactagagggagacgttcattagatggtattacattaaaaggctaagtctcagaagcttcaatttctagagagagaaattagagagagaagctctaaccttgtgggtagttttctgaagataaaaaatgagctaaaggagctctcctaagtgaggaggcccacaaaaatagggaaaaatacaataagatgtttttttaccattgatgatgatctaatggtgaaaattagcttctagtggtgatgactatttttcagagccctgcaggtcctgctacgggtaacttatattttttgtaactcccttgggggtgaaatttgatgatgatagcttcacaattacatctggagtgtcaggcatgacttgatagagcattaaattagctttaaacgcaaattgaattgcatcaatcaaatcaaaattgagcgagttatggctattttactgaaggtagttcatgacctaaggcccaggttgacatccagcacctaggttgacatcccaacgtcgaggttgacttacgacgttaacttggatgctgggtaagtgtaaaaacatccaaggggtgtactttgagatgcctaaatgatattttgacattacttagtcagtttttgtgttctgacaaagttggtcaccattttttagagatgttgctattttacggaaatgagagactcaaaactcttcatttctaggtgagctggaaatgagaaataaaaatttatgaatttgacttctctgacttcatggatctttgtcattgtaaaaaactaaacagacgatcaaaatagtgttaaattcaaataagcaaaacccagcataccacgccatttgtcaacctgggcgcagggtacttactcctgagctcctgagatttcgtttttcatacttccaaggcttctgaacttatggatgaggtttcttacctcgtttttaaccattctagattcaatggtcgcatcagatttggcatttgagcaagtcagcgtccctggctgattgtcaacctggtcactaggcctagcactaggtcaacttggacgctgggccctgtttccaagagctcaaatcgtaattttcttcccaagtttgcttgaatctttattatttctgatgacaaaaaaatgcctagaagactttctactgaacttgattggaaataggccaggttgagaatatgccaacctaggcgctggggctagctccaggtgtcaacctgggcgttgggtcccccttttggctttttagaaattctgtttggtccccaaaaatagtttaatctcaatatctcttgaaaacaaagaagattctcagaagtgttcttgaaaaactccaattaaaatggcccaggttgacaaaatgtcaacctggtcacaaggctagctagccccaagtgtcaacatgggccctgggccctatttttgtcacccaaacataattgt

SEQ ID NO: 33499 - DNA, 3638 bp, Cannabis sativa
ttgttcatttctctctttctctgtttctttccttctctgttttttcttgtttttcatgttcattctttgaacaacaatggcaaggagattcaattctcctgacaatatgagtatacgcgagagaacaataataactattaacagatgtaattgatgagacaatacgtccatctcaaaataaacagagtagataataaggagcatacaaggtgtgacatcaaggagcttgcagctcattgacccacatattcatacatggagatgatactacattcatccatctcgccctttacgcaatagagtaaccacctcgcaaatacttttacaataaaaaaatacttcgaggagaagcacatttatacttagcgttttttcctgtgaagacgaataagaagaataactcacatttagcgagaaataaccttcttagttagtataatcgtttaaaggataaagacaaaaagcagttgggtagttattagattttatcccgtgtgcatataaataaaacgtggggaatgtccacgtttcatgagtagttgtaaatgaatagatcctaataaaaataaccgccatcctatacacctataaataaggacagaatgcatggaaaaatggacggcaaaagagagagagaaaaaactattatttacatttattgagaattgtactctgtacctagaaaaatatctcgaagaagatagactcgtggagtatgtaaattttaactacaaaacacgtaaaatatcttgtgttcatttattattattattaaattttgtagtatttttattacgtaaaagaatatatatttagttaacaaaaatctgcgttaacagttttgtgctttcattgagagccttagtaataaaaactcaaaaaaaatccctccttataaacacaattacaaacatatacctatggcaaataacatttcccatgaagaggagactacccatcgccctagaaaagaaccttagggatcacagagaaccaacacgactgaaacatcacgttttgggaggaacgaaggaaaattcaatcctggtggtgaacaaatcccagagagaagaagtgaagatgcttatgatcctaccagatatgtcccactggtggaactagaaaacaaacaacttcaacaacgccttgctgaatcaaactaatgaaatgctgagttggagcgagaagacgcggcgaccaggactgcacagggaaccattcctcaaactcaacctgatccatctgtaaggagaccacgagaatgatctcgaggttctaggaccaggaggtaagagaataaccaaggaaaccccacaaatgctcaggaagaacaacatgggaatgcgaggaatgtcccaatggatagagaaaaatccacccaacacaaataatataagaaaccaggagcatcgacgagatgctctaggaccttcccatgggtttacaaacctaagaaatgaacaaactgatgtacttgagtcatctctcatgaatgcagatgcaaaacaactgcgaccaagaaaccaaaaaacttctcgtaatgatggaagaaatcctagaaaccaacctaggtccggacgacctccaaggcatccacataggccttctcgcgcggacagagagaatacacagatttacttgagtaggggacgtgtgtctaatctctttcggagaagaagaccaatgcgagatgagacacgtgaaaaaagttcgagtacaggagaatcacgatcttacaggcatagtaggttaactgaaactaacaggcaaatgcgagacgcgaatagatgttaatgttattttactgatcaagaaagtattagtaactcgcgtagttactagtctgaaagttactcaggaactagatccgtgggtaattatgagcaaaggcatcgtgaacctgatcttcacgagcgattcaatcaaaggcagccagaccttcgtgagcacttgaatcgaaatgcacctaatttgcgtaaccaacttaaacaaaatggaaatcaacaacctatagatcccattcaattgcaagtaatacaattacaggacaaatttaggaaatatcaagatggagaatatggcaaactaccaggatatgatttagatgaagaaactgaacctttccaccctgatatcctaaactcacaatttcctcattgatttaaaaatatgcatgtctcgtaatatgtcagaaccactgatcaagtctctcatttaaaaaatttcaacaccatcatctgagcgagcaatgtatcgaacaacttacgttgcatattgtttccaacttccttgacaagagctgtaagtagttagtttgataaattcatcaacaattccattacttcctaggaacaattgtcgaaagatttcaaaaggcaatttcaggctgcgagagaccgtggttcagaggcgccttcatcgagtaacatcaagcaacaatcagggaagtcccttaaagagtacttgagtcactttagtacagctccagctaaagtcataaatttgaatgatagcactcaattaacagccctacaggttgaaattgcaacagatttatccattgtagggggagaattatgggatgatttacaaggtcttcatgtaaggaatattaatgaatttaatgaaagagcgtagatttttgtgcaaaaagaagaggcacggaatgagatgaagttgttgaagtcaggcttgggagataaacccagcaccagcacggtaagagtgagcactgtgactacaaaggtattatatccaaatggttcaaataccaagaggaaggacgagtcaagagactcatccaaagataagaaaaaccaaaagaaacatgagaagtaagtacctatttattcagtttacactgaattgaatgagactcgcaagaacatttatctcgccaatgaaaatgggctcgtatttcgcataccagaaccgatgaggcatgtgaggaataagcgagactcaaccaagtattgccgctttgagaaagacattggacataccaccgagaaatgtcgtcaattaaaagatgaaattgaaagtctaatcttgagaggatattttaggcaatatatgaggacatagggaaattcgcctaatcaacccaataacccgaataacccaaggttgcaatctcctcccgtagagggtgacaatatcttagttatttctggagggctacacctcacaagaaacaacaatggtgcacaaaaaaggtacattaatgaggttaagaatgaattatctgcatttgctttggaacctttaaagaaaacaaaattagacgagccacccatcatcttttttgaagaagattcgaagcatgtacgatatccacatgcggatcctctcgtgataataattcaactcaccaataagagaataagagagctctcctggataatggaagctctgtcaacattctttattaggaaacattaaagaaaatggggttagaagaagcaaaactaagaccttgcatggtgaatttatgtggcttcacaggcgaatgtatcgcgagcatgtcgcctgggcataattgaacttcccataactatgggggaaccaccgttgtctgcgactcaaatgcaagagtttttagttgtcaacatccccttttataatgtattgatgagtca

SEQ ID NO: 33500 - DNA, 1413 bp, Cannabis sativa
ttaaataataattaagaaatacaaaaaaaaaaaatatgaagaaaaaaaatagtttgggatgatcttgaccattgatgatgactcatgatgatccaatggtgaaaaattgactcttagtaaaaatcgtcaatttttgaactttgaatctcatcagtcggattgttttcacgttatctgctggaaaaatcacaactctattgaggacgaattattgaccttaaatctttagaattacaatgtatgtatgagacttgacttgatagatcttcgaaataggttcaaaatacaagttaaatcacgtcaatcagatcaatattgagtgagttatggtcgttttactgaagattgttcagcaccctacgaccaggttacctagcgcccaggttgacaacccatcgcccaagttgacattctgacgtcaacctgaatgttgagtgagtgtaaaaacgtccaagacttttattttttgatgcataagtgatgtgttgacaccacttagtaagtttcaatgtcctggtgaagttgttcaccagttctcagagatgtcatttcgtgaaattgggaagacttgaaactccctgattttgctaatatcccaacttgttgaaagggtaaaatatcaaagtatgaatttgacctgtcacaagttgtagctctcatttactacaaaataaatatttgaatacttaaaactaaattgaattgtgataaagtagaccacacggtactaggtcatgtgccaacctaggcgttgagtgcttcccggggcccattttgatacttctgtggcattcaagattgtgaacgatgtctcctcccctactttttaccattttaagaagaattcaaggagtagaaattgtgtttgagaagcgaaaacatgtgaaccaggttgcatgtcaacctgggcgtacgacccaatgccatgtcaacctgggcgctaaggccctgtttaggctccctggaaatctcttttgctccccgagatcacttgtatcatcgttatttctgatgatggaaaaaatctctgggacacttttttgggaaaatgattggaaataacctaggttgacaaaatatgaacctgggcgttaggcccagtgccaggtgtcaacctgggcactgggtccaatttctggccaccaaatgaatctgtttgattccccaaaatacttgtatcttaatctttgataaaaccaaagaatatgcgtcgaagacttctgacccccaaacagctctgtttatttcccgaaagcactaaaatcttaattgttgatgaaaatagaaaatactcttggaagacttcatctaaactgctgaaggaagtggcccaagttgacaaagtgtcaacctgggcgctgggtccagcgctaaggccaacctgggcgctgggtccctatttgacctctagat

SEQ ID NO: 33501 - DNA, 1565 bp, Cannabis sativa
ttttcattgctgaatccaagattggtaaagtgcgtgcggagtcgttgcgagttaagttgggttttgttggttgtttcgtggttgaagctcggggaaaaagtggggggcttattcttttgtggtccatggatgtggaaacccaagtgctctccttctctcccttccatatcgattctttcgttagaattgagaatggtcaatggtggcgatttacggggttttatggcgatccggatccaagtcaaagatgtcactcttggaagttattaagaagaataagccgaatgtattcagggccttgggcagtaggaggggattttaatgaaattgttagccaaaaggaaaaaatgggaggcctccccaagccaaggtacctcattaacaactttcggaaggccttggatagctgccatttgcgagatggttgctatgaaggaagcgagtatacttggtgtaatgggagaaagaatgatctcatcttcgaaagactcaatcgggtttgcggtaacttagaatggtttgacatgttcccttcaatgaaagttcgtcatttggatcgtacaaactcggaccattgtgctttactacttatggaatatgaccctcacgttcagcatcataataagactagatggcgaaccagattccatttcgagagcgcttgggctgaagacaatgaatgtgctaatatagtacagttggcttggcaacatgagaaggaagtttcgaacacaagagagctacagagtcggttgggaagatgtgggcaagctcttcaacaatggaacaaaacaaaaaagaaagaaatgtcaaggcatttaaaggaatatgaagataaaatggcattacttacccgaagtacaagtattcaggattggcaacaaatgcaggatttggaacgaaaacaaaatatttggcttgataaagaggagatgttttggaagcaacgaagtagggcgctttggttaaaagagggggataagaacacaaagttcttccatagaaaggcaagtaacagaaaagcaaaaaataccatccatgggttaattgatgaccgactgcaatggatcacgggaaaccgaaatatgggtcgggtggcgtgtgactacttcaaacaactatttacttccactccagctaataggaatgatttgcaagagtttcaaagcattatcccgaaccgtatatttcgtgcaataaatgactatttgctggaaccattcacagaagaagaggtgtttaaggaaatgcgccatattcatccttcaaaagctccgcccagcgatggtttacctgggcttttttacaaaaaatactgggcattgattggacccgaggttaccaaagtgtgcttgggaattctaaatgatggtatgcaagtggatgaaattaatgatactcttaatttcctcattcctaagatttcaaagccaacccgaatgtcagaattttgtccaataagtctttggaacgtgatctataaaatcgtggcaaaatgccttgctggccgaatgaagaatattttgcatcaagtgatctccgaggaacaaagtgcctttgtgggg

SEQ ID NO: 33502 - DNA, 3299 bp, Cannabis sativa
ttcaaatggcttttcgtttgaggggggatgttaatagtcacattagttagtttttcagttgtatgtctgttatgttagttagccgtttgttctgttatttctgttatcttgtaacaactttcatgtgcctataaataaagactttgttcatgagaggatgtaggtaacaactgcatttttactctcatttcacattcactctgttttctttgattcttggtgctctgcaccagtcgattgtttctacactcttacaaccatagtcaatactcaaccaccctcacaaatcttataagatgactaattaaatggctaaattaaggctaatcaagtcatatacactaataaagcaaattaacaagaattaaagtcatcattcctaaactagggataaatattgagaaaagagatcacagacaattaaagggtcgtcttaattttaaaaatcttgaaaaagggtaacgatatgggttaaactgacttagcaacttcactagttttaactattattattttgacaaattttattttgtaagtaaagattgcatttcattaagaaataatgtgaactattacacgagaattaagaaatcaggaacaagaaattccctacataccttcacttattatttataacagaaatagctagtgagctatactattagcatagcaccataattatcataacataaataaaatgtaaattttgtatctaaaaataaaatgtaaattttgtatctaaaaataaaatattaaaacctaatggggataagcctccacctagttcttttgtctattaactagcttactatagataaataatgtaagtatagaaaagtttcataataaatggcatacaattcaatgaatgagataatgcttaccatgttatgtattctatctctttctgctttagaatctctcctattcatatttgttggttctgagttttttccattaaaatattgttttgttattcaaaagttaaaaaaaaaaagaaaaaaagtttaatttttctttattttcaaaatgagtttgagcaattgacataacataagaaaaaaaaacatatatttaaatattgtgaaaatcttatcgttaccttagcattattgtagttgcatttactattaagtaaagaaaaaaaaaatcattcaaaaaaaaaggtgcatttactattatattacaacaatatgattttaaagaaaaaattaactaagagtttaattgcaatgagaagagagagaatgctatcattcatacatatttttatagaactactctaaagtattgagtttgttatataatttttatttattttgtgaaaaaacaattttttttaagaaaaaaagaaacaaaacattcttacaaaaatattattaatgattaaattttactagtaaaacgattcaggattattttatacagaataaataaatacaaaatcttttataaatattatgtaaataataattgttatcataaaccaccttttgatgttaaattgggctggttgactctgcttttggattggttcaaacttaattgtgatatgatagcggataacagttgcatgatggattaagtagtcgcatgatggattaagttgtcgcaatgaacgacaatagtaatattgtttagattgagatacgaaaacttcattttactcatgatcctttcttaagagaaataatggagccaattttctggcattggaggttactgctgagaataattggtctttcatcatccttgaatgcgagtcacaagttgttgttaaaattctaagagaggaaatttctaaataagaaatagcaaacaacatttaccaatgttctgatttaagcaaatattttatttcttgtaatatttctaagattgatagattttgtactactaatttggctaagtggaaattagtccatgatatttctagttttgttgaggggatatataaaacaaatttttaattttctttttaattatagctgtgtttagcatcaaacatgagagtaatttttttttacaaaaataatagaacaaatccatctaattaagtttctatttatgtattctaaatttatgttaattaattcttatatcatggattccagtcatatttcaaaaaaagagcattaagcacgttaatagtgattaaattaaaaagtaaaaaatttgatatttaattgcactaataagtttttctcaaatcaatttcgggccttaggcgcaaaaaaatttaattaattagactttttttatatatatatatatttgtatatatttgattagttatattttttaataaataataaaatataacttttttaaaaaaaaaaaataggacctttttgttaaagaattttttgggactaagtgggaagttttgagcctgagcctctactgtccacccttgagtttgccttgtacaccaatagtgatataacaatttattttatatagacactataaatatcttttgacatttcttcataacgagttcatttatatgtatttttaggaataaataaaagatatatatgaagagtgatacattacattacatatagatatatatatatatacacatgggagcattaaacaagctaggaaggggggcgttgtccatagatacatacataacaataacataaagagtagttggagtttgatgtggtcggcaaagtaagtggaaaaataaatgaagaaagggcttttgctatttgctacttaacccatggagcctaaatataaagatgttgatggatttcaatatcaaaccttcaaagcaaagatacatcttcatcatcatgctatatattattattattatgaacaaacaccaattcactatatatttatatctataatatattggtgacggttatcaaaggcttttggtctttctttcctttttaccgatacgaaatataatcttgttttattacgtaaatttattttgttttgtttgattgttagtgttgagtttaaaactttaaacactgttgttgaaagtcagaggagagaaaagtgaggatggcgtcgagttataatgccattttttttagttatgatgtttattgtagctatagttgacctcttacaattttttatgaaaattgaattgatttatgttaccgaaatcaaaatataaaaactttaatttttagaggtagaaaagaaaagaaaaaatatatatgtttaattcataatacttgtgacaattagtagtcctgtaatccgtaaggggaaataccgagtaagttgtgcaatctcacatcgcttggggaaggtcaagt

SEQ ID NO: 33503 - DNA, 1709 bp, Cannabis sativa
actgacgtgataatcagtgatgtgatttacttacacttgtataagtagaatgtcctttctaggtcattagcaaagtaaactagtattggatgtatcgggtatacatcagaatgggccgatattgagagtgaaaaagatatcataaacttaccgttatgtcttttctaagtcaatatcacttagctgatcttaagtcaattgatctcaatcctgagatggctaagttctagcttaattgtactatacaagttctttgacttatttgttactagcttacccgtaggactagcccatacttacatcttgggaattcgatagtacaattgagttggagcattaatcataggtatggaatatatagcttttattaaaagtgaagcgatatatagttttcttagagcttggcttaacgcgataaatgatagagtgctcatttcaataattatattagtttactaagatatcatttacaagtaactaagtgttttaaggataaaatgcatcgaagggtaaaacgataaatttgtcattactcaatgtaaactgtttatagaggatcattggttgtttagattgtaacaatagataatccacagtgtatctatatttggtatataaagcattctatgtaatttagagtgtaattttgaatctatagtggagtcaggagaaattagtaagttaggaaatttacttagtgaacttcaaatctacttatttggagcttggttacataggtcaatgatctccacactaactgagataatattattttgtagtctcagttaattgatttatttaatcaattaggattctaaataatgattgtgtcttgtttatgaattttactaaagaatggtataattgagaagaaaagagaattcatgatttgtttattaattaagagacattgaagaatctaattaataaatatatttaaattgtaattttatttaatatctaattataattattaaatagataaagttagcattggtggtgataataggcgactatcattgtgttaggacacagtgatagtggcgccacctatgtcttaatcaagacattagtggtatcttttgtctagacaatttttgtcttttatgcaatttattaaatttataaatttaaaaataaattatttattacaaaataaattattactattttgacaaatccaaatagattttttcaaacttctatatacaacttgtgtctttacccttgacactgtttcaaggtggcgattcagggaccatggacctataattttaagcttcaatgaactaaattatttatcgaattttatcaactaaataatcttgtttattaattacatgattactccactgtagatatggaattaaactcttagtaattatagaattatatttattgagttttattgcagtgtacattgatataatcaattctaatgattagccctccttatgtcgattcgtaattagtttggtcaaattaccttttatctttcgaattacttcttcatcctttagatccgttaattcactaatgaacgtataatttagatataaaatttgtgcataactttttagttctagaagtgaaccaacattcgattcgttaggaaagtcaggattccataattatagatcatgttcccagacatccatattattagatccttaaaatagaagttgtaagaatcaacttctcgtaatcaa

SEQ ID NO: 33504 - DNA, 1351 bp, Cannabis sativa
  modified_base (1299)..(1326): a, c, t, g, unknown or other
attattattattattttctaaaattaatttaaattatttttatatagatatttattttcaaaaatttctctaatgtaggttcacttgaatgattttagatgctctttaatcggagccgtaccaacttgcttcccctaaactcaattttttttgtagaaaaaataatatctaaccaaattaattattttttttttataaatggcgtctcaaaagagcagtcaaataacaagataaaaactattgaaaaaacagttaataacactaaactacgcagagcctaaatgcaaaacaaataaaaaactaggtgtaaacataataaaaaccattagtaaattatgaaaagccaaaaaatgagaagccaaaaaatgagaagccaaaaaaaatgagtttagaaaaaataattcttttctaaaaataaataccaatataaaaataattcaaagtaacttaaaaaaaataatagttcaaaaaaaattaattaaatttttaattattaatattattttttttttaaaaaaataaatatcatatattattataatacgtgtaaagttttaattgtatacaagcagttctatcgtaagagtatccactattatattataataaccacatgatctaaaatcaatggttaaaaaaaattatttacgagtaggaaacttttgctaagtcctaccatagtcttgtcctataaatatataatgttgtgtactataaagtaattttttcttattattgttacgtatattattaactttaataaagggttagttttattaacaatattaatgtaattttgaaagcaaggattatctaatgtatcaccaagtatataattataattactgttttaatactaaatggataccttagttaaccccaaatatttggataccaattaatttatagctttttttttttctctgttttatttggatacttaatggaaacgtttagatattaataataggtatcatttttattttagttggatacctaaagtagtagttttactttaaattggataatttatgctatatttgtaagtaggataccaataggtataattttatgtaataagagcatccaaattaaaaagtacatttatctaccactaagttttataatttaaaattcaaaagcaaaatatgtactatttagttaccacctaatatataagaatcctaaaataaaatcattggtttagatgctaaattaggttagttgaaggaaaaaaaaaagtaaataagaaagtaaatttaatgtataaaatgttgtttctgttataaaataatatannnnnnnnnnnnnnnnnnnnnnnnnnnnaagaagaagatgaagagagaaagag

SEQ ID NO: 33505 - DNA, 1323 bp, Cannabis sativa
  modified_base (362)..(368): a, c, t, g, unknown or other
ttgaatgattaataaaatttaaaatgaaattgaatttataactaattaagaaatttaaaaaattatttattttttgaattaaaaaatctatttttatataaaaaaatatattaaagattcaacctttgtaagaactaaattttaggggtacaagtttgagtctatttttttttctcaaaaaatttagattttcttaaataaacataacacttttttagtttaattttttttcaaagtaattttatatttttattgaatttttaattaagtttctttaacttgtgagtttatcttagtttatttaaattatttattggattttcaataattttggtgttattttttaagatacgtgtttatannnnnnntaaaatttgaaaatatttttttaaaaatactttatgtatttttgaagtaaacttaatattttttaattaatttaacatttttatttattttttattaattgttttttaaggttggggctttttcattttacactttaaaatcattattttttttttcattttacggaattctacataaaaactcctattgcaactagcgttgcaacttaaattgtaacaaaaatcgtatagaaacctttattgcaactagcgctgcaactactttagaaacccaaaccgtaaatttgaagaaaaaaaaaagttcaaaaaatagtatgcggagtaatttttctataatttttaatttttttcttttaatgaaaaaagttaaactggtcaaagttttgaagtgaaaatgctaatttttaaaggtaggattatgtaacagttatattttagcagaaatttttaacttatattttaaaaaacaaaatcaagtagtgtcaaaagttcgcgaacaaaaatactaattattttatattaagtagtgcagcaaaaattctgcgaaaaaaaatgaagacttggaaagttttgtcaatatgtaatagcctaccagtagtatgtaacttccaagaaacgacatagtatgaagttgtcacgggtcacccaactcaagagattggcttctctttttctatattttgtataaaatgagcaccattagtttaaactagtagtactcatgcctatatatcaacattttatacaaacaattcagaaatctctattattacaaagttaattatccagtaatatatatatatatattcatagtcaccaaaatgggcttgttacatggtataatactccttcatttggcactaactgcagcagggatcatcaatctgcggcgagcagaagccaaaaccccagatgaccgctgccccagatactgcggaaatgtggaaattcgcta

SEQ ID NO: 33506 - DNA, 2558 bp, Cannabis sativa
  modified_base (1608)..(1612): a, c, t, g, unknown or other
ttttttgtattttgtataaaagtgtaaaaatgggatcccgatacttgtaaataattttgtaaagatataaagtttagtatttaatataaaagtttttttaaaattgacacgattttcgagtaaattctttaattagcaaagatagcactataattgaaaattcactatagtgtgccttagcattagggcgttacaattttggtttcagagctgccatgtttgtctaccgaagctcatcaaagaaagctcggctcactgttcagtaagcccatacttgtttaatatttacttgaatattaaagcatgttaggaatcatattagattgtggttatttattttaaatgggttgccttagaatccataagtgtggtagtaagtttgtaattgggtcgttgcctgaccagactgacttactaattggcaggtttgtcctatagaatggacacctggtgcaatatggagagtcgaagtaatgtggtcagggctagtaacggttggagagaatggagtccaagttgtccccgtaaccaaggtgaaagcctttggagtgcttctaatgggagtgatgttcatccgtcacaggctctgttagatttggagtaaaggttcacagaaatggaagctatgattcaacaacatgatgaggagattcagaggttgaaacaacaaaggtctcctgtagtacctttacctcatatgccactcattctcgattcggtattattagcggagcatggtatggctggtaaccaagtggaaacattgcatgagagaatttggatgcatgaacatacagttcttcagggagattcaaatatgaagaatgctcttttgactggaagccttaaagaatttattctagaacctcaagaggttatgataggaggtcaggataccacttgccatatttctatttatggtggaggtggtaggggctttgtggttgagcaaaagaggaaacctacgtcgacagtggtgggtttaaaacaaaacaagcagctctaagggaaccaaggcaaaggtagatgcaagggttattcttaccttgagtgcccacgttgtaagaaacatcatcccagagagtgcaaccgaaaagcatgcttcctgtgtggcatggttgggcactttaagaaaagtttccctcaggcaaagaaagataagcagaagctggaagcaaagcccatacttgcttagatatttgttatcacccaagctgatgctgcagctagtccttctatggtgacaggtcagcttcttatcatcaactcccattttaatgtactatttgactttgggactatatactcgtatgtggtatcgagagtaattaatcttttgggtaggccttatgatcttcttgaaagaggattcggaaccctaatgcctagcggaaagttggttatctccaataagcgcactagatgccccaattaggatcgaagatagggagttgatagctgaccttatagaactgaaattaacggagtttgatattatacttgggatggattttctgtccaagtatttggccaatattgattataagcagaaaatgatgactttttagcaagaggatgaggatccatttgtttatgttggatcggttnnnnngtctctgattccagttatttcggtgttaagggctagggatctactacacaggggatgtgtaagatttttagcagtggtgattgacttcagcagacccgagacatttgggcttgaagtagtcagagttgtttaaaactttctcaacatatttcccgaggagttggcaagattgccgccacaaattgactttgtagttgatttggtacttggagttgaacctatttctaaacctccgtataggatggctccagtagaacttaaggagcttaagttacatcttcaagagatgcttgatattgggtttacccgacccagtgtatcgccctagggagctctagttctgtttgggaaaaagaaagatggtttcctcagaatgtgaattgactatcgggaagtgaacaagttgacgatcaagaactagtatctgttactataaattgatgatttgttcgatcaacttcagggaaagacggtgtttttaaagattgatctgcgatctgattatcatcaactcagaattcgggaggaagatataccaaagactgcgtttcgaaccagatatgggcactacgagtttctggtaatgtcattcgaattgactaatgctcctgcgacctgtatggatcttatgaatagattatacaaggatttcctcgataactgcgtcatagtgtttatcgatgacatccttgtgtactcttagttagaagaagagcatgagcatcatcttcaaatggtattacagcgacttagggatcacaagttgtatgcaaagttcaaaaagtgtgaattctggttgtcaaaggtatcttttctagggcatattgtcagaaagattataattatggttggtccaagcaagatcgagtcagtgaagagttggccgaggccgtaattagtgatagaagtttgaagtttcataggtttagcagggtattatcgatgt

SEQ ID NO: 33507 - DNA, 1259 bp, Cannabis sativa
ttaacaattcaaaaccacaaaccaaaccaaaccgcgcggtttatgaaaaattctaactgtgaccgcaccgtaaaaaatttcaaaccgcattttttttttgcggtgtgggcggtttgggcggtttgatgaacacccctaaaaaatactatataaaatacaatttaatataatactatacaatacaatgcggtgtaatatggcgtatcaaatgaacctttagtgttgatttaacactaaatttaagtttttccattacagttgccctaagcatccaataacataaggttcgtttggtacgccgtattacactgtattgtattatattaaattatattttatgtaaaattatatatgatattaattgtatgaactttttaaaaaaaaaacattatgaatatttaaatatataatattttagtataaataaaaatatattatcccgtttaatataatatagtacgatacaatttaataagatgtatctagcccaataacatataaaattagaaatttggccgccaataactggtttttatatattttttatagtaaagtgccaaaaacattataggaagggaaaagaaatagagcggggtttttaagaggtgtacataagataggtggcagcagtaggagctatgtaaagagtttttgcatccatatgtgtctatggcttattgcatggttcggcacatctctcgttctcactcccaaatcccaattccaaagctatcaacccctcactacacaaccttctcacttcctctctctctctctctctctctttatatgtgtatatgactttaccactgctatgataactccaatactcgaaccttcacttctcattctccctaacattccaaaacccctttcgttttccaccttcaaaactcatcattttctctcctaaacaacccatcatcgactttcgcttaaactgaatccatggctgcactaccgtccaccgttgattctgtaaactcaaacggtacgatcttttcaattattttctgtgaaatttaattgggttgtctttaaattcttgttttttcctttcagcgattattagtttcagggctcagatatgtagaatttatgggtctatttccaatggaaaatttatgcttatacataaaactaattattcattccatgcacatgattttgtggccatttcatagacccaaaaaaacgaaagaaagaaagatgatcttgttggaatgtttttgtgtttgtcttttacctttcttttgagt

SEQ ID NO: 33508 - DNA, 1616 bp, Cannabis sativa
taacaggatcatattcttactcccggtgaacctatgatatatacacaattatcaaaaactttatatctcaaaagtaaatgagaatacttaatgaaaattgtgtaatcattgacgagaagcttacttgagtttatacatagattttgtaatttgcaaaccatattctttggatctttggatacaaagttttctgattgcaccatataacttttgtcatcaatataaacattgataaatgatactttaataattcatttgatataactcaaaatcataataagcaatcagtgtcatgcttgtccttaaatagtctttcaattaaacccaaggaaagtctatttaaaatgaatgtacgttttatgagtaattctttatatataagacataccttatatttctccatattacaatttgcatcctcttgatcataaatatacatttatcatcaattagtgttacaccttatagcaataggaaaaatacaaaaccttattatctcacattaatttgtactctttatttatgatatcaatccaattttgagagttagaacatttatggcatgataaaaattgattggaaaaatttctatcattatttccttatgtcctttctctcatgattttttttagtggcactagtcttcgagattattgaatttgattatctgaaatatttaccatatcttgaatggaaagcagtttgatattgtcatattaaagttctagattcacttcttgatcaataaaaagcatggagacctaaacactgtcaaaagtgatagttggaattaagtttaacgccgattataataatcttatttcctctccaaacttaatatccttaaaattattaacgattctagtctcaaaattgaactttagtatgggatcacaaaaattatagctctttaattattaagagtataaagtaaagtatagttccttactattttggagtccatattcctttcatgttcttacaagacattatcttagttggacatccacaaatttttatatatatacgtggaacacttctcaatcggtatatatatttatcaatacaaataatatatttatattttttacacaagtttactatttaactttatgatttatgagttatgatttattatttaaattaaatttttatgttataattatttattattaaaatatattgtattttaaaaaaatataatctattttaaaaccaaacacaagattacattcaacttaattcaatcatttctaatctaatttaattattgagtccactccaatacaatcatgcatgctaaagaggctcataataaaaaattaaagacaacaacttatctagtttagtagtatagacaattgcagcaattgatcaagagccaagaagcacctgtgagtaggtgtggacatgatctaattcaatataattgaactgaaccaattgaatccaattcaattatataaaaataaatatccaattacaattggattggatgttgaaagttagattttaattggttttgatcgattattagatgtcaatctcaaaatccaattaaaaatcgattaaattcaattacatctaatacatatcaaaaaaattatttatatata

SEQ ID NO: 33509 - DNA, 2325 bp, Cannabis sativa
  modified_base (1343)..(1345): a, c, t, g, unknown or other
aaaccaatccactggcaccacctccacctccaaagaatctgagggataatgtacgtaggggttggcaatgctactccgcctgctgattggcaatagttgtttcaagaaatactaggtatcagacttcgtcaagaggaatagttgtgtcatttaaggcaaccagcaccagctgcccctgttgagcaagtgttcacacatgcacctatgctagtggtgggtaaccaggggttcatgttgccacatagagattcggtatttgagcggttcgtgaggctgcaacctccaaattttatgggaggtactgaaaatatgggagtgacgggaatagagagagtgaattgtgcagcgttcatgttataagatcatgcccgcgtttggtgggatattgtgggacacacttgtgatgtcagtttgatgacttgggatgagttcaagagtctatttgaggaaaaattctatagcatcactgtgaggacttcacatatggaggattttgtgaaactaactcaagggaaaatgtctgtggccaaatacactctagagtttgatcggctgaccaagtttgttggggatctggtgcctacaagtttcaccaggaaacagaaatatgtgagaggactaaatgccagaatcagtcgggacttaaaaattaccattactcgtgacactttgccccccaagtctgtacgagacttttaaagttgcgtgtagacttcatccgtgcagtctttgtgcttggatgggggacatgtgtcaagagcgtctgttcgcaattcaatgtgaggctgattgggcgtcccttcagtattcggctaataaatgctctgacgcaattaatgcttcgaaatctgattttctctaaccacgtttgatgtttacacttgatttcttttgatttcccatattcgcttttgggggaaaccgaggcgtctgaggttttttgaaatgatttacccctttttgttgtttgcctataaataccagtgagcattttttcacaaactcattttcaccaatcttctttactaagtaagttcaaagcgaaaagagaggtttttagcttcaagtttgctgaagtgttttcacaaaaactgctcgtttagcttcacataacctgaatccatacgttcgattcttcagttagttcttgatttctttttcgtttactttgcacattgattttctaaatgaaacttttactttgctgtagaagatatgtaggaaaccctaagttttagaaactctgcgattttccttggtaacgattcatgcgatttcatcgttcataatgcttgcttctttaactgcacaatgattgtccttcatcttgcttattctaagcnnnatgaaattttttgccctaactcacgaaaatttcaaacttctgatttttgacttttcatcgaatattttaattctttaatcttttgagtactcctggtcggcatatttgcctgttttaatgttcgatatcccaaccaaacactcatcttgtatattgtcttttgtagatgaacccaggatctgcttcaactcttgcacgaggatcatcctcatcttcgttctagtccaccctcttcgagcgacggacattttagcttaaatctcccgtccagccataggatgatggctcatacaaaaaagacaatgcgtagaatcgacgcatctgaccctcaagtggcccgacatgccaccttacctagtaccgaacaagatatatccgcgcaggaggaggaggatcatgaaggggacgtcgaggtccagtagattgaggagcaggatgatgtttgtcctggcagtccttctgaggtggaggaagaggaggaggtcacacccctaaactttgggggatataatgaggctggggagccagtcgatggggatggcgacgtccaagttgagggcgtggactacgccagtgaggaacttaatgttgcggttcctcacagaaggcaaggtgctttgaatgccaggtgggtgagccctccgtccaaggttagcgaggcacgcttacgtgatctcgaccaggacggttatttgagcgagttagactgctatatttccgcctataacaattgagccacaaacccaaagagggggatgtgtgcctggtcggatgctcatgctaaacaaggggcactgctgcctttgcacccgtactttaggaatgtggtaaaattctttcacctctgtccgacccaattcactcccaagggcattaagtatctgtctaccctgttaattctctacgcctcccagaagtgggatatgcagtctatggttggttttatgccctaaataaaacccatttcatataatcagatt

SEQ ID NO: 33510 - DNA, 1866 bp, Cannabis sativa
atatgtaatcaaaccccgtgatttgaggggatgatcgttgtcaacagattgtagtcaactttgtaattaactgcccactatgtaattataaatagtagcaaacaagatcagaaaagggatggaaaaactcacacaaaagaggccctgaaaaatgatcagaaaatctaaataagattgactcgtggactatgcagaattttaactacaaaaccacgtaaaaaaccttgtgtgtttatactttttattttataacttttattttttctgtgtgagattttcacggttaggctcaaatttagttaacgaaaatctacgttaacatgttgatgtatcttgttactgggtgttggcatgctgcattagtaatctgcgactcaacatgtttttcatcgactagatctaaggacaattttaaaagtttttggattttttcttgattataaaactctcgtctatgagtcgaggcatttacttctacaagcaacaatacatccaaaccaaatgctagtgagaatgaagtacgtcccgttactgtcttcttagttgttctatgagcccaaagtacctgaggtagtttgtcgacccatctacctttggcaccatctaacttcttttttatagtatctttcaagggtttattaacagcttctacttgcttgttttcctaaggcctggacagtgacgagaagctcttaataatcttatttctttcgcaaaactcagtgaataggtcgccatcgaactgagtcctgttatctgatactatcttaatgggtattccaaacctacaaataatgtttttgactacaaattcaagaacttttttgcaagttatggacaccagaggttcaacctctgtccattttgtaaagaaatcgacagccaccactgcatacttggctcctcctcgccctgtgggaagtgccccaattaaatcaattccccatattgtaaatgggtagggcgaggtcatcattctcagttccattggtggtacacgaggtatatgcggaaacctctgacacttatcacacttcttgaaaaattcatgggtgtccttgtttatggttggccagtaatatccttatcgaataatcttttttgatagactttgccaacctgcatgatccccacaaaagccttcatggatttctttgatgatctcgtttgcttatgtgggaagaacacatcgtaggagaggcatggaatagccctttctatacaatttggcctctactatcgtgtagcgaggcactgaatacaggagttttcatgcctcattttatcagttggaagttgtccgtttagtagatatttgattatgggagtcacccacgtgggtgaactatctaccatcttgacatcttccttttcacatatactttgttcatttaacatttccaccggaaccaagttcaattcacccaaatcattttgcgaggccggttttgctaaggcatcatcattagagttttgttctcttgggatttgctcgattttgaaataatcaaacttttccaagttctttcaaactttctccagatacatggccatttttaaacccttagcctagtattcacctagaacttgattcactataagctgtgaatcactatgaaatatgagatttttagctttcaatacctcagttatcaacaaaccagtgaccaaagcttcatactcagcctcattgtttgatgcattgaattgaaatctcaaagcatagtcaaacttaaagccctttagagaaactagtattacccctacacccgagccatgctcattggatgcaccattcacgtataatttccatgaatccgcatctcgctgaacaagcaaattttcctctagagttattccttctat

SEQ ID NO: 33511 - DNA, 1391 bp, Cannabis sativa
aacatgattgttttatgagattgggttggtgtaagggttgataacatggttgttgtaagagttgctaatatgtgattgatgtatgagattgagttgttaacttgattactgtaagagttgctcatgtggttgatgtatgagaattgggttatcatataaaggttgctaagataatttttgtatgagattgagttgttgaaagggttgctaattaacacggttgttttcaataaatataaatcatactcattttttggctcaaatttagttcaaaatgtaccacactcattagagatggtataatgtcacaagtcatataagaagtttaaagcccttacacgattacactaactcattgacgttctcaatataaaaatggtaaacaaggtgatcatcatcatcgttgatcaaggagatcacaaggctacaatttaattggcaaaataataaagagttattttagatgataagaaggaatcctcgtatctctatattacagtagttatatatatataatagtgtttctgtagttatatatataaataaaatatttatgtaaattaatatcaattataatatatgtttaatagtaatatgtagaatttgaatgtttttaaaatgttatattattagcggagaacgtgtttttgtgaaaaaagttgtagtacatatataaatgaaaaaaaaaaaaaacttaaagtgttgtaaaaatgattaaaaaagtttctatatacgtattaataaaaacatatattgatattaatttacataaatattttatttatatatataactatagaaacacaattatatgtatgtaactactgtaatatagaaatatgaggattccttcttatcatctaaaaaaaaccatttattattttgccaattaaattgtaggttgtgatctccttgatcaatgatgatgatcaccttgtttgccacttttatattgaaaacgtcaatgagttagtacaatcgtgtaagggcttttaaaattcttatatgacttgtgacattataccatctctaatgagtggggtacattttgaactaaatttgagccaaaaaatgagtctatgatttatatttattgaaaacaaccgtgttaattagcaaccctttcaacaactcaatctcatacaaaaatcatcttagcaacctttatatgataacccaattctcatacatcaaccacatgagcaactcttacaacaatcaagttgacaactcaatctcatacatcaatcacataatagcaactcttacaacaaccatgttatcaacccttacaccaacccaatctcataaaacaatcatgttaataacccaatatcatataacaactagttagcaacactcgtagtctcacaatctcatacacgaaccat

SEQ ID NO: 33512 - DNA, 1264 bp, Cannabis sativa
  modified_base (81)..(83): a, c, t, g, unknown or other
gccggctggacgtggaatgcacctgaaacacaagcttcgttatgatagtgttttagaagtgcctaggcaaggtcttggggnnnggattttacttttttggaaagactctattgatgttaatgttattacttactaccttaatcatgttgattgtattataaataattttaatggtaaagactggcacttttctggctattatggttctccttatgctaatcaaaaatctgctccttggactttacttaatcgcttatttgatactgctcctcttttgccgtggttagttatgggtgatttcaatggttatctttctgttaatgacaggaacacatctcattccccccctctcatgctatgcattctttcctttctattcttgataaatataatcatgttcctcttcctcatgttgggcctaaattcacgtggaggcatgttttgatccttgagcgtattgattggtgcacctctaatcagctttggacgaatttgttccctcaagctactcttttccacctcggctactatggttctgatcatagggccctgaagatcatgtttcaggaccccaatttcatcaatctccgctaaaatcggtttcattttgaaaatcactggctcaaagacccctctgcaagtcttcctagacaagcaatctcactgtatttcggagattaggacttggagtaaatcccaacatcctattaggctccaaatctctcgtacacaggcagaatttaataacctgttgaatgattcccaactgactcccaattctctttctcaagttgccactctccaatctcgattggatggccttctccttaaggaagaagtttattggaaacaacgttctagagtcgactggttgcgtgctggggatagatatacaaaaatttttcaccaccgtgccactctcgaaaaaagaacaatctcattcgccaaattactcttcctgatggatccacttcccatgattctgctaatataacttcccaatttcttcatttctacacttctctttttacttctcaaggtgtgtgtgatatggctgttaactctcttcttcaagggattactaacaggctatcccctcatcaagctgcttttctagccaaaccttacactgatgctgaagttaaacaggccttatttagcctctcgggtgacaaggctcctggccctgatggactcaactcacttttttacaaaagtaattggtccactcttgggaaacacttcactagggctatgcttcaaa

SEQ ID NO: 33513 - DNA, 3144 bp, Cannabis sativa
aaaaaatcacataaaaataatattaaaacagtataaaaaataatacaaataataaaatgaaagattgtattttatataaataaatattttaaaaaccgtaaaaatatttaaaattccgtacaattgtatttttgttattattttcatactttttaattgatgtttaccatgtcaatcatattttgtcattttttttaaataaaattattagcacacttacctcccccttccttctcaactccctattattctctcatcaaagacggttctcataatcatcatcttcctctctcattttattcttccttcctcatttctttgttatcttctttctttaatttacattttctttttcagttgttaaaaatttgatttacattgttacaattgttagtcggttgaggatggtttgatccatgatatatattttttttttaaatcatattccctcctttgttcgtgggtttttcccttaatagtgttagattgtttttatggttgttactcgttcatcttcaacttctcatctcgtcaaaaaactcccaaaaaatccaaataagatcggcattgagtaagaaaagcctcgctaagaaaaatttgaaagatcatccccttagccctacctctccagtaagtacgaaaaggaaattagtggttgactcagtggacaagagaaaaacaaaacgttctaaaagtgtcattaaagatttggacttagattctgattttgagattaagaaagtgcccaaggtattactctgttttttttttttttttaatttttatttaggttttaatcatcttaatattgtctatgttattttattatgttaattttttttatatatattttttaggatttatcgttattttattattcttttaagatttttctatatgcatgctaacagtagatatgaatttaggactttttcatatcttatcaatgtttgtttgattttatataacttatgtcgttcccattctatttatcatatttttataattattttttagggtgagggtgaacctccgaaagtgaaggttcattttgatgctgatatagtgaagtttccattgaaaaaaaaaagttattgaggtatgatatttttttatatatatatttattatatgtgtacatttttaatgagtattacacatgaataagtaatataaagaaattttaagtttttatgtttaatttttgtaattaaaaaaatttatcattttacattatatggattgaggttgttccatcgactgaaaaaaaaaaataataaaataaattctttggcaaaaaaaaaaaaaaataaataaaaaagatgagtttgacttaaatattttttttacataaatatatcttttatgtagtgtgaaaagagttacttttttatatatttttttaattaagtagctaaattaaacataaaaatttaaatttctcttttgttatttgtcatcggatcaaaatctaatggtttaatatttttaaaattaatattatagttaaatttatttagtatccatttatgggtaatacccattgaaaagtattccatatatatatatgatatgtatgcataaaaatgataagtgatacaatttatgagtttcttcttactaatgattatagtgaaacacttttttactttttagaaattcttttattattttttttttaaaaaaaatacttttttcgtcgggttggttgggttaaccctaccataccgaccaaccttgtcggtcggtttaatttttttctttatttgggcagattgtacttagaattttgtaattcggtctttacattggattaaaaatatgtaatataagccgaccaaactgactgacgtacatccctaattgtaattcttaaaattttcaattggagtaaaatgccaaagctaaatgttaaatatttgaagttgcaaagtatgaataatattatatttaatcgtcccattgaagtaggtatgtatctaattttttttttaatttaatagttgttttactattcttgttattattttttgttgttccgtttctttgttaaattatgattgctaagtttttttgattattttttattattgttatgtcgcaactaaagaatatcaatccaacttctaaggagaaagacttactcaatttgtctgattatttcttggatgagaccatttattccttcagcaaagggaaagaaaaaagataagggaaagacaattttgagcctattacaaattaatgtttttgcaaatcctagagttattagtccatcttcttcaaaggctcatgataggagtgataatttgtgtttgctcgtattcgtgttgtgtcaaaactcatgtataatagttatatgctcgattccaacacgatctgtttataaatgggttgacatgacatgacccgtgtaacccgtttataagcatattttgtttaaacaagtcaactaataactcgtgtatgacccatttatgaccttttaaagtactgaaataacttttgataggtcattaacgggtcagtttcgtgttagtcgtgtcaatttgaatatgatctgtttattaaacgggttagacgagtcaacctgaacacgatccaaacccatttaaaacaaattcaagcctgctaactctcgcataggtttcgaatcgtgttatcgtgtctgacccgttttaccgacctatatgaatatgtctctcatcttaaatatgaagatttatgaaaagatatttcgttggttcttagtcagcaatattttcttatttttgttgtagctgagttgaatagaacaattgatattcttatggaggtatgtattgatattttttttttatgtgtttaatattttaatttattttgatttgatcttaatgcaagttttttttttatttatttggcaaagctcacatattgggatgagtcaacatcaaaacatttcaaatgatgtgctacgcacatcagataatgatgacgaaacacctcatgaagaggaagtgaaagataatggggatgatgaagatgatgcgtttgaaaaaggtgatgatacattgaaggatgatgggaaagaagatgatcaaattaatgaggatggtggggataattcaaaagaagaattgaacataataaacttgagagcag

SEQ ID NO: 33514 - DNA, 1261 bp, Cannabis sativa
ggggtgatacaaaatctcgcagttgtaatctagttccaaccaccttctctgcctcatatttagatctttttggctgaaaaagtacttgagactcttatgatcagtgtaaatctctgtaacttgtcctcagtctgcgtgctaccctttgaggatctcttacttcaggagctttgctgagctcctgccatactggtgtctggtgtggattgggacaaagtttggacactcacctcaaaggggttgctcatgggcgcaccaaaatgtgacaacgcaggatttaaagcgagactttgattttatcctagggtagcagagaactatagtccgcttgcttggggagtggcagcaggtggagctcttgaaagctgtgctcttggcgcatatcctgacaccccggtcgggtaataccctccgtaagccactatttgggcttcttcaaaattgatatatttttttggactctatttttaaagtcttggaggctagctgctccttcttattgtaacacattccaaaaaggggttcccgtacggattcctgcctgaagaagggccagatgttgccttcgtctaccatcttggtaattgaggcctcctctttgaatctttttataaagttctttagggtttccacgggcagttgttttatgttggttagggtgctaacctcgaggttgatctttcttgttgcaacaaactgccgccggaaacttacttgcaacttgttccaacgatccactgatcctggctccagttttttgaaccattcttcagcaaactcgcttagtgttagtggaaagcacaaacactttgcgtagttactgaccctcatgacggtcattaccctgttaaatcgcgacagatggtcactggggtccgaatctcttgtgtaagtttccatttcgggtattatgaaatttttggggagctccgctccttagatatttctagcacacggttcccggtcctcgcaatcagagttcgaatcatcccctttctatctccgagaaactctagcaatgtctttgcagaggatttctaactcggccaagattccttcattcaaggcgcaccagatactggtaatgcgtgctttttcttctcgagatggtttctcaagtcaccatgcttctcgttgattttttgccgaagatcaactgggggatgcctttgacctttcctccctctttccccgggctcttggtgcatggatacgctcttttggtcctctcgatccggagggccaagactctctcgaggga

SEQ ID NO: 33515 - DNA, 1389 bp, Cannabis sativa
attttatttaagtttggtctaggtccggggtcaaatccgggttcgatcagaggccgcgttcagcaccagggtcgtggggggattttagttcgggtctggtcggagtccaaaatattgattaagaaaaaaaattatttaaaaatatattaaaactgactttttttatttttaaaattttgattcttaattaaaaaataaaaaaataaaaattgttttatataaaatatgttttgaaaaatattttcacttttgtaattttaaaaacagaaaattagttaaaaaaaatattaccaaatgccacatatatacttatccatatatacctttaattagaaatatgagataaattgagaaatacatattctttatattcattaataaaaaatacctttctattatattttattaaaatctaccaatatttatgagtgagttgtttaatatacacttgttctctcttaagtgtagcatttaatttacactaacttaatgggtataacatcgtatataaaagtgaatatatcttaaaaaatattaatataaagataaaaattaaaacagataaaataaaatgggtatacaatacaatttcttaaattgataaaataaaacaaaaaaaacttaattaaatatttatatatatatatataagacaagctatatccacatgtcaaatccatttatagtagatatggaatgtgatcatgataagatggtgtggggtggagactcaattgaagaagctagaacaaatattaaattggaggaaaacttattaaattaaaactttttttttaaatttctttcttttttttgtgtaaaaatatataaaatattatgtttatattttatttttttaacaaaagtacttcaattaaaattatcatatatttataagtagaaattacactaaatatgagaaaattttaagagtttatttttgtatggcataaataaataaagctaaagggttatggattttttgtttttgtacatttatatgggttttttttataccatatttttataaaaaaagatggaaatctcatatttgtaaacaataataagtttttccggaaaagtcaccggaaccgaaaaagtcgccgaaaaagttatcgacgccagaaaagtcaccggaaaaatcaatgtcgccgaaaaagtcttcgtcgtcggaaaagtcaccgtcgctgaaaaaagttattgaaaaagtcaccagaagtagatgtctcaaatataaacaaaaataaaaccggttataattgaaatataaccgattttgtgacacgaagaataaaaataaataaaacagaataactcaaactaattataattaaattagaactgtttataactaaaatagaaccaattatataacataatgaatacaaa

SEQ ID NO: 33516 - DNA, 2437 bp, Cannabis sativa
  modified_base (529)..(536): a, c, t, g, unknown or other
  modified_base (575)..(582): a, c, t, g, unknown or other
  modified_base (1683)..(1695): a, c, t, g, unknown or other
gcgtttagattttctcgaacttttatttttaaaaaaatagtggatatgttcagaactaaactataaaaaaaacgataaatgttatatttatcttatttatataatacaaaatataatatatatttatatataatttcttttaaaatatgaataatatataaaaagaatcattagttaaaatgcagggcatgttttagtataataaaaaaaatattgaccaaaattatatgcaaggtacatttttttaactatttttataaatagaggatactcaataagcatttttgatattagaaggtacgaaagctttattttaataaaatgtagggtaccaaataaatatattccctttataaaaaaataatattattatttaagtattttcaattgttctttttcttattaaaattataacacatattcataaatcaataataaaatataatataaatactaaaatataaaaatgcgaggggctaaaattctctctagctattatatgtgttcgctagcatttattttttttttnnnnnnnnttcgctagcatttatttttttttttcttattattaatgnnnnnnnntataataaattaaagtattaaaatattaatattaatataaataaaatatattcatataattatttttctcaaagtattaaaattaaaaaaaataaaattatttgaatttaacacaaaaacataaaataaagtgactaaaattaataataaaaatatcaatatctaataatgggaacttaatgttgctaaagaaataaaagttttgggattaatttactaaaatatgaagtttggggaccaacttgtcaaaacttatatagtttagagataatttgccaaaaaataaaatttgaggaccaacttgttaaaacatgtatagtttaaaaatatgcgatataaataaactataatataattagtaattacacaatctaataattatcttatatttttaaaagagtattgctattaggcatcagtggtgcctagcagcttctcgacatatcgcgttacaattggctagcgatactctttaaaagttattaacttattatattaaactatatgggacttgatacttaattggaccaataacgatattaacatataggagagtgctaagcaccactgatgccctttagcatttatcttttcaaaatacaatatctaattagatatgagataataattacaaacaagccggtagaagtattaaaattgataccaattattagccatggaagactcttgacttggctgtcataatctagtgaattttgtctctatataagaaatatgactcatcctaccaattatttcgtatacttttcactataatgattttcttctctttttttttttttttcaaaaataatgaattaagaagttatatgctgtttagggggtatttatttgattggagaaatttaaaatttggtaaatactattttgaattctgtattttataaaaattattaattggactttttattttattaaatgataaaatagacttgcatttttcaaagttatacaaataggaccatgaattaagtttttatcaaaataaaacttaataataatatgatctacatatattataacaaaactagttatattttttgtatccattcgtattaaaaattatcttaaagttggttnnnnnnnnnnnnnaaattattaaaaattgagctcatggtcctatttttaccattttagaaaatatagggtccattttatcatttaacaaaatagaagatctaattaataatttttacaaaacacaatatctaaaataatatttaccgtttataatatgataaattaaaatattgaagtacaaaatatgatagttataaattaatattgttaattgaattatattggttagctgaagataataatttgataaattgttattaataaggtttttcataattataagaaaatgtggtagaatttattttatatggcataaatatataatacaaaaaaatatgagattaaaaaataattaaagtttaaaatatgagaaaaaacaataaataaatttaataaaacttgtaataataagtttcgtcgaaaaaattaccgatgtcgaaaatatcaccggtgccaaaaaagttattggaaaaattattgtcaccaaaaaagccaccgtcgccgaaaaagtctcaccgtgttgctctggaagtcaccaaaagtagatgtctcaaatattaaaaaaaaaaaaaaacatagaatcagttctataacataatgaataaaaataaataactcaaaccagttataattgaaaaaactagttccacaataaaatacctcataaaatcggctataatttttatatcaacaaggtgcatcttgttttttggtagcccatctcgaaagagctccacagttaagcgtgcttggc

SEQ ID NO: 33517 - DNA, 1443 bp, Cannabis sativa
taagagtcattcattccgtgggtgtaagggcccaatgaagacttgaagcggggacgttacagataattataaaattataatattgtatgtatatttgagttttattatacacatttattattattataagattttttaacgtatcatgcaagttagtgtatttgtatttacgtgttgtgttttttgatttgtcgtgtcgtgttgtatttaactctatatttctcttgttgcgcatgtcctacgaatttgtagcattgtgtcacatgtaggttttttttaggaaaattaagttaattttagcaataaataaataaatcttaaaatatcaaaacatacaaagaaagaaaaacatgtagaacaacaaaataaggaatatataattgagattaaattgtcatttgttttagtttagcactttcaacaatttctctgttctatcttttaaaataaaatatctcatcaatttttttttttattttacctcatatatttatattaaaccatacatatcaacttctctatattttttctccatcatttaaatattatatttttacataattttattaattaaaataaataaaaatgataaaaaaaagagtaatgaaataataaataaataattaaaagaatgagagagaaagagaaaataatattgtgacagtcagtagtctcgtaatccgtaagaaaaatactgggtaagttgtacaatctcacatcgcctaggaaggtcaagtaggatgattctgagactgtgtagatatgagactacacagttaaagatgacttaaatggattgattggtactacctatatcaacaaggtgtatcttagtttttggtagcccatcacgaaagaattctacggttaagcgtgcttgacctggagtaatttcaggatgggtgatctcttgagaaattttcctaagaagtgtgtgagttaggacaaagcacactgaaaatactcgtgttggtctatagggatagtcatcagtccaaaaagcagctagagtgacatacctgtgtataagagtcattaatctgtggggaaagacccactgtaagcttgaagcgggggcgttacagatagtatcagagtcttgatccagtcaagagtgtggtcgacgttaggggtgattgtgacagttagtagtcccattatccgtaaagagaaatattaatccgtggggaaggcccaaaggaggcttgaagtagggacgttacaaatggtattagagccttgacctagccgaaagtgtagtcaacataatagggtgattgtgacagtcattagtcccgtgatccgtaaggagaaatactatgtaagtaatcccacacccctggaaaagttcaagtgtgatgcttctgagactgtgtaggaatgagattacacaatgaaagaggacttaaatagattgattggtactacctatatcaacaaggt

SEQ ID NO: 33518 - DNA, 1011 bp, Cannabis sativa
agttctttgatccagagggtatcgtcttcctcatctctgttcttcgtcaattcttttcttcttccccatggctggcaactcaagaagctctgctagcctaacctcgttgaaagaacctgtagcgttcaagcattccttgtcgtccaaacttgatgaaaacaatttcctgtcatggaaacatcaaatcttcacagctgtaaaaggccatcgtcttcaacatttctttgttcaaaattctgctcctcaaaaatacgcctctgaagcagatcgcacctccgaaaacgtgtctgatgaatatcttgactgggaagctcaagatcaacttcttctctcctggatgctttcctccatgaatgatcagatgaacaccaggatgatcggatgtgaaacctcagctgatgcatgggcagctctccaagaattcttcactgctcagacatcctccaagataagtcaattcaaaacccaacttcgtaacactaaaaagaacaatctgtcgattagtgattacttgcttaaaattaaatccatagttgatctgttatcagctataggtcataaattttctgttgctgatcatattgaggccatttttaatggcctaggacctgaatatgatgtcttctacacctcctactccattcacaaagacaaattcactgtcacggagcttgaagctttactaatggctcaagaatcaagaattgagaaatctgtcaaagaattagatatctcaaatggtgaagccaatctagccaactatagaccaactggtaccaatcgaggatactttccatcacaaagagggggacacaacaacaactctggttttcacaccagagatgacagcaatgggtttgcaaatcgtggatctagccgtggaaatcaaggaaggggaagatggtcaaattcacaatggccacctaaacccatctgtcaactatgccaaaaaccaggtcacatggctctccaatgcttttatcgctttgataaaacctttcaaggacctgg

SEQ ID NO: 33519 - DNA, 1952 bp, Cannabis sativa
  modified_base (628)..(630): a, c, t, g, unknown or other
actaaagcagctcattattttaagaaagtagttgttgtattttcatttaatacttattttaatctatttattttaacatatatatttatttcattaaagttactaatttagataactctaaataaaaattttaacttaatatttattaaattataccataggaagatctttaaaataagatgtattttccatcattagtattaattttcctatgaatattatgaaaattacttaatttaagttggtccaaaatgaataattaattttcaactcaaatttaattctctataaatataggtatgacaaaattcgaaatccaatgtattcaagtaatacattttcaaaattctctcattaaaataaaataaaataaaattagaaatattattctaatttatgttgaactaaaattaataaataaattaattttaacataaatataatttttctgcttaattaaatctcttaagaaaaatatcaaatatttaagtgtctagaacaaatcaactttaaatattaattttttatttaattaaatctatctagaaaaatacccaaaagtctacctagaaaatatccatctagataattcataaactaattatttattttctaattaaaatataannnattttagtctatttattttaattaaatcattaatgaaaatttagcttaatttaagttgatctaaggttaattaaaaaattaatttttaactttaatataattttaaaaaataaaaaattttaaaatatctacatttaaaataaatatatttcgaaaattaagtagaaatgattattaaaataaaataaaatatactctaaaattattctcatttaaggtgatcttaaattaaaaaaattctagcttaaatataattttctatttaatttaaatttattaaaataaaaacaataaattaagtatctttaataaaatcagcttaattattaatcctaatctaatatctaagaaaaatattctaatttaagatggtctaaaattaaataaataattttcaacataaatatatattttctaattaattaaatttcttgagaatagaaataaataattaagtatcttgaataaaataaacttaattattaattctaattttaagttctaagaaaaatattttaatttaagttggtctaaaattaactaattaaaattaattttcaactcaaaatatttttatacttaattaaatattagaaaatatatattagttacgagaaatcactatctagaatattttctttaaactaagtgtcttttttcttaattaattttaaaataatacaatgaaaaattaatttcatttatttcaaattattataatactaattcaattttaattaggttaaactagtataattagcctaatacaaatatttaaataaagctaatgggctttcacaattgggtctgttcatgtgagggaggactgggtcgagtatgtcgtatccactactaatggccccctaactctcacacaagtcccaaaggagaggaatttaacttttcattaaatagttgttattcattgaataagcgcaatactaattcggcctaaataaaactatcaatggtgatattttattttagcaaccttgtgtctttaaatatttagaaataaatgggctttctaaatgcatctaagcccaaaagcaaacatataggctcataattggtggtaaaaatgcatatttattggtctcaaatgttaaatcaaattaaattttaattaatattttcaagtaaaataatgaaaatatatatttacaattaaaaatatttagtttgactttaatttagtttattttgcaggaattattttacactctagtacaaataaaaagaagaagttattgtgaaagaaagagataaaaaattggcatttttgcaagagaaaaacccaacataaaaagtgatagttttac

SEQ ID NO: 33520 - DNA, 1340 bp, Cannabis sativa
atggatacgagtttgtatcaagtatattgcggcaaaatattattagacattttataatatcgaggtttagcagggtaatggaattggactatgttatcctagggttgcgaggctacttagcgagcaagtggggcattttagtctttttctctaaggattagtcacctttttttttttgagagattggtgactgtgactcaccttttataggtgaccagaaacttaaagcaaaataaaagaaaaacaaaagcaaaactaagtcaaagtttaaaaaaaaatcaaatttcatattaccttctattcttctccttgatgccttctaaaactagaaagaacaagaaaatttccacactttcaagctccttattaattggaattgattaaatatttcagctcctagctcctccaagcatctaaggtaaattctagcacaaaacttattggtttttttaggtttttgttggttttcaataggtctttttagtaggacttgctgaggaattctaggaaggttaagaaaggctttctagggttgttagggaccgattaggactaatttgaaaggaatcggttggttgtaataaaagttatgcaagtttgagttcaaacttggctcatgtttggtattttgattttgttgacttcgcttctagccaacgatagtgcgtctatattaaagcaattagataaaataaacaatggaaagcaaagactataaataatgaaaacacaaaatattttagaggttcagccccgtgactgtggtaatagcctactcccctttaggttatattgacttgtgagacaaagaacaaagtattctctatctaaagctcttacaatggatctttgagtaactctctcttagatcactatttctctcttgagtgttttctctttgattcaatttgtcccctcaaatagtgaggcaagaccattatttatagggcctcattacattgaagtagtttcccttaatctataatacataaattgggaaataaatatgtttccataattacaataaagaaattgaaatttaggctatattacccttattctctgaagatacgagtcaatcccatgcaagtagggataacttcgtgtcatgcaaacttgaagataccattaattactgctgaagttaccaactcacatttcctggtcagtgcacgagagatgataatacaactgggttggtcggatgtcctttagtgactctgtacggacatcctgccatgcctatgtaatttggatcctcatatcaatccttatgggcttttaagagtgaaaccattttcccaggtcaaaaatgtaggacacgtatcattcagctagta

SEQ ID NO: 33521 - DNA, 2434 bp, Cannabis sativa
tgttggggctaaagaatatggatgtcttggtgatattcactttttggccagacgccattttaaaagagtgaagcaaggtgcgtacatttgaagctgctcccgaagaggcttgacaaaataagtaactatcatcagtaaacaacatatgtgatattgatggagccccattagccacacgacaccctcagaggagttgatttgattcaaacttcttgataattgatgataaaccctcaacacaaataatgaaaagatatgttgagagtgggtcaccttgccgaattccacgagtggggatgataggacccataacacgattgtgatgcatgatggtatatctcagcgaggtacaagccatgataaggtttacccattttttttgtaagtctcatacgaagcatgatagctcgcagataatcccattcaacccggtcataagctttgctcatatcaagttttaaagccataaagccctttttacctttcctttttcgcttcaatttgtgcattacttcaaaggctaccataatattatcaaaaattagacgacctagtatgaacgcactttgggtttcaaatataacaaagtcaatcatgttacgcatacagttggcaagaacttttaagccagtcttatacgaaacattacacaaagcaattggctgcaagtcacccattgaggagacatttttctttttggggaatgagaaccgggttggtatcattaagctcttgtggaaaaacacatgtggcaaaaaaatcacttaataatttgacaatgttaggccccacaatgtcccaatgttactgataaaaatcaggtcccatgccatccggccccggagctttgtcaggagcatttgaaagagagcttgcttaatttcctcagcaagtataggccgaagcaggtcttcattttgctccctaaaaacagaacactttatattatccaccacattgttacaggtagttccatcggtagtgaagattgaggaaaaataacttgtaattagatcatccaatcttgagccccattccttccaattatcatttgaaattttcaatctcagaatctggttgctttgctttcttgaacttgctgaggcatgaaattatttgctattttttgtcacccgaatgaagccaatgttgctttgatctttgcttccaataaatctcttgttgagcaaggatttcaaaataattatttttttcttcatcaaaatcggcaatgaagtattgatcatcagagcctctcatggtagataatcttttcttgcttttattcaacctcttcttaaaattcccagtaagtttataaccccaagaagacaagtttgcactgcatttgttaattttatctgacagggaaagatggctatactcctcccaacaattctttacgatttgcttgcaaaatggctcacgagcctaggcattttcgtagcgaaatagatggaggtggttgctgccattaccagtttcaggttgaaggaatattggtgtgtgatcactagaggaaaaatcacaatttgatagtgtagcattaggaaaaatattcagccaaagttgggtaataagggtcttatctaaccttatctcaacatggtgactcgtacctcttccgcattcccaagtgaaggcatggccatgaagctttaaatcgtgcagggagaaatcgcgaataacactctggaaaccattaataagatgtggaggatagggtcgactgcctcttttttcttcttgcgtagcaatgttgttgaagtcgcctataatgcaccaaggaagaggcgactaatgagcaatagttcgaagaagatgccatgtgcgatctcgaagtgttctatttggctcgccataaaatcccgtgagtctccatcgtgcataactaggtatgtgaactttaatatcaatgtggttatctgaataaccaagaagatggcttcatcgttagttttccaaagaaaagttaaaccaccttttttgccttggacctcaacagtgaaacaactatcaaagccttgtcgactcttgatacgatccaaaatatctttcttacacatagtctcacaaagaaaaatgaaattgagtttcttttgaacatacaaatgtgttaggaattgatcaatggcccgtgggtttccaagtccacgacaatttcaactaagagtatttatgatgatttggtgggcctgaaaactagagctcaccacatagattgttttttgagaagtcatcaacatttgcgaaaataccactttttggaataatggattggtccatcacttcttggagacgacaatttaatacatcttattatgtcaaggagcaatatatatatatatttttaaaagagataattacgccagcagacgaaaatttggaaaaaacatcataagtaacgctgataatttttattgtagaatatacc

SEQ ID NO: 33522 - DNA, 2860 bp, Cannabis sativa
aattatctaaatagctataaataatttcataattaaacataaccaactgctaatttccaaattaactaagcgggctttacacatgaagttctagttttaatataaagaagtgatcattccaacccacaacgaaattttttggctctgttgttaaatccttattagttatggtctcacacataatgtctaaagagaacatatccttcaaaaagtcgattttttcaaccccgaacattcccgcaactgatttatctgtgaaaatagagactggtctgataccagcatttaccacagtctctatatcaaagtgattgttaaaaaatttgttctagtaataagatgattctttgctgagtgctcgccactcagaagagccttggaggattagggatttaaattgtacccttctggggattaattttgggttgcagtgaagccagtgagcaatgagttttgctatcaccgaacaagcaccgtatccagaggctaatcaactcgtttgatcgaaggaagcaaataaaactggaactttcaataatgattctttatcttgactcaatagttttagtggaaatgaccactcactcaaattttgcttctgtgattattaacaaagattcattaataaattatacatataaaactcattcataagtatacataatatagttaaaaaatatatatgaatctcatagctagttgtgttatgaatttaatacaataacaataatttcatttttaaaaagaattatctatgtaattgttaatctaataatatactttccaaacattactatatgagagaaaccgagagagaaagatagattgtatttctcagattaattgattaatgattacagagtaaagtgcttttatagcactggtttacaagagtcaagttggtcaagactaactaaccaattagttagttaataacagattaccaacttgtattaacagaattgtcatactaaatacaaagcatataactaatcctaactaattacagtttaatagcccccctcaagttggagtgtagatgttaattacacctaacttggagacaatgttggagaaggatgagggtagcaatgctttgatgaaaatgtctgcgagattctgttgagaagagacatgaagtagcttgagggatccttgctgaactttctctcgaatgaagtggcagtctatctccacgtgttttgtaagttcatggtagacggggttctcaccgatgtgcattgcagcagtgttgtcacagtatagtgtcgctggaatttttggagagatgccaatgtctttgaggagggcaaggatccatgtgacttcagaggtggcatttgccattgcacggtactcaacttcagcagatgactgagagacaacttgctgtttttttttatttccatgagacaagggatttggccaaggaatacacaatacccagagatggagcgcctggtgtcttggcaactggcccgatcagcatcggcagagaatgaaagttgaacattagtagccgataaacttgttttagcatatgctgagatgcttggggaagtgtttccaggaaagaaaaggccttggccaggagtgctctttaagtattgcaggatcttgtttgtggcagtaaggtgaggaactcgtggttgttgcagaaattgactaagatgattaactgcatatgtgatatccgacctagagattgtgaggtaaatcaatttaccaataaggctgcgatatgtggtggggtcagataagagggcccctttatctttgcttagtttgagattatactccattggagaggaagccggtttagcccctaaataccctgtgtccttcagtagcttaagagtgaaagggcgttgagaaacggatatgccttgttttgttcgagaaacttcgagtccaaggaaaaaactgaagggggccaatgtctttaagtttaaatttgttgtccaaaaaaactttgaaatgagctatggcattgtcattgtaactagccacaatgatgtcatcaacatagatgaggacaattagaactagaagcatggtgctggtttttttaataaaaagagagttgtccgataaggattggtgaaaagaatcttcgagaagggtggtactaagcttagataccattgtcgagaggcttgtttcaagccatagatgctcttttttaagagacaattagagtttgggggagctttgtagcccggtggtagttgcatgtaaacttcttcatgaagatcaccgtgaaggaaagtgttgttgatgtctacttggtgaatgttccaattattcatggaggcaagagcaagtaagattttgaaagtgttgaattttgcaacgggtgcaaaggtttgggaatagtcaattccttgtctttggttatagcctttggctactagccgtgctttgaatctatcaacgactccttctttggtatatttaactttgtatacccatttgcatccgatagacttttggcctggtggtaacttggttattatccaagttttatttctttccagagcttcagtctcagtatccatggctttgagccaatgaataaattgagaagcctcagcatagttttgaggttcaatttctgaataggctgctagcacagctgcacgaaattgaggatgaagttttatgtaggaaagaaaaggttcaatagggtgggtagtggaggctgtgtggcatacatatgcatctagatgagatggtttttttgttattcgaccatattttgtctgtgttatgggcacagtaagagcaggatcagaatgtatatgtgcctttgtattctatagggattctgcagcagagggagtgcggttaatagctctgt

SEQ ID NO: 33523 - DNA, 971 bp, Cannabis sativa
tatggttacgagaaggggatcaaaactctaaattcttccatgctaaagccacttcgaggcgccgtagtaatctcatccacaagctgtgaaataatgatggggagtgggttggttgggaggatgagttgccaaatgtggtaacaaattattttcagcaacttttttcttttgaggatggtgattatggtgatgttcttaactaccttcagccgactattagggaggaacaaaatgatgttttgattgaacccgttactactgaggagataaagaaagttttatttcagatgcttcctgacaaatcgccaggtcctgatggcatgacaccgggtttttatcagaaattttggcatattgtgggcgatgatattgtcaaattggtaagaacttttttcactgatgaaactcttcctaatggtctgaataatactaatattgtgttaatccctaagaaaaaggtgcctgaactcatgagtgatctcagaccgatctcgttgtgtaatgtagtttacaaagttatttctaaggtgattgctaatagattgaagcttgctttaccgaatgctatctctactactcaaagtgctttccttccaggccggttgatttctgataatatcatggtctcatttgagattatgcattatttgaaaaggaaaagagtgggtaaggaaggttgtatggcactcaaactcgatatgagtaaggcatatgatcgtgttggttggtcttttttggaagctatgttgctccggatgggtttctgtaggaaaattgtctccctcattatgtgttgtgtgtcaacagttgcttataatgttacttatggaggcaaagtaatggggcctattcttccacggagaggtatcaggcaaggtgatccgctatcaccttaccttttcttggtgtgtgctgagggtctttcttctctcttgcaacagtatgagcgtaatcgttggttgacgggttgt

SEQ ID NO: 33524 - DNA, 2234 bp, Cannabis sativa
tggtggaatcacaatcatacactgttatttttcacaactcgatgtctacctcaacagctacccaatgtgaatttgttggaagattcaacataaagtaaaggtaatcatttttcctccattttgggtagaattggtcctgtataaatagtaccattaaaataaagacaaacaactgattcagtcgataatatgacgataacaactaaacatagcacgtaaaaactcttatttctatcaagaacctatcgagatagtttcgataaacagtcgagaataaccatatttgacggcaacccacaaaggtttaatattattaagaactcatcgagaatctatcgataataactaaaattgtagcaagaaaaatttcttaatcctatcaagaacctatcgagatacattcaataatcatcaaaattaacccaaattttgttgaaaactcatcgagaatctatccatgacaactaaacattattgtaagaaaaaatttcttattcctattgagaacctatcgagaaacttttgataattagtcgagaatacggaaatttgatggcaactcacacaagactacatattatcgagaactcatcgacaatctattgataacaacaaaacatgacagcaagagccaaataatggtaccttaacacctctgcagtagttgaggacatcatcttcccatttgaagtcggccttgggacccttgtgtgttttccaagcgccatggataatcccaaccacataggtggaaagaatgatagctctctatggaaacatttctagaaagaagtggcatggcctcctaagcatatggacacatgcatctacatgctccatataatgatacaaatgagcagttacagtagtaaattaaataaactaaaattatattataataataaaagaatatatgtttacttacaaaatcttcaatccaatcctgtcgtgtcaacatcttcgtaaaccatataggaccgtaatcaccaatcttcacgtcccgaagacgatggttggggatactcccacacaattacctacaaaaactttccaacagcctatcatctggtgggatgagagtatcaaaggcgtagacgacttgagttttttcttcatttaagtatagtctttaaaccatgtaggaggggtttcctcctcttgcgaaactgaatatcttctagtggtctctctaagggttgtacctcaccctgtgactggctctcaactatggaaatattggtggcaccccctagagtagaagtattctcagcaacataaggatcatagtcgtcaagcattacgtcaacatcttccataagaggcgattgaggacgtgcatctgctcctgacctattatgtattgtactcaaaatgaccctgagttgctccataataaggttctgaccatccttcagttctaggtggctagcttggtatgcctccttcagctgggcctgacaagtggaaagacacttatgctcagcctcgatcctgtctaacctctgtactgaatcttggaactccacacgatcgaggcctgaagaaaatggaacagtagcatatttgatatcttatgcgactttttctgcatggctttgaaaaacactagggtcctgggcatcatattcaggatgggtctcgttgacacccatcttaatcactatttcaacatcattgtaagtgattgttctggcatacgcttcttcattagagcgagaaagtaacactcttaaaacaatcagttgctttgaaaaaaacatgttagaatcatttcgcaaacaaaaaaaaaaataaacagaatacaacagagagaaaaaaatccaacttattaatgatatcaataaaatataaataatacaataataatagaaaaaatcatacccttttagaaaatattgaagcaagtattttctttggaatgtcataactttcatcaatatccttactgctccagctaagcattctggaatcttgtatcccatgattaacaacgaacttctttccaacttctaaaattgcctcgtaggcccaatattgtattgttgtagccataaattgtgtaccccgccgactcagtgacttccttcttttttaacttagccttcattttaaccatgtctttctgaatataatacataagctttcattttagccttcattttaaccctagcttgtaaacgtccttggcaatctcacagttcaagaattgtgcattaagatgttccatcttcaca

SEQ ID NO: 33525 - DNA, 1635 bp, Cannabis sativa
aatggtaatactctgtttgtaggctgctcttccccaagcaataatttcctttgtgtttgccaaggaatataatttacatgcggagataatgagcacttcgtaagttatatctgcactctttttttctttttctcttttattttcataagctaatttattataattataatagctcatatacgatatatatttatatagcaatgattttggttttgtaaaacttttctcagggttatcgttgggatggtggttgctttgccagtgacaataatctattatgtgcttcttggcctttgatttatcactaattataaataatcaacttcagtattgttttagtcttcagaattctattttatttgttgatggagtaggttaagagtttgagaaatttatttgatgaatcaatggagggaagagttaagcttaggggagtacactaaatagtgtatttttttttactgcttattatatataaattttgtaatataatatattacattagttaatttaaatttaaaaaataaataaataatggactttccttaattattattattatatttttaaaatcaaatatgtttcattcattaaaagccatctgccaaaagagaaaaaactacctcaacaagaacaaagtttccaaccaaagtacaactaacatggctctcgtaaaactcaagccaaaaagtgagcaacacaattcacggatagttttacaaaattaaaagagacattagaaaaggaataatcaatcaaagatttacaattttcaattaacaatccaaacacagattgcattttattttcactacgcactatttgaaccactaccgaactatcaagctcaatatctacttgcttccatgaaaagtcgttgatcaaactttgccttgaaacccatttcttcagcaacatctgacctaacaataccatcatggcattggcaccgagcccctacaagcgcattaaaatagtcacgagccacagccccgaagacaaatttttcgtctctttagaaaatcgctatatcaacgttgatcatattcataccttcttttgctttggtccataactcagcccatcacaaagacaccatggctctaatgacagattccatcataattcttgacctttcacccagactgtcgctggtgtaaccacctcctagaaatgtacacccctttttattccacaccatgtcaaatttagcttttcaaatggcccaacacaacaccataaccttgtcccgacaatccaaagaagatgccagaaataactctcgcaccaatctccaaacgacctctctaccgtgtctccccctcacaactagcaaaggactagcactgaaaagtgaactcacacgacaccaaatagtgggctatcgtcttaccataaagctcacacataggacatagatgagtcactaaaacctacttctccaacaaatgaactcgagtgggaagacaatatgtaagagccctccaaatcaagttacttgttttaggagaaatcttagccatccaaatcatcttctgaaaactcaagtccacttgaacagttctacattccttagcttcttccaactcacaatacgtgatttttacattataagcaccatgtctttcccaaaac

SEQ ID NO: 33526 - DNA, 1245 bp, Cannabis sativa
  modified_base (183)..(183): a, c, t, g, unknown or other
  modified_base (759)..(759): a, c, t, g, unknown or other
cataataagaaaaccaaaacctaggtgaaaactctaggtttttacaaatgaaacactcttctcacaaagaaagatatgaaaatataatcataaaagagataaaatcgtttggctgctctctaggtcctatttgtagaacatagcaaccctagagacagccacaaaaatgatttcccagttgtncaaaactttcttaaaaaaattccttatttgcagcatcacaatcgggttttgcagcaggagatcaggaccagaaatgaaactttccaaattgaaccaagaatacgaaattagacttcaaacctatcaaataaagtttatttgatttgttctaataaaggcaaaaccgaaatcatccattagaaaaaggaaaagtcaagtttcccaaagttagataactttccataagagaattccttctcttacaagaagtttcctaaaccaaaaagagacaagctgagaaagaatctttccttagaagaaaagagtaaacaaatgcacaaaatcaatataataaaaataatttaaatgctcaataaaaatacacattaattaaaaagtattttgacaactaaattgacataaaaagacctaacaatcttctcatttggcactttggataatcaaaatatttttaattaacaaacaccaataaacaaagttagcaaaataaatataaaactccccatgaaaagcacaacattaaaccaaaataaaaggctaactttgaccaaagatgaacacaaacacaaacctcanctccccctagacagttgagtatacaattaaaattaaaatcccaaatactcccctttctgtttatctatacgggccaaagacaaaaagaaaccaagattttctaaaaaattaagatctgaaaaacaatcatgatcaacaattaaataaaatataaagaataagaaatgaaattttaagagaaaactcataaaaaatttaccaaacaaagcacatgttgatacttaccaaaagaaagacaaatgaccaatttttttttagcccaacagtcaagtcacacgatattttttttaattattattttttttcaaaataataaaaaaaaaactaaatattttatacaaaaatcaagttattctaatgcatgcatctttccaagattcataaaaatgacacaaccatattatgctttcaaagatcataagaatttagtatctcaaatacaaaccatacttaccagatgttgagaaaaaatagacaagttacata

SEQ ID NO: 33527 - DNA, 1273 bp, Cannabis sativa
aaaaaaaaaaaaacaaaaatcaaaaatctttttggagaaacatgacttttaattttttttttctaaaatctttttttttttatatatatataaattcgaaaagcttaaagaaacaatatatggatcaattaagtcctatagtcaaataatttatactttatggattaatcactaccatttttatgtctagagccaagtgcacttaacatctttgaagacatttgttgtgattttcaaaattcaacctttgatgattgaaatgaatttgcttctaaccaaagaactctatgaaattacccaattgattgtgacttagagttctatcatcaacatctttacaataattactttatttttagttttgttaacttatattaagagttaatacttaaaatttactaaacaactctcaataacttaagaatggtggataccgataaatgtaaatacgaacatgacacattgacattttttttttatctatttattacctatttgacccacataaaaaaataaacaggttcaactttggtcattttagtatatataatctatcatagttttattaatagattaatacattaaggctaattttatattaccatatttatgatttatttgttaatatataattaattgtgttaaacttattaaatttacgtttaataggttaatttgagttaatttgaaatttgattgtgtctaataacctattttgaactgtacttgttcataataaatttaaactcactaattttatgtcattttcaagttatattattgtgttatgacttatattgtcacccttaaaatgtagtgttacaaaaaatatataaaatttgataaacaaaaaattatctaaatattagtagataatttacactacctattatatggtcttaaattagaaactctcttatacaaaattattgttttttattattatttgtatgaatattgattatttgagatcattatatttatgaaattataatatttaatttattgaaaagcacattaacaaggtgtcatatagctagaggcttaatgtctaacaaaacacacaatgacatagtaatgacacacattactaaaactaaatataaaaataaaattaaatgaatcaacaaacttaactattcctattaattaatctttaatttgctaaccttcccaacaacacttccatattatcaataggattaataaggccctacctcatccatcatacctcaataagacatagttctaaagtcataatttgaccatatat

SEQ ID NO: 33528 - DNA, 1064 bp, Cannabis sativa
ggtgaaccgtataagcccaaatttgcatggtttttgtgcacaatggctataaacgactagttttctcccaaactctataaaaactcatttgtatcacacttttgagattgggttgtgttattcgtatttctcgttagggacacgtggagtcctcataataaatacatcttaaatacttaaggtccaacaataggctcaattgagataactgggccgaatccatagatcatcagtcctttcggatgaagaataaataataactcgtccaagagagatcccatccagcatggttaacattccgaagagataaaaccgcgtacctggaagaagcctctagcacatatccgaaagcccggtataatttcctatttattaccagatcacgaaagatcagggattgcctctaataatctcggacaaaagatcatatctttctaaataaggaaagatggtaattggcaatcaagtaattaacgtgtaattaactcccacgaagatatgacatgattttgacaatcaatatcgtgatgtggcatccacatcagcatacacaaggtgcctcattggccgagctttactagataagtccaaagaaaatattttatttgtaaactccccattagaaggaaaaaaagggtaactagtatgaactctaagcactataaatactcagaccctacatgcaaagggttcaaatttctttactcacatgcctaggaaaaagagatagtgctcatatcttcttataatctctaaggcttttctagcctaacttaataatattgactcatggactaaggatagttactgcctcaaccacgtaaaaatcctgagtgttcttatttctttcatttgtgaattattattcattggcccatacatttaactttcaatttctaaaaaattcgataaaatattttggtactttcattgagagctaaaaatagcaatgatacctctaatgattacatattgtaatcatggtactcacccaaaccaaatttggccttcactactaggacacgtcgagggtgaagttgatcccaacactcaaagaggaacaa

SEQ ID NO: 33529 - DNA, 3023 bp, Cannabis sativa
gagagagaaagaaatggtgggtctattttggtggtggctgcaaatgtggtgtgatcattttgattttattatttcttttacaacatttcatcgacggctgtccttcattttccctcacacgagccttttccaccgttaattttattaacaatgaaggtttgtgtgtgggttagcatctgctagctggctatctgattcaaaaatactccttttttttttatttttgttttcactttttactattttttttactgtattaaaattttaaaattactgtattaacgtttaaaaattataaaaacactgtgtattgataaaataaaaaaataactctaaaataacttaacaaatagcatgaaaataactataaaatatcaaaaagataattacaaagtaacaaaaaataacaaaataataacttaattacaatatacaaaacaatatctattcattaatatgtttttgtattgtgattttttttccttagttttgataatttgatttatccttttgtactgctatattatttttgttatagaatttattgttacagctttatatttttaacttttcttttctctcttttcctttttgagttagtgacacttaaaatgataatttattttttaaaatttaagaggcgtttggtaatacttttattttttaatcgcaaaaatgaaagtaaaatttgtatttttttttaaaatgtgttcaataactacttttgtttttcagttttaaaagctgaaaataaaagtgtattctataactttatttttctttttttatttttcaattttatttaagttgggtctaagtccgggtctgaggtcggggtcggagtccaaaatattgattaagaaaaaaaaactgtttaaaaatattttaaaagtatttctttttttaaattcttaaaattttaattctcaattaaaaagtgaaaataattttatagaacatgtttttagaaaatattttcacttttctaattaaaaaatagaaaattgattaaaaaaaatgttaccaaacgtaccctaaataaataatatacatatctatatatataaataaagcagagaaatatcactctaaaatcactccaaataattttataattttatatgctctttcctttgttctctcatttattattttttaattttcattttatactactttctaaaaaaattaaaatgtattctaaacctaaaatagtacaacgacatatttttgcttatataatgtaaagattaaatctgtgtaacaaattaatatataacatatgagattattttcaatgaaatatgtaaaagttgtgctatatttagtacaaaaaatagttttgtggtaaatttataccaaattttagctttgtgctccaatacacaatcgcaaaatttcgatgtaaaatttaatatctaattaatgttttattaaaaaaaataaaatcttataactttatgatcaattttattattattttaatatgtaagacaataaaaaataatataaatgtttcataatttaatgtaatagttaaatatactaataaaatattaaaaatgacataaatataaatgaagaagtagtacatttattttggtgtaaattttacatcatagcaaatattgtgccaaatttggcactaaatttgctttgtgccaaatttatatcactttttggcacaccattggagtacactttttgttaaatgagctatattttatgtttgagaaatgctaaggacactctatattgcactctcttttacactttctttataaataagtgacacgtgtaactctttaagctttaaggtatgtttaagtatagttacaattatacattttttacttttcattaataattaaaatgtgtcatctcatctacttgtttatttttttggactattttattatgttttttttattttttttactaaataatatgcaccactatgcatctttcttttattttttttataataaatatgtactattttattttataaaaaataaaaaatactaactctttctttttttcaacaaatttagcatcattttgtttcatattgtattattatttaaattattgtttatttcatgtttattataatatatatatagaaacaaaaatagataaaaaataaactaaatatgattatgcctagttaataatatgtgttagaacgatttacttttattttattttttaaagtaaaaaaaaatacttctcaagattagacaaaaaaaactaattgatttaatatatacacatatttggttagagagaaatttgagaacaatttaagggaatgaaaaaaaaaaataaaaaacatgatttttttaaagaatgatacgaagcaaaaaaaaataataataataataaaaagaattagtgcaaaatttatgaaaagaaatatttttccatttcttataaagtaaatagtcaatatttattataaaataaattaaaagaatgattcattgtggtacatattatctattaaaaaataaaattttaataaataaataaaatataatttaattaagtttttttattgtttgaaaaacaaataagaaagtaaatagaatcacacattttaaatatcagtaaaataaataaattaattattagttttaaaaaataaaaaaaaaaataagtagatgaaatgactcattttaattatcattaataaaaactaaatgagggtataattgtaactacttttaaacataatttaaaatgttacacatgtcactcaataaaaaagagagtgtaaaagagagtgcaaaagagagtttcattagcactcctcttttagcttttcaccacttatttatacttccattgaaaatgctctgatattgtcatctttttgtaacatttgggggaattacttgttactatgagtaacctccactattattaccaatagtaagagtgtaaaaggtgtaacacatcttagtttgaaattcttaatgctataggagttatgacgtgtgcatgagttacatctctat

SEQ ID NO: 33530 - DNA, 2038 bp, Cannabis sativa
tcaaaaagaagtcatctttaaatttagttttattaggtaacttcacaatgatcttgcgatcgtttgtgtgggtaccgaagtaataaaaacctcctgatcctcgcttccttgcgggaacaacctttacagaatagaaatatactatttcgaggggagtaggacactcccatcccataatatggtataaaacctttaaacatgccaggattctgtaagaactcaaaattaactaaaaaggggcgatttcgagattattatagaatccttgtagtactctctcaacgggagtactactcctgccttgatgtggttgaggctttaagtgcttattccagacgaggcactagtactagcttgcttcaccacactcttctcggattactctttctagtggaaagcaggtaaattcccctggagcgacggacctaatgcgacatcctctctcttttttgatgccacaagactttaatacattaccaacataagctcctatggatcttactttggattcaatgagttctgcctcgaaagtaactgtaggatcttggggggtctttgatttttgagcttgagtggtcatgattttgaaatctaagtcacctggtgcaaaagtaacagtgactcgaggtaaaaacagaggtcttgctagaggaatagatgataaagtttggagttcaggccaagctgcgtctcgcaaataatgacgtttaccatcggttatctcttgtaaaaatcgcctatagcgactggaaatttcatcctgattggtttctattagatgatccctaattttggcatcgtttatctcaagaatggttttaggtgcataagttttggtctcgaatggaagggctaaatttacaagacagtcggtttctaagaattctggggttgtaagttttggattaaattgggtcatactttatgaacgtatgtaatcctaatttctcaaaaaattaaatacaacctaacccaggaatctatgatactaataacctaaaaattttatttaaccctaaaattatccagacaaacaaaacaaacaattacttaaaaaataaccatataaagcagataagaggaacaatcaatcacgaagataaaattacaaatacagaaaagaaagacattagaaaaaaggggagtgcaccacttactattttgctgaagatttcttggcaataaaaaactccgtgattgagattgtgatgactgagacgatgaactctgagagtctctaagattaaagatgaaatctgatgaaatacgcaggaagtaggtcaatgacagtgagggcatgcaaatacggaggagtaaagcaatcaaaacaatgttttgcagaaaaatttgaaagttcaaaaagcaaaaaatggcaaaatgagttgttactttcaaattttatacctggaattaatcaccgttagatcaaaagaaatttgatctaacagataggaacactgtagattggaagaaacggatcattaaatcctaatgatatgtctcgaaatcctgaaacgccaaaattcaaagcatgtaatttttcaaaattaggtgaagacaaaaatacccttgtaatcatttaaaaagttctttttattaaaaaagtactttttaagagacaattgttatacctgaaatttggatatatttcaaaagctaacgcgtgtcctacagaaggaatatgaatcaactctaatgatataataatgttatatcattaaatgtagattaaaataactcgttattattaaagaaacatttaatagataatatttaaaactcgttgactgtatagtcttaagcgaaacaatgataacaactattgaaccaatattgacgagacatacatctacctcagaatatatagacaaaaagaggatattcatccactccagcagaataaatgtaatcatatacgacaagcctcaggttacacatagcgagaatatcacctcgcattgcgaaagccacaaaagaaatattgcgagacagaaaccttcccaacacttagtacttttttcttattaagatggacaag

SEQ ID NO: 33531 - DNA, 832 bp, Cannabis sativa
gaatgacaagttgtttggtgtaaacgggagagtgaaaagaaatgttaccaatggtttgaataagtaaacttgagccatctcccatttggatctattgatcaccaaagtaatcaaagttgtaagctaggttttgagcattaggagttaggtgatgagtggcacccgagacaggatactagctattatcattaaaagttttagggctagcatattgagttgatgcttcagcaagatgagcactccctgcaaaagtttgaaaagtttttggtcttgtgaatgacttattaaatctgtaaaaatatttgcttacaatttgaccaagtttatggcacacttggtattgtgctttttgtccccaagcaaaaaattatcctctacactaggtggtccccctctgctgttgctggcatgccctctgctctgaggtcgtctcccacgagattgtccttatggttgatgaagtccaaatccagatggaggataagatgcatcatagtagcctggcggtccatagtagggttgtcctctgtacacaacagaaggtggagcaaaatggtaaggtgaaatctatgaggaagagaatgtaccttgaccacctgtaaaaggtttagtgtgggccaaattggcttcaactttggcaatgtcaagctctcctttgtccttttctaattgaaattcttgtgccatgtgtagagcttcgaggaactgtataaacataacgccttgtattaacagatgcgactaagacattatattcattggacaatccattaaaggtagcttcaatgtgatcctaagtcgacaaaggatggccaatggagattaaagagtc

SEQ ID NO: 33532 - DNA, 2539 bp, Cannabis sativa
  modified_base (74)..(74): a, c, t, g, unknown or other
  modified_base (1893)..(1894): a, c, t, g, unknown or other
aactaagcgggctttacaattacattgttttagaaattcatatttagggtgttaaataacatacatggtagtanatctagatcctggtaaataatccccaataggaaggcccctaccaagttatagagataacaagtaagagaacctacaagcttggcaggtacaataagagtatagagctagttctcctacgaagatattggaatggggagcacctctaaaagtactaccagtgaccacctctaaaagtactaccgatctatccaacatagtcccatactgctcggcaatcccatagtatgaactagtacagctaatctgaacgtgtaattctgggtatcaactatcgaacctatgtgttatgcgatctataagaaagggattccaagtgtaaaaattgtatcgactatctcggaaagacactagggtgttacgttctgccctaagcactgtgggtgaccacccacattgattacctcaggatgctccttcttcttgaggggcagttctctcgagataatgtacgcgagccacatagtccacgctctcttcgttagttggaactgggaccttttgccacgaagaatacttgggtactttgtagtcacaagtaaattcatccaaggcaagaaggccaacactcctcagattaatctcgttgcataagaagtctaccgatctcagaccgaacggaagattcaacaagattttgtgacgctcagctatctcaggagtgggaattggtctttggggaaccgctgtgaacagataaaagtttaataagcgacgtcaaaaatacaaataattacatttcaaagttaagtttctaagaaagaaaacttacgtataatgcaaaaggcagttgtatttattggagagagccccgtcatccagaagaattcttctttaaactctgtcttgtttggcaacctaagtatgatcctgcgatcgccagtatgagtcctaagatagtaaaagcctcctgtagcatttttcctcgcaaggactaccttgaaccagtaaaaataggctatctccaaaggagtagggcactcccatcctaaaatatggtataggaccttcaagcacgcaattatcctatacgagatggggttcagctagaaggggcaaccccgaggtagttgcagaattccttaaactaatccctaaggggaagaaaagaaacataaatgatcataacccagaaaaataataaaaaaaaaaagaacaaagaagagtgggacacttactgtttgaagtcgagtagtcgtgtgatgaaaagtcctgcaaccagagacgaagtgaacgacgtaatgaattttttgaacacttgaggtcgaaaagcaaattcgaggaaatttgcagaaaaaatgtcaaagacaagaagggcatgcaaagtttcaggaaattaggatgagaatttctcaaaaaagcttaagtttttgaaaaggcaaaaatagtgaaaaaatggattccttacagttttatacttcaaacttagttaccgtcagatcaaaatgtaaaagatccaatgaataaaaataggagagaagtggaaaagatggttcattaatgctaatgatgtccctcgaaaccacaaactgccaaaattaaaggcatgcatatttttaaattggattatgaccgaaatacccacggtaatcgtttaaaaaacactttttaaagggcaattattataccaaaaattcggatgtacttcagaaactgacacgtgtcagtctcagagaatacgaataaataaatataatggtaattatatcattaaatacaaaatagaatatctcattgaatgcagaattaatagagaatatttataacttgctgactatattgtcttaatcgagatcaggatgtacaaactattgattcacnnattgacgagaaaccattttgcatcagaaggcataatcccaagggagacatagacaacgcatagcgaggcatctacctcgctgtatgtaaagaagcattgtcgaggtgaattggttactagaacatttagcgtataatatacattataataactaagtaaaataacttgaaagacatgattgtccagtctgcaaggccttatggtgaaagagcagttcttaagttcgctcagcacattggtgctcatgccattgctggaatgcaagtaaactaggtcattcacttatgtactaggcaaggcacctcagcgaaatacatttggtagcatgtccaaatccacatcagcgttgacctccttacaaacagtttaaatcacagctgtgtgattttttagtattaactgaacgtatttacatggagcgtaattaaggcccataatttcgaaaaatattgttatgggatttgaacttaaatgtaattaattgcgaacctatattactataaataagagcagattatacaaaaaaggggacgaaaaatcttagagagaaaagggaatatactgatggtaaaacccaaattctgtatccaaaaatatcttaataagataaattcgtgaactatgcagatttaactgcaaaaccac

SEQ ID NO: 33533 - DNA, 1950 bp, Cannabis sativa
tgaaatttctctctatatgtctactcctctagagatactggattctttactttttggcaactacttctgcgttagtcaggatgtaaccactagtagttaataaattgttggtacaatgccaaaaattgtatagaactttccataggctgaatatgtaataccctaagtttataaaatggattagcaaaaccctaactagttaattgagtattattgtggaattatattattatataatctattatatgtgaattagtatgagatatgacatggtaagaccccgttggtgagtcaggggcattttagtaattttgacccaagaagggtaaaactgtgaatttaatttaatacacgcttatggactatattattatatagtatgcctactttatcctttttcaagtgtgttctgacaagtcggagcggtatagtcattaccgggtatttcgggccgaaccggattcggggccgaaatacagtttggggattatttattggcatttcaattaactatgattaatttgaaatttaattgggcatatttacgtcgaaaaagactatgttatccttggaatgcttttatgtgttatttggccctagggggcattttggtaaattggccttttggattaattgcaacaaaaaggaattattttgcattttagaaagaaaattctgggttgttttctcagctcttggccgaaccctattcttcctctcccgtcaatcttttcacttcaaatcttcctctcttgtgtgttgttgagcttgttggagcttgggggattttggtgtgcttttattgtcagaactttgaggtagtttccagctcttatttctgaattttattgctttgattctgaaatgaaataggtatgaactcatgggttgtgttcttggattgcatgcttgtgggttttagattgtttattgagtttagccatggttgtattgtgaattatagggcttgctttgtgtatgctttgaatggtaaatttgaggatttctagttgctgagtttgggttagaaaaacatgctgaattttgattcattttggtgacttccttgtgtagcttctttatgtgtgattatgtgaattttgctctaggtttggagctttgattctatgttgtttgaatctgaatttctatgcatgtggactgtaattttgagctttataatttgtggtttagctccctattatggttgtttaattgtgtaagaggttatgttggattgatgcatgttttggctggatttaggtgtgtttgggctgatttttgtgttgctggtttttggtgttgttagagagtgaattaggtgtaattcttctctatttatttgatttatgctaggtgaaagtttactatgattgtgggctggtttagcatgaaaattagtatttttagatgcattttcgtggctggaaacttagtttcctgggtttttaaacccaatagccgcggccattttatggcagcttattttatttttttcgtgtttttgttttggtcataacttttgactcgagactccatttgggacgttctttatatcgttggaaagctcattcttgagatctatgtgaatatctgtaatttaaaagccaattttataatttgtggaaatggatttagggattaaccttatacttgtgtatcctgggattgtgattaggataaccgacactttctcaggagcacctagggatttggaatctccatatttgtgggacatcaagttagacagtagttagcacgtagagatataagcaatggcgcttatatgaaatatgatatatattagaaactagaaatcgggattagagttattactctaaagtgagcggtttattggcttagggttattaccctagtaaatggttaatatgtaattattatgccatgatgtaaatagatatataataaaattaagggttatgtgttcaa

SEQ ID NO: 33534 - DNA, 3221 bp, Cannabis sativa
aagaactagcccaatttgcaatccaaaaatcccagtcacaacccaatcctggtgatcctgaacaaccccaccaaaaccatgccttcctccttgtcaaacaaccctatcaatattcactttgagtttttcataacctagtttagaccatagctcaaccccatccaaaagataccaagtatcaaacgaatgaaacaaatttatttattgagcttttctccagtgattgagagtgatacgagccaaattaataacagactccacctgacttttcttaccctttcacaagagttaattccgcgcaaatcaaatttctcaaaccaacatcactacctaaacactttgttcctcaccagtcgtgagaacaagtgaagaaactagtccacaaatgaccctgcatcaactggaatcatagccaaacctgctaccctctaataattgcacaaaatcacagtccactaaacaaacacaaaattgattcaccttccccatgatgaagactacgatgcgtggagtagttataatggattgatgatttcatggatcttgcattctatctcttctactattgctgatagcattatgtacatggaagatgcagtgtgtatttggtgtaaattacaggagcgatttcatcaaaaaaatgcaccaaggatctttcaagttaagagatcgatgcagacaatgactcaaggtatgaatgatgttacttcatactatacaagacttaaaagtctttgggaagaccacaacctgtttgtacttgtggtgctatgaaaactatataagaatgtggtgctatgaaaactatacaagaatatcttgataaggacaaagtgtttgagtttctaattgatttgaatgaatcacatattaatgttcgttctcagatcttattacaagatcctctcccaaatgttaacaaagcttatgcagctgtgacccaaaaagattaacaaagaggaattataaaatctcaatctaaaactcctaatacctctagtgagaatgcaggtcaattttcaaggaatggccctagaaatatgagcaacaatggtaatagacctgtttgtactcactatggagttcctggccacactgctgctaagtgttacatggttcatggttatccaccaagccatctattgcatgggagatttcctaaggaaattccgaacaaacctgaaaaccatcagaatcgatctttggcaaatttttcagctgctaataattggcctgaaggtgttcctgaagatcaagatctgatttctcaatgccaaaaacttatgacaatgatggcacaaagaatccagtcccaatctcaaacatctccatctcaaccatttggattcccaactcaaaatgatcaatgccaaaatgatcacaatcaacaccctactgtttccaacatttctaatagtgttccttctattcccaaaacttgttggatcatatacacgggtgccacacaccatgtctgctctgatccttctttatttacttctatccagaaaaactctagaatcgattctgttggcatgcctaatggtgttaatgccaaagttatttttgttggaacaatttatttgcatggcattgtggtgcataatgtcttttatgttcccaaatttcaattcaatcttctctctatgtgtgccctatctgattcatctaattattcttttctctttttaccaaccaaatgcattgtcctgtacattactaagaatcaagtgattgggatgggtgaaagggttgtcaaccttcattaccttcatgatcaaactgtttcctctgtatcttctattgttaattctgaaattatattagtgatgaaaccttgtggcattataggcttggtcatgcctcttgtgtaaaaaattatcattgaatacatgtttacaatttcaatattcctcttgtccaaattttcattgttccatctgtcatttcaccaaacaaaagaaggtaccttttgtttttaatcataacatttctaaacaatattttgatttgattcacagagacatttgggaaccttacaacacacaaaccattgacagtttcaagtactttatcaccataatttatgattgttctaggtacacttggattcacctaattaagaacaaatctgatgcacaaactgccataccagccttcatacaacttgttaaaacatagtttggtgctcaaattaaagggatcaaatctgacgccaaagagctccaatttcctgagttattttccaatctaggaatcatacactaccattcttgtgtccaaagaccacaacaaaattctgttgtggaaagaaaacatcatcacttgttgaatgtttgctagagctctcttattccaatctcacatacccttgatatattggggagaaggtgtgagtactgctgcttacctaataaacagaactcccacactcaatttgaaacacaaagctccttttgaaatccttcattccaaagtgccaaattataagcaccttaaagcctttggatgtcttgcttatgtttctactctaggggctgtaaggtaaaaattctctccaagagctgatgcctgtgttttcttaggctatcctattggaatgaaggcatataagcttcttaaccttaacactaattgtgctttttgttctagagatgctgtgtttcatgaacacatttttccctttgtgtccacacacatataagattttttcccaccactactactacatatgtcaatgctgatcacaatatcaacgcctccctcaacacctgatgttgtgcatactgttgatatccaacaacatcttgacatcccttctgttggtagacctgttagataaactaaaaatcatcttacctacaagattatcattgttttttgtcaactaacaatgtccaaagttagacatctacatctgtcacagaccatgtcatatttgaaatcattgactacactagattgtctccacaatttcgagcccttgttcttgccatttctagtcattatgaacttgagtttttccatcaggctcatggcataccagtttgggatagggctatgtcatctggaattaaaaccttagaggataaccatacttggatgtaacgccccgatattttgccttattttacaaaaatactattttcatgcataatttgaaaagataaaaaaaataatttaaatacaacagtggattttaaagaaaatcaaaatgcaac

SEQ ID NO: 33535 - DNA, 1154 bp, Cannabis sativa
caaaattctatgcaaagctagggtttcaaaggaattgaaaaatttaccctatttcgctgttcttctcctcctcctcttccttcgactccctcttagtttggttttgtttggctcgtttctcagaaaataaaattcgggctttaaaaaaatttcttagttaaattttctcgagaaaattttaactctaaaattggaattttctgggtttttaccaccgctcttgatacttctctaatttctccactcataaaatctcaatccaccaaatttttattttttttttttttttgacatgaatgaattattattattattatattctcgtttttactgtttcgttgaattttcttaattaattaatataataataatagtaatacgtgttgattggattataaaaagaggatgaatctggaccgttaaaagatagtgactgttacgggcaggggaatgagctgaccgcgtggctaatctcgtccacaaaatgagtgggtccctcaaagtggctggatgagattaaaggtggatgatgaccgaattgtctgaggatatatatctgtacggcgatcaagctttcagctgggctccactccctcgaatatgttttggtacttttttgagagtttatggaaaagtcatcattttacaaaattttcttttcttttttttgaataaataaataaatcagatccaataggaagaaaagggacaaaccaaacaaataaaggccggaaaatttcacaaggagaagatcaaataatagtttcaaaagacaatgatgaatagaaaccataaacatctagacaaaatgatctaggcataccaccaaatgagaaccacaagagattgaataacataagggaaagggtgcactgctctcgaggacaacatgcaccctcctctttctaatcgcaactaccatagagtgtccaaaattggtaacgccataatggaaccctatggcatacaactgtccaagatcgagaattattaaggattgttaggcctttactgtttcattagtttgttattaccgttattattactcttggttggttagtttgttacaacagccatcttgtatctcagctgtatataaagccttgtacctattatcaatacaatctaataatacattttctttctcttctccc

SEQ ID NO: 33536 - DNA, 2157 bp, Cannabis sativa
aagagctaaaaatgcaactcgcaaagcctctcgtactctcgaaacctctggacggagaagaacttgggatatacttagttgtcacggagcacgctacgagtgccgtgctaatcagagaagaaaacaacatacaacacccggtctattacattagtaaaagactcattaaggccgaaggccggtacccattgatagagaaacttgcttaatgcttgattctagcaacaagaaagctaaggccctattttcaagctcatcctaattgggtctatactgaccaaccattacgccagatattgcaaaagctggatgcctcaagacggttactcaagtgggcagtaaagctgggtcagtacgaaattaccttccgaccccgaatagaaatcaaaggccaggccttaggagactttgtagtagaatgcacacgcaaagaagaaagcataccagaaagtaatcctaagccaatacaaacacctcaaccaagtaacagtgaagacaagccgactttgaaactacatgtggatgggtcggctatagatcaactatctggtgcatgaatcgcccttgtcacgcttggggggcaacacctacatgctgcagttaaatttggattcaaggcatctaataacgaagccgagtatgaagctttaatcgcttgcttaaaattagcccgtgagatgaaagccgagcacatcgaaatctgcagtgattcacagctggtggtaaatcatgtatctggagaatatgaggctcggggagaaaatatgatagcatatttgagaaaaatacatgacctgcttgcataattcaaaagctacggtctcaaacgaattccaagggaagaaaacacaactgtggacgcattagctcgattggcaagcagtaatgtaaatgacaaagcaaacttggttcctatccttttcctcgaagagcctagcattactggaacggaagagatcgaaatgattaatacttccccaaactagatgacaccgatagcagcctacctcaacactggggaactaccaggtaatcgaaatgaagctcgaaagatgaggtggaaggcagcacagtatatcatagtagagggaattatgtacaatagaggattctctatgcaattgctcagatgtgttactcaagaagaacctgcacaacttttatctaaggtgcacgatggattctgtggaaatcagtcgccgggcagagtttatcgaagaaaattctaaggcaaggttatttctggttgacaatgattgaagattcaaaggcctatgttaagaaatgtgacaaatgccagagattttcgaagatacctcgaactccgcccaacgagttaactcagatgcaaagtccgtggccttttgccatatggggaattgacctgatcaaacaattacccaaaggcaaaggaggagtgcagtatgcagtggtagcggttgattacttcactaagtggacgaaagccgaaccagtcgcaaccattacatctaagaaagttcaagactttgttgtaaagaacataatctaccggttcggattgccgtacaaaatagtttcggaaaatggaaaacagtttgacagccaatccttcactgttttttgtgcgaaccattgtatcatcaaaagtttctccgcagtggcgcatccccaagcgaatggtcaagttgaagcagtcaacaagaccctgaaggatacattgaagaaaagactcgaagatggtaaaggacactggttggaggagcttccagaagttctatggtcgtgccgaacaactaaaaaaatggcgaccggacaaactccatttgtcatggcatatggatatgaagctatgctgcccgttgagttccagccaccatcccagagaagattgacgtacaaccaagaagcaaatcatgtactccttgctgaatcacttgatgaaattgaagagaagcgaaccacagaaaactgaaagttgatagcccatcaacaaaaagtagctcggtatatcaataaacaagtgaaggctcggaaattctttgtgggagatatggtcctacgaagaatatttttgaacaccaaagacaacatggcaggtgtactcggacctaactggcaaggaccatatcaggtggttgaagttctcgaatcaggagcatacaaattgggtaagta

SEQ ID NO: 33537 - DNA, 1628 bp, Cannabis sativa
  modified_base (1049)..(1050): a, c, t, g, unknown or other
gctatctccagaggagtagggcactcccagcctaagatgtgatataaaaccttgaggctcgcaaggatcctgtaggaggtggattcagcttgaatggggaaaatctgaggtagttgcagtagtccttgaagtaatccctgaggtggaagaatcgctccaaccttgatatgctcaaggctccaagctccaacacccgaagagttactcgtgctgggaccactacactccttacgtataattcttttgggagcaaaacaactgaattccccaggtgctacagaccttataacgcaccttttccgcagcttaatgtcgcaagactgtaggatgccaccaatgtaggccctaatagacctaaccttggactcgatctacctcgaaggtataactggggtcctaaggggtctttcatttgtggggcttaggtgacatgatttcaaattcaaggtcacctggttcaaaagcaacagtgacgttggataaaaacattggtcttacgagtggaatagaagataaactaatgggttcaggccaggccgtgtaaagaccgcttagctttaatttggaaattaacagataattaggatttaattatgaaatttttttattgattttgaattattaatttacgatgattcatttgaatttagaatgcattttatatgtcacatacacaatttcataattttgcatgttttgtgcccgacaatattagaacgcggtatttggctattagaatcacatcttattatttttagtatagaggggcagtatagttagagattgggaatgtcgggaatagtcgagattttagagttgacaaaaatacccctaagtgaccttttatgacttttagtgtgggaaaggcaaaatggtcattttgccccattagctttttgtctttagtggtttaattttagttaattaatctgattttttttattaatgtgttggctgagattaatttataataaaagaagttttatttcatttttacaaaaattaggaaaaattcatgaaaagcttcctatctctctctctctctctcnntctctctctctctcttttcgaaaccttgtagaaccagctagggttctttgatttttcatcaaattgttgtgatttcctgcagctctaagtgtaatccaagctatgttaaacctcttcgcaacttcctctttagttctttgagttttaagtttggatttttgcatgattttgaaagatggagttctgtagctactgttagtgtttgttattgattttagaagttaaattatgtttagaaatgttgaatttagcatattttgatggctggtttatcaattgagcaagctttgagttttataactcaatcttggctcattaatggtgattttttattctaagcttgggtagttattttattgctttgaaaatgtttattggggtatatgtatagaaagtttggtaaggtttggaatcaaattggttagggtttggtttgttttgggatttctaggtaaaattggctaacggattttaaaatgcgtgtaaaaccggtcacccggattttgcaacagggttaccgaaaaatttaggttgtagattcgtactagtttcaagtttttggttggttaattccctgc

SEQ ID NO: 33538 - DNA, 4448 bp, Cannabis sativa
ttgttccaccagctgctttcgttcattaacataggctatagttttaggaggacaatcagaaatctcaatgtcaactaaaactctagcatatttaatcatagttctactttgagttaccttatccaccataataggtttgcctatagtactcacaagagcacttaggctattttttccccaatattgtaacccaaggccattcaaacgcacccacactggtacagatttcaccattctcgctgtatccatatcagtcgtccacggcctaagtatcactggtttcttatcaaagtgaataaccccagtttcaagaataagatccctggtttcttcatccctgaaactcaccaaagtgaatcccgaattcatcctagctatcctctcaattcccaaattcccccaaatcctcttgataaacccttcaaaaaccctaaaaggaggattagcccctaatacaatgcaaacaattgaatttttccacaacaaagcctcagattcaacctcatccaaatccaattgagcaacaatttgatcccctattttcataggttcagtaaaatccagtcgagtagagggagtacaaacctgattggctttgaatttactccaaacatccctggctttggcattaaaatcgtctctctcagcatcatcggcccagctccctggcttcagcacattcgacttcccaatcggactctcttcgacaaaattagattccaggttttcgcaggtatcaagaaaaacctcagggacatcctcttcggcttggatcgaagggagttcaggttctattctctccatcgtaaccggcacctcctcctccgctacagtagctgcgatcttggtgggcttcgaaaccgcccgtttcttcttcgccatgagaggaaacagggagcttcacacgcccaaaattctctgtgtttgtcctttgaactttgatatctactaaatcatgctttttgaatttttttagtcattaaaattcccaactattgaaattgttgaatttaagtacatttatttcttctttaaattcttacataccatagtactagtaagatcttggattttcttttaacttcatcgtaatttttcgagttgaagtagtatgaacaaactcacgttacaaatggaggcttgaaaggaagtatttaaatatggaagaaaccctagagactttcttcttgtatttgggctcggttttgggccacttgataatgctactagaaggtgggtcgggctaattttgtttaatggatttttttttcactaaatagtttttttttttggtaaacttactaaatagttaggtgataaatctataaattggctgattcattggtattttcctaaatataaatataaacatctattaacaaagtgtgtttacccagattctgaccttagtgatgtggatataaatatttgacatgtggcaagaaagaaaatatcccagagttgtgtagtcccgagtcatagcagtcgacctggaggagtccctagccctacgcctaggttgactccagggattacaaaatgtgtgtttcgatcccaccaacttatttctaactcaccatttttcagtattctaaatcaagaagacaagaaaaatcaagtccaaggcatgaaaactgaaaagagacaaaactccatcatggaaggcaacccgggcacctagggttttcacctagcacccaagttgacatcccaactagggttttagtttttgggttcgtcttagttcaaatggctcaaactttgtactctgacatgaataagacctgtcacaaacgtatttgaggcattataatcaaaatcagagcactttaatttttgagcacccaaggcaccaggtgccccaagaaccacccaggttgagatgtgacttccaaccacaacattgaagaagtatcccaagcattttattcgtcttcatcaaaaatgaagtatcaaatgctttcaggaaagaaatggattagtctggaggccgaaacggggaccgagcgcccaggttgacactttgtcaacttgggccattttccaaaaaaaaattggaagaagtcttctgggaatattctctattttcatcaaaaattaagatttgggtgctgtcagggaacaaacgaagccatttgggagccagagttggggcctagcgctaaggttgacaaaaggtcaacatgggccacttttaatcggtgttttagaagtttttcgggaatatttgtctttttttcaaataattgagatatgagtgttttcgagaaacaaacaaaaccaacttgtggcaaaaagttagacccatcacccaggttaatattttgtcaacttgggatatttccaatcatttttcccaaaatgtacttcgaatatcttttttgtcataaaaaataacgaagatccaagtgatattggggagtagacgatattttttaggggtttaaacatggacccagcacccaagttaacaagggcacaggaccctgcacctaagttgacatgcacctggtttgcatgtttctgctcctaaaacacaaattcttctttggatattcttttaattttggccaaaaacttcctgtatttttcctctttttttttcttaatactagaagttgttgtgaggctggactataaaacctattattggaggaaacccataccgactccgggttagagacgaggtctaaggcaacatctacgttgagaaggaaaatccctacctaggactccaaccttggaccccgtctcaaacacgggacttggacttggaacccactcgtactaactacaatctataaagaacaggtcttagataagcattttctttctcaacgttgatccttctcaaactcggactcggactggggacccctcataaatgatccatcattatcctcattgccatggcctagatcctcatcagaagtagggtttagggttttggttccaatctttgtaaaaagtcatacatagaaaacaaaatgtgtagattaattagtgtgaataagattctaacatcatcactaatcttgttgttcaaattgatccccaagatcctatatttaacattttttttaatagtattactaatactagctgctgaacgacaccaaaaataaaaaatacaatgatttctattcagccaaaggagatacaatgtggctgtcaaaacatagttccaaaaaaaaaatacgacaattacacattacgagaaagaacactgcaatacaattataagtatcacattaattagagaataataatgagtacgtcgttccaacaatggatcagtttccattagaaaaaggaattgagtttaaatttttcaaagaggcacaactagaaacaaaaagcaaatgtcaaaattacaatacaaaaagatgtttaatgaatggctaagctctacaataattcatcaattcatatgtataagcacacacagaatgtggagaaaaataattaattattgatgaactcaaatttaaagaaacaaaggctacaactcaaaaattctaactacaattacacctcttacaataataataagaaaactaaccgtcaaaggagacgagagatgagggacggagcaagttttgaaagaggcttcaagggagggagaagagagatgagggttttcaaaagttgtaaaagagggtatcggttcaagttgctgttaccgtatgtttaaaggagaagagagatgagggagggagaagttttcagaagttacaaattaagggaagttgagagtacttggaagttggaacagtttttagaagttgtgaaagaggggaagttgagagaacttggaagttagaacggtgaaagaggttttaagttcaattaccgttgttttaggatttttaccgtgtgctgttgggtcgggttgggttttcaattcagttcaagttggtgttatcgtgtctaaagcctaaaattaaatagtcgaccggtttgggttgatcagcccataaattgtacaacccaatttatatacactttatattgtgggcaattttattttgtaaaaattatttagaaaattataagagttaattttttatggcataaataaataatgatttattttaaaaggaaataaataaataatgctttgagttatgaatttttttaatttcttttactttagtgtggactttttttagaaatctcatattttaagtttttcttttgaaaaaattacattgtatacccactttttatttcttattttgtttttacttttcttttattatttattaattcatactcaattttataggtaatatcccaattatgtgtgttagcgataggaatgcacatttctcccgcggggaatgggatggggctccgtggggacccgcttctaatgggacggagatttctcgctccatcctcgtccccatctagggatggcaattatacccgcgggttcgggtacc

SEQ ID NO: 33539 - DNA, 2637 bp, Cannabis sativa
ttaagatatcctacaaaattttaaaaaattcgaaataatttacaatatagaaaataatgttcaaacaatctattttacaatctatgtgcaacacactgtttgaacgcaattttcggcgtgttaaacttttctgaatttcttaaaattttaccggatgtctttaataagtatgatttacatgactatgagaaaaaaattaactgaaaaattatttcggatattaaaatatataaaaatgtatcaatatatcccttttaagtggtgcattgtaaaatttctccatcttatttcttaaattattattctatatttagaaaagaaaaaacaaaaatgaaaacttgagagaaaatagaaggaacaagtgaagtgtctagaacactccaaagacccattgattgttctttccttaaagcccaagaatttcacaccatttccttccgccattgttgtaccttcaaacacccacactctaaacgctctaaagttcccaaattgatctctgatttttaattttagggctaataaaagttgttttgctatggcgggaagaggaggcggtagaaccaggggtttgttgccatttctggcacttgaaaccgtcctccattatcaaaggttggagaggaagcctcccgtcactgccggacttatggctgccaattgtcttatctatttgagacctgcttttctcgattcgattcttcctaccattgatgaagtctggttcaatcctcgtctcattttcaaggtaccgatttcctttataatctttaggagttttgattgattcttgttgttattatttctgagttcttaaggtttttaagaattagaaatttggggataattgctgtgtgttttaatttctgagttcttaaggtttttaatccattataacaatcatatatataattatgattaaagaactttttaattggacataattttttttccccattgatttagtttcagttaaatttaactgaatttatgatttgagtaaactgaaagaatttatcaaagaatcagagaaattgtttggtaggactgatatttttcatggtgttttagaatttctttccttaccaatttaattgtatggtttgtagtttgatcattgatgatcattttaagtctgggaattctctgattttgttggacacaattaaactctttgaatttgtaatgattgggtgatcatcattattagtttgatctttgataatcattaagtctgggaattctttgattttttacgtttttgaatttgtagagttactattagtttcatatgagtgatcatcattattagtttgatcattgatttaagtctgggaattctttgattttgatgaactgttgaaacctttgtatttgtagactaattattaacttgatatggttcattaattcgaacagtatggggatttgaagcgatttttcttgtcgccgttctatcacattggcgagcctcatttgttttacaacatgctgtcactcttatggaaaggggttcagctcgaaacttcaatgtcgagtgttgaatttgcatccatggttgcttctttgcttgcaatgtcccaaggaataacccttctgcttgccaagtcgcttctattgttcttcgattatggaaaaccatattactctgagtatgcagttggattttccggggtcttatttgccatgaaagtagtcctcaacgcacagtcttcaaactacaccgacgtttatggactcatagtcccatctcgctatgctgcttgggcagaactgattcttatccaaatgtttgttcccggggtttccttcctcggtcatctgggtggaattctggctgggattgcttatcttcggttgaagggtagtttttctggtcccgacccactctctatcctcattggagctttcagtcaaggtctcacgagctttgtaacatggccaatgaggattgttaaggacttgtttcgatggaggagacgaagaatatctggtaggggatatgttggagggggcgggaataggcgaggaagagctgaatctcaggccacttggagatgccctgcttgcacctatgataattatggcttgttaagcatatgtgagatgtgtggcaccagtaggaatggggatgatttatcgagttttagtcctccattttcgaggggtttggatgatcgcctttctctagatgagctacgccgaaggagaattgaaagatttaacaggtaaagatttaatggggttttgatgtatttgggggttagagactatcatatagtttggcaaagatgtatatgaagaaatcgaaattgatctgccattgatggtttctcattccttccctgaattaggaatatacacacaaacagagcttattctaagaccaaactcttcaactcttaaatggcaaagtttgatgggaaaatattcgataaatctcagataatggcagtgtattttttttttcattattcaacgatatagaaaggatgtcctaagttagagagtttaattggtaaataagtttctgaactgcaaatttagtatttgtttttgggcttttgaaaaaaaaatgtatattttaaatttgtaagtttgaatttttctttcccagaaatggaagtatataatttt

SEQ ID NO: 33540 - DNA, 1786 bp, Cannabis sativa
aaaccgtaaatttgaaaaaaaagttaaaaaaatagtataaggggtaattctcctataaattattattatacctatcaataggtaaaaaatacaatacctattgtttggagtattcataaaataaccgatccaatccaatctgcacgatccaatctaatccaattaaattagcaaagtacagatatctacacttatgcgaattggattagattgaaaaattcaaaatccgcacttgtggggattggatgttgattgacatgtaaaaataaccgattcaatccaatcacacatatttatttataaaaaaaaatttaaaaaaattatacaagcaaataacatttttaatgtaaagaaaatagtaatttagaagtgtaatacatataatacaattatattttaaaacttaatagatcaaatgtatattctattcttacatataattcttttttacatacaaattaaaataaaattaaacatttctttatacatacaatattttttctttctttgaatttataatttgctattttatttattttgatttgttgttggagacataaaataataataatttattttattttgtgttatgtaattttttttcttcataaatattaaataatttattattcaaaagtaacaaattcaaaataactaatccaatccgcagttttacgaattggattggatttgagttattatggggattggattggatccaaaaaataaaattcgcgctcagtgcagatcagatgcactatgaaaaatagggattggattggataaacacccttacaattagctctttgtatatatagggtaatacctagtaagtagagaatttttttaccattaattttaaattatgtaatcattaagatatgaggtgtatatttttacaataaaactgcttgtatacaattaaaactttgtacgtattataataatatttaattatatatttatttttttaaaaataaaataatagtaataattaaaaaattattaatttttaatttaaattattatataatttatatttgtttaaaattaatttaaattgttttttgtataagtatttattttcaaaaaataattttatttacgaagtttgctattaatttttttatactaatagttagctataataaaattgattacttatttttaccactaatttgtttaaatatataattttactataattatcttttaaattaatttgttttattaaatttttttaatcaaaaaagatgatttctattaattaaaccaaaccaactacatccacaaggagattcccctctaaaatagaaacttacaactctttacacttttaagaataattttatctatgttagacaactttttttcctgtacaagattaagtatacttttgaagctctctttagtgctactatctatacaactcaaatccacactttttcttatatatatacacaaattttagtttagccaatgctataaattacacccgttaatacattcttatgaacataatataatttttataacacattctaatatatacatttttatttttaaaattatgtgctttttaaatagattttttttcaataacaaaaaaataaaaattaaaataacaaagctcattaacttaaaataaaaaaaaaaaccaagtccattaatgtacaaatgcacgccttgataggatttataaaacactcaaagaaatatataaatcacagatccaaacatattcctaaaagtgctttaatatagaaaaccctaaatcataaatcta

SEQ ID NO: 33541 - DNA, 2020 bp, Cannabis sativa
  modified_base (29)..(29): a, c, t, g, unknown or other
  modified_base (203)..(234): a, c, t, g, unknown or other
ctagctttttgatgagacctcttccttcntcttcttcctcttgaattttcgaaacactaagcctttcttcacaaaaatattattcggccgttagtgattgagtaagtgcccacacacatcaagttgttcctcaatcatagtgtgtaagactgtgaagaatccaaacacaagttggtccttaattccgctgcacccactgtaannnnnnnnnnnnnnnnnnnnnnnnnnnnnnnnttgttttagagattcatatttaggatgttggaaacatacatggtagtaaatctagatcctggtaaaatatattcaaatagtacacgcttaactcttctttgtctaggggtttgggcaacataggtggctgagccaattgtttcttcagctcttggaatatggttttaaattcctttatccactcaaatattttgttgcctctaagaatgttgaagaagggtacacatttgtttgtagacttgaacacaaatttgcttagtgtagtaatgtgtcatgtttggctttgtacttccttgatagttgtggacgaattcatacctaaaagggcttggatcttgtctaggtttgagcttcatgttataatagcgaaggattttgaagcattcgtctaagtcctccatatgctcccagcctttttggacttgacaaacatgttatccacatacacctccatgctacgaccgataagatcattgaacattttgtttacaagcctctgatatgtggcccttgcattcttcagccctgaagggcatgactttacagtaatactagcctaagtctgtcatgaagcttgtatgctcctgatctggtggatgcatcttctttttcttggctttagacaaggccaagttgtaacagtgacgacatattattgatctcctctcgacatcgacctcatgtcttttgggggaatttcaagcaaaagtagtagatggatgttaccgccttcaggttgtatagggctggtcagcctatcatggtgttgaaagccgaggaaatgtcgattacaatgaactatgccattagagttctggtagttggattttctccaacagtgaggggtcatctgatatacccgatgtgtgcgatgccttggccaaagaggccatacatcacttgattgtagggttccaagtcagcgagttagagcctcatcttttcatatgtcgatttgaaaagaatgttgaaggaggctccattgtccaccatgtatcttgctaaagtcatattcccaatttgtgtagtgacgatcagggagtcattgtgcaggaaactgacttgggtataggatctctttttgcaaaagagatcgtgggctctccaagatttggttgcttagagtctcattctttgcctgccaggatgttgcttctgggctcgtgacagagtattcgagcatagcactctctagctttactggtctcgcctgcaatatggggttcgccattgacgacccctaagtgtcctgccactggaggtttgggtagattttttggcacctgcctatccgcctagcaagagatggaggctaggctttgtagatggaggccaacctttgaagatggaggccagccttcagagatggaggccaaactttgtactgtctgttgttgtcttgccctgctgggacgtctggggatgctttactttgggagtcttggtaggagagtgaagcatgcacacttctcctccttctcccttcgacttcatggcataagggaatcgttgagtttccctctttcgccattatgttggttagagccatcgttgttgcgctttcctctaccattctcattattggagaatcgatagaaattgtctgtgatggttgacatgtcagacagtgattggggcgctatgaggccctgtgtttgtttgtcattgacctgcccacttgtctgggcttgctggacaacttcttccaacttcatgaagccatcagcttgctcaaggaactcctccatgttgttcattgagatctcctgatatctttccagaactc

SEQ ID NO: 33542 - DNA, 1569 bp, Cannabis sativa
aaagaaacattgtctgcctcaagctgcgcggtcgagggcatatcttgcagctccttggtaagctcagcaaccttggcctcgaaagtaagaagtttattatttgcctctccaagttccttcctcatgacctcgagctaggcccgcgcatcttcaacgtccttcttggccaagtccacatctctttgcatcgtgctggaggtggcaagattcttgacaacagctgacttagctcgagagtaggtataggccatattcacaccagcctgtacggaaaatgttttaaaatccaaactattcaaagaagaatgaaagaaaaaggatagagagaacttactcaagaaatctccttcaggactcctcctacgaccaactccaaggaaaattcactgttcactccggtcagatgttcactcacttcaggaagcgaccaagccatgtagtgatgaagcatatctttgcctctctaggcttccgtgcacagcgccagggttgtagaagccctaacgtgctcggatccacctctgacctgctcagatccaattttagcttgctcaagcccgtccgaactccctccccaagaacttttggactttgagaccttctgggttgaagggtctatagtacgtttctccttaaagagatcaatgaccacattagtcgacattttctccttcgacgggatctcaccacccctagactttttggccggagaacacaggcccgagctatctcctactctcttcttcagagcctgaatcatcttctgagacatttctgcatgaataaagcaacgaagtcagaagaagacataaaatatgtgaagacataaaaatcaagaaaaataaatgcaagttgaggtactttgcacgctgacgggggcgttctctcaaacaattatagatggagcgtcgtcatccgaagagtattcttgctcctccaggacggcttttccttttccctccataggggtcgttggccgagcaggcacaccaggttccctaattttaatggtacgctcaattggcgcctgctcagtcgggagagttttcttcttcttgcggagcctctcctgctctgaatattcttgagcatccttctcctgctttgaatattcttaagcatattgtttggctccaacacctccctttaacttagcctcacacttaaattgaatgagctctttctcctgctcgacatcctcagcttggctcgacctggatttcttcttctccttcacgggctgtggtacaaaatctgctgggtaaagtttgttctttacaaagttggcctctgtggtcaacaaagtgatattctgagcatcctccgccagttggagaattttctgggtcctttccctaagcttcagcgtgaaaggaggacgacaatatgcaaggatctgctgaaatcgagtatgagtagtctccatgccagccacgaagtaatactcattaacagaatgccctatttttctaacctccgtgtccactgtgcccttcagccacttgtcgtccagctgagagaagtaaaagtaccctgacttgctctgcttgggagtagacttcaaatcaa

SEQ ID NO: 33543 - DNA, 1255 bp, Cannabis sativa
ttaaataaattacattgagttcagaactcatactaatctctttatttactgatgtagaaaagattgtgcagcctaatttttttacatctatataattggttaggtttacacgaaaacaaaagtcgtgactatccacattattatggaggtagtaacaaagaggaaagcaataatattaactcatctctttacttattgaagtggataattgaaaatggagattttaagacctaattcacaatctatattattaatatataaactggttaacttgaatgtttagaaacaaattagattcaatttgatggcatgtttttaaaatttaatattaaaatcaccataaattttaaaagaaataattttaactatgtgccagatcacttgggtcattgtttggctttcaatataattcggttttacatggtttgattctttgttctcgttgggttttaatagtattattgtggaatattagagtttgtttggtacgtcatattataccgtattgtattgtatagttttatattaaattgtattttatgaaatatttttatgcaaaactatatctggtattgacttttatgagcacctaaatatataatattttagtataaattaaaatttaatatagtagtatataaaataaatatgatatataatccaatttaatataatacaatacgatttaatacggtgttccaaacaaactaactcgtgtgtgttattctttcgaataagatctctcttttggttgagtttggtttggttcttattgatattttagctttttgtgatagattttttcactgtaatcgtctatcaattctttagatcattagactaattagttatattatctttactcttctaagatttggtggacagatctctcctcttgtattgctcacaaagtaaagttttcattctcttgagaaaaaaaaaattattatgagatggtttgagattatttatataagaaattttttatatgtgataattataaatattttaaatataattagatttaattattaaataattttaattttttaatttaattttttgaaagtaattgtcaaaatctcacctatataaataaaaagccagtttagaagagtgctagtggaatattttgtaaaaatagtattaaaaattttattaacaaactttatatggttgtagaaataatcataaattatattatgagaccataaatgattattatagtctcatttttttttgaaaatgaaatatc

SEQ ID NO: 33544 - DNA, 1760 bp, Cannabis sativa
cacatgaatgtatgatttgatctgggtcatagtagatcatttcacataattagtacacttttttccggtaaagataacttacacaatgaattggtttgcagagttatatgtaaaagaggtagttcaccttcatggagcactgaaatccattgttttggatagagatttgaaattcacttctaagttttgggaaagcctttagatagccatgggtacaaagttaaagttcaatacagcttttcacgctcagacaaatgggaaatctgaggggacgagtcaaatactagaagatttattacgagtttgtgttatggaattcgagaattcatggagtaaatatttgcctttgatagaattttcctataacaacaactattagagtacaatagggatgacttcctacgaaatgtttaggatgagaccagagaaatgtaatatttgagtcttgagttagttcaacagactagtgaggtaataaagaagattaagtatcgaatgcttgctttgcaaagtaggtagaaaagttatgttaaacctaagtgcagagacatagagtttcaggtggtagaatctattttcctatgagtctcaccaatgaaaagtgtaaaacgcttcaaaaggaggggaaagctaagccttaggttcataaggccatttgagatacttgagaatgtcagacaggtagcgtattggctagccttaacaccatcattgttgattttgcataatatatttcatatttcaatattgagaaaatatatatcagacccgactcatgttctaagttacgaagccctagaactatagtcaaatctgtcctatgaagaacaactggttcagattgtcggtaggaaggaaaaggttcttcagaatttggaggaacagttataaaggttctaaggttatatatttataaaggtttaaagtttaactaaaagtttaaatggtatgattttcaaaaaaatcttttaatttgctaagtcgtgcacaataattagaattactgtagcggtcctaagcaagtagggcattacaactatgtacgcatgtgtatacgttacaataaaaccttgaagccaatacagtggtaatccagtttgcatatattagtgatatcaaactggtacctcaaaattgtaaagaaaaaaaatatataaggaaattttaccaaaaaaaaataaaaaaaattaagtgtataaaatcaaaacagaattttactgcaaataacctacctttatatttatacaagagagaatcaaaattacaatactaacaaatttcaagaaaataaattaactatcagtaataactaattaaactaattaacaaaacacgtgtattggcttaggggctaacagatattgatgtgagcactctcataccgactttatttctaatttttatttaaaagaattaataagtttgcgtattaattatctaattgttaactttaataagaacaaatataaactattatatcgatatttttttatatataatatatataataatatttttatataacgtcttaaattatgattaaatattttgtgtatttaggggcactaaaaactaaaaagaaagttcaaaattcaaattttaaagtttatcattttgtgacacttattgaatatgtattaattgaaatataataaacgttagaatagtctataaaaaatacccgtttaaatgtatttggtgctggatataaattttaaaaatatcaaacaaataaaaaaattagtaattaattttaaaaa

SEQ ID NO: 33545 - DNA, 2524 bp, Cannabis sativa
  modified_base (1438)..(1439): a, c, t, g, unknown or other
gtacgatcctcgagacatcaggaccttttgttgtttagtcgctaggcgacaaatattttataaaaaaatagtaaacttttgtaactgtattttgtaaacgggatcccagaattttataaatgtaatatattatgttttaaataattaagcaaaattttaattattcacgatttccaataatcttgttgattagcaacgagctgctcagtacgttaaaaatcacgataatagttagagtgttacaaatcaaggggtggaagaagatagatcaagatggtgagacactaagagtgagagggacagatcgaaagagacagtggtgggtttttggtggctagttggattggggctgaagtggaggtcaggtcagggtgtatcgtaatattttaggggtcttgggtttgaacctatgccctctccctttttctcatcccttcttcaccactaagctaacctcaatagcttactaatgcgtttattaattatctcattattgtgatgctattgcgtttgcatatacaaatatataatgtatgtatatatagttattttatttcaaaagtgtacatgcgttggctagttgtaccgtatcagaggtttttgtgtcatcttgggtgtttttatgggtcaattaagattatcatagccagtggcagaatgaggctccacttcaaggagaggccaagtatgaagattttttcttacaataaaaaaataattggatatttatagtacacatatattttggttggtcctctatttattttgatattcaagagagttttttaatttttttttaatgattgtgtgcgttgtagttatctagacccaccaataaattttaaaaaaactttgaatagtttacaatgccaaaaataaagtttaaatatttaattgaaatcatgactattctttttatatgcatgataaataattgtttgaagtttgaactttactttcgacgatataaataatttaaaattttctaaaaatttaccagtgatcataaataactataacatacatgcttaaaagtttcttatgaatggctaaatagataagaggtccgatgaaacacttttttaagaatttctcagtgatttttcctaaaaaattcagtacttcttcttataattatatagttgtaatttttgtttttgatttgttttagaaagatttatttatttatttatttttaaagaagaacctttattattttgtattattattatttaaaaaaactaaaaaccaaaaaacaacaaacaaacaataataattaaaaaagaataatatttaaagtcacattccaaaacaaaatgggttagtctaattcaaatactcattgacccttttttttttaaagaaaacttacaagaatattaaaatttatgttaatttttacaaaaatactaccacatggtttttttttttttttttnntcaaaaatactattttttttaaaacaattgtaaaataataaaatcaaaaaattaaaataacagtgaaaatttaacacagtacattggtcaatttagtcagatatagtatatttttacaaatccaatgtaataaataccaaattacaattatttaattggaacccacctaattaaaaattaaaaaataagcttaacttgtctaatatttttgttaatttggtcgagttaatttgtctaaactaattttttattattattagtttaaggttttcaaatattgaaattgaaaaataaatatataacatatatatttcaaatttaaaatgtcatagactaaattaaaattaaacaccattgattgaattaacatcaaactatcaaacaaatattcactttaagtaataaaaaatatacatggaaaaagtacattaatatagtctaaattttaactttaatatccaactacaatcaaaattattaatccaatttcaaattaaacactacaagttataaattttaaattacaaatagtttaatgattaaaaataatttatataatatatcataaataatcttgataaaaattataattacctctttgtcactcattaatactattcattagtaaaaaaaaatttatatttataaaatattaaaattgtattgtcattagacacgagtggtgcctaacacaatctaaacgtgtcatcttataattagttagcgatactccctaaaaattattacattaaatggaacttgatacttaattacaccaatgtacctagcacccttctcagtattataccgctattagtgcaattaagtatcaagtaagaaatattgctaaccaatcgtgaagtagaggtgttcgcggtgtgggtggtgcggtttttgactattttttcaaaccaacctgcacatgcagtttttttaatttcccaaactgcacccgcaccgcgaaactaaaaaaaatcacagaaaccgcaccgcaaaaaatggtgcgatgcggtgcggtttccgcaatttagactattatcaaataattaaactatcacaaatataataaagtttgagcaacactt

SEQ ID NO: 33546 - DNA, 1916 bp, Cannabis sativa
accatgaggtaaggtatatatatatatatatatcatatataatccgaaagaaattcatacaaacagaagagaatgtttgggtttgtgacttattttgtgcagtgatagtgagccaattttagttgacatttacttactttattgcatatttgtctttgttcgcgatattatgtggaaaatccggtttagtttagcggaaagaatgaggctttactaataggagcacttgttacgattacatgattttcttttattaatcttgattagcattaataagctatatctatttgtatttggtatttttttccttttgtgttctctctttaattataatgtccaggctataattacatgacttttgagtacaataattaagtgtgtagccacttggggatagcttaagtggttgggtgtgtgagtgtgtaagagatgtatagcgggatgggttgaaattcatattataacatttgaataacaatgtgtatattataggtttatatacacaattatgacattcttaacaagtttactttcataaaatatgtcgtttataaaataatttataattagttaccgaattcttaaacaaaaaccactagaacttaaataaaacaaatatttacgtggctcgccacgtaactttcacctagtattatataaaatgtggctatataacaaaataattctagttgggtggtgactttttttttttttttaaaattttgtattcaaaaataatatttattatgttaaactaaacgtctttcattaagttttttaatatatatatatatattatatataaattaaattcatataaagtaactttacaatcgcaatatgttaaaccctaaaatataaattaaacttttcaattggcagccgaagatggtatacgattgaagcctacctctgctgtaattcatcttctcttcctctgctttctatctacaaaataataaataagttcattttttttccaagtttctaatatgaatttgaaggaacagtaaatatatgtgttggatcttttgtttttttttttttgaactgatatatgttggatcttaaatataaatatatatataatatattttttgatatacgaaggaaatttcgaaatcatttttttttgtggaaatcgattttcagaataggaaagttagtgaaagttagcaggaggaacaaagctcatgacgaaattgtgactctatacaaggtatatattaatttgaattgaaagcttgccttctttgttttttattcattttctttagtacgttgttatttcttgggttaaattgttcttctattatttttttttcctttcgtatttggtggatcgcatgaaaagtttgccataaacttttataaataattctcattgatgaaaataattttgactaattttatcaagaattagttatagaatcagttagattctattgtcggttatgttagttagactgtgtcagtaatgttagttggttttgttatctctctgtattcattctctgcctatataaggctctctattgtatttctctgttctaatatggtatcagaagaaattgcctaaatcttcaagctttttcacgctttcatccatggtgaggacacgagcaactatcttggctacttccaccgatcccgtggtcgatgcccctgctccgatcgatccccaaccatcttcagacttccgctgataacaataacaatcaagctcagtcaccagctcctccacctgttcaacaaactcaacccgatcgtcctgcctacgaggacatcagaagtccctattatctgagtaatgcagaccatccggggctcgttcttgctactccaattcttacagatcgaaacttccaaccatggcgcagagacttcaagatctccattggagcccgcaataaaac

SEQ ID NO: 33547 - DNA, 2822 bp, Cannabis sativa
gccgttaactggataactgttaaatcccagcttgctctcttgattgatggccatggtcggagaagatggaacctcgaacgatactcgtggtcggcaaagatggaacttgtattggcgctcgttgtcgattgatgggttccgtggtcggagaagaaggttgcgttactttctctctctccaactctattgcctcctgtttaagatttgggagtttattttataaataatttagttttatcttttagttttaatttatttgtaaaatcttattagaaaaaaaaaatatttgttaactttttttttatttattttggatttaattgacgtggcaatttaatattgatgatgtgtcattattttaaatgacgtgtcttgccatctgtcactcaacgtggcagaaaacggcaaggtacctacggaacttccaaaactgtaacacaaggtatttttaccgccaaaattttaacttaagtattaaactgcaaccattagataaacttatttacgtcgcaaattactctaaaaattattaggagtcgtttgtcaaaaatatttaaaaactgttttttaaaaattgagttttaaaaaattagaaaacagaaaacatcaaaaatgatgttttcaattttcaaaaacaatttttttgtttaacatactatattttatattttgctcacatactcggattgtagacctgaaaccatgcccgaacctagacccggatgggttaatgtcatggcatggtgctaaaatattgatttttttttttcgtaaaaaaaaaaaaaaaaaatctaaaaacagtttttaaaaatttgtgccaaacaccattaaatttttaaaatgacaaaaaattgttttctatccttacttttaaaaacacaattttaaaaactgaaaacacagccaaacaaactcttgatttttttaagggtttttttctataataaactaataacaacatcattttacatttataccctataaaggaaaaataaatataaatagaaaataaaagtttatatttacaaaaatagcagcctaaccaaaaaaaaaggaaactcctccttattcgtgaaccagtcaaaaacaccttaattcacaaattctccattgttttatttcaaaaatcagggaaatcagctcaaattaagatgtagatctcaaggaaaaagcaataaaatctcgaaaaatccaaatacaaaaagggaaaaataaagaacagagatatcaacctccaaaatttgataaaagttcttaaattcaacaatctcaaaaattcaagagtataatttggtacaggctaaattttaaacaaaaattctaattaaccaaaatataaagtgaccgtattagtgtgatatgtgaaaatagaaaatgttttgggttaaaatttaaagattaagactaagttagggaagcatgtgcaaatataaaagagactaattacgacgacatttacgtaacgacaggtcgtttcaagctcatcactctattcactcactacttcctctttctcttcttctctcttcatttacagagctctaatcctctctccaatggcaatgcaatccaaattatcacaccaaaattcatcacgtatttcctctttctccctattttactatcaaattcttcgtcttcatttttttccacttttttttagttccttactttgttttagcgatcatttcgacaactgcttgatcttaacacttcgaatcgaaaaacgtttttttttcttttgatgaattggaagttatgtcgtattatatttatcctttgtttggcttccgagaaaatgaaagaaaatattagaagaatgagacaattttagatacctacccatttttagctagataacaatgattaatgtcaacattgcttgtgttaatgattaatgctccatagtttattttccaggcacctttacctgtaatgtgaaacggattgaaatgacttcaaggaagttttttgcatcaattactgcagaagaagacaaaccctttgattttctccgtgctttatacggtatgaaatcactatgaagttcgatgttgagtcttccataatatgttgataatcttgattttcagtaatgcaatatttgacatagtttgttatatgtgtaaaaataacttgatctagtttagaattccacatatttaatctatttttctactggaaatttgactaaaatttgtcttttagtctactatgtctggtattgacttgtatgtgatacactataatattttaatataaatcaatattcacagtgttatacaaaacaacgatataaaacacaatatagtatatacaatacaatactatagtgtaccaaaagaatccttaatgtactgattactgcacttgttatttatgttgagcattgtcatatagttcttttggtactggctagcattgtcatatagttatgagaaagtggttgttgtttccaatcctatactcaactataaacttttgctataaagtacagcttgtagaagaaccattttgttgtgggatgctttttgagtcctgcatccacttccactcattcatttaagtttgaatgaatgactaaagattggtatgtttctctttgttatgtgtttttagagggtagtatagcaggagctgctgcaggtgtcattgtggaagcagttttatacccaattgatacgataaaaactcgattgcaggtatgttcagtgtgcctaatattttccaaccatccaactatctttaaggagacattctgaaaatcttttgagtagaaagtaattcatgaaagggtccccatatattgtagggttaggaag

SEQ ID NO: 33548 - DNA, 7084 bp, Cannabis sativa
caaaattttctaattttacccattcatgagtaatacccattaagagtgcacccatatatatattcgtttttgttataatatattaatacgtaatactaaaattattatatatttgaaaaaaaaaattaatatgtagtaatatatttttataaatttttattaggtaatttattatatttgactattttgttaattttttttaaaacaggacatttaccaatttaatttttaaatttaaagtccttttacatctcaacctttacataaattgagccaatccaattataatctatcaatcatgtcaaaaattggctatccaagcaagattggatcagatttgatggcatggtatttttaaaaatctaatacttcattggtgggttgcaaagcttgctctaggctaaggtgggttaggcccgcaattagggcccatccatcttatatgtccaaataaaaaaagagaaaattacattcactacgggattttaaaagttatttatttaaatatggcacttttaggtttgaccattttatatggaaattttttattttttaggtatttttatggtatttgatatgccatatatatataaattagattttcgaagaccatatttaatgtttttatttatttttaggcagtttatttgtcactggtgtcggaaaagtcactggagtttgctgtcggcaccaggaaagtcaccggaatagctaccgctgttgagaaattcgccggagttactgtcggcaccggaaaagtcgtcgaaattgacattgtcgccagagaaatcaccaaaaaaattaccaagaaactggattcttgataaagaaaccaggttgaagaatccagtttcttgatgaaactccagcgacttttccgacactgacaactactccggcgacttttccagcaccgacagcaaactctgaaaaaatcgtcagaattggctttatcgccaaaaaaataccaagaaactggtaaaacacagtttcttggtgatttttccgacgacaaagccaattctaacgactttttcggctccgcagcagctcccgcgacttttctaacacctgcatctactctagcgacttttccggcaccgacagcaaactccggcgactttttggccccagtgacaattccggcgatcactgtagtttcatttgatttattttttatttaaaaaaaatgaaggaaattttaatattttttataataattcaaagttgcatatcccatatatatattaagtttttattttaaatgtcatattttttcttattaagttttcttaccatatgtaaattaattttattttttctatatttatgtaaatacccataaaaacatatattttaaaaataaatatatttttttaataatttttaaaaatatcatttatttttataataaggtccaatttttgttttttctaagcccattttgagtcaagaaaagccttggtgggttgttagatgaaatatgtgaaattcaatgaatccagttccttcattgtacaataatcatctaattatatttatatatgattttaaatatattttttattttactatcattaatattttggaccaacacgtagacatggaaatattaagaattcctaaatcaaataagataccaattatttgatttttttgtgacaacgacttatctctttcattatctctattgtgtctaggttggactttgtgttatattgaaaatattttgaaataattagtattttttattttggacagtaattaacatttttataattgaaatatacatataataaaaattatgtttaaaaaattaaaactggggcgtgggttcctctcttcgctctcccatggcgaagaaacggagaggggtgtcgaagcctgctacttcaaatgttcagacggaaattcagtcgccagagcttccttcgatccatggagactcggttgctccgacggaagttttcctggatccgtgtgaggagttcgatttggaaggtaaggcttcagacgggattgcagaggttgcgagacaaagtcccaaggccgtttgggctgatgaagttgaggagagcgatttccaaacttcagcaaaggagatctggagcatattccatactaaccatgtaaaaactccttcttctcaattggattttactgaaccgatcaagattagggatcaatttgtggctaagttggatttataggaaattgaagttgaatcttctttctggaaatcttctattgtttgtattgtgttgggtgctaatcccccgttcagagtatttgaggggtttatcaaaagaatttgggagaacttggggattgagaagattgttcggatgcattcgggcttcaccttagttagttttagggatgaagcaactagcgacataattctagaaactgtggtaatacattttgacaaaaaacctgttgttcttcgtccttggacggctgatttggacactgctcaaatggtgaaatctgtctctgtttgggtgagattgaatggtttggggctccaatattggggaaagaagaatttgagtgctttattaagcacaataggcaaactaataatggtggataaggtgatgctcgagaggtcgatgataaaatttgctagggtgttagtagatgttgaagtttcggataatcctcctaaatcaatatcctttgtgaatgaaagaaagcaaattataaagcaacaggtggagtatgagtggctgccttcaaaatgcaatacgtgtgctttacttagacatatgattgttaattgcaacaaaggagacccgtgtggtttggaaaaagaaacaataagggcctaatgatttgaaagttgagaaagagactattatgaataacaaggccatggcagatgctaagaatgagtctcaacagattgctgcacgtgaggacagcaatgtagatccttatcctgaaagtgctgaaattgttagagagaataccaaaggtagtacctgagggaaattccagcctgcaagtcaatggaaaccaaccagggaagttagtggaagagcaatggatcaccccaaggaagaagggggccaaacctattcttcttaaaactactgctcaagtcaaaaatggttatgatgtgctagatgatatgggtgacaaaaataacagccttaataatgaatagcagcaacattttggggtggaatgttaggggtctgaataagtttgataaacagtgtgaagtgtttgatatttgtaaagtgaataatgtgggtttttgtgctctttttgaaaccaaaatcactcatgagaaagtccaaaaagtgatgaataagtttcctagttggagctactattctagtaacaatttatcctaccgtcttctccttgtttagctggacagattagttaaggtggagaccattatggattacaagcaattcattcactgtaaagttaaaattgttggtactcagactgagttcttcttaacatgcagtctatgggagcaattctctggttgagagataggacctttgggctaagttgactaacttgggaaaaatgaaggacccttggattatcctcggggactttaatgcgatgttttattacaaagatagaactgggggccgtccggttaaggcaatagagatccaagatgttgaagattggttatgtggttgtgatgtagatgagctgaggagttctggaacttactatacttggtcgaacaaacatgacatgggagtgagaatcttctcaaagcttgacagagttttcactaatgagtcttggctggatatctacccgaacactgctgccacctttaaatgggataccatttcaaaccattgtttctgccttgtcaaattccttaaagctagcaactatggtactagaccttttcggttctgcaattactggagcttaaaaaaagactttaaagtaactgatcttgctgcttggagagatagcaaacaggccactctcatgaacataactcagaagctttttcgtgtcaaacatcctttgaagagatggagcaaaacagagatgagtcctcttatgttatataatgtggctaaagatgtgtataataatgctcaagaggctcttgctactaatcctacttgtgacattctcatgcaggctgagaaagatatgtaccaagagtttgttattgctcggaaacagtacaaaaactatctccaacaacagtcaaaagtcacttggcttaagtttggagatgagaatactagctattttcatgttgttatgaaaaaaaagaagaactgaaaacaaaattgtttccttttggaatgatgacaccattgttgaggagtatcctttagtggttgaacactttcttcaacattttcatagttttatcgggaaaaaaagttcagctactataaggattgatattttcagcttggagaatagtcataagcttaacttggaagaacaaattaagctaattcggcctttcaacaagtctgatatcaagaaggccctcttcagtatcaattccacaaagagtccaggtcctgatggatttggatcaaggttctttaacagtctttgggatagtattggagaggacatcactaaggtagttttggattttttccaaaatggttccatgcccaagggattgaatgagacttccatatctcttattcccaaaaaggaaagcccctagaatgctagtgactatagaccaattgcctgctgtaatactttgtataaatgcatctcgaagatgatatgcaccaggctgtcgaaagttctccctagtttggttcatgataaccaagatgcgttttttcagaatagacttctggctcacaacattctgatttttcaagacatgctcaaaggatacacgaggaagaacatatcggccagatgtttctttaagattgatattagcaaagcttatgacactgtggattggggtttcatagctgatctcttaaagggtttgtgcttccctgccagattcatttcttcgattcttaactgccttcatggagcttttacactcttttattaaacggtagatgccatggctctttcaaaggtgaaaaaggccttcgtctaggagacccaatgtcccgtcttttctatttatcctaaccattggataccttactagattgttgattcagagattcaatatgaaaggattcgagtttccccctctttgtaagtctcttaaactagttaatctttgctttgcggatgatcttattatcttttgtaaaggcaatgagagttcagtggaacatgtctatgaggcctttaaagtttttagtgactcaacgggtctcaaagctaatgatgacaaatctttggcttactttggtggtgtggacaatgagtgtaaagatcacatattgggtttgattcgaatgaaagaggggtctttttcccttaattattgggggttcatcttaggcctaccaaatggcgtgctttagattgtgttgttatttttgacaaaatttacaagaagcttaacagctggtctagtaggaacctctcctttgctggaagagcgcaactgattcactctatccttcttgggattaggaactactggatgattttgttcattcttcctcaaaaaattattgctgctattgagaaatgttgcacggacttcctttggggtttgaagggcaatagaagcaagtatcatctttcttcctgggagagagtttgccttcctaagaagcaaggtggtcttggctttcatgaagggaagaaatggaatatcaccctaatggccaagtttatttgggccatttcaaaaaagcaagacaatttgtgggttcattgggtgaattctacatacttaaaaggtcaagatttttggcagctccaatttaagaatgatgctagttggtatttcaagaagcttttaagacttagaaatgtcattgacaaggaagaggttctcaaggcagaacaattctataatcagcttgtctcggttcaggaagttgattataatgcaagagttttgcacaagatggtcattccgaagtaccgtttcatttgttggcaataaatgctgtgtattcggctactgtgtacaatatttgggtgaatcgaaactgttgcatctttgatggtaattgtaaaacagtgtattatataagtaaaactattaagaacactgtcaagtttagagttttaagttgtgttgatgaaagcaaagacaagcttaaagcttatatttgtaatgtaataaataattggtagtgtatcctcctgctagtttttgcagtagcggttggagtgtggtgttttggtgtttgttgttgttttgttggttttttgaataaagttcctctttttcaaaaaaaaaaaagtttgaattttataaggaatggattgaatttaaaatattagatggatctcatccaataaatattgggtccaacatattggatgtagtgattatataatattcattggattagatcatttcagttgagcaattaaatttgatttggatcagttggcgaaattcaacatccaatgtataataattagattagttttttttttttttggattagatttggagaatctcatgattttaaaatacttacaaataatttatgatatatttgtcccaacaatatcaaaaataaaatttaaaaggactgagagattcaaaatagctataattttgaaaagtaaattagtaaatgtccccttttaaaaaaaattaagaaaataattaaatataataaataagttaataaaaattataaaaatacatttattacatatatatatttttttaaaatatatataataatgaaatgaatttttttttttttaatattgcatattattatattataacaaaaacgaataaatatattagatcattaaatatatacaacagtatttaatatatagtaatactaaaaaattaatatactgtagtaataaaattatataccccaaagaaattataaaactactaaataaatactcaataaataaatatatcatgctaacaaaattatgtataccactattaaaatatgtatacataccaaaaaatttatat

SEQ ID NO: 33549 - DNA, 2346 bp, Cannabis sativa
  modified_base (1480)..(1481): a, c, t, g, unknown or other
agagctaatactcgggaagctgattctattatggagttactacatctttatgagcaagcttcgggtcaacgagtgaattttgagaaatcgtttgttttcttcagttctaatactgaagttattgtgagagattcgatctgtggacagttagagatttatgaagccgatgataacaccacctatctgggtcgccgaatattatgggccgaaagaagactgccaatttaggttttcttaaggacaaattacaaaagcgtattcaagggtgcgaaggtcgtttactctctcgtgcacggaaggaggtccttctaaaaacggttgcataagctattcttagctatgcaatgagtgtctttctgctaccggtagaaacctgtaaggatttagaaggtattatggctaaattctggtagaaaacaggctcttcgattacaaggagtattagtctgatgagctgggggcgcatgtgtagacacaaacatgcgggtggactgggcttcagaagccttcatgattttaatttatctctactgggaaagcaagggtggcggctccttacaaatgaatcttctttgattggaaaggtgtttaaggctcgttactacccaaatggaacgtttttggatgctagcttgggtaataatcccagttttgtttggaagagtgtgcatgaggcgcaggctattgttcgagcgggtgctcgaaggacggtgggagatggttctatgatctccattttacatgatccttggttaccttgccctgtagatccgtatgtgcattcagaccatcctgggttacaagacaaaacagttcacaatctctttcgtttggatgataaggtgtgggacatggaaatcatacatgacttgttctctgctcgtgacagtgctcttattacatctatacagctgagctcaaacaatcatagagattgctggtcttggagtttcgagaatagtggtctgttcaccgtaaaaagtgcgtatcgtttcttggaaaatctcaaatgtgattgggtggacgatgacaacactagtttttagaggaaaaagtggacattaaagatttctccaaaggttagtaactttatttggaaagcagcttcgggtatcctcccaacttgtttgcaacttctcaagcgtcatgtggttattagccccatttgtctggtatgtcatgaggctaaggaatctacttttcatgctctagtgggttgctcttttgctcgagcctataggaatagatctttggttagtatttttagttggtcagctgatagttttggctcttggtttcaagctctttcggcaaggatcaattcttaagcattggaggaagcggcgatggttgcatggagtatttagaaggcccgtaatgaggttgtttgacaacaaaaatcttctattgctgcatcagtggttttgttggcaagatcactccttgatcaatttcgttttgcacagtcacggacgacaanntcgttgtctaacagttcgataggactgtctttgcgtgtgcattggactacaccagtttctgatcagatcaaggtcaatgttgacggtgctctatttaatgatgttagccgttttgggatgaaagtcctgttctagcaaactaacaacccaagcccggattggaaatgggctagccaaacccgacaataacaggcgagaattattacgcgattgttgttcacagaagacaggattaacaccttccctcaagtagacaggcaagtttgacgtgctagcttaatgtcttctacacgaaccagtcagcgagatgggcggacccaggacggttcaaggggaacaacaacagcattgcagttcgctgaactcgcatttatgaaggacaagacatgaagaaggagttcatagttacttagcccgtaaccatatgctggtgaagttctcaaggccttcactactagcacgaggggaattgttaggccagagattgcagaaattatcgggatcaaggaagccttaagctggatccagcatcataattggcaaaatgttctgctagaaactgatagtgtggtctgtgtttaggctatccagagtgagttacatatgccttctgagtttggtttattggttaatgattgcagaattattttatcttctttgagtcatgttgctattcagtttgttgaacgatctgtgaacaaagccgcccattgtttggtgcgtaactcttgtttttccccaggtcatacttttcaggattatcagttaaattctgaattgtataatattgtgccggttgattttaccggttaatgaaattttactttcattcaaaaaaaatattaaaatataactaattaccgaa

SEQ ID NO: 33550 - DNA, 2866 bp, Cannabis sativa
  modified_base (123)..(126): a, c, t, g, unknown or other
  modified_base (2431)..(2432): a, c, t, g, unknown or other
  modified_base (2627)..(2628): a, c, t, g, unknown or other
  modified_base (2804)..(2831): a, c, t, g, unknown or other
tgtggcccgaacatgtacaagcaccgccaagctctcgcactcatggctgatcagagaaagacagtaaaatatctataatcataaccatcatatcacatatacaataatgccattcatatttgnnnntttaatatagacctgcgtgttacgctcacacgcctaattatgtctatgtggcatagacccacgtgttacactcacacgtttaaatacaataaggccttagaacgattcatctcgattctagttaccgagtccaacccgattatgctttgaacgcatactctttaatctcaatacatacataacatggcatagcatttacatattgataatcactagggtaataaccctaggccattaaactgctcatgccagggtaataaccctaaccccggtttcaaattactttcaattatcatattcaatataagcacgaccacacataactctacgtgctaactaatttcttacctgatgtcccgcaaacgtggagattccaaatccctgggtgctcctgaccaagtgcaggtaatcctagtcacaatttctggaattcacacgtatagggttaatccctaaatccacttccacaaaatatagaattgatattcaaattataaataatcacatagagctcggaacgagctttccaacgatataaagaacatcccaaatggagtcccgagttaaaagttatggtgaaaacaaaagctcaaaaaaaaaataataataataaactgccaatactatggtcgcgaccagacctgcgatggtcgtgactagagcccaaataggggactcaccctctctggttaagcgctaggtcgcgaacattgggtttaaaagcccagaaaacccagttcttagcttcaaaaataagccaaattcacacctaattcaaccaaaacatgcacataacctcaaaatcatccccaaagattcatagatatcaaaacaaagtatttagggcacataattcaagcttaaaccacaaccaacatacaccaaatctcaagataggaacatactagctaggttccaaaccttgagctcaatatcacacttaactttgcacaaatttaacagaaaattcagagctactaaactgattaaaaacatccataaaatccctacaagcctctcaaaaacttactctaacacaataatcaaagattaacaatacaactaacaaaaatcatcaaaatccaactaatcctccacatacatgcacaccaagagcaatatcaccaaaaatcatgctttcaaaacctaaattcagcaacaaacaaaaatcactataataggaaattacctaaagccctaagcaagaaaatcaagcttaatcacctctgaacatcaacaaaaatccattatggagaggatgcaacaattgaaagaaattgaaagagagaggtaaagaaggggggtttgattcttggctgagaaataactagaaaaatgccttcctaaatttcttttgttgcaaagtaaatcaagcggtcaaaatgaccaatttgctcctagggccttataacacacacataaatattcaagggcacataagtcattccatcacatataattatttcaaataatttcagaatattcaaataaccaaaagataccaataaataatcccgaaaatgaattttggcctccaacccggttgagcccaaaattcccaattgtgattatactgcgccgacttgtcagaaaatacctgaaaaaggatgaaacaagtatactatttaataatatagtccataagcacgtaattaaactaaattccacaggcttaccttttttgggtcaaaattacgaaaatgctcctggctcacaaacgaggttttagcatgtcatttatcagattaattcacatataatagattatataatattttaatgccacaataatacatatttaactagttatggtttgctaatctatttccttaatcttagggtattacacttagcgtatagtgtacattatacaaactaaacataacggttgaatgaacttgaacaaagaatagcgaggcatccatctcaatatgagaaggcatactcatggtaccttcactaatcagcttcagacatatttcaatgagatctactactctgttgagtcagctctctcagatagaagctgacatgcaaatgatgttgactgctgaagtgcaccttgtcaccaagaactatgattgttagatggagtgttatgtcttcaatagcagaaacaacaatatttacattatcaaccttgaaaagacatgggaaaagctccagctcactgtcagagtaatttctactatccttgcgaggtgattcaacaagatacactttagagcgtatctaaatccacgtcaacattaaccggggaaaagcggaaaaatcacagtagtgtgattttcaaataataaccgcnnttattttacgtgggatgtaatcaaatcccacaattttaggggattattattgtgggaaatcaatctgattgtaattaactgccatcctatgtaactataaataggagcaggatacaatgaaaaaggacggcaaatccttgagggaaaaagtcctagaattgtatcagaaatatctaataagatagactcgtggannatgcagaattttaactgcaaaaccgcgtaaaatttgtgttctttattttttctttactacttgttaatgcagatttttgttaaccaaatttgagcctaacagtgacaaccgcacacagaaaaaataaaggttgtaatataaaaagtatgaacacacaagattttttacgtggtttnnnnnnnnnnnnnnnnnnnnnnnnnnnngtcaatcttatttagatttttgatagttttctcag

SEQ ID NO: 33551 - DNA, 2165 bp, Cannabis sativa
  modified_base (1974)..(1976): a, c, t, g, unknown or other
ttcctcttttgtccactctattcttgtgaatacttactttaaacatccaaggacctgaaacaaggagatttaagtatgaaacagtcctaaaactagaaataaagatcgaaaactaccctagaaagcgacccaaaacttagactaaaattagcttaacatagaccaaaattcttcctttctctagtttcatcctaataaattggagaatgatatttctaccacacaacatctcatagagagccctccctattgtagcatggtatctattattataggagaattctataaatggtaagtacttgctccatgatcctcaaaattcataacacgggctcataacatgtcttccaatatctatattatcctctcagattggccatcagattgaggatggaaagttgtactgaacttcaacttagttcccatagccttctgaagacttacccaaaatttggaggtaaatttaggatctttatctgataaaatggacttcggagctccatgaaggcgaacgatctcctttacatacaattttgcatactgatccactgtgtaggttgtctaaactggaaaagagtgtgctaacttggtgaaactatctacaatcacccatatagaatcatacaaccctatagttctaggtaatccaaccataaaatctatagtaatatcttcctatttccactcaagatatgtcaaaggctgtaataaactcacaaatgattgttgcaatgtgtttggagatcttatttcccaactgaggacacttctttcactccttccaaatgtcaaactttgtcacattagtcggtcagcaaatactgctacccacgatctggctaagaaggcacttcgactagaagaggatacctgttggattagtgatgaggttgtctccatttcttcagtgttttcgtccatgtagagctgcctctctttccttaaaaaaatattaacgtatattaacgtatagctgcaccatgagaccaccacttatatatgatttttgttatagttgacttttgtagaaaattatagggttctatcttaaaatcaattggtaataagtggagtagctcatgttcttatatatgactcatcaatattttaccatttactctatgtgggacattatcctacaataatttttgacttatttaaaatttacatatttggatagattacagttaattaattatttaacttttaaatcataattagtgtaaattattattttttggtatgataaatgattataatttttaattttgtgatatcactactacaaaaaaggcattcagtgacatattttgtgagactctaaatatttgtagtgactattcactgtgcgtcactaatgtgggtgactggacaagtaatatttagtgaccttcacaaaacgtcactaaaatgctttagagtttcttaatgagcgtcactgtagccttttagacactaattctaaccatttaaaatcgtcacaatacatatatattatttaattttattctattttaatttaattttatattattaataaattgataatatatttttttatttaatttttatataaattaataatatataataaattaataaaatattattttttaaatagcaattaacagaatatttgaactgaaatatagactaaacaaaattataaaatacacacattatactttatatcaaaatgctttttacattgaacacaaaaataggtatatgacattaattttaaccaaaataaataaataaatcaaaggcaatacaaatccaaaacaaatcagaacatgtttagaacaaaaaaaatacctaaaaaaataaaaacaaatcatccataaatctcgaaccaccaccgtcggccacaaatccaaatcaccattctcggcaaaaaaccccaaattgcctcagtccacctacacaagaaagatagatatatatatatagagagggagagagagagagagnnngagagagagagagaggaatagagagacaaacaaaaaatcaatgttcgatgctccacgggaaggaaaaataaagaaggggaagagaactgtggtgcggcgctgagaagaggagagattggggctttatctgggtagcaagacgtcgaactgaaaggagagattggggctttgaagagagagagagagaga

SEQ ID NO: 33552 - DNA, 940 bp, Cannabis sativa
ttgcttacccctagtatatatatataagagcattgttattggatactagtagtatttagcacgcttaagacgtgttgccttgcgattggctagcgatactccctaaaagctattacattaaactatatgaaacccgatacttaattagaccaatagcgatattgacaaataggaaggtgcttagcaccactggtacattttagcatttctctatttataaatacataatgtatatatttcttttcgatccattaaaaagaaataaaaaagattattctccttgtgtggtctatacactaaagtactcatgagatgaattaaatgccaagtttttttttataaaattaaaacaattgattggtatattttatgatggtggacccttttgcttctatgttttaatgttattcttgttgatgctctaagtgcattttacacgttataattaaaaagtatttttaatttttaaaaatagaaaattaatttttgaagacaattataggaactgtgatggtactgttttggaagcttttgcaacataatctcctggcgattcgcatgcttctgtggcggagattatgagtataaaagaggcattaagtttgataaagaagaagtgctagaataatgttattataaaaactgactttttagtggtcattcaaagcactaaaagtttggttgacatgacatctatctttggtcttcttgtccaagattgtaaatctcctactttctttgtataatgttaaaatttgtcatattaaactctctgctaataaagttgcacattttctggctcgtggctcttattattggtctgacagtatcttctctgggagcaatgttctttctgctcttcaaactattgtaatagcggatttagctatttaataaaatttctacttttattaaaaaaaatgttattttctatttcaaa

SEQ ID NO: 33553 - DNA, 2263 bp, Cannabis sativa
tccactcgctcaaccgccctcaagacgtgatgcgtcaaaggggaaagctccgatgctttctccacaaagccgtggtgcacgggaagatgagttgttcacggacactactagaaattaggtttttagtgacactatatagtgacacgcataaaaatgtgggtcactaaaaaattaggagtaagttttagtgacacacactatgagactctaaatattcggtgtttaccacccgaaatgtgtgtcactaaaaatatggagtgtcactaaatacagaaatccaaaattcataattttataaaaataagaaaacatggcctatagtgacacgccacgcgtgtggccaaaactatttgccaacgcgttatgcgtgtcgctaaagccaagtgttaatcatgtggctttagcgacacgcataatgtgttggcaaatagttttagccacacgcgtggcgtgtcactatacacccttttatttttttaaaaaaaaattaatatatcagccctaattatactgctttcatcgtgcccacataccacacacagaccaaatacacacaaacggccatttcttcttctctctgcgcgctatacctcttatatatatttatattttttttaattgcccacaaaggagctgctagctgatcgaaagtattatgtaaggtattttatttttattttttctttaatttttgtttaatttgttttataaattatttaggttttttaatttcttcatattcattgaactgcctcctttcgatccctctgtgcaccagtcctctgtgctcctccatctcaggcgcaccaaaccgtgatcctccatctcaggcgcagcagacccgtgctcctccatctcaggcgcaggtaataaattttttttttcatttttttttaatttttttttttgttcattttagattatttgaaaatgaaatttgttgagtacaagctcaaaaaaattgaaccactaaaaaattaattaaaatttggtatacccttttttaaaattttgacatgtatggattattagctcatagtactagtagtccatatgggaaatcaagagcaagtgtattttggcactgtaaaggtgagaaaatggtaaaaatcaaagtcttttcatctttcaaaattttcatttcatgtaaaaattttacagagcaaaatgaatgaacaaatttaaatttcaaaatttgggtatacactaaaagactaaaacatttttcagcatatgataaaaatcttttaaaataaaagaaacaaataatgtaggttataattttagttttacaacaataattgaaaactaacatttttttagaataataatacaactaattttatagaaaaaaaacacatattattaattttcatatcataaaagaggagaaagtactcattaagaatattttaaaatagtaataaaattattaaattttcatatcataaaagagaagaaggtactcattattaatacaaatgtgaacatgaggttaagaagatctcagaggcgaaaaggataaattaaatattttcttaattattattgccctaatggaatttgaatgtttgggccttcaaagttggtagaatttgtatgtatagctagatactatatataatgaaatgatgaagaaaattctaagaaatcaagtgttgctcacattgcgtttatgtaattaccatctgatttatgtgggtttgtaatttgtaaatatttatttgggaagtaatacggttaagaatagggagacaaatataagtactagtaggttatgcatttgttttttttttttaaaaaaaaaaggaaaaagcaaaagggtcaaaaatcccaattacaaaattcaaaaaattatatgtttgtaaactaatacctattcaaactctatgctctcttaaatctttactctattcgtaaatagtaactttattgtgacatttttaaatctcaaacataagaaagagaagtaataagcaaagaacactagattttttttattattattagcttgatcatgatgattgtcatttccactacttattttaatagtttttttttttaatgttactataagtgttttagttactagcaaggatcgttgtaaagttagcgtggtcattttaaattagaagaggtacgtgtgcatattaattttgtttgttaattaatattatactaatgttagaagagtttgaatatcctaaatatgcatccatagtgaagtaagttttgatattaattatgtgttgcggtgataacg

SEQ ID NO: 33554 - DNA, 1901 bp, Cannabis sativa
aaaaacatggtttgtatcttttatatatgatcacacgagattaacttgagtgtttctcatgaaaaataaaatagaagtgagtgaaatatttgagtgctttcattctatgattcaaacacaatttcacacaaagattcaaattctcaaaactgacaatgccaaagacttctttaattctattcttggttcttatttgatacaacaaggcatcattcacctaagttcttgcgttgatactcctcagcaaaatggaattgctgaacgcaaaaatcgacatctccttgaagttgctcggtctctcatgtttgggactcatgttcccaaattcttctggggtgatgccattcttactgctgcatacctcatcaatcggatgccatccaaggtgctaaaatttcaaactccttgtcaaactcttttgcaactatttcctcacactaggttcattagctttgttgaccctaaaatctttggatgcactgtttttgtccacctctattcacaacatcgtagtaagttagatcctaagtctatcaaatgtatctttattggttattcctcccatcaaaagggttataagtgttattctcctactactcgaaaaacttataactctatggatgtaaccttttttgaaaaacatgcttactacaaatctgagattcagggggagaatgtaaatgaatctcatctttgggagagtattccaagtacccatactgacattattctaggtactcatactcatactccgcctctcgatcaattttccaatccagtcaaggacacttcttcgacttcttcagtcatggaaaatcaaggtccatctagttcttcccaagtcatagaaaatcaagatccgcctatgactattgagcctcaacaaaaagaacctaaagagatccgtgtctaccaaagaagaaaaaattctgacaaagaattaaaagatcgaacacatcttgagtgccaccatgaatcagaactggatccacatcctctagaaatacattcaggtttgagtaatcctagtcatgataatgttattcatataaatgatgatctggctattgctttaagaaaaggtgttcgagcttgtactcgacatcctattggcaactttgtgtcctacaaaatcttatctccatcctatcaggcatttgtttctactcttgacggtgtacagattccccatacaattcaagaagcgttgcttgatcctcgttggaaaaaggctgtacaagatgagatcaacgccctgatcaagaatggtacttgggaaatcacaaaattgccaactgggaagagactcgtgggatgcaagtgggtattcactattaagcataaagcagatggtagcattgagaggtttaaagctcgcttggttgccaagggtttcactcagtcttatgggatagattatcaagagacctttgcacccgttgctaaactcaacaccattcgtgttcttctctcccttgctgcaaaccaggactggccattgcaccaactagatgttaagaatgctttcttgaatggagatcttgaagaagaagtctatatggatattccacctggttttgagaattcatccaaccaggataaagtatgtagacttaaaaaatctctatatggccttaagcaatctccacgagcatggtttggaaaattcactaagtcaatcattcagaatggctatactcaatgtcaagcagatcacacattgtttgtcaaaatcgactcagatgaaaggatagctatcctaattgtttatgttgatgatataatattaacaggagattacaaggaggaactagtaaagttgaaaagtttcttatcaaaggaatttgagattaaagacctagggtatctcagatatttccttggcatggaaattgcacgat

SEQ ID NO: 33555 - DNA, 1193 bp, Cannabis sativa
  modified_base (946)..(946): a, c, t, g, unknown or other
  modified_base (1021)..(1025): a, c, t, g, unknown or other
  modified_base (1069)..(1073): a, c, t, g, unknown or other
aacttttatgatatgtaagaaagatgttctacattttaatttaaattataaagttaataaagtattttgaaaacatttatcacctaaatttagaaaatagtttggccccccctaactttatattctgctccgcccctgaccacaagagcaactcaaactgtaaatttaaaaaaaaaaaaataatatattagtaattctgtttttttttctaaaataaaaaacaatactaaaagttttaaaaatttaaggaaaataaatataaatttaaaaatatcaaaattgaacatactctcaatattaaaaataataataatgttacaaataatatattaatatttatatatatttaaattaatttaaaattagtataatttcaattaaccaaacacaaataatattaatatttatatatataaaataatttaaaataaatattattaatatttttatatatttataaaattaatcctactagcaatattaaatttaattaaatatttttatatttttaaaatattatgttaaataaacgaaaaccgttacattttttatatataaaaatatacggatatacttctctatgttttttcaatttttcaagacacaacttggttactggttactagttaggtgtagttttgtagtggtcaagagtgtactgctctggccatagtaggaagcaagatggaggtgaattatcctaactatatattatgttaaggggagctctatttacaccatataaaacgataaatacaccctattattaaaaaaatataagcttaaataatttttaaaaattattcttagtatattttttaaaattttttcttcaaattattttatgttaaattttaatacttattttaagttcattttcataattttttctaactcatatatatatatatttattttttttaaaaaaaaaattcatataattttntattttaatttttttgtcataaaatttaaaatataatttatttttatttaatagtatattttttaagaatatgannnnnaagaaaaaagttaaaaaaatttaatacaattaaagatataaatnnnnnataaaataaaaaattataaaaatagggggtgttttaaaattttgggggtgcaaataaaatttcccttagagcattgtaaaagtcaattaaatccacatctttcactataattaaagtcat

SEQ ID NO: 33556 - DNA, 1301 bp, Cannabis sativa
tacatatatattttttttttattttattttttttttattttattatattacattttatatatatattaaattattaattacaaaataaaaaaaaaatcctaaaagactaacagttcacacacacacgacacttcaattccaatttgctcttggaggtaagcttccaactttttattcttttacttacttcattgaaagctttgtgttataagttataacttcagtttgtcaactttcaatgttttattatgattgcttgttaatgtttttattattatttttattttttgaaatgtgtcttagctgtagcttcattcgaatgatttgtttttatgggttttggttgaagtctacggtggtgtctaaagttataaactatcaaatgatatgtaatatcttaggtgtgttgttttataagagatgaagatgttgttataaaattagaaggggctttttttgacggtagtactatttaatcaagaattgactaggtgaacccgccaacccggtcatccgaaacccgccaacccagtgccctattcgggtctgggttcggtttcatttttttgaacctgaaacccgataaacccgcccgatgttcaaccctaggagggatagagatgatatttgttctcatttatgttgtttggtgttaagagtatatgtggaaggaaggagagtaaaataaatatcaaaattaccattttatcatttttaatacaattatacattatttttcaagggtagaaaagatattttgtatatttttttttgtctttttcttgaattcccccatgttaagagggattaaaaatagtgtgtttggagggagaccctctccttccatctctcctctcccttcttctctctctcttgccaaacaaacggattctccaatccctctatccttccacccctctccctccctccttctctcccctctaccaaacatagtgttagggaatcatcatggacttctaagaaatcgccaatgagatttgtcaatgactttagcaagagattcaaatttgctaaggaaaggcaacctgtgcacttgaacccaaaaggaggcagtggtgaaagagttaaaagaaacctttgacagaacacttgatggacatagaatcatatggttggttgtgaaaatgccatggttctttgaataagactctcttcatatcacactcgcaaccaaatgtaaccatatacgaattcgtttcgtagtccgagatagtcacctgaaatcttccaatccaaggcttgagtatgaaaattttcaattgtttaggattgtatcctct

SEQ ID NO: 33557 - DNA, 1194 bp, Cannabis sativa
cgagcaacatgacgcgcttgtcattcaacccggggcacgtgctcaaaatctcgctcaaagagatgttgacgtgactctggtcggccaagaggctgaacaggttaatctagccgtgcaggcacagttggactagctaaaaaatatgttccaaggcctgcccggtcagaaaaacaatgacctcgagttagaccgagcacgtggatcccctttctcccaagagattaatgtcctagagttgcctcacaagtttaagatgctgatctagaagatcccttatcccatctcaagtattttgaaatgcaaatggacctggaaggagcaagaggagatgtatattgcagagtttttcctgccaccctctcagaggccgcccagcaatggtatttcaagtggacccaggaaggttcaactcatggaaggctttctcttcgggattccatgaacaattctcctcttctcgccaactttcgttgcaattaaaagaccttgttcatgtgaagcaaagaccaggaaaacctctctgagcttacatcaacagattcatgacgaaggcaactagggtagcatggttgaccaaagacgggaaattttccgcgatactgggggcattaaagttcttgaagagctttggaaggacgtcaagaaaaacggaccaacagattctatcagtgacttccttgatcatgcagatggttttattaagcttgaagaagccattcagcgagcagaggttgagcaaaaacctggccaaccaaaaattccctttgctgggacattcgacgagctcccccagtacccaagcagttcaagttcgagtggtaaacagtccaacaacaacaataggcaaggtaatgggaaaaagggaaagttcgctggcgaaactgagcagaatcctagggaaaatcccaccaagtttactactttctctgtcctgacagaagatttagaaactatttacatggctactcaatcattagctccgtattagaagcccacaccgatgtaaaaagatgtaagcaagagagacatgactaagttttgttgttttcatgaggattatggtcatgacaccaacgaatgcaacaacctaaagtgggaaattaaatttttgataagaaaaaataattcgcacatgcaaaaatatgtcaaggtcaatcaaaatcaacaagttactcgggaatgttacaaccttgc

SEQ ID NO: 33558 - DNA, 2551 bp, Cannabis sativa
  modified_base (999)..(1005): a, c, t, g, unknown or other
  modified_base (2492)..(2494): a, c, t, g, unknown or other
atgaggtattatgtgttatgaggtttttttattgtagaactagttttgcttttaatttatgtttcaatattttaggaactgatttccactttattttttgattgtaatcgatttgaattattatgggttagttgtttgtattcattatgttatataacttgttctattttagttataatcagttataatttaattataattagcttgagttattttgttttatttgtttttattctttgtgttacagaactaattatattttaattataaccgattctatttttgtttatatttgagacatctacttcttgtgactttttcagtaactttttcctgcgacagtgacttttccaacgacgatgactttttcggcaatttttccagtgactttctcggcaacggtgatttttccgacaacttttccagtgccaatagtttttccagtgacttctccggcgccgacgacttttcaggtaacttttctggcaaaacttattattgtttacaaatatgagatttctatcttattttttttttaataaaaatatggcataaaaaacccatataaatgtaaaaaaaaataaaaaaaccgataaccccttaactttatttatttataccataagaaagtaaactcttaaaattttctcaaaaatagtgtaatttctacttttattattggttataatttagaaagaatatttaacgttacttataacactacaaaaaactactacttttagtcaaaactttttagttataacataattcttttgtgaataaatgtgacttttactcacaacataatgttacttgattaaaacatattatttagatacaagttgtcactaatttagttttagttacgacaagtattgtgacaaaatatatttagtcacaataaattgtaaattttgtgactaatatctttagctacggacattttagtcacaatataggaatgataatttattgttagtcacaacttttttacttttnnnnnnnagttttgttgtgactaaaagtatgattttttatcgcgaatgaacatgtctatgatatgaacatttgttttgtccttatggtggtgacattttcttataccttgattattgatctaaaggtgataaaatcaaggaaacataataatcatagtggaacctagcctatagtaatatttttatacatgttttgtctttacattattttatttgttaaaaaaattaaattcaacaatttttgttaaaacaaacttaataattattttttcacttttttatttttcaattgagaatattttttttccaaaaaaaaaaaaaaaaactaaatttaacaagtatttttaagcaaactgaataataactttttcacctttttatttttttagttgagggcattttttcaaaataaaaaaaaaaattctaaagattatttttatatttgtattttttttgtataaaatccaataaatacaataattcatattaaaacataaatttatatagactttagcgtatatcaaataataaaataaatttgatgaaatgtggagattaagaactttcattagtagccttctttgaaagaacaaaaaaagaaacataaaaaaaactcctaagaatgatgatgggaatgtagagattaatcactttgtaacgtcctttcaataaaacataaaaaataataataatgatagaaactcgataaattttgccatagaatggtttaataactttttatcttcccatttagaaaaaaaaaattgctttcccaatattttatattaaataatctcaattttttaaatacttttaaaaattaatatttaatttaatgcaacacaatatgtacactcaatagtcatataaatgaaaagttaaaaaaaatatattcctatacagtatgaacaaaatctatcacagaattcttctacttatattggtataatttttttgggtcaaaagttattggacagagtatctatttatactattttgaatcttctacaaaattatataaaaactctataatagccctaatgggcactgagttgagttgggcttaatcaagatgatcacaaatatttgcaaaaacttttgaaaactaacgtaactaactttgagaaataccaacatttggaacctgcctataaaacaagagatagggtggtatttcaagaagattttgagactaagacaagttgtaagcgaagcctcattaaacaaacacgaaaagagaggtaagtttagagcaaaacagttttacaattcacttgttataaccaatacagttacttatgctagaattgtttaaaataaattcattgtgccttagcatagattcatttaatggcaagttgttaactcacaatttctaactagggatctgtttggaaaacctattgcaattaaccacaatatttttcatctttgtatgtcaaaaatggggtacttatcaaacaccacaacaagcaattattaaatatcaaccannncaccacaagcaatataaaatacacaaatcaagagtaaaagtgagacaccaagatttt

SEQ ID NO: 33559 - DNA, 1607 bp, Cannabis sativa
  modified_base (430)..(432): a, c, t, g, unknown or other
  modified_base (857)..(862): a, c, t, g, unknown or other
tttgtgattaattattcaaaaatatattttagaaggggtgaaagtttaaattttataaaataatagagttttattgtacatattataattagattacttaactgttaaaaaaaatataatagagacttaaatataaaagtaaaattattaatattaattgctaaaaagggtcttattaaatatttaaattaaaaattaattattttaagaaatagctaatttaattctaaaaaatgaatttttacatgttggtaacctgctattaaaggttaacaaaaatgtaaccattattttgagaaaaagcgtttatattatagattcaaatcagttagacctctcggtcgttacacaaaatattgttaggtaaggccgaatccgggatagacccataaacctgatgagcaaacgcccatctagccacattatgagnnncaaagttacaagttctactaatataagcaaagttacaacagataaatgagggagaagacttagtacaaaatgagatgtaattatcaagcgcccagcaagaagccttcccgttgagagcattgatcaccacactcgagtcattctccacgatcacaaacttagctccaatatctaaggctaccgataccgccaagcaacatgccgcagcttctccacagagaacgtccgagaaatcttcccgagccgtctgaactctaatgactctgccaacatgatcccttgcaacaacagcaatacacatactactagatcccaccttgacatcacaattcagcttaatccaatcctggggaggaggggaccaagcttcttttagatgtggagtggggctaggaagcaaagtaacatgtaaatctgcataagannnnnnaatattatcaatacatttttttaaatcaggagagcaattattatgaaccttctcattgcgcaccctccaaatagtgtccactataattgaggcatataagaaaacatcgtcagctcgaaccccgctattatttagatcccagataaatttgacccaatcccaaactcggatgccagtgtcacacactggatagattccccaaggagaggagcgccaaaaatgaaacgccacatcacaggacaagaagagatgttcggaagattcctcccccaacccacataaagggcaactagagtcctcaatttggaatcgtcttccaatcaccgctctaatagggagagcactagaaaggatacaccaccataggactttatgccgttccaagactttgctattccataatttgttccaaagttttggggccacctcacagtgaggagctcgttcaagagcctgagccaaatacgcagatttagacgagaaacacccattgctttctagcgtccaaacccatctatccataccagctccagatggatgccctcctttaagaatgtcagagaccgtttcttgatcaaaacagcctcgcagtttaggcacatcccactaaccattgtctaacagtaagtcagccacgctatttgttgcgatattttgcacacgcaagtgtacgtatcgttacaagtagtaaactcacgaggagtgaggtcgatcccacgaggactgtagttaagtacgttaaaat

SEQ ID NO: 33560 - DNA, 1248 bp, Cannabis sativa
ttgatattatttggaactcactcactgaaggattaattattaactcaaacttttaggtcttgtttttgtgatgattaataaatatttaattattatttgttactaataatttgttaatttagtagcaaaattaaaatataaaatatatttttccaaggtaaaatagtacatttactgaacttctcaaagtgaatttaacaagcatatcaactactttatatttgataagaacaaaaaattcatcaagggtcaagaattcaagaccctattcaaaagaggtttaaaaagctcaaagtcaaaagtcaacctaaaagtcaaagtcaactctgaggaaaaattaactttagactaaaacatgcaaatcaagttaggaagctcatctacatcaagaccatgtacaatcaaagggtataaatttactttagtcttgttaaagtgatttgcatagtacactagggtttataaattcaaattttggcccactcactaacttgtgcaacaagttttatccccagatgattcaaaatgttttttgattgagtttctaaatcaaatttcatttaaataagagaacaaaattagaatttctgagatcaggtaatcgagtaaaaagttatgcacattttagtcctaaaaattgtaaaatttgctactgttagccattcaaagttccggttggaatctgaaattccagttgtcatcaatctggaattccggttcccatctagaattccagttcacgataggttttggaatgcgtgctaacgattataaacggctatattttaccccaacactatataaacttgattttttttccaaaaaattgtagttggctgagcattagtatcatatatctaacatattaaagtgagattaatgagctccctagtcaaaaatctaacaaacacttttcacacactttgagccaaaacttgtgtttattcatttcaagtgtgcttgcttatcactctaggtttctattgtatgatcatacttctaaagtgaatttgcttgtaatttctttcaatcaaacaaacacatttttatattgtgattggggtgtggttggcaccggttgtaaacactccagttatagtgagattgtcactacaacaatctgagaaagaggtcaatagtccttggcagtgtgaaactattgtaagaggtttgagaacacattgatgaaaatttctcgattgtaagggttagtcaagcttgttaacttggctcgatattggaactcaa

SEQ ID NO: 33561 - DNA, 1605 bp, Cannabis sativa
gttttggtagaagtggcagcgactcaaccaccgatcagaagagaaaggcaccatatgcacttggtggctcaaattaaaataagaggttctgaggaaactagggccgaggccactgtcagggttgttccgaaacccaatacacttacccggaatgtcccaactgtaagaagcatcatctgggagagtgtaaagggcaaggatatatttagtgtggttttcttggtcactataagagagattacccgcaagttaagaaaaaagagtagaagacagtagcaaagcccgctctagtaagggtttttgcttttactcaagctgatgtagaagctagcctctcaattgttataagtcagctctcagtcaacaactcttatctctctgtatggtttgactctagggcccctcattcatatgtgacggcaagaatttttaataaattgggttggctgtatgatagctatgataaggggttcggaaccctactacctagcagagaattatttatctctacaggtaggttaggtctatgccaataagaattgaggatagggagttgagtgctgatttggtagaattgggcttagcggattttgatattatacttagaataaatttcttgttcaagtattaagttaatattgactgtaagcggaagatgctgatcttccaacccaagggcgaggaaccgtttgtgtttgtgggatcagtttagggatcccgaattacaaggatctcagtattgaaagttagagatttgttacaagattgaggcctagggtttcttgtagtggtattggataccacagggcttgattccattcggccagaggatgtcagagtggttcaagaatttttagatgtatttcctaatgaacttctgggttaccaccgtagcaggaaatatattttttattaatttagcactaagagcagaaccagtctctaaagcaccttgtagaatggctgcaacataacataaagaattgaagatccaacttcaggggttgcttgacctagggttttcacgacctactgtgtcatgctagggagctcccatgttgtttgttaagaagaaagacagatcccgaaacatgttcattgactaccgggaactaaataatctgacaatcaagaataaatatcctttacctaggtttgttcgatcaaattcatgggaagatagtcttctttaagatcgatctctaatcgagctgtcatcagttgacaatctaagaggagaacattccagagactactttttgcactaagtatgggcactatgaatttctagttatgtattttgggctaactaatgctccagcggcttttatgaatttgatgaatacagtattcaaggacttccttgatatatgtgttatagtatttattcacgacacccttgtgtaatctcaatcagaagtggaacattagcaacagctctagatggttttgcatcgattatgagaacgtaaattgtatgccaagttcaaaaagtgtgtattaaaagtgtgtattttggctatctcaggtgtcctttcttggacatattttcagtaaggatgggatcaagattatccagggaagattgaatctattagggattgg

SEQ ID NO: 33562 - DNA, 1739 bp, Cannabis sativa
ataaaatgatttctgatctttattaattagtaaatctgaatatattgacatgggttttatttagggcacaaaacccaatattttcctcaaaattccacgcacaattctcgtcctctcgtcaagtcccattacatatagaagaccaagtcgaagtaaagcaaagaccagtagagcccctcagagcctacataagcatgttcatgatagaggctacaaaagtcgcaagattaactgaagaagggaggctggccaccatactgggggccatcgaggtactcgaagaactgtgaaaggacattaaaatatgtggccccgtagggtctatggtggagtttctagaccgagtagatgggtttatcaagctcgaagaggctattcagtgagcaaacgtcgagcttaaaccggcccaaccacatgtccccttagcaggagcacctactcagagctcacaataccctaacaactcaactcatagtggaaaaaggtccaataacaattgcaagcaaggcagtaggacgaatgaaaagttcacaggcaaagttgaacacacccctagagaaaatgcctccaagttcactgccgtttctgtcctaactgacgacctagagacaatatacacgataacccagtctatggtcccgtacaaaaaacctactcccatgaagaaggacgtaaataagagagatatgtccaaatttttttattttcatgcagactacgtccacgacatgaatgagtgcaacaacttaaagcgggaaattgaattcttgatcataaaaaataacctgcacttgcaaaaatacatgaaggccgatcagaatcagtgggccgcccacacagacaataataaagatctacaaatacctccacaagttgacggacatttgcaagtaattattggggccccacacctcgctagagactcgagcaaagcttgggagaggtatgcccaaaccttacaccatgagcaaaaggaagtagtcttggtcgtagaggagagaaagccaaaaataccacgggtaggggaacccactataaccttcacttaagaagatgtcgtccacatttgcttccagcataacggtcccttggtcgtggaagtccagatagcaaataaaatagtggcccgaaccatgatatacaatggagcctcttcaattatcctattcaagaaaccatatgagaggatgggactccaactcaaacatttgaccccctgtacccaacaagtctatggtttctttggcaaaagtgttgcacctttggggaaaatttgtctacccctcactattggacaagctttgaggagcgtaacagtgatggcacaatttgtgataattgatgttccattagcttttaacgtcatgttgggccgaccaaccctatatgacctaaaagctgtcacattaattttccattcgtgcgtcaagttcccaacaaagaatggggtagggtgccttaaagggaattaacaaattgcacgggaatgctataaccttttcctaaccgaggccaaaaaggaaagttcctccagcttgagttcggattaggggaaaagtattgcccaataggaagtcgcccaaggctgggaggaggatgtggatccctgacttggtgaaccaaatacaaatgtaaggtgactggaagaattggaagagatagaaatcgactcaaatgtccccaccaggaaactcaaaattggcaaagctttgttgctcggagtaaaattagctttaata

SEQ ID NO: 33563 - DNA, 2272 bp, Cannabis sativa
atacttgggttagaagttcatcaatttaaagtgatggaataatgcacctaaagaaaaagaactacattgagaagatcctaacaaagttcaagatgcaagattctaagagcacttcagtacctcttggaggacaattcgtattaactaaggaggaaagtcctatgatagtagaagagaaagaagagatggaaaaaattccatatacaatggctttggggtgtctcatgtatgtcatggttagcacaagacctaacattgctcatgctttaagtatattgagtaggttcatgtcaaatcctgggataaaccattggaaggcactcaaatggctgatgagatatttgagagggacatcaaatattagattgacttacaagagagtttcagagaaagtaactttgaaaggatatgtggatgttgattatgcataaagcaaggatactatgaggtctactacctcatatgtgtttcaaactaatagagattgtattagttggaagtcacagatccaattcgtagtagcactttcaactatgaaagcagaattcatcgcgaccacagaggtattcaaaaaagcaatatggctacaaggaattttgaaggagttgaagcttatagttggaagggcaagggtatattctaatagccaatcttcaattcatttgtgcaagaattcagtttattacaagaagacaaaacacattaatatttggttattttggataagggagaatatagaagaagaagtaatcgagctaaagaaaataaagttagaagagaaccctgctgatattggcactaacgttttacctgtcagtaagttcaagcattccttggacttactcaaccttagttgctaagaagctacacatgaaagtactaccgcctccataggacaaatgtgcacagcttgttgggggttgaagaaataaggtagaatttgtggtataattccttaaactcccaatcaagattcggttagttagttagctgttcattaactaacttaattgtaaaaaatgacagcaagtatattggatccattgtcctatataaagagagctactcatctcatttcataacaacaacaaaagaagactctaccgaaaaaaaggagagagacaacactgtagagagaagttagagtgtgaacgtgagagagatatctaagagataaagagttgtgattgagaaattgtattgagcaacattgatgattatgttggctcgagttagtgagttaatgagtgttgatggattacaccatagaagattcactgtaattattttcctgtagctcctacgattgatatctcttattctcatcaaataaagattggtggtcgtgcttttaaactagagtaggacaaaattcatattgaacttgggatctgaactagtataattctcgtttcttgttgtgtctggaagctatctaaatttaccttggtgtttatgtttttggtttgatatgtgtttgaaaattttgttcttgatttgtttgttttgatttaacttgcgttgtttatgtatgattttgaagctggaattacttaattcatatatatgagagctaaatttcttacatttacatgatataaatatgtttgtaaatataaatttagacgataagttgtacaaaatagtaaattcacaactaaaaagtagtataaattgatctttctaaacaaagaaacaaaacataacgtagaaaagagaagctattggaaggaaagtgcatgagctagcagtgtctattgttacaaaacagactatatctgagactgaaactctgctgaagtgtgagacagaatatttaacaatgtcatttttccttcaattcccaattttaagtggtgtatttgcaaacttccatgaacaacgaataaaagcatcttgtatcctatcacctgccacgtcattgatggctaccaaatcagaaatctccttcaagtcttctttgctcagcttcactcttaatgatccaatgttatcatcgagattctttgtcttagttgtacctacaatattaatcaacaaaacaagcttagttaacttacttttgctactaattaatatacaaatagtggcataatgaatgagtttgtctcaccaggaataggcgccacgtcatcaccttgatgaagaacccaggcaagtgccaattgtggaatcgtacatccatatttttgagccaacttctccatttgattatacaagagtttgtttctctctatattttctccttgaaacctaggatgtgattcctaca

SEQ ID NO: 33564 - DNA, 1571 bp, Cannabis sativa
aactaacttctcaatcaacggatattgtatctctccccctatcatgcacttcctaacgtagtacactggatgttggaccttgtcctcttctcggactaaggctgcgctgacagcattcttggagacagctaagtatagtaacaaatcttcttcgtgaactggcttcgatagaatcagtggtttagccatgtgttcttttagttttctgaatgcctcctcgcattcttcagtccattcaaatttttgatatttcttatgattttgaaaaaagggatgcagttgtcggttgatcgggaaaggaattggcttaaggcaacaacctttccggtcaagctttgcacatctttgtgcttcttgggggaaggcatgtttaataaagcttgaattttctcggggtttgtctctatccccctttggctgacgatgaatcccaaaaatttccctaacttgaccccgaaagtgcatttctttgggttaagtctcattctatacctcccaaataccgaaggcattcctgcgaggtcattccggcatggcttcacgcatgctttggatttgactaacatttcatccacgtaaacctccatatttcttcctaggaggcctttaaacatttggttcaccattctctgatatgttgcaccaacgttttttaatccaaaaggcataactaggtagtactatacccccttattggtcgtgaagctagtgcactcttaatctgcaacgtgcatcttaatctggttgtatccagagtaggcgtccatgaaagacagtagcttgaacccagaggtggcatctaccatctggtcaatctgaggtaaagagaagcagtctttcgggtaggccttgttaaggtgggtgaagtctatacatactcgccatgtcccatttttctttggcaccagtaccggattagccagccattctgggtagtacacatcctagattaggtcgttggtcactagcttatctacctccttttccaaggcgtccgcttttactgggtcaatgggacgccgcttttactgtactggcggcatatctaggttaatgtttaggacatgggtaatcacatgcgggcttatgtcggtcatgtctccttcgcaccacgcgaaaacatctgtggtcgcccttaatgcttcaataattttgtttttttcctctggctctaggtttcatcccaagcggaggatcttggtagggtcgaggtcgcacactcgtacttcctcaatgtccttcataggctctacagtctttttggatcccatacgaggatcaaacttatcttcttctgccaactctggttcaatgccctcacggaccaccagcaccggcaagtgtgctgcaacattatagcattgcttggcctctcccggatttcccctcattgtccccactccagcttcctgagttaggaattttaggcacaagtgccggatggtggtgattgcaccaaagtcgaccaaggtcagccagccaaggatggcgttgtatgcggttgggcaatctaccaccacaaaggtgcagtacttaaaagtactctaaggggtatccgagcacagggtgac

SEQ ID NO: 33565 - DNA, 5793 bp, Cannabis sativa
  modified_base (5760)..(5767): a, c, t, g, unknown or other
tcattaatgccccaaccatgtaaaaatctcatgcattaaactttctacagctcttcttatatattatttaactggttgccaaaaatctcggtcaacaggttcttttaccgtttttgtttagttgctcgttgttatataaagactttcatatttttcccctatttgtttttacatatatagttagatgggtacaacatgtgtttttgttgattctaatattcaagttgttgaagatcatccaattttcattgaccaaactcctcttgttgacaagaggaaatctaagaaaccaatagctttgacgtctccctttatggagtttgactcttcgaattcaagttctaaagatggttctggttatggagttgttaagtacattgctggtttgtgtcctcttgatgataaaattggagaagatatagaccataaagacgagaatgattttgacttgtggcttgatgaaggtcgacgaacaaagaaagaccagtatgtgttttatttagccttttttttgtttcatgtttctttttttcttgatattaaattattatctgtatttttcttttttattatttttttatcttttagtcatgttaaggagaaggtttacttgaagggtaatgataagattgttccaccttttcgttttggcgtggaagatgttgcatccaagatgtggttccataagcttgcatatcttggccaatgtttaattgattctgtaagttttttttttttgctgaccttttttaaaattgtcattttattggttttaatgattatttttttggttgttgtgtagttgtttatattttttggttttttttttcatatgttctttgttttattgtttagcatttggatatcattttttactatctttggaaaaaaggaaagtattcaaaggaactgaaggttaagtttacaaccactgattgcttattcaacaaaatcattaatacattgtatgaaaaatttttggcaaagaaaaaagatcattctttgataactgctcaacatgccattgctattatatcagaggtaaaaagattttgtgtggtgcacattgacatttgtgcgatcatgttttgttaatcatccatatggagtctgaatcacattagattcttgctcgtttgaatgttgaggaaatgcgaatgtacatgtacaactctttctcgactgttatgaaagatagtatcgctatgaaagcttgtcagccttttttggtgttattgccgtacttttttgctttgtttgatgagttcataaaggataacaaaccggtttctttagacccttttgatgtggttaaggttgatggtttacctcaacaaaacttgaagtaagttgtttaaagtttttattttcaagtgttgttttgttttttttctaggtattttccttttttttttgtttttcgatgtttttttgttgttttccagtgactgtgatttttttgtggcatcgtttgctgaatacgtcattgataagaaaccaatcccttccatatatgatgttgagaaacaatgcgatcggctgattgtgttgttcttcaagtatgctcgcatgaaagaatttgttttagttatgtctttgttgtttttagctaaaggactaattgtttagttgtttttatttttataatcaaattatgttaaaaatcatagacaaattgttgtttctagcaagtgtttttatatggttattgtttttattttataattttctttttgttttttagttgatatattcattttaacctaagaaaacatctcaatttcaacctaattacaacctgcttttaatgaacgaacctagcatttaaatacttttctgtaatatttgtgttattttaatattaataatgttaatatacattttctgggttaaaaatatctcaatatcagcttaattacaacttgtttttaattgatcaagcaaacatttaatcacttaattgtaatattttttttgatgaataagaaattttactgctctaaaccaaacttttacatcactaatctttataatttactattgattacaatcaactatcaacaatgtataacaatgtacaacttcacatcctcaaaatccattccgtgtcctcttgcttgactttcttaggcagcagccctttgattctcagcttgcttagttgctgagttttctgcactgtagtgttgatgagccacacttgttgattccacaatacttcatttctagccttccatatgtgatacacaaaacttacaatgactgtgttcaccatactttttcttcctgcagaaaatcttttcgtttgatggcaggattgcagcagtttagtaatctctactactggtgtgttccattgcaggaacaacttgatctcttgcaggcatttcctactgtattcacactgaaaaaacaagtgctcaatggattcatcttccttttcacacaacaaacatgtccaatctatgttgtgattgtatttgcttactatctcctttgtgtttagccttttccaaaacactagccaaagtataaatctatgtttaaggataatgagtctatcttaaacaagattacaccaaggcaatttagcatattcagagaagagcacttgatacccttgtttaattttatatctctgcatcacaaagctgttcatgctccttttttgctgaaacatgttcttgacagctactattttcttccatgcccaactacaatccagtggaacaatataactccaccagtcttgatctttcagatacaccatgtggatccatttgacaaagagacaatccttcttgctggctatgtcccaaacatatctccccaaggctgcaatgttccattgttggacatttcgaaaacctaattccccagccgatttgtataatgtcatttgtataataattatcatagtatctattttctctcaacaatatgtttgaaaaacttttaccaaataaaaagttctacttaaaaataacgaaacaaccaataaaaatagtatgtatgtttatctaaatggttcaatgtagttgttttctagttgctgaatagttgtttgtacttctatgttgtaatttttctgcacgtttttttgttatgtcccttttgttcacacttgctacacttgtctagtttttttatttcccaagctgacgtcatttttcttttcattggccttccagatttgattctttctttggaaggcaacactatgatgtgttcaaaaaattctggtagatcccattctctaaggtttccaactgggtatactgtttcttcatatgtttgcagccatgcttttgatgtgtagtagtgtgcatagtatttgtatgtgtctatgttcaagtccttcatgacaccagctgcatagttacatggcatttcatcattttgaaatctattgcatgtgcatgtcttgtccttcaagtttactattcttgttctgtcttcatctatcacctcaaataggttttgatttcctggtttgacctgcatgtttttcgaagcaactttaatacaactaaaaaactctataaaaacaacttctacagtttagagtatgcgacctctaatatcaacttactgttaatcgcaatgagtgtacatagttccctatgagtttttttttttcagatgatggtgtcagccttgttgtgcatttttgtgcctcttttctattatggtatgtccactcttgcatttgtaccctcaagcactccattaatcttgtgactggtgtttcccttgctgctaaatttgctgagttcagtgcttctgctatgttagatgtcatagtagagtacctaccatttaaacaatttttatcatcattctaatttttactccaactgatatgcaacactaaaaaaacacaaaaacaacgtttttaatatcagacaatgtataacatgttatccttttctaaaattaattgttattgttttacctgttattttttgaatgatatcttgaccatttctcatggccaattttttccaaatcggtcttatgcgcttatccaagttgtctagctcccttatatgaaattcaaactccaattctgtgtaagcttttgcggctgcaaagaattgacctctgaaatgctttgcattttttttgaattttgtttttatgtttgacaagaggtagaagatgcagtagccatgtgttatttttgagaacacttttcttgttgctttgatgatgctttgctttcatgtatgtcttagattagattaggcattgatcttctcgaaccccgaatgcttctttgattttttttgaagaactacgcccaggctttatcattcttagaatcaacaatacagtatgcaagtggaaatatttttgattctgcatcttgtgtgttggcagtgagcaacgtgcctccatacgcggcctttaggaatgtcccgtcaacaaccatgattggcttacagtttggccaacctttaatagcagcatttaatgcaacaaatgcatattggaaactatcatcttcttgtttctctatatcaattattgttcctgtaattaaagcagccatttatcgttaatagtaatagttagcaactgttattcaaccagttagcaacgcaaaaataacgttttttgttcaacaaatatattttaaaaaaatattttccttctacctggatttttcttttgtagcatgtacatgtatcttggcaagagattgtatgattctttagcatttccatgcaactggttttgtgctcgctctttactacgccatgctttcatgtaattcatctttattccgtatttatctttcatttctccctgtatatttataggactgcactttgttttcaagttcaagaactttggttttacgaaatctgctattaacttttttgttgcttgtcgttgatctttgaatcttattagaactgcagatgtgtgttcttcttgataactccttattatgaatgtttctgtgtttccattttttgaagcctttaaactccatttgcagtttgagtccaaataaactatgttgtattctttagtgcaagaactttgtatattgaaatgttttcttgattgcaaagtagcacagagcacttatcactgtatctttttccttgtaaatttgtctattttctattgtttcatgtcgtttatcattgataataatcatttctgtgttgttgacttcttcttcttcttctttttggttgttttcaagctgttgtaccatttctgcagccacaagctttgcgtagtcggtgaagtcaaaatatttatctattgctggagttttttcgctgttgttttttggttgttggatggtttactctgatgttacagcccaagtctcgagcaaaaatgtatcatcttgaactgatccaattgtgggtggatatagttgttgcttggacgttgttgttgggttgtttctaggttgttgcacatctgcctgtgctgagttattgtcatatgctgccataatcatattgttgcacaccattgtttggttaggtgcaaaaaaggtttgtctctctgtgtttccgattttgttcacacacaatgggtaccttgtgaaatcagtctcttcgcttaataactttgttcacacacaatgggtgcaaaaaaggtttgtctctctgtgttatcgattttgttcacacacaatgtgtaccattgtttggttaggtgcaaaaaaggtttgtctctctgtgttgccgattttgttcacacacaatggcttttgttcgcttcttggtnnnnnnnnacttcttcttcgatttgggtttcgaa

SEQ ID NO: 33566 - DNA, 1946 bp, Cannabis sativa
cttcaagagaccatcaatttcaaaaaaaatttatgagagaagtgaacccctcggcacaaatgagaaaaaggtaaggggataaaggatccctttgacgaataccccttccaggcacaaaagaatctgacacatgcccgccatgaacaattttgtacttcactgaaatgaccgtagccaaaacaaggtccacaaaacgagtggcgaagcccattttttccatcatagctctaagaaaaccccattcaactctgtcataagctttgctaagatccaatttcaaagccatatatccctccttacccttgtgttctctcttcagataattcattccttcaaaagctatcataatgttatcgcagattaactgcccaggaataaatgcagattgagttggagaaataacatttggcaaaaatactctaagacgattcgtaatcaccttagaaataattttggagaggacaatacacaaagatataggccgtagatcacccatggaaataggctattttttcttcggtataagcacaatatttgtatcattaagcgcatcaggtaaaatagcggtatcaaataaatatctaacctgcttaaccacatcatccttcacaacattccaatatttctgaaagaaaccaggcgtcataccatcaggtcacagagatttgtccgggtgcatatgaaccagagcacgcctcacttcttcctcagtgaccgggtcaaggagttcttgattgtgatccaaagtaacggcactaggagtaacagcaatgaccgaggaaaactctgatgctgaagtcgtaaataggttcttgaaataatccaacataacatcaggaagcctatcgtcccacgacaccaaaatacctaaatcatcttgaaggcgagaaattgtattatgctttttcctagctgtagctttagcatggaagaacttactgttgctatcactttcacgaaaccacaattgtttagatctttggcgccaaaaaatatcttactggtttagggtctcgcttaggttcagttcagcatcacgaaatcgttgaatagaaatagagtctctccctttcttccattgtcgaatctctcttttgcactgtgagattttttgcttgaagttacccgtatactctctcccccaaacggcaagcatctccccacaatacttcaacttctcaataatcggttggccactacaatgctcccaacaatcagacacaacttgtaaacatatgggctcacgcaaccacacattctcatagcgaaattgccgaaaaggaactataaagtttcaaatgataggctcaagtaataacgggcaatgatctaaagctgtgattttaggattagtcagcttcgctagattaaattgttgataccattgagaacacaccaaagcacgatccaggaggacttctatccatgcatcagtacctctcccactctcccaagtaaatggataccccaacaagtcaagatcaatgagatcacactcagcaagaacatcattaaacccatccagtatcaattgaggataaccgttacctcccctcttatcaagatgactagtgacattattcaaatctccaatgacacaccacgggagagtagattctaacttcagagttcgctacaagtcccaagtcctataacataaactcctattaggctctccataaaggccagtcaatctccaagaagaagaagcagcttcggatatctccatgtcaatatgattgaaagagtagccaagtaactgagcatcagagtcattactagaactctggcatcaaccgaaaacaaaccatcaaatcccaacttaacacgaagtctttcaagtttctctttactagaaaaactttcaaaaagaaaagaaaattgggtttcacaaattgaagctttttcttggatcgggttggggccccgacccgatggggcagtcc

SEQ ID NO: 33567 - DNA, 2126 bp, Cannabis sativa
agaaaaatataacaatggatttatgtttatgagttttaatttggaattattacatgaaaaatacaaattgacattttatttacaaaataagtgtaaacaacatttatacattttatgtgcttttaattaccaaaatatctcttacactatcacttacgcacataatcagatgaaggttactgggtggttgaccaaatattgcatcagacgaaggtttcaatctcaggaagcatggatcgtgggttgaaggtgtatataagaagtatttgtttaatttttttttttatttgggctatacacttgtttattggtcggttgaattttttttttgtaatattaactcaagtctcgctcccccgtggctaaatgtgattgttatctagtgaagaagaagtcgaaggtgtctttgcctaaaaaaaattcaacttccacgggcaaaaggggaagaagatgtcaatttttaaggcaactgtgatgaaattgtaatgcaacagttatatctgttgcgagccaactaacataaaaccacaaaacaactaataattccacatatttaatacaaataaatattacaacaattgtgttttatctgctcaggtcgtgtatttgaaaattctaagccctatttttataattctatgatattgttgtaggaaaaccattattcaactaacgtgattgcaactaaaaatgttaaattttgtcagtatttttttttgtcactaatcgataattacttgtatcttaatagtaatatttggataaataactgttagcaaaatatttatgcaactgttatgaaatattaaaaatcaaaataatattttcacgtacgtaactctatctacatgtctctttatgatttaatatgaataaattcaccattagaaatttggaaaacaacgaaaaatacaccaggataaatattttactttagtatattgatgtgatcttttggattatatttgaattagattgtttgagaactccagttcaactttttgagatctgcatttcatagatctgaaaattgaagttagaacattagttttatgagcattaaattagatttctagttgaattttagtatcgtaatagtttttctgcactttttttttcatgaattcgaagcaacccctgttttgattgattccagtcatctcctcatgtaaagttgccggagtaatggtggttctttttctggttggattttgtttcagtggtattgggttattgggtggttgcccaaaagttacattagacgaaagtttcaatcccaaaaagtatgaatcgtgggttgaaggtgtgtataagtgatatttgtgtaatttttttttatttgtgctgtatatttatttattttgccagcttaaaatatttttataatgttatttattttttaattaaaattttaaaaaaaaactcttatataatattaacacatgaaaaaagtgataagcaataccaatagtaatctttaacatttctctttaaaatattacgactatacatttaaaatgaggtagattccgctcctataatattattttcccaatcgccactatcaaaaataatattattttgccagaaaaaaaaaatggtaaagagtgtcgtaaaagttaaaacaatagaaaagctcgatctttgtgtatcattatcatgttcttttactgttccaaaaactcacttctttcaactcaaaaattccagaggaatcctcctccgttccgcaggttgcctcaactccaacacttccactttcactatactacccaacctatttgtttccttctttggatttctcactctcatctcatggaatcttcacaatagtaagttaattttcaactccaaatgtctttttctctcaactagatgtatttactattctaatcaagatttttctttgtttgcttaacggtagtactgggttatacttgctaatttctataccattagattctaacctaacatttaattacaaaattatgctttaaaatagcaaggattagagttgtacaatgtattcccacttgcaaatggggagtacccatgtgcatagtttgatctacaaaagcttagcttagcttaactgcttctaaaatttatgctgcagcaactaagaa

SEQ ID NO: 33568 - DNA, 2805 bp, Cannabis sativa
tattaaaaagtaaccaattcaaaataatcgatccaatttgtacttttgcaaattggactggattgaattttagttgatatgcggattgaattggatctaaaatatgaaatccatacttactacagattggatgtactatgaacaaaatagtatggattagatcagataaacacccctaagtgaaactcttttgaagttgaagattacctttacatatatggataaactaagtaagaagaaaaaaatattgttatcaaatcataaatgtgaacaatgttagattaattttatttataaatatatttattcatatttatttattttaattttatagaatttttgctccctaaacttttacatgtaccaaattatgtccctgaatttttctgatcgttaaaaattttccttaaactattgagtttttcaaaattaagggtttttgttcaattttactaatttagtgattgtttatgtactaaatcatgctcctcaaactttaatatctaccaaattatgctctcgtatttgacatatgccaaatcatatcccctgaacttttatctatgttagacttttcttactaaaattagacaaaagtctttaaatccaacaataaaatttttaacgaccaaaaaaattcaaaagacatgattatgtacatgtcaaaatttaaagaaaaaagatcctaattagccttagaaaaataagagacagagacatagtagtttggcacattgttttcatactgcaacaaacaaaaatagtctttttaatataaaaaccaaaaagttagaccaatttaaactcatgaaaaagatacaaggattataaaataaattaccactttttttttttttttttgcttaacttaatactcatttgtacatttagacaacacacagaaaatatcatttacattatcaataaacttagctaaaagtaatacctgcagcacaacttctcaaaccagccattatgttcttctaatcaaatttttattcatttatcaaatcaaaagcaatgggttagtgagtatgaaaccaagtgcatgaggctaaattttgttgaataccttagtgttgatcaattgtgccgcgagtggaacgagtcgaaaagcctctcaataaatagtgttagtagaaaaaattggtcatgtggatatttgtatctggtttaacctattaaaccagattgaatgcagaatcatgtggaacaaatcatatcttatgggtcttgggttccaaataaaatgcttctgcaccatcttcacattaatttgcatagtgagatatctctttaatggaatagccaataagatctcttttaaattgggaatatccttctcagccacaataacagaaaaagcactccaatttaatacctcactaagaggaaggacaaagttgtctgctataatcactgggacacattcataataaatggcctcaatgattctgggactgttgacttcataccccattgggcatatgcaatatttacttgacttcatgtgttgaatataagacatctttcgggagactctcgcaggcaatggcccgtaaattttcatgtcttcatctttgttatgccagtgcttcagtagagttggacgaaccctgccgtgcatgttaccagcaaagaaggaaaggataggacgttgtgacactctctttccaccaccgatatttctaagaggcctcctgggagtccttatggtagtttctggtagggaaacatccttgccacgaacaaagactccttctgaaagatcggcattgcataggacttttatggtatttttactcagctccttgtgctcatttactgtgtatggaccctgcaaaatgttagatcagtatagacaagaaaaaacgcactaggataatgtggagaaccacttttagaagaagcaactaccaaatcaaattttttcaagccactgattctaaggcagatgttctttcaagatgaacctactagttcttcagatgaatttgactttcaatcagaataaaatatttctttttgtcgccaccaaactctcaaatttcaaacacagacagtagcatagatatcatcaggaatgaggtacaagtttcaataattacactgttatgctgctaccactgatatgggcattactactaagttagaaagggagacaagctatagtttccttcagtataaaagcaactatacagtgcaactgaaggtgtattacaaggtgtaactgaaattgaactaaatgaatagaaacttttaataatttgtttttttttttttgtttttcctgaagtatttgatgattaaacattttagttaactaagaatgtatattcaaaacagcatcatatacagataagtactgataccagtttatggacatagcaaggagaagattttcatacccaatcatggcaagcaacaaggaagtgatccgatccatgtgagcgattccagaaaggatattttgcagcaatctttttcacatagttcctaagatatattgataatggtttcaaattatgtgattcaggcacatatagggccatttccagttggcgagcactgtatggcagataaaataagtgagctttttctgggtcctttgtgacaaactgcttatttccttccattaacttcataaaccatccttcagaagcatatattccttgcagatgtgggtgatgaaaaataggtctcgatccatcgggataaatataaactttaagtaccgtctccatcagttcgtagctcctatatttatgaaacacattgcttttcagttttgcagagaatacttcc

SEQ ID NO: 33569 - DNA, 2353 bp, Cannabis sativa
ttaaagtataaatctatatatatagactacattggaaaaaagaaggagatgctctggtctagatccgtgatgtaataataaaataataacatttgtcatgagcatatcagcatgaaaattgatgtattatactaggaaacataatttcttatagtgattttgattttttttttaaaaaaaaaattatcaattttatattatatttttttgagttattattaatgaattaaatttaaaagagaaaatgaaaacataaatttaaaattttaaaatatctaaattaaatcaccgcatcccacgcgaccacattcaaagttgttatcataactgtatctcattttgtagtcgcttttacaatcaaagttgttatcatcatcgtatcttacatgtagtcgcgattacatttaaagtcgttgtcatcacaatatttataacgtttggatcatgagactctaactgtcacaatcacccctctttgggagtccgacgtcctcgaccacacttttggctgggtcaaggctctgatactatttgtaacgttctcgcttcaagcttctattgagctcttacacccatggaatgatggctcttatacacgagtatgtcactctggctgcttcatggaaccgtgatgactgaccctacagaccaacatgagtgtttccagcatgctttgtcctcactcgaacatttattaggaaaacttcacaggaggtcactcatcttgaaattacctcaagtatggagttctttcgtgataggctactgaaaataaaatccaccttgttgatataggttgtaccaaatcaatccatttaagtcatcatcaatgtagtcagatacctacacaatctcggattaatcatcacacatgacctcccggcgatgtgggattgtacagctccagctctttccctttcgaatcacgggactctgactatcacagtatctcacttgtaatcgccactatatttaaagttaatatcatcatcgtatctcatttgtagtcacgactacattaaaagtctttatcaccaccatatctcaattatagtcgtcactatattttaacacgtatctcacttattacaactttaaaaagtatttattttgtaaatttttatgcatattaattttattattactatttattttaattttaataaaaaaacataaataaagtactgaagaaggattttaactctcagctttaaattactctttcattcattcaacaaaatggttcaaccatcataatactctcaactttaaatgacttttttttttgaaataagcgttcattactaaaataaaagttagacctcatggtcattataaataatatttactagaatagatggcacgattaccattccagttaagttttgggcaaaaacccacttagcaacattatgacccgcaaaattaccaagtttagagattaagacaaaattacaactcaaaaattatttagagagtctaatacaattcaaaatataattattaatgtgccaaacagaaactttcctttgcaaagccttgataactgtatcgaaatcgcactctctataatcatgaaattgtgcttccactccactgctctttccaaagcaagctggcaagctattgcttccccaataagagcatcagaggatatgagcatgtttgaagcaacccgcaaaatagttccccaatgatcctgagccagagccaccacactcatcaatgaactttccactttaacgtcacagttaattttcatccactctttcggagaggagaccagcgaggagtatctcgaacaatagtggaagtgaaaaagtgtgatccataatctgcataacaacgagtgatagagttaatataatacatgatgctactcagcttattattgtgtaccttattattgcaggcttgccaaatagtatccacaacaattgatgcatacaggaacacttccttaacattaacgccctttggttgtaagcctcataggaatttaacccagtcacaaacgtgcccacctaaatccataatcggtatcaatccccatggggaagatctccataagtggaaagaaacattgcagtagagaaaaaggtgttccattgtctcttctccttccccacacaaggggcaggcagtatcgctaatttgcaatctctttgcaataacagcacgaataggcagagcattagaaaagatgctccacttgtgtctctctagcgccttacaatttcataatttgttctaaagcgatagggccacagtacaaggaggagtccgctccaaaacttgggctaaataggcaaacttggtcaaaaaattacctacgtgatccaaggtccgaatc

SEQ ID NO: 33570 - DNA, 2028 bp, Cannabis sativa
tttactctattcatgataaaccagtttcttacaaagatggatggatgactggctatctgaatacacaatcactccctctttgatttgtttcaactcataaagaactccttgaagccataatgctttcttaaaagcttctgttctcgccataaattctacttctgtggtggaaagagcaaccacatactgtaactgagccttcttgcataaatagttcccatttgtcaagaaaatatatgaagtggttaattttcttatatctctattcggggtgtagtccgcgtccacaaaccctttcaattcgaattctcctttttctttctcataggtcagaccataatcctacatgccctttaaatatctcaataaccattagggatttctaatgctccttgcccgtatttgacatgaactgacttatgatgcttaaagcgtgagttatctctggtctcgtactcaccatcacatacattaaacatcctagaaccatagaatagggtacatccttcatttattctttctctttcgtgttgttaggacattattcctttgacaaaataaattttcctcctaacgaaatagatgtactccttgtatcttccatgttgaacttttgaataattttcttgatgtacccagactgctttaggctaatagtcccttccttctagtttcgtgagacttcgataccaagtatattttaaactggtccaagctctttcatctcaaattatcttttgagcttggctttgatacttttgatcacaaatttatctttgctcttgatgagcatatcatctacatagagtaataagaacatagtcgtagattgctccagattcttaaaatataagtagtgattgtatgtggatcgtttgagcctgatttgatgaatatacgtatcgaatctcttattccattgccttagggacaattttaaaccatacaaagatctattaagcttgcacactaataaactccttttccttccacccaaaaaccctggtggttgcttgatatagatctctaggaacccattcaaaaaattagtcttgacatctagttgttcaacttcaaactctagatgtcctaccaaggaaaacatcaaccttatagttttgtattttaccacaagtgagaagattccagtatagtctataccttccacctgagtacaacctttaaccactaacttggctttgaacctcacaggttcattctcattgattccctctttcgccatgagaatccatttgcactccacaatcttcttgttctctagctttggcagaaaaacccaaatcttattcttctagagtgaatccacctcctcatccatggccttaagccattcagacttgtttccacctgaaattgcatcgtcataggttccgacctcttcaattttaatctattgaactactgcaaatactattatgtctgctttcccaaacctttctagaggttgaatctctctctgggttatgtcacgagccaattgataaccttctagacctgtctgttcggacccttctaacacctctatttggtctcgttatcatgttcttctgactccacaatatcttccatctacgcattgtcttccagttccagattatcttccgtctgtggaccttcttttaggagctttgtttcgtactccatttccatacttgtagtgtctttgtttcttgtttttcctacatcacatggagacacactacctttcttggaggtcaagtgaggatattctaactcataaaaaataacatttctagcaatcaaaacctttggttcacccttcctggaaatatagattctataccccttggctcctaaggcataacttaagaaagtttttcttcacaggatctagggttccatcttgtcaatggattggtgtacatatgttgtacatctaaatgttcttaaatgtgttaggttggggattctgatgtacaacatttcataaggtgttttaagtctattaatctattagagcttctatttataaggtaggttgcggtt

SEQ ID NO: 33571 - DNA, 2474 bp, Cannabis sativa
  modified_base (784)..(791): a, c, t, g, unknown or other
ttagcattgttgccacgtcccaatgtatagaccatctttacttcacagttcacacacatgtctttcaattttgcatgactcataatttttgttggcagagttgttgtttttaagtgtaggtgctatttttctttttttggtagataataattgcttgactgaagttgaatcggtcgatgagattcttcaagaaattgaaagattctacaccgacctattcattttgcagcaaccacatggcaatgcaattgacactattttccagggaatcacctcccaacttactcctgagcagagccatcttttagagaaaagtttcacccatgctggggtatgtgctctcttctaaatgcccctgataaggcttctagaattgatggctttaacaaccaattctaccaaaagaattggcgcatgtggtgggtaacatggttatactgatgcttgtgctaagcttccttaacaacgaggcagatatattccacttcaacaccactttcattaccctcattccaaaagtgagagagccatccacgcttgaagatgtccgccctatcagcctttgcaccacaatatacaaaattatttctaagaccctgaccaacagaattaaataggttctcaaccttcttacatctctcaaccaaagtgccttttttaaaggtcgccttatctctcataacatcctgaaggcataagagctccttcatgccattaaagggaggaagaaaggctcttagagttcgtgttagattttctgtcctaaataaaactcattttaatnnnnnnnnatttactaattaataaaaaatcagaaatcgtttttatgttgcatagtttacataatttatttcatgattatgtttaatgtataaattttattaagtcgagaatatttatatatatatatatctctatttgtgttcttggtgctttgcactattattgttgttcatacaagctactcttagctcatttttaacatttagaaaactacccacatgatcttctctctctagattttctatttatagaatttagagcttctgacacttagtctattgttgtcattatcatctcgtgagaaataaaaactcgaagtagatgtcataccaatactatcgcgatataggaagtgaactactataaatttgttgtgtctctcttatataaactcaactacttattcattctcaccaatctagccagcgggtgtggcttagaagtctagtctaaatttttgagtcaacacttaataaaaaaaatataaaaaaaaaaatttatatcttttatatcaaaaatatatttatataaaaaatatttaagtcaaacttaatttttttttattattattactttcagccgatggaataactctaacacttataatgaaaaaatgagaaatttttaagggactaattcaaaaatatacaagaaaaatattacaaaatacggttgtacgaaattttaaacatttttaattatcgcttttaagattttatttacagaacatgtttattacaattcatacggttttttaatattttcatgttatactcttattattttattgttggcttttgttatttatatattacttttatgtttgtttgtatgttattttcatattacttacatataattttttttgttgtttcactgtaaaaaaatatatatcaacataaattgataaaaagtgtaatttttttaccaaacattgggtattttttttttttacatagttaaaaaaattaagcataaaactcaaattatcataataataataataataccccttaatatattaagaaattgacatgtaaataactgcctcttcaccaatacaagttcgcctacaatatgaacacagctacaattatcataaaagtttagatcatcactcaaataataaaaattgaaagttgcgaattgattcctttggactcttaagatagcatattttaagaagggcattttacataaatgtatatatttttttaaataattataaaaaatgtttaaaaaaaaatacaattttaaaaatgtacacatttgaaacatatttacaaaaattcatacaaattcttaattaaattataatagatatattgatgagtcaacttactatatttagatttgtataactattttgatgactaatttatatagtattaatgagtaagcctactaattaacaaaatttgtatattaataattacaaaacataataagatattaaagaaacaataaattttgtatttatcatacaaattatgtcaacaacataaatgaaatatttttaaaattcatttatattaattttacccttttgctattctatggacaaattaataggtatatgtcgatttttaaaaatcataaattttgatcatattttaattaaaaagatcattatcaaatttattcatcgtgtttatttatattaggactgttgttgtttttttttttgtttt

SEQ ID NO: 33572 - DNA, 2296 bp, Cannabis sativa
gcgcagaagaaacttcctccaaaactcagagatcctggaagtttcaccattccttgtactattgggtgaatagaagggataaatgcactgtgtgatttgagggctagcattaacttgacgcctctgtcagtatttagaagattgcagttgggggaggcaaaaccaactacggtaaccttgcaattggctgatcgatctctagatcatcccagaggagtcatcgaagatgtgttagtaaaagttgataagttcatttttccagctgattttattgttctagatatggaagaagacagcaatgtcccaattatattggggagaccattcttggcaactggccaagcgttgattgatgttcagaagggtgaatcgaagctgcgagtgcaaggaggagaagtggtcttcaatgtgttaaaggcaatgactttcccaaaggcaagtgataactgtttctttgttgatttgatcgataccttgtggaaaagaaaaagttgatagaagatccttcagaactgagcttaattaaggatgatttgactgagcaagaaggagtggaggtaagggagtatgctaaatggctcgattcttatggaccactaaataggaagtattatgaagagttgggggttgtgccgagggagcttgtgccatctacagagaaacctccagagttagagttgaaggtgattcctaatcatctatggtatgagttcttgggaaaagataagaagcttccagtgatagtgtcagcttcactttctgatgtggagactgataggttgcttagattacttcgggcgcacaataaggctattgcatggacattgggtgatgttaagggaatcagtccctcaacagtgatgcatcaaattttgatggaagaagacgctaaaccaacaattgatgctcaacaaaggcttaatccacctatgaacgaggttgttagaaaggaggtggtcaagtggttaggtgcttgagtggcctacccaatttcatatagtaaatgggttagtccggtgcaagtagtaccaatgaaaggggggatgacaataatcaaaaatgagaagatggaattgattcccacaagaatggttactggttggaggctttgtattgactacagaaagttcaacaaggcaacaagcaaacaccattttcccttgccttttattgatcagatgttagaccggttggatgggcaagagtactactatttcttagatggctattctgggtaccatcaaatagccatagcacctgaggatcaagagaagactacatttacatgtccatatggcacttttgctttcaagaatgccctttggattatgtaatgcaccagcaacattccagagatgtatgatggccatattcttagatctaatagagaagtgcatcgaggtgtttatggatgatttctcagtattcagctcatcatttgatcaatgtcttagtaatctggagttggtattaacaaggtgtgaagattctaatttggttcttaactgggaaaaatatcacttcatggttaaagaagggatagtgttggggcataaaatttcaaaaagtggtattgaggccgataaagctaaggtatccacgattgaaaacttaccacctccagtttcagtaagggagttcgaagcttcttgggtcatgtcgggttctatagaacatttatcaaagacttctccaaagttgccaagccgttatctaatctgctcgctaatggagtgtcttttgagtttggaaaggattgtcttgaagcctttcaaattctcaaaaagaagttaatctcagcaccaattgtgactacaccagattcagagttgccttttgaaatcatgtgtgacgccagtgattatgctattggagcagtgctgggacaaagggttgacaaggtattcagaactatctattacgcaagcagaaccttgaatgatgctcaattgaattatgcagctacagaaaaggagatgttggccatagtttttgcatgtgataaatttcgaccgtacttgattggcaataaagtcattgtgtatacggaccattcagcaatcaagtatttgatgactaagaaagatgccaagccaagactaatacgatgggttcttcaataagaatttgatttggaaataaaggataagaagggcacggagaatttagtggcagatcatctatcgaggttggaacttcaagagagtcagaatacaaaggaggttcaaatcaacgaagatttcactgatgagcaactgtttctcttggattctactccttccattcagatctctag

SEQ ID NO: 33573 - DNA, 846 bp, Cannabis sativa
tatctacgaactttgagtctacaatacacatgatttactacaaaaaaaaaagtatgtgaaggaggaaaaagaagaagaagaagaattggaaaaaagataagagtgtattttttttattttgatttttaggattgagcttgtaaatatagtctctattgcatctagtgtttgagattgtgcagaagatggttagtttattttaatcatttttttcttatgtttttttaattatttattttagtgttgttttacggttgtttgccatgatttattcatttgacgtcgattttactgttcttactccatctcgctagaattaatgattattttctgggtttcttgtgttgatgtggtggttctgtttgtgagtgtggaatatggagactataaatacattttttcttcgttctctttggctatttttgtggttttcttattcttattctcctacgagctcactaacaaaaagtttttgagctgtgtggtttttttatgtttttccaagtggttatatctacttcattattttgcatttgtttttgtgttgttttagttttattttagtagtttttttattctgattttttagaactgagtttgcaaatatagacgttattgcatctggtgttgaggctatgcagaaaattgttagtttctttaaatccttttttccttttattttttttttattttttttagtgttgtttacatttattttgttatgattatttattcggtgtctattttactatttttgctcaatctcgccgaaattaatggttgttttacgattgtcctactgttgctggttctgtgtagaagatggaggccccgtatttttttttt

SEQ ID NO: 33574 - DNA, 1531 bp, Cannabis sativa
  modified_base (675)..(675): a, c, t, g, unknown or other
  modified_base (1444)..(1469): a, c, t, g, unknown or other
ccagatccaagaacaaaagatggtgatccattggctaaagtaacaatcgaagtgggactatgagactgaaaacttgaaaagaggctggaattacctgtctatgatatgtggcaccagaatcaatgacccattttgaggatttggaaagaaggcatgcattagagttacctaaatcagtaatcacagtgagaagaagatgaagacttaagtgattcctgatacattgagaacttggcaaattcatcagcagaaataaagactgatttttcaaatgtgagtcaaatttagatgagagtcctgcaagaaaactcgaaatagccatctactcttgttggcactgttgagcttttacatcacgagtaaatggcaataacacattaagctcttcatatgtttttttaaatgtcataaagtaactcataagagacttatcttgtttctccacacgataaaacgctttgcaaacatcatatatgcgagacatgttgtctttgccagaatacaaaaactccaagtaatctatttattctttaaccaattcacaatgatttgttaaactaatcacctcattatcgatagaatttcgaatttgaaggaacaagcaagcatcctcacagagccatatttttcttgaatcgtctattcctttgggaggatcgttagtcaagtgatcanctttgtcaatactcctcagatacagttcaatcgtcttactccattccaaataattcgaaccaatcaatttatggtccataattttagacatcacgggaaccacatcagaaacaacaactgatttcaaatttgattttatctctgccataatctcaaaagcaaaaataattgaaagagaaaaggaagagagcaaacacaaaagaatagacactcaaacacgatgaaggcaagagtatcaaaccacaaaatgccaagaaccgctggagaccgatgcaaggaggacaaggaagtaccaagattgtgacgggcatcgactgtcaccggagaagatgccgaatctgctttcacgcaccggcacgtggggcccgcacggggtgaatctagacgtcgaaatttggggttttgtagatcgacggttggcaatatttttgagtaggcagtgagaacaaattatcactctaaagattgtttccgaaaaagaaccctaattgaaaacccaaatttgtgaggaaccctaattttaaattttgaattctcaatcctaaaatgagctctgaaaccatatagaaaatagtgaatcgaattgtgtgttgtattccataaaatactatatatttatatacaaaactaggaaactaaatgggaaactactaaatacaagttactctaattttcaacaactaatattttaacagatctcaagagtgttatttgtgttctttatgttgttagtcaaagcctacgatttggtttgggtcacacgtatagnnnnnnnnnnnnnnnnnnnnnnnnnntgggagcgctaatcatagatatgtaatcaatatcttctatctggacatagaagtgaaataat

SEQ ID NO: 33575 - DNA, 1228 bp, Cannabis sativa
  modified_base (1136)..(1146): a, c, t, g, unknown or other
ttcgaatctgcccaaaaacgaagggcaggccgcggcactccccacatggggctgcagcgccgagagagctaggccacggcccctgggtttcaaacccagaaaatcccaattctcctactcaaaaacatgctcaatcacaccccaaactcagtcaaaagcatgctcacacaccagaaataattccacaataataacccacataacaaagagctgtcacacacattttaagctataaatcacaacatacatacatcataaaatcagatttaatccttattcaaaataagcacacacttgagcataaatcaccaaaatctcatacccaagaacttaaatacctaatcataaattcagcttaccatcaaccataaaattgagagtattcaatcaaattcatacacaacaacattttaaaatctcatctaagttagcaagaacatactccacaatcttaacaacacaatcatgctataaacataaagattaaaatcaattctatccacatgcatacaagaccaacacaacacctttttcatgcttttcaacatctaaatgtcaacagctatttaaatataaacaagcaccaaagattcccacaaatcaagctccaacccaagcaattctcaacaaattcaaaattagaaagatgaatatatagagagaggggggtcagttcatagggttgagaaataaatgcaaaataattcattattttgtccaataatcactttgtcacaaaatagataaaatagctaaaatgactaaattgcccctagggccatattctcacataagcacacaaccaagggcaaaaggatcattacccatcacatacatactcaaaataatttcaaattaatcactcaacaataaaatgccaatataaaatcccaaaaatgaatttcggccctgaacccggttcggcccgaaattcccaattgtgactatactgcgccgacctatcaaaaaacacctgaaaaaggacaagacatgtacactatataataatacagtccataagcacatcataatataaattccactgttttacccttttcgggtcaaaattactaaaatgctcctggcttaccaacggagtcttaacatgtcatatatcatattaattcacatataannnnnnnnnnnataatataattccataataatacatatttaaccagttagggtttgttaatccatttttcttaatctcaggatattgcaaacc

SEQ ID NO: 33576 - DNA, 1168 bp, Cannabis sativa
  modified_base (888)..(893): a, c, t, g, unknown or other
cggtggattggtctggtctgcaccaagctctacttggtcaccctgtggtctagatgattacggagggtccatttttacaaataaccctataatcaacaaccccgatgacttaagcaccaataccacacttatgcacttattgcccttaaaccctaactcaactattcattccaattaatcatataacattttaagcatggcatcatacatcacataaatactctggatgctcgcatactgcctaaaatggaaagcggtaaataaataatcatataagcagtaaagcgtttactctcaacacttactgcaccacgagtcgagcttatctttgatgatgatcgtacaagttcggtcggtctataggaagtttaaaaaccttgatgctctgataccaaactgtaactccctaacaattagacacgtcacgacacctaattatgaaaccttaatcccctaatctaggattactaaaaagataagtgcgggaatgaaaataaaacttgtaataattttaaactttacaatcaaaagtgacatatttcgggatcccaaaatcttttaaaaaatattacaagtcttttcactagccgacctaagcggtaaaatcaaagttacaaaagtatatccctggtagaccccaacctgcttggtctagtgtggcccgaacatgtacaagcaccgccaagctctcgcacttatggctgattagagacaaatttaccctttcctgcacaatagagcacccatgagccaagcccagcaagatagtaaatatatcaataatcataactaacatatcacttatacaatgatgccatttcacatttgtctatataacacagacacgcgtgatacgctcacacgcttatttatgtctatgtggcatannnnnncgtgttacgctcacacgtctaaattcaataaggtcttagaacgattcatctcagttctagttaccgagtccaacccgattataccttgaacgcataactcataatcttaatatacatatatatatcatggcataataattacaaattaacaattcactaggttattaaccctaggccaataaaccgctcactttagggtaataaccttaatcccgatttctagttactcacatatatcatattcaatatacgcgccaccgtgcataactctacgt

SEQ ID NO: 33577 - DNA, 1655 bp, Cannabis sativa
aatgtgtgtatggggatttctgtgagatcaaaagctaaagatataatgttgtcatttccaagtgaatcctaactttgtttggtcatatccttatttaatggattgcaaatgtagattgttgggtcttgagtagggaagcacgtcctgtaacaaatgagaccctgacacgataacaataccacaacatccttagggagaaaatcaatgattgtctatttgaattgaaagccttcttcatcaataagaatgtatgtgacagttttgatatctttgttgagtcatggaaacttgccttggaagatgaatcttgagagttcaatatagagtaattttccttttggtcttaattgtactgcataggaagttatattgcaatgtaattaatattattgagaatggtgcatagcaatttttgtggttaggaaatagttgattgtctggcgcatagtagtttttgttgttaaagagtttcaattatagtcttttacttgtttagtatagtgacacatgttatacatataattaaataatgaaatattattttgtctttcaagaaatgagaaagatacggtgcttgaataatgatgtattctttgaagaacaatgcctattacctacaatgacattgtttcaatagaaatgtgtatctaaaactaggaacaacttgatatctgatcgttcttttatccaatctcaattacaaaggacaaaactctctatctcagaattcatattccaagacaagttctcatggctcaacgaagatatcaaaattgtgacataaatttctattgatgaagaaggctttcaattcaaacagacaatctttgattttctccctaaggatgttgtggtattttcatcgtgtcaaggtctcatttgttgcaggagtttcttcgctactcaagacctaacaatcaacatttgcaatccattaaacaagaaaatgaccaaactgagttggaattcactaggaaatgacaacattgtatctttagcttttgatccatgtcagaatcccatacacacttctacagaatccaatttagtgacagttgaggcatttgatttcaaatctcacttgatttcaaccattctttttttcttgaagagtatatttcgaatgtgaagcatttttcttcttcttctccaatctcaaatgccttaactgcactaactttaattttgtacaaatgtgtatgggattctgagatggatcaaaagctaaagatataatgttgtcatttccaagtgaatctcaactctgtttggtcaattcctttttaaatggattaaaaatgttgattgtttagtcttgagtagggaagcacttcctgcaacaaagaagaccctgacacgatgacgataccacaacatcctgaaagagaaaatcaaaaattgtctatttgaattgaaagccttcttaattaacaggaatgtatgtgacagttttgatatgtttgttgagccatagaaacttgtcttggaagataaatcttgagagttcaagataaagcaattttccttttggtcttaattatattgcatagcaagttattttgtaatgtaattaatactattgagaatggtgcgtagcagtttttgtgctatggcaatagttgattgtatggtgcatagctgtttttgttgttaaa

SEQ ID NO: 33578 - DNA, 1740 bp, Cannabis sativa
tgataaaattgtgctaaaaatgtgttgtgtgttcctacttttgaaacctatctcatgtctgctattgccctaaccaagtttgtttcctgctctttcttttttttatcctaatcattgtactatccatgaaactatgaagactcaacagattgggatgggtgaaaggataggaaacctctactacttgaaacggtctcacgaaactaatcctcctgctgctgttttttcaatttcagattctaagatttatgatgaattggtgtggcactatagattaggccacccctcttgtatcaagtctcatcctttgaataaaaaattaaaattcagtcatcaccctagcaatcatttctattgttctatttgccattatgccaaacaaagaaaattgccttttatttctaatcataacattatcaagcattgttttgatctcatccatgttgatatttagggaccctttaatgtcttatctgttgagggttttaaatatttcattactattgtggatgatagctctaggtttacatgggtgcatttcattaagcataaatctgatgctcaaatagtaataccacagttcattaaactcattaaaaattaattcaacatcactgttaagagtgtccgatcagataatgcaaaggaactttagtttccaactttgtttaaagacctaggcatcattcatcatcactcttgtgttcatagaccataacaaaattctgttgtggaaagaaaacaccaacatcttcttaatgttgctagagctttactttttcaatcttatattcctctcgcatattggagtgactgtgttgctactgcaacatacctcataaatagaaccccaacacctaacctgaaaaataaatgcccttatgaatattgtatcataaacaaccacattatgatcatttaaaagcttttggctgtttggcatatggttctactcttgctctttctaggtctaagttctcaccaagatcagccccatctgttttcattggatatccaccaggtatgaaggcttataaacttcttgatctcaatactaatagattttttttgttgtagagatgttcaatttcatgagcatatttatcctttcttaaacacttctccacctgcagattatgacagctttttacagcttcctactggtcttacaccaactaccaaatctgccccttcctctactacaagacctattagaaattctcataagccttcctacttgaatgataaccattgttttttgactaattgcactaatgctattttttctcaggatcttgatcagggagctgtctatcccctctccaaggtcattgattactctaggctctctccaacatatcaagctcttgttttatccatttacaggctcactaaacctacctcttatgatcaagctcatggaaaacctgagtgggataatgcaatggataatgaaatcatagctctttaagccaatgacacctgggtcattgtttctcttcctgctcatcaacatgcaatcggatgtaagtgggtttacaaaatcaaattcaatgttgatggcagtgtagagaggtttaaagcttgattagttgcaaagcagtacagccaacaagaaggcattgatcattctgagacattttctccagtcaccaaattggtcattgtcaagcttgttttggccttagcagctatcaatggttggtttttacaccaacttgatgtcaataatgcttttct

SEQ ID NO: 33579 - DNA, 2427 bp, Cannabis sativa
atttaaattattaattaattgcatacaaagaaaacggcatctctagcagccatagccacaatatcagcacaggaaacaacgccaggacattgttgttccagctcctctttcacttcatctataagctcatacccacgcaaactaagatttgctggcgaatccttttctgctgtgttgtcctttgttgagtctatcagaattgatgcatcgcacccctacatgatcaatcgattcatatattaaatatttaaacaataacatacatattaattaatgtatatgcctatatatatatagtagttataaggtatatatacctgaacgaaacagtcgtggaaatgcaatctgataagagaggcagcaagagtgggatcatccctcaaagctctattgacagtgttctggacgatgatatcagccatggggcaactcattacatagtaattcatactcacaccatttgctacaccaaatctgtatccactcatcaccactatcactttcatcattaatagtattatcacactactactgctcacaaacttattcccaaatacaatctccaccattttcactaattaattaattaattcttaattatatgtattcagctccgatcggatgatcgatcacaagaccgtgcaaatataaagattactagctactttacttgctatatatggcaatgcatacatatgcacacgagattacctctacaagtaattgattagtgtttaatgtgttactatatatatagatataaaaatgaatatgtttattaatttttattttattagctttagaaacaagtttgaccgaagtgagataaaataataataataataataataataaaacactgaaaaagtcgaagatagtggatttatctttttttccaccctaccctatggccaatccaggtagtactgcaaaaaattagtggtgatcaccacaataattatcaccttattatattgcatgtaggtcgacacgtaccaaatattcaatcagcaattagtccagcacataatgaattgataagtatttgcttaacacaacaatgtatgttattcagtgtgattaaatctaatattaatatatgtatccgattaattaataagaaatatacatatttttcaaaaaataaaaaataaaatgttaaatgggcaaccacatgttacatatagtgttttatctatatcaaaagtgtatctaacacattattgttaacgtggaatgttctaagcacgaacggcactcagcaacattggtttactccccaggctcgggtctgcactcgcaggcttggaacaccttaagagtccaccctgtaggtccacacccaaagcttgcaccaccaagagtgttcacacacctaaggcctctacctctctcgtgcttcgccactcttctagtaaaatactccacacccttccgtattaatgaagcaggctatatctcaagcaaatcactacaaagtttaaaggttatggttcacaaactaactcctaaacataaaaaagcttgtgtccaatgagatcattatttcaagaatctcatgtttgacctttttgaggaagtgtctctaacacttagccaaataaaaagcaaagggggtgcatgaataggcccgtatgtacaagaaaagattaaattcaaaggatataatttgataggctgtatagagattgtattgttttaaataaaatgaaacattgtgtattctattaattattacaataatcataattttttttagatatcttcgggtttagttccaagtaaagagaaatttactgtatattgcagtggaatgcaagaaagtgaggtcagtaaggtgtgcttgagatatctggtgcttcaaaagctcatttattttttcgatatcttggcattttaatctgttcaaagaaaatttcagctactgattgtaatattattctggagaaaatggtcgctcaaattagagtttggactacgagcgatttgtcatgaggagaattactctaactaatttgctattaattaccaattactcatgttcggcacaaatcgttattcttccaaagaaattgctaaaggatgtagaagttgtttgtagagcatttcttttgaaaggagtagttgattcttctagacccaatttggtggcttggcagtaggtatgttcactaaaaaaaattagggggatttggtgttatataggagaattattgagtggaacatggttgcaatagaaaaatatatttgggtcattgctaacttaaaagataacttgtgtgtgaaatagattaatatacttgcagaatagagattggtgagagtgtaccggctgttggggtcttatgccctaaataaaacccattacaatctaatctgatttgttatcaataagagattagaagtgatttatgttaacatgtagtt

SEQ ID NO: 33580 - DNA, 1393 bp, Cannabis sativa
  modified_base (1354)..(1358): a, c, t, g, unknown or other
actattgccgctatttttggagcttggggactaatctgtatcaccgtgaactttttggggacttttaccgcaaatttcccaaaatataataaagatatttgattataaagatatttgattttgaaaagttaaaatataataaaatgttggaaacgtagacccctaaaaagatgattaggtagactctctatctgtttcggcattcagaaaactttttagttcaattttttttttcatgattacgtatgttgtagctatttaagatcacttgtaaatttttagaaaattctgaattgtttacagtgtcaaaaattaagttcaaataattacttacaatgcgtataagaaaaaatagtcgtgtgtgcaacaaaatatataaattttattttcgacacttgaaaatactcaaaaaaatttaaaattttacaaattgttctaaataattataacatgtacgattataaataaaaaattaactgaaaaattcttttatatggcaaaacatataggagttctactaaaatattttttttaaagaagtgcactgaggacgacttatcctgaaatgttaatatagaataagtactaattattgtataaaaaacaacattgaataaagaaaagttaaggggtagagcctccctaatgggtagtgtagtctgtccctatcgtggacagtttgcactaatggccaaataattttgataattatatgaacattaataaaattacattatatagttcatttataaaaatcataattaaaaatgttcaaacaaaacaataaaaataatatacaaaatatgtaaataatataaaactaatataaaaagtaaaggatggcaaaaagtctcactctaatttgattgcttagttgttgttcaagcaatacacaattcggcttctttaccttctgcttttggcctgctggtttatgaatgccaacagctcttagctaatctaaataatgttaagttttattttgtaaaatgttctgctaacaagacggcacatttccttgcgagtagtttttgttttttgtcagttcgtattttttatgactacaacttactttgtgagtttgtaaagattgttaagaacgattcatcttattaataaattgatccatttccattcaaaaaaatataaactatgatatgtacaatattcatacttaaagtactaattaaatataaaataggctcactttttcattccgttgatatgcataaatatgtacatagaaaataaatgttttgtctaaactaactcaaatattatgcgaaaaactatattaaaataaaattcaaacaattatataaattatatatctatatatatatggaacacttcnnnnngggtaatacccattgatgggaactaaaaaaaatta

SEQ ID NO: 33581 - DNA, 1377 bp, Cannabis sativa
  modified_base (1350)..(1350): a, c, t, g, unknown or other
ttttagaatacgaagaggtttttttaaagcatattcacatagcttccgaatcttacggtcattgggttcttcatcctgcaaatttttttgatatttatatatgtaagaatgtacagaggttacataccttaaatcttattatttttcaatgtagattagaaaaagattaattttttccaattactcaaatatgtgtatatgttgagataaacaagatatgagagaggtaaaattaacctgagagggagggaatataccaaagattaacttcttaaagaatttaacatgatgcctagatttggcgtgtaatttaggacaccaaaaattgagattttcacagagaggaaaaacctgccttgaaatcgcacccatttctgccctaaaagtcattaaaaattaagattcctctcttaaatcctaatccaaattacatacaaaacacaaatttagattttctataacagtaatattggaatcaaaaccttggtatggaagattataaagggccaggatcgtggagatgatcgtaaagtggagaaggagcaatagaaaatatgtgagcttacaccaagatgtcaaaaactaaatatctgaccttttaatatgaaggtccaacacaccctggtcgcatatgtatatccagatcccacatagaattcagaggaaagagaatctgtaaaaaattatcacagggtaccgaaaaaacccttagcaaatcaactattgtttaccaacataacaaacaaaagcagtaccacttgcacaaaaaccctgaacctattcccaaagtgcatatcaacaatcgatgaagctctgactgggtgcaaaatcgatcttagagggccagagatggtgcgaaataactgtgagaaaatgaacctctttggttcgtttagggttcgaatagggtgaggatagggagagtcggtgagctgaggttgtgagagaaagctgatagagaggttgagtcggtgctattggatagaagctcaactgatcaattgaaaatagagggaaaattttgaaatttaccgccaacaataaaatttttagggaataaatattgtgtactctcaaaaaaaaattatattatttattatgtttgtatattgtttaatattttaatgaaaatatcaatatattatatttttattatattaaaaataatatatcaaactaatattaatatatttaggaaaataaattaatatttatatattatccatacatatatgaacaaatgtaataagtaaaatataatttaatgtcacgctatcaactcattttaagactaatattttaattgtaaaagatcattaacttttactgactaactatttcgtcacaaanttcaaatttttagtgactaaataattt

SEQ ID NO: 33582 - DNA, 1970 bp, Cannabis sativa
  modified_base (135)..(139): a, c, t, g, unknown or other
ataattggccatgatatcactcttaactagtacgattcatgtactgctgaactgacacaatagttgtgtcgctatgatagcgccaataaatactctctggcactacgatgcccgtactgctgaaccgacacaatnnnnntgtcgctatgatatcacccaaacaaatatatcataaacacaacatgcatatatatcatatatacatacattcgcacatatatatatcatatgtttcacggtattcttacctcgtttccgaattcaagtgagttggctgatctgaacagataacctcatgttggatggatgccttagtcacataatataaatgggtaaatgatgcgccaaaaccctaatctgggaaacccaaacttccaagtaaaggttttgttacagataactgaaactacaataccctaagcaacaaggaatcacccaaccaaggctctgaaatggacatgaatcgacgaaatggattgttcgggaaacctgtcccagaaccggttaaccggttttacaagacttgacaaaacggttaaccggtttgcaccaggtttccccaaacaatccaaaacctgcacaaaacatgtccaaacctcaccaaaacttccagaacacctataacaacatcaaccaacataacccaagcaatagaactcagaaaaacatccaaaatcaaaacatgccattaatgatctaagtatttgagttttcaaactaaaactttgtcattcaccacaacacacaaaaaaaaaatcaatgtccagaactcatctccaacccaaaataaacttagaaactcaattacaaatcaacctaactctaacagctactaatttataaaattacacactaaaagcaagcttaccatacaataaatccttaaataaagacgattagagttacctcaagctaatactcaatcttacaccttgaaagaggtccttgaatcctactaaaatgaagaatttagcagcaatcctccttggttcaagcttggttcaaagagagagaagggaaaagagagagaatttgttgattttctttaattaattccttttcctctaattaattcaatgtaaatcttaggctaaaaaagaattggctaggtgtcactcaagccactagccacctaaccctcccttgccaaattaccaaaatgcacatggtgcttaaacttaagctaattaaagcctaggggtaaaattgtcaaaaactataaccccgctaaaactcggtattatatttatctccaatattaatcccactaagaaaaacattctagacttacccatgtgactcatattgccatccatcgcattttccgtcgtccccgagcgaaattcataaaaatagcataattcacatataacacaaataatacctctagagtttgataaaatctccataattgtgaaattataactcaaatggccatttctaataatggggcccacaattaaataaatttattaacaattataaaaatatcaataattaacactaattgcctttactaatccatattctaaaatgaggtcattacaattatccctccattaaaaggatttcgtcctcaaaatctaacctgaatagctcaggatattgagtcgtcatgtcagactctaattctcaagtagcttcctccaccttgctgtttctctagcgcactttgactaaggctatgggcttgtttcgaagaaccttctcctttgtatcaaggatttgaactggttgttcctcgtaggaaaagtctgactatagttcaagggattcgtaactcaagacatgagtcgggtctaaaatatatttccttaacattgaaatatgaaatacattatggacagctgataatgctacctactcgaccttctcgagtatttgaaatggcccaatgaacctagggcttaacttgcccctctttccaaagcgtctaatacccttcacttgagaaaactgttgggatttta

SEQ ID NO: 33583 - DNA, 2706 bp, Cannabis sativa
tcagcgataggtattcttacaccttggataagtgttacgtcctttccaagaaatttgcaaagtttaccaacatcggatgtatggagtatacatcggaagggaccgatactgaactttgattagatatattagaatttactgtaatatctataatatttaaatttgttatgaaactttgattagacatataagtatagaatagtcccataatcaatagacttttataatatttaaatttgttatgaaacttttttgagacattaactatatttgatgtttcattaatagtattgaatttaagggtaagttatgatttggtatctagctagtcttttattcaaatggatatttatgttttgagcattgttattgggcccaataccttctataggtggcgtctcatgattggtcagcaatattccctaaaagctattttcttaacgagcattgctattgggcaccagtggtgcccagcacctttctataagtgctccatgattggttagcggtattctctaaaagttattttattaagttatatgagacatgatacttaattacaccaataacggtatgacgcagtgatgcctattagcaattttcttttttaagttatatgtgacccgatacttaattacaccaataacagtataacaccaaaaagggtgccactaaaagtatcaagtttttatagtgattattaattagtgaaaaaatagtaccatatataagataaatggactacttttcttcctaactaagtttttttaccataacactatccaataccaacttccctcttgtggagcctcatagctctgccaatcttttttctttaatatacaccaaatgtatccaccacactaagattatcttttttttttttttttcagagcaatatctcacacatatcttcccaaagcagctatattacattgctgaatatttctagaaccaaggcctccataagccttggatttacatagaggaaccggagcccaagcaatattacccgagttcattgtttctgctttgcctttccacgaaaaagcaggtcaaatgctttctatctttgaaagaatatattttggatgcagaatgagaataggtgcccaataaatatgtgttgacttcccttttatccaaggacatcgagtctataaaaatatagtaattgtaaagaagttaatgatgaaaaaaaattataaacaacacacaatatttatagaggtttatccccttataactgtaatagcttactcctcttttagttgtattgattataacgaactatcaagatcataaggtccgaccagatgagtctcttaataattctcaaaaagtatacaattatttatgcaaagtgtctgcccttttacaatgcaaaaagaaggccccctaaatagtgagatgacttcactatttataggaaaatacaaatgcattatttgctaaatcatcggtaacgataaatgtgaatctcgatataaaagaaataaagtggcatgggaattcaaatataaaatcccatgaatttctctactacataatcaaatcccacaaaaatagggatttagttgagttataattggggaagcagttaaaaaaatatcttagaatatcttcgcttagcgtgtaattctggtcggcaaatggcactgcttgacctacatgtctattcggcatgccatgagctatggggacctattcgaacgatagtcactaaaggaccaggctttcatcaattcgacttagaatcgatctggacggtacaataaaatcgatctggaccaggctttcattatgggcgacgtatctttattgtaccgtccagatctacatcttaattatgtagatactcatttataaaatcgatcttgacaacccataatattatgggcgaagtatctaccatgcacaaatccctcatgattttgagcaataatagttgtaaggatattcttcaatctcccacaaatcacaattgtcattgttttatacacaacattgctacgcgcaatcaactgtagtcactaacttgacttggacacttgctcttaggaatgagagtgagtgtggttgcattaattttcttaagaagcttccctgaattaagcaccaaaatgatagatttggtgaaatcctctccaataatgtcccaaggatgcataaataatttttgaaaccatcaggggcctggggctttggattcagaaataaaaaataatgcctctttaacctcctctttagtatatgctgaatttcttcagtaatacaaggatcatttttaactatttttctcaacacatgccttctattttccattttggaacccagtagttgttgtaaaaataagaaataaaagcatcctttacctcaactagattatccacccaaattccttatgcattagtaataatggcactacattttggtttcttctagttcttaagctaatgtggaatagcttagaattagaatcacatcctttatccaatcattcttagtttttttttttgtctaaggaatgatagataagtcttgtgcaccctcaaataatttcttcttgtctgactttcagcatcaattaactctaagtttgtggggttcttgttagcagccccttgagcttcatacaaagcaattaaagcctttttctcttgtactccaacatcctcgaaactttccttattaagaatccttaaa

SEQ ID NO: 33584 - DNA, 1529 bp, Cannabis sativa
ctggtaaaatatttctaacacaaggctctaagtagccaaagcttggagagcccacgatctctttctcaaaaaagggagatcctgcccccaagacagtttcccgcacaatgaccccttggtcgttactgcacaaatcaggaatatgactgcaacaagatatatggtagacaatggagcctcctccaacattcttttcaaaattatcacatgaaaagatgaggctccaactcgctgacttggcaccctgcatttaagtgatgtatggcttctttggccaaggcatcacacccattggatatgtcaaattacccctcactattggataaattccaaccaccagaactttgatggtgtagttcgttgtaatcaacattcctttggctctcaacaccatgataggctaaccaaccttattcaacttgaaggcataacatccaactatcacctctgcctaaagttccaagcaaggcatgaggtaagatgtcaagaggaggtcagaaatctgcccgtcactgttacaacttggccttgtccaaagccaagaaatagaagatgcatccatcaaatcagttgtcgaaaacctatcaacaacttgtcgatatacactcgacaatatcttcagaaagaaaaaaatacaagtcaacatactgcaaaaaacaatgtcgataaataattgtcaacaacctatcgacatcatatcgacaaatttgtgaaaaaagacaatgaattattcaatgataaacaatatcaattaaacgtaagagtgaacgaaatatcgacatgctatccagatcctatcgacaatgcatcgataaaaaaattatataatacaataaactataaaacaatgactgacaacctatgtaaattacaactaaccaagtaatcgcaactaatgacaatcaataatcataaaaaaaaagttaaaaaaatggtacctgagtctctgccttgggcaaatgagcatttttgacatattctgctactttttctgcttgtcttctaaaaatagctgggtattaagtgtcctccttagcctatgtggcatccacaccgccctcaaccaggttctccacaccatcgtaagagatggtcctcacatattcctcctcttctgtgtgtggaaatagctccttcatcacttcaagatgctgtttaagattcaaaaagtataagagaaaaatgatttagcatttattacaagcatttatcttaaatagttactctaaacataatagaaactcatacccgtctagaaaataatgcactaagctccttctcccctatctcacccaatcccatgatttgtgccatacctcttctcaatctctaaatggcctcatatgcccaatattatactgcaggtgcgaagccataaaatgtgtatttgcactcatgttgaacttctaaactcagattcttctcgtagttggccttctatttcaatatgttcttttgaagcgagtgcataagtctagcgaatgagtgcttcccttaaggaatatggaagaagaactcgagatcttcga

SEQ ID NO: 33585 - DNA, 2823 bp, Cannabis sativa
  modified_base (271)..(271): a, c, t, g, unknown or other
tcaattcttatttttgttggcggcagggggaggtatatgtgaaaacctttgacacttatcacattacttgacaaactcgtggatatccatattgatcgttggccagtaatatccttgtctaatgatatttttagacagactttgccaacccgcatgatccccacaaaagccttcatgaatctctttgatgatttcagtcacttctacagggagaacacaccgaagtagggggcatcgagtaccctcttttatatagtttgccttcaattantgtgtagcgaggcactgaatataatagtttttgcacctcatttttgtcatttggaagttgtccatcgagtaagtaatttataataagagtcatccatgtaggagagtcgtctatcattttaacgtcttccgtttcacatatacttggctcgctcagcatctccaccggaactaagtttaggtcatccaagtcattctgcaaggccagttttgttaaggcatcaccgttggatttttgttctctcggaatttgttcgattttaaagtaatcaaatctttccaagttcttccgaacattttgtaaatactttgccattttcatgtctttggcctggtattccccgaggacttggttcacaatcagctgcgaatcactatggcagatgaggtttttgactttcaacgcctcaactatctttaagtcggcaatcaaggcttcagactcagcctcgttatttgatgcgtcaaattggaaccttagtggtgaaacttaaagccttcttctggaaatatattaataatattactacccttgcacccaaaccctgttcgttggatgcaccatcaacgtataacttttaggtttccgcgcctcgctgaacaggtgggattttttcttgagttataccttttatcaagaagtcggccaaagcttggcccttgatggatgttcgaggatgccatgttatgtcgaactaccccagttcaatcgaccattttatcaatcttccagaagcatctggttttgataaaacttgtctcaagggctgatcggttaacacttttttggggtgcgcctggaagtatggccgtagttttcgagacgcatggactaggcacaacgcgagtttttctagagggggatatctggattctgcccctaataaccttttactgagatagtaaataggttgcttgtgcttgccctcttctcacactatagctgcacaaattgcatcttccgagatggctacatagagaaacagcgtttctccctccagttattgatttcgccagccaaaactggagacgtcgctagatgcctttttatcttctaaaaggcctccttgcactcttttgtccactcaaactttttattgcctcacaatatattgaagaatggcacacacttattagtggacttcaaaataaatctgttaagtgcagccattcttccggtcagggcttgtacttccttaggccttattggtgatggaatgtttattaatgccttaatttttttcaggatttgctttaatacccctcgcattaactatgaatcccaaaaattttcctgaattaactccaaaggagcattttttcaggttcagcttcatgttatacttctttaatatcttaaagcattccgcgaggtttgaggtatgatccctactctttattgattttaccaacatatcatcggcgtaaagttccatgttccgttctatttggtttgcaaatatttcatttaccaatcgctgatacgttgccccagcgttcttcagtccaaacggcatggctttataacaatagagtcccatgtttgttacgaagcttgtatgttcttgatctgggacatacatttttatcttgttatatccagaatatgcatccataattgacataagctcgtgcccaacagttgcatccactaactggtcgatcctagttattggaaaggaatcttttgggcacaccttattcagatcagagaaatcaatacaagttctctatgttccgttaggcttcgagacgagaacaggattggctatccacgagggatagaacagctcgcgtataaagtcgttgactaaaaacttgtccacttcctgttttagtgccccttgcctcttggaatccaagggtctcctttttctgtttcttcgctgggtagcttggatcaacatttaaatgatggcagataatattaggatcgatccctatcatatctccatggatccatgggaactgttcttggttcgcctttaaaaagcttattagctgctatttgagctgctcgtccaggttcttcccaatgtatacacactttgtgggatttcctaggtcgagaataacctcttccaattcctcaattggtttcaataggtttctctcatcttgaactcggaggtcaagatcttcgtctttcttttcattttcttctgtcaagatcgccatcaattggtgaccagctttccaatgatgcagctcaatgcgatagaaatcgcgaaccagcatctggtcgccacgcaccactcccacgagtttcggtgtttggaatttcaaggatatgtgcttgatcgaactgactgcccctagtctgataagttttggtcgacccaacaatatgttataagttgatggaaggtcgacaactaagaagttttgcataacagtggcagataggggtgcctcgcctaaggttaatgcgagctcgattatgccaagacttgcaatgctgtcttcagtgaatctgtaaagattcaccatacaaggccttaatttgtctttttcgagccccatcttctgtaaagtctccttataaaggatatt

SEQ ID NO: 33586 - DNA, 1914 bp, Cannabis sativa
  modified_base (81)..(87): a, c, t, g, unknown or other
tatttataattacatagtggacaattaatttcaaatttgacctgaatatgtttacagcaattatccctaaaatcatgggannnnnnnacatatcacgtagtgtaaatgcagtttatgatttgaaaatcgtatagctttgattttcccgcttttactgggtcaaaaaatcgtgtattgaacacatctttagctattttatttggagatgtctcgacagaaacttggttacagtgatcccaatagcgagctgggcccattcttctgtccaaggtcgacaatgtatgtctggtgtcgatcgcggttcttatttataaagaaccattctgactctccagggttgtaagccttgttaccgttagctggatgaagctataggaagtcttcccatagtgagatggtcacctcgcttacttattcttgagttgatccgacttttacacttagattgttcattatactaagcacctccacgattgatacgggtcgctttccttggtgccttgctattcacatttaacgacatgtggtttctcgctaatatacaagtgccagtttgtacattgattccttgcctaagaccttacagtcagcgggttacaaatatactctgatactcagtaattaatgagttattccataaaagcaatggcatcaattcaaaatccctttttcttgacacgtgtccttcattgaggtggcagctaaattttgggtataacattactactattttaataatttttctataaatatattaaatattttaaaaaaaaattaaattccaaaaaatgtatatatatatataaaggagaggaatgaggcagtgacacaacactctaaaatctctgcaaagttatttttctcttctctccttaattctctcgggaacactgtaattttttttctacaccaccctatttatttatttttataaaaatattttcttttaacaaagcactttaaaatactatatataataaattttaaacttcttaacaaataatttcaaataataattaataaaattgtgtatttagttttttataaataaaattatttataataatatggaatgagacaaatatttataattttactatatattagaattatatttttaagtaactatctatatctatatatataaatgagaagtatgaggcagtgacatgatattctaaaaccactccagaactatatttctcttctctccttaattctcttaattttaatattttattaaagcatatatctataaattgatattttattattattttaataatttttctttaaaaaacaacataaatctacaaattgatattttactaatattttaattttctataaaaatataaaatatttttaaaagttaaaaaaaataaaaaataaattctgaaaaaagcatcacataattataactaaagagcattactattgggcatcagtagtgcccaacacctttcatatataggtggcaccctacgattagttagcgatattttttaaatcttatttgtttaagttatatgagacttgttacttaattacactgatagtggtatgataccaacaaggagagttatttttttagcatttttcataactaaaatatcacatttttttaaatattttttttaattaagatatttaagaaatagtaatcacttttttttagcatattaattaatgataacataacaaagtaatgaactttctctaatatcttaagagtgttaaaaaatatttaaaattcgagatgaaatctgagattaagatatagatttaaaaaatacaatagtgaccactacaagtgaactacggtaatgacaagggatgcgataagtgatgacaatgggtgagatacggtgatggaaataagtgagatttaataacaacaatagttttgaatga

SEQ ID NO: 33587 - DNA, 1611 bp, Cannabis sativa
tcatagtgcaaagtctcctattcccttgaatttctctgatttgaatctcaccattgatgacattaaagtttcttcaagaattttagcgaaaagaatcctgattttgcgttcttgatcgattccaagctctgatttgtgggaaaattacaactaaagatgcagaatcaaatcaactaaactttaaataatcaaacaattagcaatgtcaagagtcacaaatcacaatcaataatcaaagaaaaaaataaggatgaacaaagaattgaaaataaaaaacgattaaagtatagtaaaataataaaattaacaacaagatatatactggttcaagtccaatagatcaatgtgatctatatgactctactctagttttggaacaccaccaaattctctttattgattgagtaagaacatgtgcaatactgtcgagatcgattcatatgatttctctcaaagtattttacctctcacactcttacccaagaataatcttcatctacataagattcttcatacaaaatccaaatccaatctctctcttttctctatacatttctctctctatctctcaatcttttttttctctgtctcaaaaactcaacctgatcgttgtgtctaaaatggtaagtgttggtagtatttataggcttaggatcaatatcctaaattcggtggctgcaagaagcgaggttgttaagttagttaggcaacaactaccttaaccaactctcctttgagcaagatctttacgttagcataagtatgagttcttctgggagcgaatctgagggcttttggaatcacaaaccaagactctagctgaaggagctttccgaataggaaagagctagttggagtcggctatctggaactcttttctaggagaaaaaacaactagccatctggaactcctttccggagaaatgctaactttcctgaggacccttctcggaaggacatgaaagccttccaggacctgcttctgcaagtcaacaacttttcaaaaaagataataattttttgagaccttttaatttggaggaactattccaataataacaataataataattattattattattataaaattttaatcacaagctattcatgtttccaattttcaagttgattcgtcttaaccaaattgagtgaagcaccatatgaatcacgtcaaatggttgagctggtctgttcatcacgaaatgtctcttcacttgagaaacattattatacaatctcaagtattcctcatttggaatatcatttaagatgttcttaatttctggtatttttgagatcgggatttgtatggaaaatttgctccaatcaagtacatcattaaaaggcaatgaataattattagagagaataaccgggacacaccctgcattgattgcctccaccactcttgggctagccacttcgtaaccacttggacacaaacaatacttagattttcccattagcatggtgtagtttagtccttccggaagcttttcaaagacctggatatcactgtctttgtctttccattgctcgaacaagattcttctaatgtgtccatgaagcccaccggcaaaaaatgctaatattgtgcgcttgtgtggg

SEQ ID NO: 33588 - DNA, 1813 bp, Cannabis sativa
  modified_base (830)..(832): a, c, t, g, unknown or other
gttattatggagaaaatataaaatagtaggagataactcagcttcatgggaaaagtttctctcagactattcacgacgtataagaaatgttctagaaaaattctaaatttatgaaaatagtcacaatcaggtctaagctcctaaagcaaagaagaaaaactcatcactattcaaagaaacagatactgtaagggtcctactccgtaagacaagtatttttgaggattcacaagattcatacatgaaccaagaaatcaactaagatccttatctctttcagtacaatggactagaataagagattgtttattctgaatatgatgcatgtccactagctggaagtaatgaagatgatgaaccatcaggttggcacccactttagaaggactccaattatgactcagactacaatgctaatcacgggccaattatcgaccgctaataagtagaacaaagagattccatatctcgtgtaagatagcaaataagtgaaaaaattcttaatagtcatgatgtttgtacgaattttttctaaacgtttatttgtcagtttttcagtttgtccatttgttgttagattgtccttttctcggtttgtcattttgttggtttgtccatttattgtcaggttgtccttttctatgtttagttgtttgtaggaaatttctagaaagtttcttattttgtatcctaccacatgtaaattgttatgtatagagccatcattttcattgtaataaagggcatcaggaaaagcattctactaaataaaatttttagtgttcttctctcaaaatgttcttctaaattttctttaagagatttttgannnagtgatagtgtgcattatgggtcataccgaagagatattactgttatgagttaggtttcacttgtaaaggtaactaaacaatctatctttcataatcgtaagtcacgttgtatagtcgtaagtcatgctgattcttataagaatattacttaagttatctttatatttgatgatttttgtaagaacattgcttaagttatgtttatataaaaataaatttaggttgatttttgttaatattgaagtgtttatctaaattcttaagatgtataatatttttttatttattatttgaatttaatatttaaaaattaaaaacatgtgtattccttagataacatttttgtaaaggataatttaatccataaaagtgttctaattacactgaaacaatatttttttttttaaaaaaaaaaaaagagtatgatgcaaaataacataatacaatgcaacaaaaaaaaaattattaaaagaaaatcaaactatttgataaattatttataaaaaataaaataaaaaaactacaccgctaaagcagttacacttgttggttggtgtaaaaatttgttacaatccgtagcaaacactgattctaaacgtttttcatcctaatccccatcctaatccccaaagatatatatgaattaagccatgatgtaaaattgtaataaataatgataatccaaacaaatcaccaataactaacataatatagaaagattaagataaacttcaaacttaaatcatccaatagaaaaagtcacaagctttatggttgaaatatcattataaaattggtttcaaccaaaaaaaaaaaaatatatcattataattgtttcttttgcaaaaaagaaaaacattaattaaaatataaaaatgatacacaagaaaataatattccacatgttctctctaccaaacccaaaccaacacaacaatcccaacaatttcatttccaatcgtggctttgtttatgggtct

SEQ ID NO: 33589 - DNA, 1587 bp, Cannabis sativa
  modified_base (1020)..(1024): a, c, t, g, unknown or other
tcattggaaaaaatgggacaatctttgcacttccaagttttttggagggttgggctttcgtaatattgagcatcataatcaagccatgcttgctaagcaagcttggcgtatcctcacctcccctgattccttagttgcccaaatccttaaagctaaatatttcaagcgaaatgatttcttgcatgctgccactggccactcaccttcgttttgttggcgtagcattctttggggtagggatcttttgatcaagggccttatctggaaaattgggatggcaccctggttaacatttctgaatccaattggcttcctttccacggtaaagctatgttaaagcctggcctgttccctccctcccaaagtgtctcttttttccttactgaagaccgacattgggatcttactaaactccggttttattttgatgaggagatgtgcaatgccattcttactgttcctattgatcctcataaccatgatactctcatctggaatcatcaccattcgggttgtttcacagttaactccgcctaccatttggctaactctaacttttctgctcccggtccttccaatccagctacctataaacgttggtggaccactgtttggtcttctaatatccctccaaaaattaaacattttgtttggaaagccttcaaccacattcttccctccaatcttaacgttttccaccgtaaatccatctcctcccctttttgctccttttgtcactctcatcatgactccaacacccactcccttattgaatgttccagggcaggtaatgtttggaagcactcttctttccttcagttttatattaataatagaaattgtgatattaaggaattcatgctcagaggttttgaatgttttgacaaagatcaattttcctcttttttgggtttaatttgggccatttggaataacagaaacagagccatattccattctaacaataccactgatttcagtttggagaattctgtcagttattatttgcaggaatacagnnnnncgcagaatcggatatccatatcatctcccacttcccatcagtcttctgcgagtttacaagtaccaagaacaatgtttcagctttctgtggatgcagccctttcacaaccttccaacaagcatgggtacggagctgctgtaactgattctcattgtaaagtcattgcaactttcatggctccttctcattcaggtctccccccaatttttgctgaagctgaagctctccaccgggcgttactttggtgtcaagcagtccgttttcctattgctgttattgcctccgactgccagaacttggtgcaccgtatccagaagttctctccaaatcgttcagccctttcgggtcttgttgccatgatcgtctcctctttgtcttcttttccaggtgctatcgtccattacattcctcggtctacaaacaccaccgctcacgaccttgcccgagcagcccttggaacggacaaagagataatttggaaccttttaagttcctctccttgaagatcttagtcccagcttttgcttttgtctttgatcttctttattaaaaaaaaaaaaaaa

SEQ ID NO: 33590 - DNA, 1792 bp, Cannabis sativa
gttagtttctaaaattccatacttaattaagagttggtattatattgtattataattatattgaattatattttatataatattttttttatataaaactatattagtatctacttttatggtaattaaaaatataatattttaatatatattaaaatttaaaattgtattatataaaaatatataatataatataatataaggatgtgtccggcacccttaatcttttacatttttcttatatactaggtaatagcatatagaatgcacatttgcttagttttattatttaaaaactttattattttatttttattaaaaagattaatttattagaaaatttataaaaaaccataatattaaatcgcatataatttagatcaataagacatacttgatctttcaatagtgtaattagatagaattagttaagaactgtatttagttatttagatacttttgtctaactttttccagttgtatttaactaattttgctcttggttcacatgagtgtatctagggctgttcattgaaattgaaaaattgcggtttaaattcggactgcgacaatctaaaccactgtagaccataattggggaaactgttttagtcgtttggttaatccaaaccgtttaccgcataatggttcagttgcggttcgtaataaatagttaacggttaaaccggaccggaccgtttataataataattgatttatatgtattttttatgtatgactatatgtataattttgaacttttttatgtgtcatattttttattgcacgaattttagattcttatgttatgtttgactttagagaatatttttatattgttatttatatatagatctattacttatcatgtatgtcaaatatatattttaaaaaataaaattaaaaatttagcaaaaatagtaaaattccttaaaaattatgaataattataaagtccacttaacccgttgtttcgaaccaaaccaaaccgttcttaatggtttgctgtggtttggtttgagaaatttattggtcgggtttggtttctaatattaaaaaaaaaaacgttataatgctttggctcaaaaaatatgaaagtccggaccaaaccaatccgtgaacacccctaagtgtaccaatatatataatctcaagtctgttccattaatcatcaagaatcttcttcttcatctctcgtgaagattgatgtacttcgaccctaaatccaacttatgcagaatgggaggttcaagaccaactcttagtctcatggttttttttcccatgagtgcttactaacatggttgtgagaattcgagggagattttgagtacactaaataagcacttcacccttcaagtccatggcaagattttagaatttcatacaaaattgaagaacctctagataggtcatatgtcactcaatgagtacctcttcaaagtcaagcaacatgtttattttcttacattcgtgggagaagttctcaacacacatgatcatgtgattgcgatctttcaaggtctacttagtgagtatgataagtttcttattttctctaatactcaaattgaagcctattttgtagctgagattgaagctttgcttcttgcttctgaaagtcagattgagaaaactgacagagggatagatataagtgctcatgttaccataactgaggcaaaatattccaaattcggtagggatttcgtaccatcatattgttggattttatgccctaaataaactttatttcaattgaatctttatcttttaaatatcaataaagaaa

SEQ ID NO: 33591 - DNA, 1105 bp, Cannabis sativa
  modified_base (602)..(620): a, c, t, g, unknown or other
gtatgaccattttagtgaaggttgttcatggcccagcgcctaggttgacattccaacgccaattgacatccaacgcctaggttgatgtatgacgtcaacctagacgttgggtgagtgggaaaacatcctgaggatgtattttttgatacctaagtgatattttgacatcactcagtctgtttctatgttttggtaaagttggtcaccagttttcagagatgttgttgttctgctgaaatgagagactcaaaattctttatttccaagtggtttttccatgttggaaatgagaaatgaaaagttatgaatttgaattttttgacttcaaagctctcaattattgtaaaaaaaataagacaaacggtcgagacaaaatcagaatcaaataagtagaacccaacgcaccaggccatttgttaatttgggcgctcggttcttttgaagtttctaggatgttattttgatacttccaaggttctagaacttgaggatgagatctcctactccatttttgactattctagagagaattctcgaattagatttggcatttagatgatcaaaatattgggatttctgccctaaaagcaagtaattaatgnnnnnnnnnnnnnnnnnnntatgaaatacaattataagataaaggatgtattcattataagagtataatttttaaatatctaaaaattctttattcatatagagaaggtataatcttgtagggatttacaatagaattaagattatacaatatggataaaaaaaagtcagtagtgtattataatttacggaatctttaatataaaattgctaagtaaagttttgttatcttcatttttgtaagcatgacacatggatgttaattaaggaaggccaaggagtcatcagctgcccaactccctcaattgatgctccgagaagacaaaggcatcaacttcgcaggaagagttcctctgaaggaaggctccctaaatgctggacatgcaaagggtatccatgaaccaaagtctcaaccatccaggagctaagactctttgctagcatgagggatgtggatcttctcaactaggcctaagtactttgaggatacaccagtccaaggtac

SEQ ID NO: 33592 - DNA, 1136 bp, Cannabis sativa
attatttttctcaaagtattaaaattaaaaaaataaaattatttgaatttaacacaaagatataaattaagtaagtaaaataaataataaaattgtcaatatctaatagtggaaattaatgttgctaattaaaaaaataaaagtttggagattaatttaccaaaatatgaagtttggggatttcaaaaaaaaaataaatatgaagtttggggaccacttgccaaaacttatataatttggagactaatttaccaaaaaataaagtttagggaccaacttgccaaaacatgtatagtttaaggacatgctgtacaaataagcctaaattaaattatagagtttctactaatgatagctgcaaaagctggcataattttgtatatgataaaaagaggcaaatttattagaaactctttcatatttgtgtgtttttcaatatcgtgtgcataatttgaccaacataatatatattatgtctactttttaattataatcgatttttgagtaattgtatgctgtggaatagttcatctaaatgaaaaggtcttcgcaatcgttatttttggaaagttgttcactcactgttatcgatcccgaaaggagtcatgtggaatgatagtcgagtgcggaaggaagttccctgatgactatcatgtccactatgggaccagttctcaggatagttagctcttccctagaaaggagtttcagctggctagttacctctcttggaatgatagatccagatagtcgactacaatagtctttatcctatctggaagcgtcttcagctagtgtctttggttcgcgagcgcgtaagctagtatatgttcccgaaggccctggcgctcatgctgacgtggagacttcactaaatgaggagttggttaagttagttataaagttagttatttataactaacttaacaacctcctttcttgcagccaccgactttaggatcttgatcctaagcctataaataccgccttgactcgacatttgaagacggattgaggtacgagtttgagtactttgttcagatgagattgaaagttggagagagaaaagattaagaggtacagagggaggtacagagaaaagagagagattgggtttgggttttgtaaaaagaatc

SEQ ID NO: 33593 - DNA, 1827 bp, Cannabis sativa
ctctctctctctctcccttctacacacctaatagggctctctttccctcttcttacttcatatctcacgcgcttctaaggttgttcatctttctcactagagatctgcctacttgattcatgtttttttatctttatagagagctatatttcatcgaaccaaccacttttgcacaagcatgcaaatctaaagtgtcaaatagtggaacggatagtgagatcgatgctctagaagccaatgaaacttggattgttgtcccattaccctcaggacaacataccattggtaacaaatgggtttacaagattaaatataactcaaatggttctgttgaaaggtgcaaatctctcttggttgcaaagggttacactcaggaacaaggtgtcgactactttgacacctatgcccctgttgcaaaattcaacaccctcaaactcctattttccttgctgcaatcaaacaatggcatctccagcatatggatataaacaatgccttcttacatggtgatttaaatgtaaatatctacatgaagtttccccaaggctacactcctaagggtgtcataccccctaatgatgtatgcaaattaaagaaaagtttgtacggattgaaataagcatccagaaaatggtatgcaaaactcattagcacacttcttcaacaagagttcatacagttaaaaaatgacaactcactcttcctaaaacactaggcagggacattcaaggcattatttatatatgtcgatgacataatagttgccaccaacaacagtgctgctctaaaagattttgttgcaactcttgatgctcaactcaaactaaaagaccttggcaccctgcatttcttccttggccttgaaattgcacgctgcaacaagggaatctcagtctcccaaagacctttcaccatacaacttttaaaagatactggtcaccttggtactaaacctgtttccactcccatggaacccaacataaagctcaataatgagacaggaaaacagcttcaaaaccccactcaatacagaagtctcatcaagaaactcatctatttaacaatcaccatacctgacatctcatttgctgtcaacaagttgagtcaatatcttcacacacctcgagaaccccacttccatgcagctaacagaatcctccagtacctaaaaggcacccttgggcaaggtttattcttccatgcctctgcaccagcaccactccatctccaagcctttgcagacaaagattagggagcctgtttggacactcagcgctccatctcaggatattgcatcttccttggcaattctctgatctcttggaaatcaaagaagcagcacactgtctcacattcattagctgaaaccgaatacagagcaatggctaatggcacctgcgaactaacatggctacacttcatcatacacgacttcaacatcaacatcaaactcccttcaacactcttctgtgacaacagtacaactcttcatatttttgaaaatccagtttatcacgaacgtaccaaacacgtagaaatagattgtcatctcattcgtgaaaagatcaacaatggaaagatcaagaccaaccatgtctcctccaagtccaacatagctaacatctttacaaaatctctttttccagcacatttcatattttagtttccaagatgagtgtcaaaaattcttacacttcatcttgagggggcctgttaaaacagttaaaggtggttagttaattcagatagacagttaggttggtttctcgtactctgtgtatagatattccaatgccattgtagccaattcattcattcaataatatt

SEQ ID NO: 33594 - DNA, 1213 bp, Cannabis sativa
agtggggcgggtcggatctgatccaagatccaataactatccgaatgtttcggatcagtaataatccgtcggatcggatcactgatccgattcgaatgaatggatctttttaccgtgcctaagtaaatccatgaagcatgtaatttatttaacttagataaagctttgagatttatggagatagactaagctaggtaacaaatcaatgcatcatataattcatttaacctaagttctattttccatcacaattaaaacttacaatttatcacaaacacttagaatcctaaactattaggtgaatagtaatcctaagatgacagtaaattaaagtatctaatttagcggccgtctaaataaaatataaaacaataatcatgatattgaacatagaagaatagaagcaatttgatataaagaaaactagaaattaacatttaatgatgacatttaaaattcatgtctcgggttttgaaataacccttaactaaaagaaaactacgctgaactagacattataaaaaatcataatttagtaagagttgaaggagaaaaaaagaattagaatgaagaacacttcgaagccgcgatctccatctctttcttgctttctctctaagtttctctctattttgtagctctagaatgatgaaatttgtagcttaagaggtcctatttatagtattagaaaatatctcactaaaagaaaagataactcatctttaaaaaaaaaaaaagataaaaaaagttgtagtccagcttttgacccctcgccgcggccataggtttggttgccgcggccatgacttcctcgccacggccacgaggttgctcgccgggcgacagctcactgctgaaaaatttctgtcacctgattagtattttggccataacttcttcaatacaactcgaaattggacggttcaagatgttccagaaagctaagaacgagatctaaaactttcatgctgagatccaagtccatttatgcctctaaggttatcaaaatttgcaattaatttctaccttgtaaaactgagctcgtcgacttccactattttctactgaatatatgctaacatccctccaaatgacaccaaatacatgattagttttaaaaatatcctaaaaaatcaaaatcactataatcaataatttaaagaatcaatttaagaatatgaatacataaattgatcatatttataagataaat

SEQ ID NO: 33595 - DNA, 2266 bp, Cannabis sativa
agcattacctcagcattcctgccagtgataacaaaatttttatgtgtttatgagaattttccaaaactcacaatttaagttctaccatctagattcatgtattcctatatcaaaccagattagagagcattcattatgcctcaattcttaagttatgcaaggtaaatgaaatattcctattacacttacaaagaaaaaatctaaatctaggatttctcttgctccattcaagtttaactactagatctagcccttctgaaataagatctagcttagcaaattgttattaatggccaaaaaacaacaatcaaataaaaatgagacttcacttgaatgaacaaaggtaaaagtactaaaataagctctaaaattaaccatacccaacataggagtccatagccactcaagctttaatagtttagctcatactcaaatcaaaaaatagcatccaaattcaaaatggtttaaccatggctgctgcctctttttttagttcaacaagtttctttaaaattactaagtacaaacacaaagaaagagaaagaaaaagaacaatattaagagagggtaaaagaaaattcaaacacaaaagcttggtcccactctcttctttcttctgttgtacttccttctgcaattactcctctttttcaaaaatgcagctgctcatgttaatggaagatggaggtgtagttggttttcttccctttttgttgttgggttcttagggtacaaaattcacaccctaaaaatagaagcccaatatttttccactttcgcccactaggtttagtctctttccttccacagcagccagctggtgtattttgagtcagggacaaaattgctgatgtggataagtgaaagtcgtttttttatactttttccacgtcacttcccaaactgcccagaatgctatagcattgcttcagtaattctgtccagttttcagcttttgttcaaacttctcctttgcatcacttcccttttacctagcaagttaactcttctttcccacaacaaacaagcaacatttaattaaaaagaaatacaattaacacaataatttttacaagactcaaaagttagcttcctaaatagaaattaaactaaaactacttaaaattaagcaaccaaacacattttcaaaagttatcatttatgtttgttatgatttttcatagggtcgaaactggtttcacagtttcaatttatcttttgattgttttaggttatattggtaactaatttctatgtttagttattatttttgttgttttatgtaattgactctaacattctagtttttaatacgactgatttaaataattggtttctcagttattgttttaactaattgattattgtagctggtttaagtgtgccaaatttcaatgtctaacaccaatgacaactccaatgtctaactccgatgactttttcgataatgaaaacaactctgacgacttttttgatgatttttcaacgacaataacaacttcggcgaatattctcattccattttctacttgtttgctagttaatattttattttagtagataatgattgttttgggtagtgtagtgggttgatggttaagtattggagcttttgagaagtttgtaactagttttatttttgtattgtatttgatttgttcaagattccatagagtatttagaatacaagtacgtaaaatttatttataattttagtattcgtaattggtattttttcatcaagataacaactctagcgaatatactctcattctattttttacttcttttgcagctaatattatgatttagtggataatgaatgttttagtagtgggttgatggtctagtattaaagtttctgagaagtttgtaactggttttaatattagtattgtgttggtattagttttggtaatgggttgatgatcaagtttttgagcttataagaaacatatgtgaaatttctgagttttggtaattgtatatagctgaacttttcattgagaaaatagttttaattaaatggaagaaattattttcttaatttgttaccttaaaaaaattatattactattattttagtttttgtaggtttttttaataagttttcatagttacagtatttgtgtaaataactatttattttatatgataaaataaatggataacttcacaaatacacaaaaacaacaaaaaaaattatataaatacgattttacggaattttaaatatttttacaatttttttttgattttatttaca

SEQ ID NO: 33596 - DNA, 1349 bp, Cannabis sativa
  modified_base (758)..(772): a, c, t, g, unknown or other
  modified_base (897)..(906): a, c, t, g, unknown or other
  modified_base (1311)..(1323): a, c, t, g, unknown or other
ggtataactccacctaaggaatttccagataaggtccggctgcctaccacttggcccacaagtggaaccagtgaccggtgattggacagctgaccgctatgaatttgggcggtatgccagttggattttcttctgtgccgcccaacgggatactagacgtagcagttggttgttgattagcaacttgatacgctttctgtatcagtacggtggcatgtcttgttcggtcttcgatggctgcctactgaaccttcaatgtttccatctccctatccctccattcaatgaactaacgcctctgctcctcgaacgcaaggttaattgcagcacggagctcctcctaatcatgatgtaaggtattagtgtgaccttgcatgagtccaagagcattgtggaggttctgaatctcactatcatctcatatggtcgtttgagcattggttgcgaatgggattccagtgctattagtatcttgatctgctgccgatttggtgtttccagtctcttgcacaccgggtgtgatcccagccaaaggggatgtcacaccttggcctatagtatgtggatgcatgttcagttgttcaagattggttcctggtcagacccttgtattcccaggagtctgcaatgtaggttctattaactgtgggtcactctgatcaaccacgcctctacgactttgcaccaccattttgtgtgtctgataaaacttaaggcaaagagaaaatttgaaattttgctctcaatgaaagcaccannnnnnnnnnnnnnnttttagccaacgacaatgagtaaagtaataagcgataagaaatgtaattacgatagagcaaaaaccagtaagcataaagaacacaagattttaaagaggttcaacccctttagttcggtaatagnnnnnnnnnnttagattgtattaactcgagaacaaagagtacagtgttttctctctcaaagctctcacaatgaaatctctgagcattttctcttagatctctctggagtaattctttcgaccccttttacagtgaggatggatcactatttatagggataaatgcatgagggaaggattcccttttacttacaatatttataattggtaagaacatatattacatatttagaatacataaattgagggattcagacagtttgtcatatccttttgatataatcccatgattgtagggattgctcatgtgcttcacgataccaatcttgaagttgctaagtcttgatacattgcttagagaaatgacttcgtttgctatccggagtatctgccctttgttgggttttatgccctannnnnnnnnnnnntcaatataatcagatttacttgttaa

SEQ ID NO: 33597 - DNA, 1162 bp, Cannabis sativa
  modified_base (533)..(534): a, c, t, g, unknown or other
cttcaagaaatctgatctgagaaaataggaaactcaacaaaggatcagattatacagctagttagataaaaaagaaatgggtaactaaacttacctttttacttttttttttccaaaaataggaaagctagacaactttccttccaagttttaatacacaaaataggaaaccatattaaacacataccagccaaaattaataggaaataataaaatatttttgtcaattaaatatgccaaaaatgaaattaatactattaacatattatttaaatatatattatacagtacattaaataataaacaatttccttagttaacttctcttttactactcccactcttcctatgaatgttattacaaacagaaaatttatctttttctacttaatttccttacatcgaatatggagtactagccttgactgcaatgagagtgatccttgagaaataattattttacgaaaaacctaaatttcatacttattaattatgatttatcataatggtacacacacacatatatatatatnnatatatatatatgaaactttaacaatgaatctacaaactcaaaattataaaatgataccttagtttccaataaatctagttgagcactaaaacttgaatataaatgatgttgatggtgatgccaaaataataaaggatatatatatatttatatatgggagaataatgaaggttgtttatggtaatggcttcaacaaaatggatgaaagaattaataaaagaagacttgatggacgttaatagtgttgtaaggtggtgaaaatgacttgaggtttcgttgtttatatatgaatttggtttagatgttgacaagatgagagagtgatgtgattattgttatatatgatggatagggtgataagtatgagggattgagagatgacagcagttcagaataaagagagagatttttgagtctaggtcttatgagtgttgagatgaatgaataattaaggttctatttataggcttcccatagcccaccccacttacctatatcatatcccttggctaagatttgaattttgaataatatgctaatagtcattttaaatcctaactgtattgaaaatcttcacaaagtcagtcgaagtgataataaagttccccacttcccatgcaaccgcat

SEQ ID NO: 33598 - DNA, 2061 bp, Cannabis sativa
aaatagccaccatcttgagggagaatattgtggacattatcctacattaaataaatagtaaagtattgagacatatataagaacatgggctactccactcatcaccaattggaccacttggttttgagatggaaccccatgattctcaacaatgagaagccgtctatattagatgatgaggaatgaaaaagttcaagatagagaagtcattgtctatattagacgatggatgcacattaatcttcatgaccacatatcatgggtaacgagtcctcttcaagacaagataaatttttaaaatacacttttcgagacagtgtcaatctcccaattgaactaaagttctaatttctcattctctattcaataatagctacacaattatatatttataggctttcccactatttacaaattactaataagcccctatattattttcataacactttccgactctttaaaaatcaccttgccctccaaggtggtaaaaataaaaaaaaaaatgaaatacaaaaacaaacaaaataataaaagagaaaattacacttaatatggtattttgaaactttatttgaaaaatatggcaattttatgtttgtctcctttctatggacttaagcatttcttttatcattttatgctatttattttgtcatattttttgttattattaattaaatatcatattttatttttttctcactcatctaaccctaacttttaagattctcatttgtcatttcaaaagtatgatatattttaaaccatagttttatattacaaaaatatgatataccataaaaatgtatatttgtaaaagtccataacaaattgaatgtaaaagaaatatgtcgcaaaaaagctcttctccatagctttaactgggttttgcaaatgaaactttcaatcactcatattgatatcgatgtgtctgccactttgaattctacatctatgaatttatcatgcttcacaaatttaatccaagatgtttgttgtcttttatcttttttctagagttgttgtttcttatgttaaaagaatgctaaccaagctactcataatttaacaaaacatgcaattatgttttagaattggatcaaaatatttgttggatgggagaaattaccactctaattttctttgttattgtaaatgattatttatttataatataatagtgaaaatcttctcaaaaaaaaaaaaggttgtatttcaaattaaaatcaacaaaatatcgattagtatatttatttctttttttaagatctatttgttttttgaaattgaatcgtgtaaaatttgagttaaacgtgtaatcagatgtattttgaatatttatagtaaaaattaaagtcttaaaatcgaaacaataaaaattaattaattcataaaaaatttctacattaaatatttaaatatatatatatcttgacgtggtgatcaaaatcacacatgattaacgatgcatcaatccacaatcgacagctgttccttctcgaaccaggatagttcatcgtttaaccgaagggcatgctttgtcaaaccatgagctgcaaaattcttatcgcgagcaatatgggacaaaactaccccctaaaatttagacaataaagctataacatccacaaatagcacccccagctcgttaaaattaccattcctttgtcgatagttgtattaaactaaagaaatacctacaaccacaaaaaactaatataaaatgaaaaaacacacaaaattgaaaatgataaaaataaaactaaatttatttaaaaataaatttatctttaacgacttggagaccaactaattctcagtccaaaaaattcgtctctgtcaaaatataacaagtacattctattattataaaattaataataaaataaactaatattacgaagaaaaaatacacaaattatattttaataaagaaaacttatctgaaaaattctacacgattccttgagagtcagagaagtcaacaaacaatgttactgaaagaaaaattcaatataatttttgcgcaacttaaaaaaagcacgtaatctcattaaa

SEQ ID NO: 33599 - DNA, 1804 bp, Cannabis sativa
atatattgcctatgttataacatttaggtttagggaaataatttagggttttttaagtatagaaaatcaaatttccctaaatatatcgatatgaatgttcaaatcttctcattcattgctatttaattgtaattattattctattttcttagtttctgactctatgattcaaatatatatatatatatatagttataaaacaaagatataagatggtggcataatgctctaaaattattctgtagatattttctcttggagaattacctattgtacaaaggtttactattttttttacaattatacatttcagttttaatattttcaattctacaaatcataattttcataaataacattctattagattttttaaatcaattatacctttttttttctttaatcctaattatctttgttaaaaaaacatctattcttcacgcttttcatcttgaccactgccgatttcctcttcgactacagttgacctttgctttgactttcgctaacctacctctgctttgactttggctaacctttgcttcggttaacctctatttcaacttcgattgatcatgattcgtctttgcatccgttttgagtttgctttcgacctcgccattgttcttatcgacgttctactacttatcccttctcatagttttaggcagtactagtaatcctctcattgtttagtaatcgatgagttcatcccatttttgaagactttgttagaagtcaagctaaagggtttgttatgttttcgaagctttatgctaagttttgaactaagtatatgtttgttttggtggaaaatgttttcacctttgattttttttttctaagtctaagattagatcaaaaaaaaaaaaaaaaacaaaaagttggagaaaaaagaaagaactttctgtgttatgatctctcgggtctattttttttttttttttaaaaaaaaaataaggattgtgtgtatagttattgtagttgcctacatagtgtttgataacatggctgtgtgaataattagtttatattttaaagtgtacaattttatttgttttatagttaaaacttttggtaaatttatttcaagtatgagtggtcttatcttgttttgtgttcatctcacaaacattgttccaaattttaaatattgaatttgagttacttatacttatatgtttgttttgtgtatgtttagtttattgtgaattagggaactaagctgcgcttcgcgccggttcgaccctatttttataatttttataattttttattgtaattaattttttaattatcaatcacacaaacatttatatggcatgatatgattatttattactaataaaaggtatatatactatataatataggatgtttgtatataaatatataaatagtcattatgttgtttaatgtttatatgttatgtaactgaaaaaattaatttcttaagatacttgaaaatttattaatgaatataaattgagattggcttttcatatacatgtttgacttttttatgtcacaattaaaattattaactaaactattttatattctcaatttaatatttgtatattatgtataaagaaattaacttattatttattaactagggtgaagttacgtgcaaatgcacgaatgcttctccccaatcttagtgtgcttcttgtcttactattcgacgactttacattcttttaaattgaacatttagggctcgtttggaacgtcgtattaagtcatgttatattgtattatattgaattagattatatatcatgtttttatacaatactat

SEQ ID NO: 33600 - DNA, 1335 bp, Cannabis sativa
  modified_base (29)..(31): a, c, t, g, unknown or other
  modified_base (58)..(60): a, c, t, g, unknown or other
gttagaagagaagatttttacgtggttgnnnagagaagatttttacgtggttggggcnnnaatgagccttagtccacgagtcaccgtatttatgagagtatttattccaaagctttttcttggctgatccccatttctgtttatcattgggatatttataggcttataatggtagtaaaaggccaccattgttgtgtttgtttacaccatacttagcacaatttccaagatctgatttagggcataattacttatcttgtgaagggtttttaggctgtccataggtgtttggtgggatgtgatttatcccttatttatgacttgatggctcatttatgcggttgtcacttgatgtatgggggctcgtgaaattagggaacaactgggcttaaaccctcgaacatgcctggaagagtaaggcattctaatgctctctcccatactgcattatatgtagacacaatatcttggtctttgggtgacacgtcatctttcattactcctctcgtactatccgccgaatacactttacttgcaaagaggaacaaatggggaatgctcgctgataactctatggtatagagttatttttattggctttaaacttaaattgtcatgaaaagagtaatgaaagtgtgtttgtttgttaagtttgattagtttttgcttaattttctatttagaatgatagcttttgagtcttgtgaattgttagtgttagctgtacttatttaactaaatcttgtttgtttgttgtttagtaaagaaaagttaaagtcccacaggaaaggaaatgatgtgagaccaaaatagatattgaagctgaaatctggaaagaaatactgtcataatgctatagcattctggccattttgggctgatgtggtcaaaagttacaaaaaaaaaatcatccatccacatcagcactcatgtggcagccatttaaattcacgctagctggctgttgtggagagaggagaataaacctagtgggccaagaatggaaagaaatgagcttctattttagggtattacattgtaccataataacctagcaactaaaaaagtacagccaccttcatcaacataattagctcaactgccatttttagaagaattaattgtagagaataaaaagtgcaaaaaaggaaggaaaaaaaggaagaccgaagtgtaaaacgagaaggacaaaaaaggccatatcattctcagttttaggattttttttttctctatttctttctattcttcttattcttctaaactctataaaaactaatttgtagccatggattataatactttgtattggattatggtaactaaagtgagtat

SEQ ID NO: 33601 - DNA, 1868 bp, Cannabis sativa
gagtcccgagttcgggtttaggttctagtctaagtcctattctgggtccgggaccgggtccaggactgggtccgagcacgagttccagggctgggttctggcctagttctgggtcacagtcaagatgtgggtcctggtcacgttcccggtcctgttccaaggtcctagtcatcttctcgttcatgtttaagttttgggtcccaggtcttggtctaggtccaggtcctgggccagcttcgggtcctaattcggttacagttttgggtctatgttcaggtcttgttcctaggtccctatctacttctagtttcggttccagtttcaagtcacggggtacgggttcgactcgagtttgggtccgagtctgggttaagacgttatttgggtctggagctaagttcaggtctgagtttcgatctcggttagggtccaagggtgggtccagtttttggttcgagttttgttccaggtcccggtcccgttccaagatccttgtccggttacatttcaagtgttgggtttgggtcttagtatgtgttcgggtcctggtatgagtttgagtgtgggttcagcatcgagtcttggatcttaagtcccgaggtgggtcctaggacaaggtttgggtgtggggtcgagtcccggatcgcgatccaagttctgacgcccaagttctggtcctagttcaggtgcccaatttccaggtatgggtccccccttgatgttcgggtcctaggtcccggtccgagtccaagtttgtgtttcgattcgggttcgggtatggtccgagtccagaacctggttagcgtttgagtctgagttcaggttccagccccaggtctgggtctaggttcgggtctcagtctgggtctaggtcccggtcttggtccaagtctcggtatgggttcttgtctgagtatgggttttggtttgggtcctgttactgtctcatgtgtgggttctagtccacacgtggtatgattccaattctggttccgagatcgggttttgatcccgttctgggtctgagtttgggtctggatcccggtctgagtctgggtccagatataggtacggatccaggtccgagtcctagattcaaacactgactacgggttaggtcaaagccttaggtccaaattcggatctcagttatggatctcggtcttgttccagtaccaatctcgggtctttggctgggtccttaatttgggtttgggtctgggttcggggttgtgtccctgtagtcaggtcctcaattttcggtccaaggtcaggtctcgtgtctcgagtctagggtcaagttttgggtctccatctcagttttaaggcctagtttcaggtccaagtgcctcatctaggtcttgatccttggtccagatctgggtcgaggttcgggtttggggccgaggtcccccaatctaggtccagatcctaggtcccagtcaagatccaagttcaagttcgagtttggctcccaagtttgggtcctagtctaggtcccagtatgggttcaagtttaagtttgtgtccaggtctcgatctgagtccaagtccctattaagggtccgggtcggggacacaattcgagtcccactcaaggtctagatcccagaccaggttcttgtctgggtttgggtccgggtttaggtcgtgagtttaggtctaggtttgggttttgatctgggtctgggtctgggtcttgggttccaatctcggtatgggtattggtctaggcctgtgtccaagttagcgtttagagttttgtgtttagtatttagggatttagggtttaggatttagggcttaggtcttaggggtaactgtaaagagtttagggtttagggtttaaggtttcgggtttagggttt

SEQ ID NO: 33602 - DNA, 2123 bp, Cannabis sativa
gcgtatttggaataggagaaatacattttcgcatgatcacaagctcctctctgataacatggttagtgcctgggccatggattatttatggaaatatcaagatgctaataatattgagccagctcttatgggtccggtctctggcaatgcaagtaatcgactggcctcaattgagactggtctggttcttggtgagttcaatctttttgtggatgctggggtgtgtgttgagaatcaaaaatagggatgggggctttggtttccaaccgtatggggcatgtcctattcttgagtgcgactccttgtgtgggattgttggaaccgcacgttgccgaagccaaagctttgctctatgggcttccttgctgcgtgcagatggggtatacggtgaatactgtcttttctgattgtcagcgggtagttcttgctgtcaatagcaaggtccattgtctcaatgagtttggtattattctcaatgaaattaatcatattaggaattctttcagtaacatatccatgtcgcattgtaatcggtcaaaaaactatgttgctcattctttagcaaaacgagcattagatttagatgaggctcgggtgtggtggtcgggcttgctcgctgatttagctgtttaaattgcctatcttttgtatcccgatcttttggcttgatgccttttaatagaatttctcagtttccttttcaaaaaaaaaaataattatattattaattagtgaacttattaatttgaaaatttatgtatctaaactttctctctctttttcttttgaatatgtttcgtaattttttttttcttgaacaataaactttcaatgaaaaaaaagcgtttagtatattataaacaaaagatagaaaattctccatcaaaattagctcattatttactctaactccaggcatgaccgaccctagactaaagcaggttaagcccgtgcctagaaaccactaatctagagacccaaataaagaaaaagttctttaaaaaatgcacatgttttttaatgattttataaaataccatctatttatataataagggcttcaaaaaaatttacttttcataaggcctaatacaactcaagatcgactctaagtacatgcacaattaatcaatatgcgtgcacccatattgaccgaacaatgtatatgtatcatgaatgtcttaagaaaattagacaatagactagaaatatctttttattttaaggaaaatagtttatagatagaaaaaaattagaccttacagtcattacaaataatatttgtcgggatgattgacgggtaaatcatgccaattacattgttggcgtaagcctacttagtcacattatgggttgtaaagttataaaatctgacaataaaagaaaaattacaacttaaaaataaattaaagagcatattacattggtgaatatagttactaataccccaactcaaactggttccattcaactcattgataactatctccgagtcactctcaattaacgcaaatggcgtttcaaagcatggttttctctatagtcaactgaaaagtcgcagcttcttcaatttggggatcaacaaatttaaacttgttagtgaccacccacaaaataaaacttgtgtaatccttaacgaaagtcactccacactaaaaatatcatctaaaaaatctagatcattctaaactcattatgatacataccattacctagaaaacaaaacatgtaaaaaagttaagaagttttagtgttttacaattctaacctaaaatataaaataattacaaaaatatttctaactaacctatttataataataccagtatcatatcagcctaaaatactagaatctaaaataattaatattagaatttgagaaaaatttgaaaaatctcacttcccgaactttaaaatttttctagatagaaaaataagctgctaaaataccaattaattactttttttattaaaaaaaaaaaaaagaaaaaaaaatcaacttaaaagaaaaatctcaaatacaatttgtctggttagccttttatggtaactggttacccctctgattaccataagagtatcaggttacccttacttgattttcccatattcttcaacttttt

SEQ ID NO: 33603 - DNA, 3834 bp, Cannabis sativa
  modified_base (162)..(165): a, c, t, g, unknown or other
taattattggtgatagtccaaacctcagaaatcgcaaaaaccgcaccgcatcgcaccattttttgcggtgtagtttttgcggtttttaagtttcgtggtgcgggtgcggcttgaaaaattagaaaaactacatgtgggggttggtttgaaaaaatagtcaannnncacaccacccgcaccgcgaacaccatgcacttgagatgtggcatgatgatcgatgctcataaactgttcgacgaaatgctggagaagaacttttcttggaacacaatgatattcgagcttgttgatgctatcctcatgtaattaataaaaaaaaaaaaaaaattcaatgatattttagtctggacattacattctatcatccttaaaagaaatttcgtccttcaaatttaacttaccaaacactcgaggtattgtgtcttcataatcttcacctcttactacattttctccctatctaccatattgacccaaaaaaataagtatttaacttttgtcttatcgttcaatcaacaatacatattatatatacaacttaattaagtattgttattcctccatgcattacttgaataataaaacacactccatcaaaatgacttacacatacattctttaaatacaagttttacaattgcatgctcttaatattataaaagtttttcttctcttatgaacatccttatacgtcattaagagtaaaactatttattcttctctgaacattcttacatgtcattaagagtaaaatcatttattctcttatgaacatctttacatgtcacttgagaacacattatacaatacaaaaataacaaacaaaaagtaaggtagaagaccttatgtaaatttcttttaattattcacattctttcattgaatgttattacatactaaaatcttacccgttttttacttaattttccactgtaaagctacggtgtcattcttgcagtttcatagttgttactcactcatcgatagatacttttttttatggtacttgaaaataaacatggatgctcttcaaaaggtcttgtctaaatatttgatgatctatttcgaccacctttttgtctaacgttcacttcttaactttctttatccgtgcatttgttgcacttgtcatgccttctcatttttttagataatagtctttgattccttttgtagtctcacaattcatgtaccactctactgtatcttctttgttaatctctcttatggttcctggtcttccaatactcttttcaagttaacttaattatgagattaactagttttccacactaacttttttgtttaccttgctatagtagtgaagtttaaatatgtaatgttaatagatttgtgaagttgtattcaatgattgcttcttctattatactaactttctgggtatcatatctcttcatatttataataccacatatcttttatgtcttataaatttcaatcctttttaattcaaaaaaaaaaaaaaaaaatcccaacttctaaatttcactgctaaaatataaaaaaatctatcaaaccaacttacattctaatactaactatttacttttaattatgatcataccatataagctctaaaacatcataaacgcactaataaccttttaaaacgagttcaaccctactatgaatgatagtagcgcaactaattatttatcattaacttttaactataggctaaccctgtaatcttataatatattaataagctaagttgttgaggtaaggaacctacatacatcattgacaaactatgtcgaacagaccttactcaatttatcgttactatatcttatacaccccacttgtatctgattttctactagccactcacgttttataattatttagtcagggctttttgacttgtacttcctaaactacctttaaaaaatataaatccataattcacttaaacattttcattccatatttgaatgtaatcatgttatcaatatatacctcccttggtctttccttgtaagtttctcacttctaattagactaattttagttgttttccaaatgatagctattgtcttattattgtttagatgtgttcttctaggattctccactaatagaaaaatttagttgatgagactcaataaataatgttgtttagaaaaatttattttgaattgacaaaatagtaattatttattttttaataaataatttattttttcaaattaattaaatagggaaaaatatagaagttgttaatatacaaatttttaggataaaaaacactatcattgtcttaattaagacaaggtaggcgctaccctatgtaggaattctctattggttttgtctttttgtgttaattaattaattaatcaactcaattagataaatatttaaatttgaaaagtggttaaagatatttcaagttgattgagatatttcctcaaagtagttaagatattctctcaattggttgagagattccccatcataaatatcaataactgaatttagatagattaaatatgatttaattaattgagaattaactactataaatagaagcctcgtttgaaaattctacactgttatttttgaaataccagaaagaaaagaaaaatcaattttctttctcaaactattctgctcatatgttgagaattcaaataacaagaagtttcgagaatatcctgatagtcatcaagatgtatttatttctttcatgtaagttatattttagatttaatgtttatacatatggtgatccctgtggctatagtacaatgataatcaaattataatatttttcctgtgtacctaatttagtgtcataaaactaacagatactaggtatctttcgaatgcaattgggccgtgctgggatttcgagagtgtggatttggcaagttgttctaaaaattgctgaagccacgaaagtgctttcgtggttaaagcgtaatttctaaggtgttagtattatcgaatttgattgtctgatattagtacaaattgttaaaaatttgaatatttgtcatctacttttagtggtgtcattgaagatattaagtagcttttatcttatttaagtgatgtttctttacgttttgtaaaatgatttgccatgtgggatggtaactttatggttagagcatcccatttatataatgattgtatttttttttttttgaatctaatatctcttttggtgttgttgatattattgagattaaattagtttagttaaataaaatttacaattaaaaaaaataaataaatatttaaatattttatctaattattaataatagccttatatatagtatcattaaacaatagtataaaaaaaaattaatggaaaaaaggggaaaaaataggacatgtttaatataattgtgttggttatatagtgtgtttgatatacttaaaaaagaaatcctaatatggcatcattttaacctttcactacacaattaaactagatttttttaaaaaaaaaatgtacaagtgattataaatacatcttacataatcattataaaataggactaaaaatatttttataatgttgaaatatataaaaatctactgaaacttcagtgaactatagacatattatactcttatcattaattaagattatgaatatatttactttcattgtgaatcctattttgtttatcttgtgtagaaagttatccaatctaattacaactaactaattcaatcctaatcgatccatccagtagaatcggatatccaatcataattcagatcggatgtaaattttaaaaattcaattggatcggatcagttgttggatgggacatccgatccaatagataa

SEQ ID NO: 33604 - DNA, 2042 bp, Cannabis sativa
  modified_base (683)..(696): a, c, t, g, unknown or other
attatattgaaatgcgttttatttagggcacaaaacccaacaataacaataataacttaataataataatattaataaaagattatctcatcattttttagctactaagaaacttctaactttagggcatttggtcaacccaagtacctcagaatatctcggtaattctataatcaatttatctcaataatttcattagtattactaactaaatctgttatgacatttttggccttcgattgggttttcaaggtcgtcgaacttgaaaatatttttatttcacaaatagcttacattatatccacatattctaaataaatcttcataattaataaattacgcttatttatccacttatagaaaaatttacaatttatgataaattaggttagcaggatcataatcctactcattactacctaattaacccataatatataataaattttaattattcatttatgagatattacataaccgaagtaaacaaaaaaaactagtatttacatttacgactataatgtctgttacaccaactgaatcaaacaccttattatggcaatctccactctagagaaaattaattggtcaaatttttattttatcttttggctaattaagatttttaccccctgaacttttaaggtcgttaaaaatgattcttgaactattgagattgttgnnnnnnnnnnnnnntatccaattttagtaaaaaaaaagtctaacatggatgaaaattcaggagccgttatttagtatatgtcaaaattcgagggatatgatttgatagatatcaaagtctgggagcatgttttagtacataaataatcactgaaatagtaaaattgaatgaaattagacaaaagtccgtaaatctaacaatctcaatagttcagggagaattcttaacgaccagattagtttagggggatataaatcctaattagccttatttttttggtagaggaaggggaaaatggataattaaaaaaaagggttatattcattcaattttaaccaccatatacaaaaaaaaaaaaaaaaaggctgaaaatataaaccaacacaaccacatatatttaggatactagtactaaagaaaagccctgtagttaaacttaatataaacatatataactagataaatatgaactacgtacacaaaaaccattttatgtacccaaaaccaatacttattgatggacaaaattcttgatatgggacatcatttcctgagttcgaagttgagaataactagagttatgcagaatttgaaatgcatgaccaacccctttatacataaccatttctaccttcttccctgagctaaccaaagcgttacacagagccaagtttctgtctctcaatatatccatttccgaaacacaaaccattacacccacattattatgattattattattaggcctcatcaagtacttgttggctgattctccattaatattgatcaaagggttgcaccaagggtggtcccggttcgcacccaaaggcaaggacagtctccaatacgtgtcagaagctgagagagtcaacgccgagttattcgatggttgactcccatacttctcagacccagttctcgtctcacccccaacaaagggttgaatcagaatcacacccttcagtctaaacggcctcaaaacggcgtcgtccgaggctgcagcagctagccgagtagtggctacgtgataagctatgcttgctccagcgctgtccccagccaagaataggcttgacatgttgcattggcttagccagctggaactactactactgctactactctgagtctgagcttggtgtttgatccacatgagggcgttgaagccgtcctcgtaagccgcgggaagccggttttcgggggctaaacggtaatttaccgagactattatgcagttagctttggtacaaaggtttgccaagaattcatggtagcagctccatgcggcagagcccacgcagaagccaccgccgtggaagtaaatgagcaaaggcttgagctggtggcccgtcaatggcgg

SEQ ID NO: 33605 - DNA, 6664 bp, Cannabis sativa
  modified_base (5744)..(5745): a, c, t, g, unknown or other
tcgacatgttgcgttgcgattgactagcgatattccctaaaattattatattaaactatatgagactcgatgcttagttagaccaagaatactaagcaccactagtgccctttagcatttctcttaatggccagtttggtattttcttcttataaaaattgtggtcagtttggttttaaacaaaaatttgaccagaacaagtctattttattatttaataaacacggggcaaaatgatgaattgaggcgaaacgttggggagaaattggtatttaccaattaaaaaatattacagtatgcaggaaagagttataactaatacaagggaggatagacataaagacgaaaagaaagaaaaaacgactttataagtgatagagcataaggggactcagaaaacgacatttatttaagctgtgctgcaccaatagatcgaaaagctcttcgaacacttaaccaaaagggatctttcttctatgtccaatcgtgctagcaatcataatcgaaagtggctaacctcaaaaccccttttgttcctttcacggcaccataattggagaatacaaatatattggtgaggatatgcgtgtaagactttttattcagttttctacaatgcattaatggtctttccaagtaaccatagaaccaaagcaagttcaactccaaatatgctatgtaaagttgttctgtccaatgtgaatccaaatactgtaacacctgctctattgttctcaaagtatgtgactgcaaatttaaaaaacaaaaaacaagaagagtatattaagctaagctaatcatgaaaatagtgtaattgacaattaatgttggtgttaacttaccaagagcttgtctcttttgaaatgaaattgtactataagcatatgctggtatcaatttgctattgtccaactcatcttcttcgccttcagcttcatcctcagtaccatcggattgatcatctgctgcagctgctgctgcagcagcattaaacacatcacgggcagcagcggcagctgcctgagaaataggagtgtcagcttcaaagttatccaatgtggcgcagacatgccacttggcagcaaggcatgtaactgcctgtgccttgtgtgtgatcttggttgcactacgcagtagtatgaggactgctgtaaccagagtcatggagcacaactacatccaacaaaaaaatgatgattaattatgacaacatttggattctcttatcaaattgttatgttaagaggcttacagcaagttcaccagctctgaaaatattaagctcggatttggctttggtggtgattagaagtgacgcgaattggctaccggtaaccaagatcaaggccatcaaaatgaagactcggaaacggtggcttatgatcctgagatgctttcggattcggagatgctcagagagaacagagcccacatcagaatcaacatggaaaagagtagcaaagtcttgaatacgtaggatttggagatggcatatgaggcggaagagaacgcagacgaggaagatgaccgtggttctatagaaccaggagaagacctccattatgcatgccacggtatcactcaccacaacatcaccgaggaatgggatttgtgaagatcctgaggtgtaccaccatatcttgtatccagtctctgctaccaagcacggtaatacaaatatgccaagaatcgttagtgatctctgccatgatcaacaagtgaaaattggggtaagctaactttttaacttctaaaacagatcaaatttcaagttaaaatatatgaaaattacagtttatatttttttcttagctaatatgatggtaaaagttaaatgagattatgtgatatttttcgacaaaatgtgcactatctgactatcattactgaaatattaaaacaatattttttttatttctttgtcgttttatggatcgaaacagacaattaattcatcattatctatgttcttcctacgttttacatttgtctactttaataatttttcccactttttttttatagtggtaggcagtctttctttgcaaccttctagtgaatgatataaactaaagtaaggaaaatcaaagaaatattctacattgcaatgacttagattctaagagttatttagagataagctaacactaagaatgacctgtcatatgctcatatatgattaattagcaaattaaatgtggattatacagaacaatcataatggatgcctcctccacacagtgagtggtgacaactgttcaaacttcataatgtcaaagctttcttctaacaggggaaagttattcagacataagtcggtaacatatgacaagatataaaaatacaaaggagtaaaaaataaaaataaaagagcagtagacagatttcgtattatattttgtcacggtcacgttattattattattattattattgctatttattatgaaccacagatcaacattaataaaagagattttttttttctttttgtggtaggaaatgaagtcctgtactataaaactcataaatttgggacttttatataacaccattattcttgtgaaggattgcactatttcaaaaacgaatacttaattttggtatagccttataatgaaataaagtcaaactcttaatggttgatgatgcaatgcaattggcctaaatcaaataagttaatatattttgattgaaagtaggaccaacactcccatttgacaaaagtaaagaatgatataattgtaaatattcttagttaccataaccaaaagagtactaataaagaaaaacagaaggcgattcggtagaacaattgtagttttaaaaacaaacaaataaataaataaatataaatcaatttgattaaagaaaagaaaaagataaagatgaagataaaaagaataactcacatcgagttgtgatgtgtatcctctgcgaacggtctcactatcattccaaagcttatcaaagaacaagaaccttcgaagtccatacttcctataaaaattagagagacacacaaacgacagagtggcgacgctgctcaacgagagctgaacgacgctgtcgtatggcctatcgtgcttgctatcgcaggtggaacaagcgaggacaaaatgggaaatgccaggaaccacaatcgtgaagagaacgaataccgaccacgaaaggctggccgtccagatggttgattgatccacgcacatccaccgtagatacgatcggaagctctggagctcgtcctgcgcgtgcgaaacgcaccgcatgaatttcctgctctttattccctccgctactaacggctccctattgctaccctccatcccaaaacgacggtggaaaatatatgttttggggtccttttgatgatcctacgacgggagagagaggctttattatgtgctttcctggtctatgggattggaaatttatacatgatgcaaaatttatgatttttattttttgtttttcaaagggcactgcccaatcagagaatgagaagtggtgatttgtttttgtttttttgtttttaagaaaggaaataaattacgggttttactgaaacagctccagccgtaatcgactatataaattagataattttcctttttgtttttaattattgatatttatgctgtaagctttcattgttaattttttttttaataataataattaatttgagatctcaaattaaaaatggtaaaaaaacagctggggatgggacccattcgttcgacgtgtattgtagggcgctaattacgcaagtagccaatgtgacgatgccacatgggaatcccattttaggatgtcaatggtgtcgttttaaattgagagtagttcttgtctttgttttatttttaaacaaacaaaagggttacttacttacacctatacaaagtacacttgttcgtgaactatttgaattcttattcctttacaccttaattcacttataatatttaaagttaaaatagcatcaaataatacacagtatccatgggaaaaaaaattggtagcttggtcaatggtggtttggaatgactgcgtgggatatggtgattggaaaatgacttattttggatacatacctaataattatgtgatttaacctggcaaataatgtatatattagattaggactaggtgtcacataaacgatgccaattattcaactaataatattttaaaaatgacaataatttttgtttctgcatcatatgacttcgattttcataataaatttgtccaagatttatcggccaaatttatttacttatgggaaacctctaaagaacatggggatgtctttttatattattaaaattatatgtttgttccttacaaatatatattgtttataactaatcagaaagattggacgacctatgtttcatttattgttgtactctagtttagtacaaacaaaccttcgaatttgtggtttagtgtacataaagtttgagctcagtgatttgaatcgatacatgtgcacactcagagaacacatcgcatcctttgatcctcattacttttacttttatatttaggcaattattgatttagcatgtgaagtgtgttactcgaacggctgaacttgggcgggtttgtcgagttcgagtgaatcgggtttgggtttgtcagatttggattatagaaaccaaactcatttgaaatatctcataacagatttaaaatttgactgttattgagccttatgcaaaaaattctacgtacaagataagtttaatttaactttaatagtgtaaaatgtgtgttaaatttgacccaaactaaaaattaggttaaatttgtcataaaagacagcatgtggttacgaaaagtataaacttacgcaagtgcacgtatcaagcagtactcacacatatgaggtcgaactacaaggaattaaaattaaataccactaaattagacttatatttccatttggttaattgaaataattttggaaagaaaaataataaaaattgacagaaaatttgaagaaagcaattaacgttgttcaaatatagatgaggaatcttgtttcaattacacaattgttaatgctatttactattcttctttctttaagtgatgagataaattataaaaataaccctaactctactcagatcattaaggtcctaaactatatatcatttattgcatctttgagatagatcaatcacgtatagtttgaattaaaaaataatctaagagtcacacaagcgatgtgagtactctcgtttcacatcaaaatccatgtttgttcaattagaacattcctaatattcaccttttgagatttcatataaggatcataaatcatattaaatgtgaccaatctaaaatatgtattaacacaaatatgaacaaatcacaaagattcaaaaagaagaagaagcaaatcacattaacaaattggaataaaatcaatcaacattcattatatctctaaattggaaaattagttcataacttcaacaatcaaatccatgttttaactaaaaataaaaattaacatacaaaattaaaaaaaggaagagaatgaatctagatggagaacttgatcggatagtcactctcactttctcaatcatcttcttttgtttgtaggattctatttgttagcgcagattttcgttaactatatttgagcctaagtcgtgataaacttgtacaggaattaaaagctagtaaagaaaagataagaacacaaaggtttttacgtggttttnnagttaaaattctgcatagtccatgagtcaatcttattagatttctgatacatctctcaggccttttctctaataattttttcatccctttttcattctaactttctcctatttataattacataggagggcagttaattacatagttgactgatattgtacaacaattatcccctaaagtcatgggatttgattacacaccacgaaaaataaatgtggttaatatttgaaaatcacatagctgtgatatgttcgcttttactgggtcagtgtagacgtgtattaaatacgttacagaccgtatcgttctgagacgtctcactgggaacgtggcaacaataaccttggtagcgagctggagcttttctcatatgtttccgaggtcgataatgtaagcctcgtcgttcctgcgcttgaagacataatgctccatctgaaaatcgcagttcttggtgacaaggtgaactttaaaaatcaacatcatttgaatgtcagcttctatctgagggaactgactcgacaaaactgtgaatctcattgaaagatgtctggaactgattagtgaaggtaccatgagcatgccttcctatagcaagaggatttcctcactattagtttttgggtttacccgtgtattatacgccaagtgtctttaacaaccatcatgtccggctcatgtcttgcctacatctcctcctgcgtggcgaggttgatgcctcgctttgcacatctgatgtcgtatggtttctcgtcaatgcgtgagtcaacagtttgtatatctttatctcgtgtaagaccttacagttaacaagttgtaaatatactctactaattacgcatttaacgagttattctattttctaacataattacatttggtaattcgtattcttcctaatttgacatgtgtcctcctctga

SEQ ID NO: 33606 - DNA, 1440 bp, Cannabis sativa
atacatagatccaaaaatttattattacaagtaattgaatctagctattaaatcaagtaaaataatacattttaaaatgagtaattggtggcaaaaatgtttaagtttttacgttgtatacttattttaaaatgagcaatttgactccttatttaaaatagtcccacatgatttagatactaatgtggattttgtattataggttatatattaataactatgtcttctactttactttttactttgtgactaagttagtgttacattattcttttgatgggtgattaatgagatttgtcttacctaattagttatatagtttctattttctttagaaaaatgaacaaatatattcttgcattttttaatcttggtcaaagcttcaaaattgaaaaagaaaaacttattttttaatttttgccatttgattagttaaaaaatatcaaattttttttacataaaattgattaaaattagaattaaacacaataaactataaataaatttatgacataaaatattataataatataaaataagaataataattttcataattagctaaaaaaataacaaaatcaaaattcttaggtatgtaaattattttaaactagattattatagtaatttaattattcacaatttatttagctatttgtcaccttagttaaaaaaaagatagtttagactatgaatagacatcataaatattatttttatttcaacgtttgagttttaatattaactaaaaaatacataaaaactaaactattcatgattttttaagattttttagggatttctttagttagattaacacgtttatcaaaaattaataaacaacaaataaaaataaaatttaaatatttttcttattatatatgaataaaagcaatatgtttttaatatatattacatgtaattagattagatcggtttttaattagatttttaatttttctcaaaaaatcgattcaatccaactactcacattcaatccaatccagtggtaacttgatgtctattttttataattggattggatttatttgattcagtgtaattggattggttaagtgtaattagatcataattcggatcacaatctttattgaaggttagtaaaagtaaattttaaagttagagtaaaaatatttgattacaattagaaagagtgtatcattatattttattttaaaaaacacaatatctaaattataatttaactaaatatagagaacgacgaataattttttaaaacatagaactaaaatttatatttgctctttaagggcggctacatttactagtttctaatctaatccaataaaattttgcatatttacttcaaatttttggtaattgaaggaacatgaagaactgaatttaatttgagaggtaaaaagttgaaagattgtaaagaagttgatccaatatgag

SEQ ID NO: 33607 - DNA, 1135 bp, Cannabis sativa
gatcacatgggtaagtctagaaccgttagaaccgtatttcttatatttcttagtttcttagtaggatatatattggagaaaataaaatacaggggttaagcggggttatcgagtttgaccattttacccctagttgtgagaaaggccaaggttataacctagaaggtaatttagtaatttgtttagagaggtttggtggctgcctaggagagtgacatgtggcttcttattattttagcaaagcaattaattttctaagatttatttaattagggaaaattaagaaaaatcaaggaaaagccaaaaaagtgaaaagaactcatcctttctctctctctttgttcggccaacccaaaaaccaaaggaggctcatcaaattcagtgtattttttggagattcagcaagattcttgtgagtttgaagcaaaggtaaaccctagaacaattgattttgtgtatttaaagctttagattggtttcatgaagtgattttgaaaattaggggctgtagggtttagtgtttgtgtagttcaagttataatgttcatttgagttgagtatagcttcttgtagctggtttttagctatggagctagatttcaataagtttgagctttgaactcaaagctttggtcattaatggcataaattgatttagtgtgttgttcagtgaaatacttgttgaaatatgttgtttacaccgtaattaggtactctggaaggtttggttagatttggtggaggattgagaaagaaatgaaaattttggggtgaactggtgtaaaccagctagccggttttggcagggtagcccgaatgttccatttgctcaattctcgtccatttcaatgccttagttaggtgtttccttatttcttcagttagagtaatccctagagggtataacagaacctaaggttgcgggttcgtcgggtttctaggaggattattagggtttcaatcatgtgatttaccttgttttaatatgtgattagggcatctatccagcacgtgagtcttcattcaggtcagttagcacactttaatctggaaagaaggtaagaactgtgtataatatgtaatatgaatacttgagtgtatatatgtgctaagtgtatatgcatgcttatgtgtt

SEQ ID NO: 33608 - DNA, 1420 bp, Cannabis sativa
aatctaacaatctcaatagttaagggggcatttttcacgaccttaaaagttcagggggcataatttaatacatgtcaaaattctggggacaaaaatcctaattagcctattttaaaatataaagtgggtatctatatgaagtagttattttccaaataagacattagaaattcaagggtataagtaccactcatacaaaaaaattctaccaattattgattttctattgcctacacgaacgccaattggcattggccttagtttaaaattggtttagtgacacatactaaaccaatagtaccttattgatgcctattggttaacaccatttattagttctaaagttgttaattagaagcgaagtcaatgacctactaatactacttccatgcacctctatatatcatcaatcaatttctttgataagtttttatagtcgctttgtacataatttaaaagttaatttatatttttacttcttaaactttaacatatacaaaatcacgtcttttgaactttttaggtcgttaaaattttttcttgaactattaagattgttagatctaaaaacttttgttcaattttactagaaaaaaactaacgttgatgaaaatttaagtaacataattcgatacatgttaaagtttaaagacatgattttataaatatcaaagtttagggggcacaatatagtatatggacaatatcatattagggaaattgaataaaattaaaccaaagtgcttaaatttaacaatttcaataattttaggagaatttttaacgacttgaaaatttaaaaagcacgattaatacatgacaaagtttaataggcaaaaatcctaattaacttaattttaaaaaaaaaaaatgctcttttaaacactttgatgcctcttaatatcgtgttgaaattttgtgacaacatgtaaaaagtttaagatattgggtgagaaattttcgacaacttgtctaaattccaaatattattttgaaatatgacatagaatgatctatttccacctaacagagagattaattgacttggttataaaattataataataaaaagtaaaaaaaaaaggttttcgaagtaaatgaaactaaaagctctttttttttttgggattaaactaagacctacctttaagataatagaaacaggctgggcgaaatgagaaaaatttgaaccttttttttggcttactctactttccaacggcaactataacaataaataatctccaacttgcattaagtttttttttttttttttgactattggtcactttgtggacccattacccatactcaaagctgaaaaacataaatactcatctcctcttcttctgtgttgaattaatgttgaaatttggaaattaatgtttacaaagtcttttttcatatattttagaatatt

SEQ ID NO: 33609 - DNA, 4140 bp, Cannabis sativa
  modified_base (3488)..(3490): a, c, t, g, unknown or other
tattcttatcgtttttataactgttttataaccagttttaatattatatttttttgttaacaggttgagcctgctaatgttgcttttgttggtgctgattctggaactggttccgaagttccagttgatgcatctaagaaaccagaggtaaagaaatcccgtgctaagaagaagaaggtgagtatcttaactggttctgttattgtttttgtattttaactggttttttttcttttagaaatgtgtttttaaatatttattgtatgtaatttagtttttatactatttataactggttttttttctttaagaaatgtgtttataaatgtttattgtatgtaatttagtttttatattatttataactggttatttttctttaagaaatgagttttcaaatgtttatattatgaaatttagtttttatactcttttttaactggttcttttgttagtgtttttaacatgttttgtgtttcatttattgttttagtattataaccggtttctcaatttatgtttgagcttttaaagttttgtttttgtattttttttaaccggtttcctttttgtgtttcaaggttaaggttgattcgtcggatgatgattttgttgaacatattgaatctggaaccagttctaaagttccagttgagaaaaagatacagcccactgttagggaaactcgcagccggaagaaaaaggtgtttagatgtttataattttattttttgttactgtttgtgaatgttgtatatttatgttttttctttcctatttttttcaggctgcagtggctgattctgatgttccgaatccgccagtacgtcgtacaacacgtgctggcgttaaatgtgttgcttcgaagggccctagtccttcgatacttgaagagtctgttaaaaaatacacaagtttatcgaatgtggtaagtactttaagtttttcattttacatttatattttgtttttttatgtcattttatttttgtttatggaaccagttattttctttatcatgttcttgttgttgttgtcactggctaaatcttattttataactggttatttttacaggatgtttacttgaagatgaaaccagagcaccgttttgcaagtaagcttcagatttggaataacctgtgggttatcaaggagcttaatggaaatcttactccttctcaaaaggcgttattttttatgatgccttttttgcaatttctgaagatgagtaatattaagtggaacattgtcctgcctcaccttgctttagtgagggaggttcatcaagagaaggaggatttagagaagtggttcttaatccgggacagagttgtccgttttggtttggaggagtttgtcttgatcacggggttaagtccggaagggtcatctgacttgaacgagttcaaacaaaagatgttgttcaagaagaagatgtttcctgacttgactattaaagtcattcaagagcaagttagggcaaggtttttgtctgaagaattcgatgatgacgttgacactgtgaagatggcgattgtttttctgttgagtcattatttgtatgggtatgagaatggtaagagagtcgacaatgagttttttggttttgtcgatggcgatttgtcagagctaaggaatatcgcatttggtaaactgcagtgggataggactttccactacatgaatttggcctttaaggacagtgacaatatctattataagattgagaaagtcaaagaagaaaaggataagttctattcttttaaatttcaagggtttccatttgctttcctcatttggttgttcgagatactcccaagcctgtctcctaattactgcaagaggattgcaaatacatatcctcgaatgctaaattgggagagtacttacaagaaaaaaaaccgggagttattcagaacttgtttttgagggttttaacaatcctgaggtaccttttactttttataattggtttcctttttttaaaatagtctatttataattggtttttaatatgtttgatttctttcaaattttttcggccactgtgaaggatttttatcatgttgatcgtgaactcaagaaatctgccttgcaaagccgaaagttcgaactggtttatcttccgaagaaacctcgaggtttcgatgggaaggtatgccttttttatgcttttttttcatttttggttgtgtttttattttttatttttttatttagtttgttacttttttttcttatatgtttttttttattatttttgttatgtattattgcttgttttcagttttccaatttggagaaggctttggtctgtattcaagaggaccaaaagaaaattttgttgagtataaaaaatttaaaggatgagtttagtattaaatttgatgaagtcattgaattattgaagagcaagaaagggtcatttgtgcccaaagattttgaggagaaggttgacgattcttgttctgagaatctggatgttggtgggaatgacgatgagtttcccgatccgccgtcacctgaggtattttttcttttagtttgttttttttctgtatatataactggttatttcttattttctatggccttttatgtttcctattttttgtgttttataaccggttattttttggcatgttctgttttttttattctttatctgtttagaaaccggttatgaatatattttttgttccatctttgtaggttgtttcaaattccaaacttcctgaatatgatgatgatgaaggtgggctgcaattgtcacttgttcgggaagataaggttgtttgtttgtttctttattattatggatgcgtttattataactggtttttttttagattgcaagtttaattaattcgtcttttttttttcaggttccagctggcttaggtgaggggagggatgagggccgtttgttttcgtatgaaaccattaaagtcgaccaatccattttggatttggttgacagcctcactcgggcatgtgcctctccaattagtgcaaagaatgatcaatgggatttggtatcaattcctgagtctgcaaagaatgatcaatccatttttctgtttttaaccggttatttttttagcgagcttatatttttttttatttattaagttgttcgtgttgtatatattatatagaactttttttaatatagaacatgtatgttggttcatgtttaaatataatcggcttctttttctttgattttttttttttgttttggtgcatgttgaatataactactttttttgttgttttatttttttttttataaggcaattctatgttatgaaaattttcatttttattcaaaaccaattatgtttgaagatatagttcatgatcaacaaatattgaaatgatttttggaacatacaaaatctaatatagtattttttttttattgtaaatgtatctttgtattcaataaaactggttattgttgttgtgtctttgctttcttnnnccttggttgttttggttcttgttgctttggtggtagagctggattagtgtatgttttttttgttgtgccctgtctttttgcaacgtccacactttagttgtacttttggctctctttttgaacttattcttcttctcctaggtctccctgctctctttttcgtgtttggtggtaggactatcatttccaagctctcaggcagtgtcattcactttcatttggtaatgagttcgctgttgtgtcatatgttgctttcatttcgtcagttttgtagtagtccgcaacatagtcataacctcgcaatcctcgtttcgagaatacagctattgcatgagcacatggaatttcatcttgctgaaaccaattacattcacatgttttatccagtaaatttaccaggaatttcccattctctagcacattcacttggtggagtatggatgtgactgatgtaacctgttattttaaatagaaaaatttattttataaccgttattttatacagttgttcaatttttttaaattgtactgtttgtatatatcaatatatttagtggtttacctcatattttcttgcttgaataaagttgtctctgagtattttttctgtcactgttgaaactttggtgaatgttccatgtgcttcgttg

SEQ ID NO: 33610 - DNA, 1821 bp, Cannabis sativa
taattttttctatatattaaattaagcatataagttataaacttataacaccataatctatattcgttagattaaaataaaataaaaaatacattaattacaaatctgaaatactaaagtcaagtttcaaactatatataatatataacttcaaaaaaaatttatatataatatattatatattattatttttaatatattatctatgtaataaaaataaaatgattagattttaggagtttttttctcctcactcaactttgtttttatccaacatctatattttaactcttttcattataaatactattgtactattacatattttaaatcacactttcaagtatactttttttttttcactcactattacaaactgtattttcagtattatttttaaactaacacttatatttttaatgttagttcatagaaccgacacttatttcacaatgacaaaaagtcaaagtttaagtgtcggttatacaccgagatgaatgagttttgctgtcattttaaaactgacacttaaaatgtacacatatatttttttttcctttagtgtcggtttaaaaccgagactaattggtatcagtgttgatttttaaccgacactaaaaggagtatttttgataaaaaaataattattaagtataaacattagtaattccaaaaacactaaacctatcaaactcattaatatattttctagcattataacgactgtaaaatgaacgtttcccatttttaaaaacctgttaaaatacataaaaaaaatatacaattctcataagaatatattaatttcacagctcagctaatacaatacaaaaaaaataaaaaaaaaatacatacattaaactcaatatacaaacaaatcccagaaatatagttgctaaatacaaataattatcaaacaaaatcaataaaaattgaactaaaaattatactgaaatataaaaataaatctagaatctcgattttatggtacgcatggaccatggatgaccatggacgaccatcgtggagaaggggtgttgcacaaagaagaaggggtttgaggcttgggttttttggggttaggactcaatcgctggggagagagagatatatatggtctcagtttctggggttggggttggccttcgatgccgcacgagggggtgagggagagagctagggttggggtttcaacgtcgcacaagagggtgagggagagagttaggattttttagggttttcaaaatgagggggagaaactttctgtttataccttctttctttatttttttattcagatttttttaaatgtgtatgtaaacgtcggtttataaccgagaccaaatgatcttttagtctcgattatgaatcgacacctatactcaatctatatgtatatatttttaaaatttttttgatgtcgattatacttttagtatcagccgggttctactaaccgatacttaaagtcaaatataggtaccagttataaatcgagaccaaagagttagggtggtctttagtgtcagttaaaaaaagtgtcccttgaaccaataacaaaagtctactctgtagtagtaactctttctatattgaattcatgaattctcaaaacattccatacttcactatcttctcaaatttctagcaaccctcgaatcactcacaaaatgccccaataaaaccaaagttttcaaagtgctagctaccaacttcaccatactatatggggggcatgtctcatgtggtattttttagctttggttataagtcgccaaaatacactaactctataaaattttttatttttagtcacaacaa

SEQ ID NO: 33611 - DNA, 1512 bp, Cannabis sativa
tcatggagggatcatttggggccaatcatacaaccgggttttcaactacaaccccacgattttttctcacagatgtcaggagattactgctaaactttcaagaattcccctccaaatagtcacagagtggaaagacatggcttggatgaatagtatgcttcccagagcaagacaaaactctactcagacctcctcctcaaaggacatgagttagattcgaagaaaatgaccgagaatttgagatcaaaattcccagctcatatggggggtatggtacgcccaatttctgacaactgcaacttcttatgtccgtttgccaaggttactagctcaagtgtacacatgcaaccaaaagtaggaaacattttcaagtaagtcttccaaagggaaacacgcctgaattctttcctaaaaggctaaacttgagtatgaatctgggggtaagatgcatattcggccaaaattcttgaaaagaaacatccacccgaataccttcttacaagtctctgtggatttcctaaaagtttagtccatcgggttgcataattggcaaaaactttaggctaacaaggaccaaagtaagaaaaatgcctacaagtctaaggcagtcgtgggaatggctctaaggattgaacctcgtaaaataactaaagcgtgaagaagatgtgtgaaaaagcgaaggctccttttttgcgaaaggaaaccatctctgagctgactctaaacgagtggctttttccaagctagaggttaaatggcacgaaaaagcattacagctctaggaacaaaagggtaaaaccaagaaacgatccctagatcgattgagagatgattaagactagcacgaaaggttgaaacacagatcgttggaactagatgtttcaatgacacaaccagcccctaaaaagtctaccaaaataaatcttcagaaagggaatagcaaaaaaccctatttactattacaagcagcccccacggccagggaaaattaatattgtctttacaacttgaaaagtgtagcaaaaggaagatatataaaaaaagagaacaaacaaacaacaatttaagaaagggcctgttgaagttcaagactgggcaccaccagatgggttggaggactccgctccacacaatcgctccactgtctcctggtaaaggtcatgaacgaccctcataccccatatgaggcgagtctgttgagcatagttggcctccagtaactgattttccttcttcaggccttcaatctgaagcttggcctcagtgagctcagccaaaagggttttgttggcattgtacaagtcacggttgtccccttaacttgctctagctctgtcactagcgtgctggcctccttagcagttctctcagccagtaaggccagctgtcgaaataggctaaggtaaagaggctaaatgtcaaagcaaggggcataacataacaaaaaagaaagaaaagaggaagaaaatatcttggggccttaccccgaccccctgctgcttgccagagtgg

SEQ ID NO: 33612 - DNA, 2036 bp, Cannabis sativa
aacaagagtagactattttgggtaaatactattagctaaataatatcccatatcaactctcttcctttaatgatataatgagttggaggagcaataccttgagaaagattggaaaaaaatgagatgcctctaacacattgatatcattgttggaacttgacagtccgaaaaatgtataccatatccaaagatcatagtctgccacaaccttaagaataatagttggggatccactacgactcgcatattggcctgcccaagctgttggataatttttctatttctaattcatacaatctagactaccccacatttttggaaaaccacgttgttcaccaatacgaagtaaccttgcaatatcatcaacattaggtgatcttagatatttttttgcaaacacctcgacaacaacacaacaaaatctcttcaaaatttcaattgttgtggactcacttattttaatgtactcatcagtaaaatcagccagtacaccatgtgccatcattcgaaacacaactgttattttttgaagagtagacaatccaagaacaccagtagcatcaacaatacgaaaaaaaataaacttcaagacattcaaaatttttgccgaaacataaaatcattgtactatggggtatcaataaaataatctataaataaattgcgataaaaaatttccttatctcgatatataaatctaccacctggaattgatcctctacaaatgtattagttgttgtcttgatttagatgatgaacaaggtgaaaattattattagccctcatgtgaatgattactgtttcttctgcatgaatctcatcaatatcattaattattttctcctcatctaaggaagaattatcagatgaaaagtggagtgcaaaattaaaactcatgattgaagatagattcaaaagatgatgtatattttacgtgtggtgtttatattataaaaatatagtaaattaccatgattaattaaagatttgtcttattcttaactcattagtctaatattccaataattaataatttgtcttattcaatcatgtgaatatagcatagtcaataacatatcacaatttgttataactttatttatctagatatatttgttgcaatattatagcaagtgatcaggattatttttgttttgtatgtgatgacaaagtcattatgtgaacatgtaattaactctatctcagtgtcacttacatccccgtcgcatcatttttcttttacacatatttaattcaagctataatttatttcttttacgttctctcacaaaataataactactcattgtactcaaagaagttcttaatacacaaacaaagatgatatgtatctatgtcttatttatgttgatatttctgaaaattctataataaataaaaactaattcagtgaccaactttggtctcgggtcgcgaataatttcaataattccaaaccttcgtatgtcactcaagatagaaacaaaagatcattgcatgcttgaatgttattgatcaaagctatttccaaattcagaggatgcataagacaaattgaaggattaaatccaagtgttgcatctcaataggatatcgtaagtacttgtaacatttaaattattattaatgtttgttatttttattcatttttaatgttatattttatgatttttgtagttgaattgagccaagattctactagctcaagataaaaattacaagaaaggtttcaaatttaatcatgtttgggatatacttaaggatatggaaaaatttacagataacatcaatgctacaaaaaatattgacccagtggattccaagtctccccaaactgcatctcatggactttcatcgttttcagtagacaaattagatgataatgatgatgacggaggtaattcatctaaatgacccattggggtacaagaaagtaaaatcaaaaagaaaaaataatatataattttgtactattgtcgaaaccattaaagaagaaaatcaataactcattgaaatatttagttggagcaactcca

SEQ ID NO: 33613 - DNA, 1662 bp, Cannabis sativa
tgcggtttggactatcactaaatgattaaactatcacaaatacaataaagcttgagcaacactggtcaaaaataccataaggcttaaaaataaatacgaaaaaaaaattgcaaaaatacaataattagtgggctttggactgcacattcacatattggatctaaataaatataaaaattaaaattttaataatgtgcagtgcgatttgaaccacatatattaacaattcaaaactataaatcgcaccgcactgcgtggttaggaaaaatgcaagccgtgactgcaccgcaaagaatttcaaactgcgtttttttttacagtgcagtgcgagcgatttgatgaacgcccctacttaaaagtaaatagcgagtatataagtggcaagaaaaattaattatataaatatactggttcagtgagagttgagtcagcttagtacattttgagagatttccatacaaaatcgaattttattcatgtgtatttttttatagtgtatatttttagtttttttcagacattttttttgttgtacgtttgttgctttaggtagtttagatacatatatttagtttatttttgacatattttattaaaatacaataataagattttttttaattgacacaatgtgcaatagtagataattatatattgatatgttaattatgtattacccattatattatacagtaccccattttaaaattataagattttattacttttactattaatgtaattatttatttaacttttaaaaaataaattatcatttaactgtcactaactcaaaaagaaaaaaaaataaaaaaattgaaagtatgaagtttttaatagcaaattccatagaaaatgatgtagtaatacaaaaagataaattaagttgtcaaaactaagtattaagcaaaaatttcacatttaaaatattaaaaatgaatgcaaaatacaatttcacttatgtcaaatttatagcataagagtttattaattttaaattcgacccatctaagattataagaataatctcttaaatataatccttttgtttaaaggaaatacactttgattccaattacgatgatattaaataattgaagtaaacactttggggaaaattggagaaaaaatttagaattgtagctgaacttagtaattttggctaactgtgttgcctacataccttctttatgaagaatcaagccacttgtaccattttcagaaatttattgctatttgaacatttagaaaaagtcataggtgaataactttttatgaaattttgacaattgtattttataccattttgcgatattagcgattgcacttaatcttaacaactaagctgcttacgtattcttttataggaatgaagtcaaacgtagtttcgaatctttgtgaaaaattaattcactttgacatttgaggtgaaagactttttgggaatcttaaagtagacgacctcacattatctcattttgcattttgatcaaagacctcacttgggatttttgttattgaggagtgttagagaatcttagtctaggcttgtaattggtctattcaatgtaatacaattctttctctcctttctttctctctaaaactttacatggtatcagagcttcattctttcaataatggcaacctcgtctcttgaca

SEQ ID NO: 33614 - DNA, 1556 bp, Cannabis sativa
tttaaaaaaaaatattttttctaaaaaaaattatgttctataaaactgtttttaattttcaattttttaatcaaaaatctaaatttaaaaaaaaaaattactttaaaatttttttaaacagtttttttaatcatattttagacttcgactccatgagatcttagaaaccgaaactagactcggccccagacttggacccgcccccaatcctgacctccctggacccgactaaaataaaatcaacaaatgaaaataaaaataatatttacaaagcatatttttattttttgttttttaaaattgaaaaagaaaagtggttatagaacacatttttgtttttcaaaaataaaatttttaaaataaaaactttacttttatctttgtgattaaaaaatttaaaaacaaaagtgttactaaacgccacctaaataaatcaccccactttaattttatttctgacttcgctcctagcatctactattcttctccatttctcgaagtccatagatcaccacggccaaccatagatcggccacacaaccaaatcgaagtccataaattcaatcctaagcccaaaacaaaatccgctcacactcaaaactaaccaaaccaaacacatgccaataataataagattatttaggatttttcaccccgaactatatatgacctacatattattgtgccttctgaattttgtagcccatttaaaatagtccatgaactatttacagttgtaaattaattattctgtcaagttttattacatgtgatgaacaaaataatgacataactactacattagcgtcatatcacatgtgtaatttaacattaaaaaaataaaattattatttttataaaatcattaaatttaaaatcaactaataataaagaaatttacttaaaactaaattaaaaaaattaaaattattatttttttcaaattaattacataataattttatttgtcacgtgtgacaaaatttgatagactaattcacaatactgtaaatagttcagggaccatttttaacaagctgaaaatttcaggaacacaataatacataagtcataattctggaaatactcctaaatagcttaacaataataataataattacagatgcagaaaaataaattaagatccgtaactgaaagcaccgataagaacgatggcaaggttgaagcggctcaaccaaaccgatacccttcaaagaaagagccggtaaccgaagtcgaactcaatgccgaagtcaagatgaatgtggcgtctaagtcgaagttgaagttgaagtagcagaggtagaagtcgaagtcgaattgtagagttgtgaagaatttttttcttaaagagaaaattagggttaagaaaagaatgtaaaaatgatttgaaaaagctagttgaatattattaatgtaaaatgtcttataaaattgaaaatttaaaaagtaaagcgaacaagtgttaaaaatattgtaaactttcgtataattagtaatttctccttcattaattacaaatgttatacaaatctgttacaacctcttagtcaacc

SEQ ID NO: 33615 - DNA, 1549 bp, Cannabis sativa
  modified_base (59)..(62): a, c, t, g, unknown or other
ttttcaaacactaacaattattttgatcgaaatattaaaaatctcacatttctgatagnnnnacccctttgtgaaatgtggctcagacccacctcaaaatatttttcccatctaatcaaaatgatttcatactactaagacgggagtatgaagattgtttttttttgttaaatttggataaaatgacccctaattaataaaaattgaaaacattctacttttcagggtagattttaactagtttcatcttactcttacactcgttagtgttttcttaaaatctcaccctacacatctcgaaaaatagtgaaatttaacagtgatgatgccaagagcattgtgcatcaattttctattggaaacattgagaaaaaaagtagttttcaagcactaagaatcattttaatcgaaataattaaaatgtcacatttctggtagtggtacccctttgtgaaatgtggttcggacccatgtcaaaacattttccccctctagtcacaatgatttcatactattaagacatgaataagaagattatttttacgttaaattttttaaaacgaccccctaattaaaaacttgaaaacattctacttttcagggtaaatttgaacaagtttttccttaatcttacactcgttagtgttctctaaaaatctcacccaacacatctcgaaaatagtgaaatatcatagggacgaagccaagagcattgtgcatcacttttttttattaaaaacattgagagaaaaagtagttttcaagcactaagaattattttaatcgaagtagtgcaaatctcagatttttcatagtggcacccctttgtgaaatgtggctcggacccatctcgaaatatttttcccctcttgtcacaataatttcatactactaagacgtgaatatgaagattatttttgtgttaaattttattaaaattaccccctaattaaaaaattcaaaatgttctagttttcagagtaaattttgacaaattttaccttattcttacactcattagtgctttcttaaaatctcttcctacacatctctaaaaatcgtcaaatttcacagggatgaaaccaagagcattgtgaatcacttttctattggaaacattgagagaaaaagtagttttcaagcactaaaatcttctcaatcgaaatagtgaaaatctcacattttttatagtggcaccccttggtgaaatgtggcgtggacgcacctcaaaatatttttcccctctcgtcacaatgatttcatactactaagacgtgaatatgaagattgtttttgcgctaaatttggattaaatgaccccttaatttaaaaatttaaaaatgttttacttttcaaggtaaattttatcaagttttttcttactcttacactcgtcaatattttctaaaattctcaccctaaccatcggaaaaatagtgaaatttcacaaggatgaagccaagagcattgtgcatcacttttctataggaaataatgagagaaaaagtatttttcaagcactaagaattattttaatcaaaatagtgaa

SEQ ID NO: 33616 - DNA, 4510 bp, Cannabis sativa
  modified_base (27)..(31): a, c, t, g, unknown or other
  modified_base (2135)..(2140): a, c, t, g, unknown or other
  modified_base (3338)..(3339): a, c, t, g, unknown or other
aaaatagattacattgaaatggagttnnnnntagggcataaaacccaacaaccgctacttgaatctgagcgccactagaacttggtcataagccgctctaactccttgcaagtgtctgccagcaagaggaaaacattcatagcataactcggcaagacttgagcaatagatttcaacaatacctcctttcccgcacgagataagacacgcccttcccacccttgaattctcttcccaagcttatccttaagaaaaccaatgatagcattcttatttctcccaaccgaacacggcagacccaggtaatagccatttttatcggcctcctaaatttccaacatagcacaaatggaatcccgcacctcaataccaggattattactaaaaattacagaagacttagaaaaattaattctttgtcccgaagcacctcgtaagtatgcagcaactccttcacattgtacgcttcttcctcaatgaccttacaataaatgtagttgtcatcagcaaagagcatatgagagattaccagcgtacctcgagcaattttacaccccgtgagtaagccactttgttcataactccgcaacaaactagagaaacctccagcacaaagaataaacagatatggtgataaaggatccccttggcgcaaccctctttgagcatcaatgggccccagcaccttcccaccatgtgaaatggtataggaaacagaatatacacattgcataactaaattaatctagtgaccatcaaagcccatccttaccatcatagcccggagataaccccactcaagcttgtcataggctttgctaacatctagtttgagtgccataaaaccatccctccctctttgtttcctctttaagtgatgcataatctcgtaagaaatcatgatgttgtccgagatcaaccggccttgcaaaaatgcactttgagtatcagatatgatagacaacataacactcttaagtctattagcaaccacttttgacacaatcttgtacagcacattacataacacaatgggtcttaaatctcccatatccataggctgcttctttttaggaattaagaccaaaatggttttgttaaggtctgtaggaaggaaaccattatgaaaaaaactgcttaacgatattgataacatcatccttaacaatcagccagcacttatagaaaaaactcggggtcattccatctggccctggggatttatccggatgcatttggaacaaagctttccgaacttcttcatctaaaactagtaatagcagctcaacattttgctgggatgatacacgagtttgcacgctacttgtgacttctctccaatcggtttgggaagagaaaaaaagctggtggaaataagaaaccataagatcgtccaaagcactctcccagtcaacccatgcacctgaatgatctttaagttttgcaacaaaattattccttcgcctcgtagttgcagaagcatgaaaatacttgctattattatctccctcttgcaaccacaattgcttcgatctttgttgcctaaaaacttcccgttatacatagccaagtgcttctttgctcgtttgtaattggctacagacacctcattccgacccaatttccactttttcacttcgtttttacactttttcaaccgttctctaaagttgccagtaacccccttaccccaatccgccagcttttccccacaaaacttaaatttatgcataacatcatcagactcacaaatctcccagctatctgttacaatctcataacaaagaggttccctcaaccacgcattttcaaaccgaaactgcttaacataattgtgacccgcagcaggaaccatgaccataagaatcggagcatggtctgaagttgaaatttcaagattatggagcttagcagaagtgaacatgttcaaccaagcaaaattagcaagccccctatccaaccgcacttctatccaatgattagtaccccgcccacgctcccaagtaaacgataaccacataactccatgtcttgaagtccactatcaaccaaagactgttgaaaaccttggatcaaaaagttaggatacctattaccgccccttttgtcgtcatgagataaaacattgttaagannnnnnatcacacaccatggtagattagaccgattagccagagtacgtaacaaattccaagtagaagcacgcctactcctatttggttccccatacacaccagtgaaacgccattcctacacaccttaagaagcaactctcacatctatgtaagcatcaaaaaacccaagcaaagacacttcttcctcatttttctataataacgcaatacctccactccgaccattaacatctacgactatcataccatcaaaacctaacatcacacgcactctctccatatgagaacgattggataaagtctcatagagaaacacaatactgggcttcttttggatcataagatccttaaagaattgtaaagtccatgggttcccaagcccatggcaattccaagataaaatattcataatgattggtgggcctggacaccagtacccaccaaactcaagttctttgaaccatttacctcttgacccgttgccccatcccccgtcacatgggccccatcaatatcttctaaagttgttcttctcctcttcgtatcaagaaccaaaagacaagcctcctcattgatatcattagatagttctttattcttagcagctggtaaaatatcttccacaattataggatccccattaacagcctttgatgatcctatcactgcctcacattgacccaaagttacgtccactatcatcggactcgaccccagcacaccatgattcccctcaaccattgccacgttgacagaacctcaccacgagccgtggtttttgctgcaaaatcatcgtccatgacaacattaaactgcttgagccatttagctctgatcatgtggtttctacgtataggtctcactcgcagccattccccatatggcttgattatatgaccctctccaacctcgaaacgccgtggacaaaagcttttaaaatgctccataattccacaaataaagcagaaagtggggagatgttcatacttaaagttagtccagaactcgatcccgacagtattgcgaagcttcatacatctctttaattgcttcgtaacattacgaagataatcccgccataagcccatgaaattcctttcatccgattgaacaaacttctcaatatagtttgcgacatccttaacaatcgtagcagttttaaacctcgatctaagatcatgcaattgcacccacatatcaacnncattcaaggtaaccaatcttggatcctccccccgttgtaaccttttgaagattaacaagaacctattaatagtccaagggcttcgattcatcatactttggatgtcaatctcatgataaaattaaaagagatagtgattagtatccaactccttgacaaacatccccttccccagctgccacaatgtagccatcatatgttgcatagcttcaaaatcaatttatctttcagtcaagaaccttccaacgatataccacctgtcatcatagtcattaccatccgtaccactagcatcataaggcaagataacctcctcctcctcctcaataggaatatgcacccctgtaccatcttccataatcgtacgacaacaagcaaaatctcgaaagtagaaaaagaaaacaagaaccaacaagaatcgaaccagaaaaagctaaagggaaggactaaagaaccatgtcaaaagacaagactaatgggaaaaactaaattagtttcaacacataaacacgatgacagcattaaaattgattaaggaatgtactccttataattctaaccccataaaaacactgattggaattaaactactaatagtaaattaataaatgaaacaaaaaactaaaaaagaggaggactcaaaaattaagtttctggctcgtaataaaaactgcaatccatgtatgtttttcttatcaagagtgattgaatcaaatagccaccatagagatcatgtggtatgggtagtacgttcaagtacgactgaaccgaaccgaaccactctcaaacgactgaaccgaaaattgaaactgacacagggcattagcagcgggaccccgccgttaatgcggtttaaaaataaaaaaaaaaattaataatattagtaattatataaataatattatataatgtataaataattatttatagatatataaataataatttaaatataattaatcaaattgcaaatattataatttcactccaataatatttatgaataatttgaaaatgtctcaattaaactactttaacgttaattctattacaatgtctcgaaattaaactaaattattaaaaaaacataaataaattatttcataaaatcttcattaaggtcacgggttataaagtcttgatccgcattattatcattacgagttcccga

SEQ ID NO: 33617 - DNA, 3362 bp, Cannabis sativa
cccaatatccttatggaatttacaatatttgttaggatctcttttgctcctcaaattcctcatggccccgggcttaccaaaggccacctttcgctcatgtgcaaggtaaatattctcccgagtttcattaagctctatataaatagtatacattggcacgtatttgtcatgcttcttttgtttctttttatccttcgacggttccttaactccgtcctttctcttcaaaccagaagcccccaagttattaattctcgtggaaactgttcctgttgaaacattgctgggtttgcctcccgagcttgttttcaacagattcatttcctttcaggcttcttccttccgaacaaacacctgagccctttcgttgaacttagtgatgcttctcactagacgtccttgttagtcatcccacaactcgccccctgcggtcaatggatcagtagagatccccgcctgaagggctgtaagttgcgtgctatcatccaaattcctaaccctagtcacagccgtgctaaaatgacttaagtatgccttaattgtttggtcgggctactgctttatattggttagcgaggctgcttcgggtcgcctatccctagcagcctgaaattgtttcttgaaatccctggatagctgctcccaagaagttattgaatgatgagtaaacaggttaaactagctactcgctgctccgacaagcgaggtggggaacaaaatacagcgaaaattgttcatcacattactcgctcgcattattctgttaaacttaatcaaataagagatcggatcagtggttccgtcataggacgagacatgggggtttttgaatcctgaaggaaaaggggtattcttaatatctgggtgatacggctcaatctcctccttagaggcgtatccagataatttccctaattcccccatttgatatctcttgaacttgtcctccatctcatttatctgtaattggattagatcctcttgctttggaccaagctgttggcgaaggtcaagtttcttccgattcaagtgctctcgcagatccggttgggagtaattgctggcagaacttatcttactcacagatcatgtcctactcatagactttgtctttgagtggctcgtagatttacttgttcccatactttcttgatcattagctcattgagtactttctcctcttcgagttgatctactttgggttcttgattgcctcaaagtcacacttgcttcttcaggctctttgcgttcctcccgagagtggttttgtcgtatttcccccatcaaggtctttacaagtcctcgctttatgggtttgggaagaacattggtgatttctagcaggtgatctccgttctctcggttgagtctcaagatcctcctctttttcatgagggatttctcgttcattagttttcagttgtctcccatctggctgttcgttctaattttcatggggtatctcattttccctcgattgttcttcccgggccttttcctgtcccttagttcgtgatccacgaggtctgcctcctggtcttctcactccaggttcaggttgattttgagcattcgtcccctgtgcagctggccgagcctacatcacgctctaactcagagtttcgacattgcgcctattctagacggcgtcttaggcggcacttttccgtttcataagttccttctcccacagattgggcacctccacaattgagctcttcatccctgggcctgaggttgtgaccattcccacgctgagttctcctttagcatgttttccatgtactaggaccaacgtcgggtcgagttctctaggaacgtgtggttcgtgcactgggaccaccctcaggttgagccctcctagaacgggttgtccttctggactgcgggttggtagatcttctagagcccatgggctctttcccagaacgatgattggttaccttatgtggggtgttaacattttctggatttttcagccatgaaggaggtggtttttcttcaaaagaagggagggttttttcttagctttttcccagaggctctcaatgaaagcaccaaactgttaacacagattttcattaactaaatttgagcctcacaatattgatttcacacaaaaacataaaagctatataaatgaaaatatgaacacagtgttttttacgtggttctgcagttaaaattctgcatagtccacgagtcaatcttattcatatttctgattattattcagggcctgtcttgtatgattttttttcgtcccttttttcttcttgtcggccactatttataattacatagtggatggtaaattacaatgttgactggagtatgtttgcaacaatcatccttaaaatcgttggatttgattacatatcacgtagtgtaaatgtggtttatgatttgaaagtcatatagctgtgattttcccacttttactgggtcaaaacaatcatgtattaaacacatctttaattgttctatttggagatgtcttgacagaaacttggttacagtgatgccaatagcgagatggggccattcttcattctgaggtcgacaatgtatatttggtgtcgattgcggttcttatttacaaagaattcttttgactcgccagggttgtaagccttgttactgttagctagatgaagctatatgaagtcttcctatagcgagagggtcacctcgcttacttgttcttgagccaatccgacttttacacttagtttgttcattgtacgctaaggacttttacgattggtacgtgtcgctttctttggtcccttgctatttccatttagcaacatatggtttctctctaatacactaagtgccagtttgtacattgattcctcacttaagaccttacagtcaacgggttacaaatatactctgatacttacgtaattaatgagttattccataagaagaaattgcattaattcacattcccttttatcctgacacgtgttcttcattgagatggtgatgagaacactaaggcaaagataccagtaaagttccagttggccaggtgacgagggcgcgaaccaagaaattcaaagaagaactcaacaacttagtcaacagaattttaaaacaagaggagaccatggtcaacactgaaggagagcaacaatttgtgtttcttatcaaagtagactcaatttagtcccaaattaagctggtcacattttccaaggcaattggtagctttcctttttaattttgtttcctttattttgtctttgttttattttgaaagttgtctttcttttagtttcttttttcttggttggctatataaagccttgtaaacactttgaaaaatcagaatattttggaataaaattttg

SEQ ID NO: 33618 - DNA, 7142 bp, Cannabis sativa
tttagcaatttttttttctatatatactagcaaacatttacttaaaaatatatcttttattttgttgcgaagagtgtaatttttactatattcatagcgaaaaaagattgatctgcagtagctgtagaaactgaaagtgtagaataagagttactactgtatacacaaattatttttttttttacttttttaatttttactaactactgacataaataaatcagaaatggttgctaaaagaataaaatcaagaagttttccacttttttttaaacaatttttttgaaaaatattgtgaagtggtaatggtctaactagcaaataaaccaaataaatatttttaaagaatataaataaacactttaaaacaaaaatgacacttattattctttttataaaggaaaataataatttatatgattttgttagtattacttagacaaaatacattttattttcttcaaattttactttgactttttttaaaagagtcactatataataattattaaaaaagttcaattacaatatactaaattttaggacttagaattatatatacataattacatatatgctaggggtcaattacaatatactaaagtttaagacttagaattacatatacataattacatatatgctaggagggccatgaccactataaacaaccatgtacctccgccctggtgtccacaaagtattcatatgccttttacaatgatcttagcaatataattgcttgatgctcgtcgtctaccttcacccctatattgtttagatgaagaacaattttattgaattcatccaggtgcttcataagctcttttgaatcctccatgctcatcgtatagagcttcttctttaggaaaagtttattgatcaccagagatttcttcatgtaaatggctgcaagctttgtccagagaccctatgcagtaccttcatctgatacttcctaaaggacttcatcaccaagactcaacatgattgcactgagcctttgattccacttctagaattttcttcttatcatctccaagctctttgagagaagtagcatcaagtgctaaaataccttgatgaactaggagagccttcatcttaatcctccatagaccgagatcattttatcccgtgaacttgttagcttcaaatatgcttgatgtcactaatgtcgagttcttgaaacttcaaacatggttcttgaatctttgatctaactatgaatctctaataccacttgttgtgaataatcacgtgatcaagaatttaatgttccgataaagaatcagaatcaattgaataatgacaatcaataaaccagaaatataactaacaataatagattatactagaatttttataatagtataaaatagaagacaaaggatttaacgaggttcaatcacaagccgttatactttggacctaatcccttagagaaactaccttgagaccaatttttattcaaagagaatttaactcaaattacagggatgatcactaatgatcaaagtcaaaaatagtgttttgcacttacaaaaaactctcttgagagtgttgtgatcaaacacacacaaaccttgtatccctcctatctcattattttcttttcaaaattttctttctagatcgtcacctaaatagagaacacatgatcttatttatagtttcttacttaggctccgaaaagatgggaaaactgagctaactaactaacttactaattattaaaacacttaagttagttaacaactaactaaaagactaaaatctctaatattttttataaaataggggaccaaaaattatacaacaatatactatataattggtaaaaataattaaattaaatatatatcttttaattattataaataattgatgcgagattttattgtattacatataatttatcattccgctaattttattgagataagaaatattttttaaaattatataatttattatattattcataagaaaaatttgaaagtataaaacttcaaatttcattcataattaaacaaaaatattaaaaaattataatatatattttaaaaattaattaaatcgcgcaaaagctcaccttattccctagtataatataagtattaataattagtattttttttttttttgaagaaatttattaactttattaattgcaaccatttaagattacacgaaacaactcagaagaaatctcattgcttttaaaaatacaatcagtaattagtattgattagtacatagaagcatatatatatttgagtatatatatatatatatagtaattctaaaacattaccaatattccttcaaaaaaacattaccaatataataacttaacacctctaaaatattagttaaagttaatttatttagggaatattactatgttaattaattattggagagaaaagaaataattatataactgatgaaaaaaaaagtagaaagtataataaaacaacggattaaattggaatggtctaagaaagataagatatgggatataagacaaaaccattaattatccactgataataaagtaaagtagaattggagatggaagatacacatttttcttttctctttcctttttaataacagaaagatacacaattttataattgtacattgtaataattacagcctccaaagtctaaagtgggtcactacagtggcacctcagcctgttgttaaaatggcaatatcctagaaagtcttacttccactcctcgtctccattcccattccctagatagaccgacctttctattggcaataatcctattccattccgcaatgtcagcttccaccacccattcttggactctcacttcctctttttctttcctctgttttctcacccttctctccggaatcaaatcagacgacctccaaattcttcttagattcaaatccgcattccaaaagtccaattcccagttattcaactcatgggattcccacaacactttatgcactttcgctggaattatctgcaacaacaaaagttttgtcactggaatcgaattatcgaatcagaacttatctgggattcttccattggattcgatatgccagctcaaatcacttgaaaagctctctctggggttcaattccttgtacggtaatgtaatggaggacttgaggaactgcacgagactgaagtacttggatttgggtaacaacgttttcaccggacccgtccctgatttgagcccattgaccgatttacagtacctgtatttgaataagagtggattctctggtacttttccgtggaaatcgcttggaaaattgaacggtctggtccaccttagtcttggggataattcattcgaaccaactgctgagtttcccaacgagctgttgagcctcaccaatttgaaacttctttacctctcgaattgcagcctcggaggggaaatacccgctggaattggaaatcttgtggagcttcaaaacttggagctttcagataataatatgaccggcgagctaccgaaggaaattggaaaactcaccaagctatggcagcttgaactttacaataataggttcaccggaaaactccctattgggatgagaaacctcacgaaccttgagaacttcgacgcttcgacgaactatcttgaaggagatttgtcggaattgaagttcttgaagaaccttgtatctctgcagttatttgagaacagtttctcaggtgttattccagctgagtttggagagtttagacgactggtgaacttgtctttgtacactaataatctcacggggcctctccctctgaaactgggttcctgggcagagttcgatttcatagatgtttcggagaatttcctgaccggtccgataccaccggacatgtgtaaacgaggtacaatgaagaagcttcttatgcttcagaataatttgacaggtgaaatcccagaaagctatgcgaattgtccgaccttacttcgtttcagagtcagcaaaaattccctcaccggcaaagttcccgccggaatctggggattgccagcagtcaatataatcgatatcgagttcaaccaactggaaggtccgattgcctctgatataaaaacagcaaagagtcttactcaactattcgctgggaataatcggcttaacggggaacttccggtagaaatttcggaagctacctcgttggtttcggttcagctaaacgacaatcatttcttcggcaagattccggctactttcggtgaattaaaacatgttggcaatcttcattttcagaataatatgttctctggatcaataccagagtcactaggctcatgtttgtctctaaacgatctaaacatggcaaacaactctctttccggccaaatcccttcctctttaggaactctacaaagtttaaatgctctaaatttgtcgcacaatcaactttccggccgaattccgataactctggcttctgtgagattgagccttcttgatttatcgcacaactggctcgccggtcgagtaccagcgtctctgtcaattgcggcctataatggaagctttgccggtaacccaggcctttgcagttcggaaatcaactctttccggcgatgccctcctaattcaggcatgtccaaggatgtacgtacactcataatttgcttcgcagtagggtcagctatccttctgctggctttagtttggcacaactatttaagaaagagtgagaaagatgattaccaagatcggtctttaaaagaagaatcttgggatttaaagtcattccatgttttaacattcacggaggaagagattcttgattccatcaaggaagagaatctcattggaaaaggagggtcgggaaaggtttaccgagttcctatttctaatggcaaagagctggccgtgaagcacatttggaacaacctcgactcacaatttggccggcgaaaggaccggagtagtacgacaccgatgctgaggaaaagcagcggcaagtcgaaggaattcgatgctgaggttcagaccctcagctcaattaggcatgttaacgtggtaaaattgtattgcagcataacaagtgaagactcaagcttgcttgtttatgagtatttacctaatggcagcttatgggaccggctccactgctgccgaaagaacaaactagattggaattcgcgccatgagattgctgtcggagctgccaaaggccttgagtatctccaccacggctgcggccggccattaattcaccgggatgtcaagtccagcaacatcttgttggatgagtttttgaagcctagaattgctgattttggtctcgccaagaatgtggttcatgctagtaaagaaggccaaagctctactcatgtcattgctggaactcatggctacattgctcctggttagtcttgtatatattggaaacaacaattagttatcatgcatttagtgaattaagtttgtttttttttttttatataattaatattttcctttaatattgcagagtacggatacacctacaaagtgaatgagaagagtgatgtttatagttttggtgtggtgttaatggagctagtgactgggaagaggccaatagaaccagagtttggagagaacacagacatagtgagctgggtttacaacaaccttaacaacagagagagcgtattgaatttagttgactcagatattccagaggttcttagagaagatgctattaaggtattgaaaattgcagttctaagcacagctagactccctgagcagaggcccaccatgaggagtgttgtccaaatgcttgaggaggctgagccttgtaaattggtgggaattattgtcaccaaagatggtgccactgaaaccatggagggtctagatgacaggtttcataaaataattacttagtgtttattatgtaacaccgccgcgtagcatatctataaattgagataacttgtacaatatataatgtgttcgaatttttatattaggggttgttcataaaaaataaaaaaataaataaataaactgtattagggggcaatgtagtggtcggcggcatattaataatttttgtaccagttttggtgatgaaattgccttatagttagctttggactgtagttgttgtgggaatgaagatttccttttaatttttttggcaacgatttaagtattttaacgaatgttttatttttgttttacttggggaatgttcagtagtaacgcaaaatcatacataaaagataaactacaaatggtaacttagataaaaaaaaaaaaatacttaatgtgactaagaatttagcatgttcctctcactgtactcatataatattaatatactacattttatatgttaattaacttatggctataactaatatgataatttgacaagtccaaaaaaatttatttcatttgatcatgtgctgatgggtgttttattaatttattactttggtttctagacagcagctgagactgtgagttgtgcagttcaactcagctatcttcgagaaggattcgtttgtcttatattaatagttaagtacgcactagctgaatatacaagtcactattttgaatttgaaataatatttaggaaaaaaaaaataagaaaaagaaatagctggcaaaaaaggggaatcacacaataaacaatagttatcggcaatggggtatcggtttccttgcgcaatgagaagatatgcatcacttctttccatttcgtatcgcaattggatcattcaagagataccaaaacgtgttggttatgcttatatacatgcatcttcttagtgaaacaggatctcccacccagattgtattttcaagagcattgttattagtggtgtttggtttgatgtaatataatagtaatagtaatagtaatagtaatgtaatggaataagaatggtaataggaattgattataatgtttggtttgtagttagaatgaacactgtaatcaaaattattatgtttggtttggcatgagaatataatgaaataaaatgtgtattgactaaaataaccctattactttttattataaaagggaaatttcactatttgcccttaataatatacctcatatcaaaatttatacctttccttaatttgtacaaatttagtcc

SEQ ID NO: 33619 - DNA, 2050 bp, Cannabis sativa
gagagggaaggaccttatatcgtcacaaaagtgttagaactaggataaatagtttggaccaatctatgactgccacttgaatctggtgccagtaccaaggtactggaatagggaccatctaagacgatatcctcaatgaactgttctctagacaattcgcttcacagtgagattcactttaccatgtgcaagtgaatcaatttcctctctaactaaaaaggtgcaacaaagtcatcgataggtcaataggtccatcgttaagttatggcccctacattgctagtgagatagagcatcagtatagtggggatcagcttagcttctttgataaaaaatgcaaatttgcgaatgctatttcttttcatgcaatctagctacaatgatgatgtaattgaatttaatatctaatgaacaaaatcattgagtaaagtttgttggtacttcattgttattaatcaattgcaactcacaggccagacgacactctcaaccgctaaacaaagcttgtagagttgttcttgaggtaccttcagttatttctttagtgagtaaacactgccaacccatgaatctctggatgagtggacaagtgctcacacatgtaacaactccctaagatccatgatcaagaaagcccaataggatttggtagggcaagttaccaataaaggcatttttacaatcactctgggggcaaataagacatagtatacgagagccatgcacattatatgagtattcagaaaaaatcatggtacacgagagccatgtatgtcacatataccttggaatataggatctaggtgttaccctagtataagggagccaggagttgcaaaggcattcaaaaaaatttgcacaccagagttagtatttctatggtttaatataaggatcgagtttgtaaatctaaagttctagtgaaagtgttcctcttgggatcacaaaaatagaaaagaaaagaaaagcatcattaattatagaaaactctgtagaagcaggacgctacatccagaagagactttctaattgattgaagaaaaccctctgggactgggacgctaccccaattgtgttattcatttagttgttaaactccttctaagtatgggatgttgtacttagaaagggtctagtgcaatatttattctatttttcctctcttcgagttttttctttagaaaggtgctatgagttgaactcatcaagcaaaggttcttcaacaacctgtgatttttctcttatgtaaaagatttggcgggtttttccacactactctttgacaatgattcatctcacttatgatgataaactgaagttatgtttgagcactaatcacactagcaataacccactacacctcaagtggtctatcttgctgacagttgatagcttcaacatacaaacttcaaagtttttcaccttaataactaagagattaatgctatgggcaagagcagacaagctcagacagtgtcaatagaatttcaaacataatggtgataaagttgatggttaacgatagagcatcaccaaatattctaattaaaacaaaccctacaaagagtgggtcactccttaaaagatctaaagccttccaagtagctcgtgtatggttttaggtgagctgacatcactccctatggtaaaatcagtttaccactcacaatcaaaatagccccgtggaaaatatcactatgactaccttcatagtatatgacaccaagtctccatggaaggtcaacaccctacgacctccaagccatctcacctatctaccacctgtcagtcaagttctcgacaccagctagtatctactgtctcctttgcatccaaagagtagcatgaaaatgttacaacacatcattgacattcgccacaaagacctcctctgctgtggtaacagcttaggggatgaggaagacctcctctgctgtgctaagaactgaggggatggagaagatctcccctactgtgctaatagcttaggggatgtaaaagacctcctccactgtcaaggcattttaggagacaatgaaggcctcttccg

SEQ ID NO: 33620 - DNA, 1693 bp, Cannabis sativa
ttaatcttatgtagaacctagaaatgacattatacatcaagcaataatgcaataaaagattaaacataaaattaagcatcaatattttttttactaaatcgtaacacatagaaagagcatgactaatcttatatatttttagcaaaaaaaatgacaaagagatagagatggagatggtggtgatagtgaaggaaatgaacattaatattacttttattaatttttagatacatagggaggacatgactaacatttaacaaaaagtaaataaaaatgaacataaaagataaaaatgtgcaacactaccattactataagcactaaataaaaatatatagaaagagcatgactaagtctatatatatttagtatataatattatatatagtaaatagatgaaagaagaacataaaaataaaagtggaataaaaacttgcattactcaaatgtgaatcaaagatacaaaataacctcactttgcacatacagaatcatccctaaccttccaaagaagattaggctattatgctaatcattctcataaaatttttgcacggctggagaggagaagcgccaagggggcactacttggattacgtggacgaatcgggaggggccatgtggcgctgatgtggactcctgctagactgaaggcaaattgggccttaagctcttttaggctgcctcttttttttcttttcttcttttctttttggactgcctcttttttttttcttttcttcttttctttttggactgcctcttttttcctaaattcttctttcaattttgctactttcatatctccttttcttttcttcaacaacaatactttaattcatacaaaataaaaataaattaaattcaaataaaatattttcaatataaaaatatatttcattaattttgtgaaaatattaatttaaacttaatttattttaaactttaagatcaagaaatgtgtatttttcaccaataaatcacacggtacaggactagaatctgttaaggccgcatcatctcgcgagtttggttcaagtgaggtcaactgtccgagtcattaataaacaactcatccatcccttaaggattggatccacgtgtcaattttataggagactgatctcgagtttctaagcgaaaaattcgcactataacaaccacctagatgtgtcagtggcagagctaaccacatattctagtgggggcaattttttattttttttttagtaaaagagtcttaatgaaaaaaataaatcttatagggacaaaaatagtaaaagaaaaatatgaagataaaattaaaaaaaatatataaattttataggtagaaaaattgaaatgtataaatatataaataaaatacactaattttgtgggtataaaatataatattaaaaatttacacaattaatttgtaaaaaaattgaggagtctatctataagtgttatatcactattattataattaagtattattgaatataattgaattaaataactattattgaatatcgttaattatttacaagactctatatctagctcatcatagacactaatggcatctcatatcaatactcttcatgttatccctcttgattgagacttttaacctatcaagaatgtgggttaaaatagtcccaagtgattttttatttttaattaggtttaaaatatatattcattatat

SEQ ID NO: 33621 - DNA, 3684 bp, Cannabis sativa
agggtccaatctgtaacttttgcaaaacacatatttacccttaaattttacattaaaattttacaattgtgcattggagtacaaaactaaaatttagtataaatttaccacaaaattactttttgtgctaaatatagcataatttttacctcccccattaaaaatggtctaatgtgatcaaattatttgaaatagggatttggtgagtggttactggtgaacacaattaaaatagcttctaatttttgtcactgttcattttttgagccaatttttgtcactttttttatttttcccgatgattgattattaataccaatcaatttattttttatttttatttgattaataaaaattatagaaaaaataaataaataaagcaagacaataattaattatttttaaaaaataataataaagacaaaagttattatgatacctagctatttatcatttattttacttcctaatgtaattactcaatttctcttcttcttattcaatttacaagttttttttttttttttgaaaaagtattcaatttacaagttgaattgaatagtttatacccaattgatgtgaaactccttatattcttatggtgaagtttaatcacaaagaaagcattaagcaaagtaacttataaaatcatacaaataatctagatactttcgtcctaaatcaatttgtatcataaaaatcaaagcatattcaaattcgatcaccttctaaaattttgattcgaatttatagataacaattatagatggccagtaaataattacaaaattaaaataaattttatggaattaaattaaaagaagaagaaaaaattaaacaataaaattaatccataaaataaatttaagttgtcaagaaacatagagtttcacctcaaaactaattggtgatgagtgaagtagttcatattcttatgtatggctcaatacttttacatttaatccacgtgggacaatgttttccaatacaagtgggtcacataataatctttaaaagaaattagacactagaaatcattttaaaataataaaaatttaattaaaaacattaaagatagagatggagaagatagaacattgtttggagtcctctaatagtgttttcagcaagccttccttttatgctaagaattttctaatttttaaatggtattagatctaagctctcagtccctttaaattcacaattaagaaagttttctaaaatcctccaatgcccaaaattggtccccaagttcaaatgataaaggaaacctagctccaactcgttttatagacaaaattttggaaagttttccaattttttttgcaagagccacgactctcttgttttctgattttctgttgcgacaaccaatagtattttggccataactttttcgatgtagcttggaattggacgatacaagatgttttggaaagatgaaagagagatctagaactttgattcagaaagtttttcctgaaagtgaatagatcatagtcaaaaattatcttgaagctttagactttattttcagtcacaaacaaagtgtgtttaacatccaaaatttagaatttttcaatttatttttaaaaagtggtcactcttgactctagaacatgaattttagagctaaaaatgcaaactttgaccaaattgagccaacaagaaatccaactaagtattattagagttttatttttctcttataattttctatttttgtctcaaaaaggcttgaagaataccaaattatcaaaaataaaaatctccaaacatatctcttgaaaaaacgaacaaagacaaaaatcaagcataaattcgaacaataaagtaataaaaatactaaaacacacactaaaataaacgctaaaattacataaaaataaacttaagaatattaaatagcactattcatagcaaaaacaaatttccacattgttaaacataacatattttactcagctataaacttcataactaaatctcaagattattaattggaaagttgcaatttaatttttaacaataataacagtacatacattaaataagtttactacaatatatataattcattaattatgtttagatatattatattattgataacataatatcatcaatgtcatattgatatggtggaaaattctgatactacttcagtagaaaatatttcttgagctgttggagtaaataaagaaggtttttgtggtaaatgcaaggcttccaaatttccttccaacatctcaatcactttattcatggatggcctatctaatggcattgtttggatacaccacaaacctactatcatcatctttcttacaatttcattttctaattaagcttgtagttgcaccccacaatgctaagttactttcttcttcgagatgtttataaatccaatcaggaaaataaatttcactagattgactaataacattatttttgacattattgttctttcctccaaccatctcaataatcatcatcccataactataaacatctgatttagaagaaactcctccaaagtttctactaaaaacttctcgaactatgtatccaataatgatataatactttctttcttattcaagcaaagttttgccaatccgaaatcagaaatcttgggacacaaatcatcatccaaaagtatgttatgtgattttatgtcgaaatgcaaaattcttgtgttgcaaccacgatgtaaatactccaaccctggagctatgccaatagaaatttgaaggagtttttcccattctaatggtagatggttattgtcattattattatgtataaacttttctagtgatccattagacatgaattcataaatcagagctttatttccactgtctaagcaaaaccccaaaggagatacaatattaacatgagaagttctactaatacttgcaacctcattaataaattcttctccatttgctttgatgcatttggatgaatactcctaattttcataaatatactttaagttaattatgtctaaattatatatatatatatataaatatttaatgttgttacctatttgatttctaattgagcatattttttattaatcactttaatttattttatttttattgttattttggtttaatttttatatttttttagtttatgtattttaattttttttttatattttttgcaaagaacttgtaaatatttttttatatgttcaattagtggtttttgtacggtgttattgtgttatttataaattttaattgtgttaatgcaatatgttaatatttaataaatttgttttaaagtttgattgttgttaaattgtttttgtgttgttaattagttgttttgcataatgagaaaaaaaaaatagccctacacgcccaagctttctttggccacactgccaacgtggcagccgcagagtctctgccgcattctgacgttgtagttctgcgcgcatcagtaaatgactttacccttcccactcacgtgtgaatctcagttgtctgtcttattcattttacacctgaaatttatttctctattgtatttttttttttttttgagtcatttctctattgtatttttgtaataaagaaattttataaatattatttttataattttttttagtgtaaaaattgatttatttttaggatgatataaatatttatttta

SEQ ID NO: 33622 - DNA, 2102 bp, Cannabis sativa
gtgcattgtagaattttccattattatatatttaatttaatttaaaatttctaataaatgcatattcttgaaatgagttaagagaaagaaaacaaatggtgggtgaaagaagaattaatggaaggaggtcacgcatttcgatcatatactaaaaacagaaaaagaggcatttatagaggaatggtagttgtgaccacccttggtaaaattgttagagatttactaattaattctcagttcacttgtcaattcaattctcagtagtctcaccactaatattttaccacagttaacgacaaactaaggttcaaaaaaatttaaaagttaccttacttttagctttgtaggttttcagtttctgtagagagaaagagagaataggggtaggggtgtttggtttggtttggttgattggtgaaagaggagaaaagagaagaaatttcatgagaatggaaaataaataaataaataaataaataaagagagagaaagagaaaagaaaagagacaaatcaatcaattgagtgaataaaacagatgcacgtggacagacctaccacacgtgcactcaatcatcattccctgttaggataaagacgtcaagaactaaacaacaaataaccacacatcttcaatctttatcggtcaattctgaaaacctcaacccctttttaccttccgaaaaaaaaaataacctcaactcctttttcttaagtttttattattttttatatttttaaatggcgaatgtttaaaatttatatatttagttatactaaaattttttaatttttttatttcaatttatattcttaaaaaatatacatattaaataaatataaattatattttaaatattatcacaaaaaaaattaaaataaaaaattatataaattttttttaaaaaaataaaaaaatatatatacacgagttagaaaaaaattataaaaaaaaaatcaaaataagtattgaaattaacataaaataatgcaaggaaaaatatttaaaaaaaatttaaaagtaatttttaaaattatttaaatttatatttttttaataatagggtgtatttataattttatgggtgcaaataaaactcttcttctttagaaagttttatttacacctcataaaataaattataaatatattttatttcatataaaatatatatttttaatttatattaatattttttctaccaataaatagtatttttctacatgtaattaatttttcaattaaagtaactcatttgatagagtaatttttttttttttcaatttttatgttttaactaaattatttagctattagctagtctaatgtaattagtaaattctcattccatccaagtttttctttttctttttaatgaaaaagaaaacattattatgttttctgaattttgttgctaattgcttaattattttcttctgtttttcaagagtttgggaactgagattgtgagtctcaagaagggtctcattgaatgtatcactcttttaagttatggcagaaggttattcccaaggtggtctttttctatttatatttaattttattttgaactttgaccatgattttgttttacccttttgtagttttttccccaaaatttaaaaatatattattaggaaagtacattttgttttactaattacactatccaatatcgtaaaacatgttataaatgtgaaacatggaatcccgatttgagacgagtattaattttgctaatgcattttcttagatgataattttcttttagataaatatgctgaaaatatttatcatgacattggattaaatatatgtactatgcaatgtaataataatcaaaggaaaaaacataatattattaaaataatatattgtatattataattatagaaatactgtactgtcctagtctctcctaagaaattcaaaaccaaccctttgtttcttacacatattataagacaagacaaagattaaagaatataaaacaataattcatgaaaacccgtcaaggttctccctaaccgttatcttagattaaaattttgtcaaggtaaattagtactatcctttcatatagatgatagatgacatatcata

SEQ ID NO: 33623 - DNA, 6459 bp, Cannabis sativa
  modified_base (1350)..(1353): a, c, t, g, unknown or other
  modified_base (5539)..(5542): a, c, t, g, unknown or other
tctactcttggaggcatgggcctgccacttgaatccattgggatgcgtgtataaatcttgcaggacaaggcctgcaggatcttgcaggtcaagggctgtaggttttggtaggtcaaaggatgcaggacctggtaggtcaagggctgcaaaacctggtaggtcaagggctgcaggacctggtaggtcaagggcagcaagacctggtaggtcaagggctggaggacctggtaggtcaagggctatatgacctggtaggttaagggctgcacgaactggtaggtcactatagctctatctagaggaggcaagactcatggcgccggttatggtgataggattcaccacatctacagttttcattgggattcctattatgactggaaactaagtatctggacctacaattttttggtcttgagggagacctaatgatgctgatggtgcgacatgagtttttcttgtggtaaccatggcgtttgatcaaatacgatatccacactctcaatgaaaacaccaaattgttgaccttacaaaatgatcaattaatagttgggtcgtatagatctgatgcttgccacgtgttacacaaacagaatgaaaaatcaataaacacaaagatttggcccccttgtgatagcgggtaatgacctacttcctttttggttatatttctactgagggaaatactatcttgatcactctaggtgggaatcgttatagcaactttaggattacaaagtatgaatcagtaggtagatctcaagtgttgtacaacctacggtgctggccaaccgagggtgctagctaacctagagttggcgtgtgatagagatgaaaagaagagagagagatccctaatgggcttgtacaagagagagagagaaagacgagagagacttagagctattggaggctaagtggcttagaggcaacttagggaacttgggtttttagctagaggttaagacctttatataggaacccttaaaccataggtttacaatttaaatcccttgtaaatagaatagttagttagatatttacaaaagaccaaaatgcccttaattgtagatactctttagccagtctgttaggcttttagggcccaattcgcatcccatatcttgtgtctatgtgcagagttgtacatggagtctttccaagtcaatctttgccgtccataggcgtatagggaggtcttgacagccatggtcttgccaggtcaatcctggccacccatagtcctaccaagaccttgcaggacaaggcctgtaaggtctggcatgtcaagggctgtaggacctggtaggtcactatagctccaccaagaggaggccaacctttgagtgnnnnggccagccttttgcaagttgaggacaactttgtacattgtaaccttgaagaggtcacttcttgggtccggaagtcacttcttggccggccagcttgtgcatatatcttggctggcctataggctcctcttggtcggccaaggatgttggtacaactccttgtgggcttgcttcactcccttggagaactacttgacagatttgctatatcttgcatggaggctctgttttgctattggcggtggtgcactccacctgtgctctatctttggcttacgtggacatgccacgtcaggtggataaaatttaggataagatagattattaccaagaatttaacctggatcttctcctcatttaattgtgttcatcacagttttccacaaaggcttgagtatctccttaaatagtgtgagataatactcaaaatacctttggaaccaatacttgagagtgaattcaaattccattgtgtatggtatgtcaaaatatgtgaatggaatagatgagctagatcaaacataagctttttcaattctcttctctttctttatataggcattcacatagagttaggttaaaatgagatggactaaaatacatataattgggctaaaattaaactctaatgtcgaattttacttatggactttagagttagatttttgtcactttatttcagctaatgaaactaaagttccaaattttagcaattttctcatctaattatttaaataccaattttattttaataattataaataattatcaaataaaatacaatttaaatatgtttattaattagacccacaacgagtgctaattcataaataaacccctatttctcttttcttctcaaaattgtccaaagttggtgaaaattctcaaataagacatagtatatttttgaattctaattgacttattaaattaattagttaagtctacaagatgatattatcccagacagtgtggggaccacgggccgatgcaaccaagctcctaataagtagaactaaaatttatcgagcaaattttctatcttattagttgctcctaatttcactatagattcagaattgcattcttgattacatagaacgctctatatactaaatatagatacactatgtattatccattgtttcaattacaacaatcattgatcctctatagactgttaaaattgaatatggacaaaattactgttttacccttcaatatatttaatgcttcaaacacttagctacttgtaaataatatttcaggaaactaatataattaccaaaattagtgctctatcatttatcgcgttaagaaaaaatctaaggaaattatcgtttcacttctaaatagttatagaagctacagatgtccaaatatatgattaacactcccactcaattgcactatcgagttcctaagatgtaagtattgagctggttctacggtaagcttataacgaacaagtctaagaacttgtgcaacacacttaagtcagagcttaactatctcaagattgcgatcaaatgatctatgatcaactaagtgacattgactaagaaaagataaaatagtaagtttatgatatcttttccactatcaatatcagttcagtccgatgtatagcctataatactagtttactttactaatgccctagaaaagacattccttttattcaagtgtaagttaatcttattgctgattatcacgtcagtgtaaatctaatacactgataaatcatgggactaaataatttgaagcatataatcacaattactttccaatgtgatgacatcactgtaattgtgaaaaactatatgttcaggatttaatagaacttatatattaagcacgtaatcatgtataaaacatgtgaacaaaggatatgacaaggtcatgatatgatttcagatctttattgaaagtaaataagattacaatgaaattgggttttatttagggcataaaataccaacaattagagattgagttagtctctcataccaggcacgacgagcctatttgaaaccatacaaagctttttctaatttgtatacatggtatggaaaaagaggatcttcaaaacccttgggttgttcaacatacactttgtaataccctaggattaagaaatggattagcaaaatcttaattagataattatgtattattgtgaattatattattatataatttaatatatgagaattgatatgaattatgacatgttaagaccccattggtgagccaggagcattttagtaattttgacctgagaagggtaaaataatgaaattaatatgtttacgtgcttatggaactatattattatatagtgtgcccgtgttatctttttcaggtgtgttctgacaggttggcgcggtatagtcacaactgggtatttcgggccgaattgggttcggacccgaaatgcaaatttggattgaattattagcattttatttattgatgattaatctaaaatttatttgggtttatatatgcatgaaatgacatttttacccctgaatgtgtgtgagtatgctttctttgccctaagggcaaattggtcattttgacctttaattgataattgataaaagattgaattttgaataaatgagatagaatttcctggttttgcttcccctcaaacccgaacccctctctctctctcaaaccctctttgaatttcaaatttgatgtggtgaaaattgcttggtttggagctttggtatttagggattgattgagctttgcttggaattgaattgaggtagctctttctaactgattttatttggaattcttgcttattattaattgtggtaaaagcatgttttaggttatgatgttcttacttccatgtaaaaagaaattggtgttgatcttcataagtttgagtgttaattgcaagatattgttgtgggttatattgttgagttttggatgagattttaaaatattctctaggttggaatttatgttttatttggtgttatgcagctggaaaataatagggttggattagtttgaagctcaagttatagagcttgaattttgttagtttagagcttgattttatgcttgttgtgcaatttgaaatatggggtttaaggttggattttgatgcatgaactatgtgttttagctctctaatgtttgatagcaactttaaattgtgaattgagtgtttgattaagttttgggggtgatttgattgtgtttgggagctgaaattcgtgttttagcttgttgatttttgggtttgaaacccaggtgccgcggcatggcttttagcatgccgcgactcgccccttttgatggaacctgggagttggtcccaggtgccgcagcatggcttttgcatgccgcggcccaccctcgagtttttgggtagattcaagagttgactttgaaaattcataactttgtgacgcgaactccgttttaggagttctatataccgttggaaagctcgttctgagctctatatgattaactgaattttgaatgccatgaaggtattttatgaatgtggaatcaggggttaaccctatatgtgtaaatcccagaattgtgactaggattaccggcacatggtcaggagcactcggggatttggaatctctactattccgggacatcaggtaagacactagttagcatgtagagttatgtgcggtggcacttatactggaaatgatatatgtgagtaattagtaaccagaattatggttatcaccctaacatgagcggtttaataacctagggttattaccctagtgatatatgatgtgtaagtgctatgccatgttatgtatatgagtatattgaatgttagggttatgtgttcaaggcataaccgggttggattcggtaactagaaccgagataaaccgttttaaggccttattgtatttagatgtgtgagcgcaacacgtacgtctatgttacatagacatagataaccatgtgagcgtaacatgcaggtctgtgtcacacaggcttacgagaatggcattaaagtttacataatgtgttaaatatgtttatcaatattttatactgtcgtgctaggcttggctcatgggtgctctactgtgcaggaaagggtaaattcgtttcagattagccatgagtatgggagctagatggtgtatgtacatgttcgggccacnnnngaccaagcgggttggggtctatcattgatgcattttgtgactctggtttgtcgcttaggtcagccaatgaaaaaagacttgtaatagtgttttgtaaaatatttttgtgatcccgacacatgtaacttttagtttgtaaagtttaaattaatacaaatttattttcattccatttgttattaaagtttaatttctgtgctaattttattagtaatcccatttaggggattagggtttcttaagtatcatgggtaacgcgcctagtagttagggcgttacacacttcctcactcaaaatgccattcaaaaaggcagattttacatccatttgaaataatttgatatcaagaaaacaagaaatacacaaaggcaaacgaatagattctaatcttgctactgaagcaacaagttcatcaaagtcaataccttctacctgtgtgtagcattgtgccaccaactaagccttatttctcacaattgtaccaaactcatcacttttatttttaacaaactattttgtcccaatctcattaataccttttggtctttgaaacaaaatccaaaccttgttgcgaacatactaattcagttcttcttgcattgcattcttcataagtcattgcttccttcacactttctagttaaaattgcaagacaaaatgttgactcaaaaatctggaaaaaagattcctaagccacacttgctagctagattggcgagaaatgttaagtataaatggagagacaacaatttatagtagttcactcccagtgttgtaacagtaatggagctatatcaacttcgagtttttaatctcatgagatggatcacaaaaaaatggctaagtctagaatctctaatttttagagagagaaaccagaaagagatgctatgatcttattgttgggttttatgc

SEQ ID NO: 33624 - DNA, 2679 bp, Cannabis sativa
ctaacataaacatatccatccaaaattacaaatcactcaagatcaaatattacagtcatctatctctaaagtctgaaaactattaagattgtccaaaataaactcaaacaaaataaatcagtttcgatatcggcctcactcaataatctcatcgtcaattgttgatgattccatgaccttagattttttgttctgcaattagaaaaacacagtgttagtcaaattattataaataacaaaacataataattattataaataaataaataaaaacataataattaaataaaacatattcaatattcatcaaggaaagaaaaaaattcagattataataataatagcaactaacaaaaattttgtttgccatatactaaaaatcacagtaaaaaaataatagtaaaaaaaataaccaaatctatgaaatcacaaatagaaaaaacagtagaaaagaaaaattataatacatttatttacaactaccaaaatttttatgctaattgttatatgctcaaaatcatagcaaaaaataaccaacgaactacaatgtctggccaatcgtgattcttaccaaacagaaaaaaatgagctccggatccttcaacatgaaaaaaaaaagaaagaaaagagaagacaaaagagaacttacttgttgttatctccgacaaggcaagcaacgatgtggtcgtttgtgtgtgcaaatagggccattagagatggcagatgggtggaggatcggagccgtttaagaatggaatcacattcacaactagtttttttttgtaagaaagaagagggggcggcagtgtgcttgggttttctcatgtacgtatgacatgaatattagggaggggagacagtagtgtttatttaggccttagggtttgaactgatttttttttttctaaaaactttattgggccgacccaggttcgttggttgggttacaatgtatgcagcccattaccaacccaatcaacacgggttaagaaagttttgacccatttaattttggcccaagaaaaataaggctgtttcggcccaaattcaagttgggccatgccacatcaataagcagttgacgtccataataagtgtaatatctcggaaacttaattgtgaataattaggatttattatacattatggattaattaggtagtaatgagtaggattatgatcctgctaacctaattagtataaattataaattttgctataagtggataaataagcgtaatttaataattatggagatttatttgaaatatatgaataatacaagttatttgtaaaataaaaatattttcaggttcggcgatcttagagacctgattggaagctaaaaatatcacaacaatataggtagaaatattgttgggattattaggataagctaattttagaaataccagtgtattttggggtacttggaattgaacaaataccctagaaataaagatttcttagtagctaaaaaatgataagataattattaatattattatattattattactgttaagattattattattaatatattattattatcattatattaatattattgtatattattaatattattattaaacttatcagataagataaatttacatatatgtaaattttaaaaacaaaagaaaaacaagccctaaaaaaatttacctactcctcctttctctcgagcaaccaagagcaacctaccaactagtttttttttttttttcaatttcttcactccaagattcagctcctcaacactatagatagacaactaggtgaagctaagcttggaaggaggcttgaggtaagtttagctctcttttttctttggaaaagtttaggttttgtaagtgaattttgcatctgtagttgctggggtttaagtaagttcttggttgtatttttgggttggattaggagtattttgaatattcaattgatatgtttgtttgttgtggggttaagagaatcaagtttgagttttaagcagattttgattgagagcatggctttgatttcgattacgttgggattgttatatgaatgatatatatgtgtcctatgaagtttgaaatgatttgattaggtttggagctagtttggagggtttaaagataagaaaaatcatgtgtctcgctgttcagaaccggaattctgtatagtaccaaccggaattccgtttggtcagtttttgaaaaagccaaatttcgtatgttggccataacttttcaattgggtgtccattttagacgttctatatactgtttcgaagcttgcaacaagctctaccatatattgtatgttttagagccaaaatataaattttatttttgtgtatttgtgctatggggtttggtaggaaccctaggttgtcctttgcagttgtcaagcagtgtttggggataaacacttattgggttaccgctgttgtgacataaggccgagatcatcggagatagttctccacttgggttggccaacatgtatgaacctgaattaaaggtaagaaaagtatattctactgcatagtacgttgtatgtaatacaattagtattgtaatgaattaattaataatattgagatatacttaatattattttataatgaaaatattgattggttgagtatcgataatgtgataatattatgcatgtgatatatgggctcac

SEQ ID NO: 33625 - DNA, 1685 bp, Cannabis sativa
gggcggtttgtaattttttcgggttatttcggtttgtaatttttatcggttttttcggttcggtttaggcggtttacaaatttttttgtacagccctaatcccaactatgatggttaacatgaaatgaggaactgacctgtttattaagcaaatcaagattgattattgtcacaaacgggtactccatactaggtagtcaagggtgatcaaggataccagtggcggtctcaagattgaattttagagtggacttagttatacatttaatataatctaaaataataaataactagctaaatttaagtggaatgatagtttagtagcaccccctattctagtggtttaataaataaaatgtagatacaagtagaaaaaaaatgagcaagaaaaatcaaaacatggtctttcatgtaaatttgaagaattttaaccaattgtcctatttaattgctatatgtatatataaaaataacaattgtatattaatatatttttaaatctcagagtggactttagccctctcttaagacccctaggtccgcctatgatactaacgtgagtacccgatccaatagtatgtccctcattttcactagctgttgagcactccaaatactatgccatacgaaattaggattacctagatttgttgtcagaaagtcgccatgagagaaatatctagctttataaatttaacccactaaggaatatggattatataataatctccaccattgtttagccaacataacaaggttagagccatgcaaaatacgaaatgtaaaataggaagtctcattccacaagtttgttagtcgagtcatacgttgttaagacatccaaaaaatacacttaagatgacattgtgtaattaattgacaacaaaaatgtgacactactacaaaaatgggttttcctgacgtttttaaatagtcgtttaaagtattcccgtcggtttctataatcgtcgcctataacatggtatatgcgacggttttaaactgtgcccttaatgttgggaatgtaaaaagaaaaagaaaaaaatacagatttaatggcagaaaaatctatattttccactatttctttcctctattagctttataaataaataaatatttttcattagaacaaattatttgaaaaattatactataaaaatataaaactaccttaagaaaaattattgaaattatattatttattaggctaattttaatttaatttatataattttataaaaattatttttaatcaaaaaaagtaatatatatttggcttataagtcaatttaagtgtttttttttcttctaaataattattattaagtattttataaaaataattattttattgtattaattattatgactataaattttaatacaatgtgaatcatattatttaatacataaaaaataatttatattagtttgtagggtaaatggcggtaaaacctcaaatactttcgttttggtttcattaaatccccacaacccaaatttctgcgggtaaacccctaaaaccaagaaactgttagcaatttaacactttcgtccaaatttagctgttaactgccaagttagattatccacgtggcacaattctattggtccacgtaaataattatttaaaaaaaataaaaaattaatttaaaattaaaaaaattataaaaaataaataa

SEQ ID NO: 33626 - DNA, 3198 bp, Cannabis sativa
  modified_base (1653)..(1654): a, c, t, g, unknown or other
atacaatatctttaaagtgactgggaaaaagaggtttagtgagtatgtctgctaagttggctttggatggaacatggctcatgcgaagaacaccttggttgatcttttcttgaactgtgtggcaatcgatctcaacatgttttgtttgttcgtgataaactggattttctgatatatggatggcagcattgttatcacagtgaagagtggaatggagtgtcatgttgatgtagaaatccttgagaattgaagttagccatgtgagttcacaagttgcatgagccattgctcgatattctgcttctgcggaggatcgagagatggtttgttgtttcttagacttccaggatatgagggattggccgagaaatatgcagtagcctgttatagaacgtcttatgtcgaggcatgcaccccattctgcatcggcaaaagcttgaagctgaaaagtgttggttggagaagtataaaagaaaaggccttgtcctagtgagttctttaagtaatgtaaaatgcgtgtggcagcttgcatatgagggactcgtggggcttgaagatactgactaagtttattcacggcaaaactaaggtcaggtcgtgtgatagtcaggtataggagtttccctatgagactcctataaggggtaggattgtgaagtaattcccttgaatcattacttagtttgttattgggttcctatatatatcagctgttagatttgaaaatagcagcaatatgtgtgttgtgtgtgagggcactaacagaaatcaagttgtatttaaaatcgggtacaaacaacacatttttaagagtgatatgagagttgagaaccacagtaccaattttatgaatcttggcttttgaaccagtaggtaaatggacagagagatcagtgggaattgattcaatagaggaaaaacattctaggtggcaacatacatgatgtgttgtgccactatccataatccacaagaaagggtcaataatacctgagaagttgttaatcacgactttgtcagatgtagaggcatctgttggttgaagttgttgtgctaacatcgatattaattgttggcattgtgctggtgtaagctgtgtgttgagatcaggtgttgaagaggtgatttgagaagcttgtgggttgttggtaagagtggtgttcatatcagattttcttgtagtggtggaatctgatttcttgttgccatagccaggagggaagccgattaagaagtagcatttgtctttatagtggcctggcttttggcaatttgtacaatgtgggcgtggccttttgttctttgaaaccgcattggctgcaggagcagtatcttgaggattcgatgaactggaagtggcagccaagggaggaagtaatcgatgtcctagagacctttgtctttcttggttgattaccatagaaaagaccttattcaaggcagggcaaggatcaagaaggagtatgtgatctcgcacagcctgatatgaatcattgagacccttaaggaattgtaatatttggtcatgattttggtgggccaagtgttgtgcagcagcagcacaagtacatgggatgcagggtctaagttggtgtatttcatcccatatagctgtcaatttcgtaaaatatgcactaaccgaatcatctcctnnattgagataggttagtgtttcattcaattcgaaaattctgggacccttagcttggttaaatagattatttaacacggtccacatctcatgagcagggtctaagttggtgtatttcatcccatatagctgtcaatttggtaaaatatgcactaaccgaatcatctccttgattgagataggttagtgtttcattcaattcgaaaattctgggaccattagcttggttaaatcgattatttaacacggtccacatctcatgagcagtatcaaagtacatgatgctactcttgatttcaggtgaaaccgagtgtaaaatccaagacatgacaagttgattacaacgagtccaatgatcaaaaagagagtcattttcagggggttgaagaagagtaccttccaagaatggagtcttgttcctagctccaatgaatagcttgaaatctcgtttccaagattggaaattcttgtccgagagaactggagtgacaagggagagacctggatgatcagccgtgctgatgtagaagggagatctaatatcttcataagctggtctgtcgactggagtggatcgacgcagagcaggaacagattggtttgtttgtggagggttatcagcggaagtggttgatggtggaggagccattggtgcttcaactctggaaggatcgtcaaacgttgttgcagaactggtggcccgagtacgcaccatgatcggagaagaaagatcttgatgcttggagctcgaagtggactgcttgaagctttagtttatttcatctaataccatgttagaacagaggatttcagagagaaaaaagaagtgttttattgatttgcatcttatgaatttacaacagtaagattacacttatttataggcaaaggaattggcttagaagccaaccgatccttgtaacagaaaaaacagtaaaacgagtaaaaataacaaacttatactaactaactcttaacaaggggcatattaaggattggtttattcaaaatgtttggttttaggtgttctcttttattttttggctgactccttgtatcccttggagatgtaaattttttgcatagagaatgagagagaattgttgtgcttgatatttatgtttagttaatagtacatatatgaaacttttattgaattcaaacacgtttattttatcattactataataaattaataatttaacataaacaaattaaatcaaaataataaaaaataaaaaacattaatttgcttgcacagagataaataattactacagtaattccaagttgatagagggaagcaaattcaatctgtgttaatcggtcaaagattgagtttgtagcaggtggtgaacaaccttctcaaaattcacaaaagatgatcctgcacccgacccggaaccggcagtggttgcttcaagcgccatgtttttcaacaacagagctttcttcttcatggtaccaccctttacaccatccattaactcaatcaccaaactctctatctcatctctcttggcatcactctcaatctccataccgat

SEQ ID NO: 33627 - DNA, 2974 bp, Cannabis sativa
agcattggttaaagtactctggaagaatagtaaagtagaagaagccacttgggagttggaatctgacatgaggactcagtatccagagctattcaggttagattttggggacgaaatccttttaatggggagataattgtaatgaccgcatgatttagatatggattagtgagattataaatactaattttattattatttatactactattgatggatatatgtgaacatttataattttacaaaatatcttgttcttgtaattttagctcggtggcgatggaaaatgcgacggaggatattttagtcacatggcataaagctttttagtgattaaaaatatgttatgtgagctcaatggttggtgttggcggggttgtggtactggaccattttacccctaatttgttccttgtatttggtttaaatgtaagggtagattagtaaaatggttaataaaagaaaggttacataattaaccttttatccaataattcaagaagaaaagaaagaaaataagaaattagagaaatggagaaaaaaatctagatttcctattcttcttcttccatcttcgaactagaggtggagctctgaaaattgtgtaatttatcctgaagattcagtttaggtttgaagcctttgattgaaggtatgacccttgaaaccctactctagatattcttaaggttttggttggttaagtgttaaattttggagttttggttctgttgtttgagttttgattaagagtagttataataggttttacttgatgatttagggctgtttgtgctactgtaattgtctattttgaggttgagcaagtttgagctcatggaactcaaacttgactcaaaaatggcatgttgaattttattgagtttttcttgctactgttgtgtgggaattgttctagaatatgtgtacaggtgttctggagagtttgattgcatttggggaagatttggctgagttatgcaatttttggagtttgttggtgcaaaccgacagaccggttttacagggtctgtaaaattggttaaacagtttacaagcaggaccacccaaaattgcaactttccaaatccgtgctattttccaagcatattttggttttccttggtatttggggtagctgtatattgtatgtgtcattaagattatccttagttatgagctagggtttcgaaacggtttattcgagttattacccaattgtgtaatgtgacttaggaccttcgttcaacttgaagattttccattcaagtcgaccggcatgcttgaatctggaatgaggtaagatagcataaagtatttatatgtaattgagtgtttcttattatttattacaatactaacgcccaaatgagttacttttaagggtgttagtacaatgtagggcattaggatagttacagtgttaccaatatgagtaccaagggatatggagtgcatgtggtacaacactcagtaacttccagaagtacaataaaggccctaccaacacgagtacggagttggtactctagtgcatatggtacagtggttgtactttcgttgagaacgttcttaaccatttggtgagcttggtaattgggctcaagacggcttacgcattaagccggtatcataatgcttatataaatgttatgcatatcttactgagtctgtcgactcattagtttgctaccttgtgtaggtaagggtaaggctaagctggagtagcaatgagttggagctcaacaaagattgtacatatcgcgacagtgcaacctggaggatctcggtcatactacattttgaattacattttgttgttgtctattgtttgtaaaaaaaaataatatgtaactatatatgcatataatatgtattttcagccgtttttttaaactcatgatctcgacctatgagtttcgaaatataacaagataagtttaaattggaattagcaaattttaaaatttttaaagacgtgctctacaatattagtgcaaaaatgtgaagatttgcattaaaaaataataataatttaaattaaaaattaataaattttttaattattaatattatttaatttttaaaataaatatataactaaatattattataatatatataaagttttaattgtatacaagcagtcttatcgtaagagtatacaccttatatcttaataactacatgatctaaaatcaacgataaaaaaagtttccctacccgtagaaaacttatgctaagtcctaccatataaaggtaatcaatatacaaatttatttagaaataaggtttttatatataaaaaaaaaagtaactagttttttttttttttgtaagtgtagcataatgatattttacaatcaattaatagttcaaaggtcttgggttcgaacctataacctctttctttttcccatccctctctcaccactaagctagtttatataacttttagggaagttttttggggtgtataaaataaatatccttttgttaaataaagtggggtttaattataataaaaaaatatttttaattaaatgattggggtaaatttagtaatggggtgtagttataactttggggtgtaaataaaacttctctatttttaaatatgtatacatttttgtaagagtaacattatattagtttttgtttttttaaaaaaagtaacgtatatgttacaaaatataatttttgtggtaatttttacgataatattaaataaaagaatattatcacatatttaaattctctctcaaacgttaataatagggaaaaaaaaaattaaagttttttcttattaaatttatagctatcggagaattttttttttttgttaagacagcctcgctggccttctgttgggcttaatcatgcgtgacttggtcggggctatattttcctacgtactgttattagccttgtctttgtgataagattttgagttttagtcttgtctctgtgacat

SEQ ID NO: 33628 - DNA, 1471 bp, Cannabis sativa
agagagagagagagaagaggaggaggaggaggaaggtggtgagcccatggacgaaccaactagagtgacaggagaaagagggaaagtacacaaaaaagaggaaaagaggacagaaggtggtaaagaagagagggagaagagaagaggaaaagaagagaaaggacaaaagatggaagaggagcgaagagggaagagaaggtggcgagccaccaagaaagagacaaggagagggggcgagaggggggcttgggctcacttttgttggttgtgatactttaatgtctcgtttggaacgtcgtattaggccgtattgtattgtattgtattatattgaattgtattatatatcattttttttatataatattatgttaaactttaacttatactaaaatattatatattaaggtgctcataaaagttaatactacttctagttttaaataaaaatattgcataaaatacaattaaatataatacaatacaatacaatacaataaaatataatatggcgtaccaaaccaacatatgcatatatgtttttctttatcacagtcttagtattttctttatccaaacaagtaagaatataaataattttttcttaaaaaggaaaaaggaaaaagaaaaaataagaataaaaagtatatacaacattacacatagcaatcttaagtcaatctaaatttttttcttcttcttgaagcttcctattacaggctttgctctgggttagtttccaatcttggtttgtggagtccgattccttcttctcaaggtttgtttcctgcaggttctcttatcatcttgtttttttctctctgttttgagtttatcatttctctcttctctttctctgtagctagtcctgttttggccttattttcttctggttttgcatttattattgtttccttctggttgtctcctgtcctccctttctccgatttcgatttggtctgttcatccttattaattgcttggatttgttttcttaatacgtcactctaatcattatgcttgtttccctaatttctcgcgcgtcttcactgttcaataccatttctctctctcatttgcatttaattttggcggccccttctaatcaacatttaatatccctggccaatatttcccctcttcgattttcgaatcgtttttttctttctaaatcaaccgtcatcttccttctcttcctctctaaaccaaagatcatcattactcttcagcgtcgattccagatcgtctctcccagctgtgaaatgatggttcagacgtttccatatctctttgcacatctgtctcaaactttgctgaaaacccatcttttcttacctaccactttgatatggcttcctcttcaaccaaccccaaccccatttctgctcttgatgatgaagatagtcttgttcatgatttcgatcacatttctatccactcctccacggatactgatgctttctgcttgatt

SEQ ID NO: 33629 - DNA, 1612 bp, Cannabis sativa
  modified_base (568)..(571): a, c, t, g, unknown or other
tagggcataaaacccaaaaataactcgtatgctacgccaggtaaaaaataagataaactgatgtacattctctctctaaactgacggcacacgcgtacctatcactgtcagcagcgtgttcgcgtacggacaatagttaccaacatattgggcctcaccaaaattctaggcacttccagaacaatcaatcgcctgatctgcctagtttttgcaactcaaaaatttttcaatttataaccctcttaaacttgttcaaatcaattataaccttccagaacattatgttcatgcattctaaacaaaactataagctgagaacacaacataaactaaggaatcaacattcaccattaagttatataaacctaatgtttatttttcacggcctaagtacccaacgtttgtaaaacaataatttttctccagtttcatcagtacagactctattttgaaattagatactacatatttctatctagacccaatgattaagaatctaggctttatatatgtcctgtttaagacaataacaaaatttgtacaaataaaattagagaaaaattacagnnnnataaacattgggtacttatgccgctaaaaataaacattggatttatgccacttacaaacttaaaattttaggtacttacgtcgttatttatccgaaatattaatgatcaactacctttaaatatttttattgcaaaataaaaacttgggtatttaattgttatattctttaaatatttggtatttttactacaattaattcttttttaaaatataataacatgttatctattacactacaattaatgacaaacaaaatctgcattctttaaaaataaatattcatattaatataaaatatttccttctttcgttctttagttagttattattaataatcttctaagctttcaattaattaattattctttcaaaatataaaaaataaataataatattatctagacgaaatcttcaaaatagttgtcatactagaatataacaattacttattttagttattgtcaatttctccattttttcaaaatgatcatattttatacacactgttctgttttcctagtccatatactgttagagagcatgaataatggagaaaagaaataatacacatcttgatcttcttctctcttaacatgcaaccaagtaattatagtacaaaaatttatgtaaaatttgtagaaataaatgttgaagaaaacattttccagtttaattttttttactaattacccgtttacttaccagcaccaaacaaaaaattcaagcactaaatgtaacagaataagaacaaagagcaaaaaaaaaaaaaacaacttaattcttttttctttaactttgaaaaaaaaaactcatcaaagagtgttagagtgaaatatcaccaatgaccctcataatataatatttttattgttggtgtaagaataaagtagtaatttaaataaaataaataagtttctaaaaataacttttaattctttaatactattgataagaattattatttcttattattaaataaataatatatgttataaatattaataattatgtgaatgtccaaatcttttatttattacca

SEQ ID NO: 33630 - DNA, 2607 bp, Cannabis sativa
  modified_base (44)..(60): a, c, t, g, unknown or other
  modified_base (511)..(511): a, c, t, g, unknown or other
agtaaaaaagtaaaaaattccgtctgacagtatttttgtaaaannnnnnnnnnnnnnnnnataccatgtaaatttctctatattatataatgttatgggttattctattacatttattttaaataattatttatatatatttttgagagtgagggttcaaaaaattaagtcaccttaaactcatatattttcaagacggactctgcactcaccctttctaataactattggccacttaaaattaagtcttgcatataaaatcttaatcaactatgtatgtctatgatgatctttctaatcaagttttttatatataacagatcgttggttattctaatactttcgtaatgttatactttcgtaatactttatatttgtttacttacagtattaaaattaagaaaggtagaacttgattaaataaaggggaaaagaaaaggagaacttcccccaccgattttataaggaagactataaagggtaataaattttaattatttttattttattntttaatattaaatatataataatagttttgtcctttaaaatatatcttacaaaataactaccatataatatagtttaactcaaaaaggcaatttaatcaatttaagtattccaattatgtttcctaataaaataaataagataaatcactactattcgatttccaaaaaaatttaataaacaacatattacaaatattgattttgattatttttcatttattccgttacatttctccattaatttattctgattgtgaatactgtatagtaatcttaatgactattttattaaaataatcaagtttggcatcagtttgttcatatacacaaattacatgcctaaaattattgtatcatttttagatgttactgtaagtatttgtcatggaatttgaaataataatgtgagttaaacccatatttgtatcttacttcaaaaaaaaaaaaaaaaaccctatattttgtatcttaacaaaaagagtatttagttgggatatttagtttggtcgtgtaactaatgatcataaatcagacctctcccacggaagagcgagctgaatcgccgcttaggggcctcgctctcagctgaaagttctttagataaacaatttattttattttgcaaaaatactatatttttgatttaaatattatttggtacaataaataaccaatttagcttttagaaatgctacatattttaaattttattaaaaagaatgtcaatttttttttaaaaaaaatatcacactttaaatttatattagtactatataatgaaaatatgtgattttttaaataaagcctagttgaaatttgtttacaaaatcttgaattatcttgtggtggcctttgatacataataagcatatatttgttgggtattttcataaatatatattatatgaaaacagaaaaaaaaaaaaaatagaatctacagttttttaatatttttatacattttttttttcacaaaaatacgaattattagttttacgttaattttacaagaacaatattatacatgttgatactaaaaagcagtcaacactcgttcgctaaattggtaagataaaataagagatgagtagggtaaatagagagacacacaaaatttatgtagtagttcactcctcatgtcgcaatggtaatggagttacgtctacttcgaatttttacttctcacgagaattacaagagaattgactaagtatggaagctcaaaatttttagagagaaaaattggagaaaaatactctgactttatggacacttttctgaatgtgaaaaataagctagatgaactctccttttataaacaaggaggttctatcaaaataataattaaatattcaaaaaatgtctaaaaatagaataatattttttactattaatgatgatctaatggtgaaattgactccggtgatcaatcatcaattctagagcttgaatcacgtccgtaggacttttttcgggtagttgtagttgaaattcgtaattttgttgatgacaaaatttggatttgatatctttagggattgaggtatgagacatgacttcatagataattgaaatagtttcaaaacacaagttcaattgcatcaatcaaatcattattgagtgagttatgactattttactaaaaactgctatgatattaattagtacacaggttgacagtccagctctcaagttaacatataacataactttcgacgctgaatcagtgggaaaatattctaagaatgtattttttgatgctaagtgatattttgatatcacctaatccatttttttattctagtgaagtcgttcatcatttttcagaaatattcacataatttatatatgaaatatattggatcatatcattatgatatgatacaaaacctcaaaaaaaaaaaaaaaaaccataatattacgtgaaaacaaatgatagtcacattcaccctatctattctattatattatatacatccaaacctcaaacgagaaaaattataatattacataaaacaaatgtggattttaattatgtcaaaaaaaagagtggattttaattaaggcgcttagtatacatgttttgtttttgttt

SEQ ID NO: 33631 - DNA, 1614 bp, Cannabis sativa
tttttttttttaattttgtaatttctttatactttgtgactaataataattgtggcgagatgaatttagtgctttatttttttccctcaaacattaagattctttttattaattatttactatttcttctttatttttattttcttaataaatgaaaaattatattgctacaaatttcatttataaactagacaacacaagtaaagaaagatggtttgagttgtttagctactgctataatgtacatgacatatactattttaatttagtgatttaaaatatttttttaaaaaaatattgttttattttacaatattcacttttttctttttaattcatcattgtttgatttttttttttatcaaaaatcataaacaaaatatcaagttcataaatttatatatataaatatagattattatttattctgattttttttaagtttttgacattattatctaatatctcataatatatattgttgcaacaaataactatagagatttttgtatattatttacataatttcttatacttttaaatttgaaaaaaattaactaaatatagcttcaatactttcatctattctcttcttaattctctcatttttttttattactttaaaaaaaaaaaaagttccaattaaactactactactactactactactaataatatctaataacaacaaaaacaaaaatatctaactaaaacaaactatatcaacgtacataagacacaatattttttctctttcaaatctatataggtatatatattaattctctacttaattctctcattttttttttattttgctttatttaattagagatcactgattaattaaaaatgaaaaaaaataaacatacatttctatataaaaactaagaaataaatatatatgtattaaaaaaattaatgtacatacaattttttttcatagagagatatagttaatattaactaatataatttatcaaaagaaattattaactaatataccaaaaaaattaaaattctaaacttaattatgtttatcacctcatctcccctcacattaataaaagtaagtactaatccaataattgtttaatttattttatgtactgagcaaatctattagaaatggtattaataatgattacaagtgagatgcggtgatgacatcaactttaaatacagtggtgactacaaatgagatacgatgataatagttgttttaaaattatatgatgaattttctatagatttattgtcttctttatattttagatttctattttgtgtaagaattgttgagtttttaattttcttcactataatattgtacatttaagaaaattgtgtgattttatatttacatttaaaaaaattgcgtgattttatatttatataagaaaatgtatgataattttttttttaattatttagagttttctatatagatttatcatttttttatataaatatattttttctttttaaaaatatacataaaaataaatttaaaattatttgatactgattttattatttaattgataattatataataatttaactgccgcacgcgaagcgcggcttgtttactagtatatctattctatataa

SEQ ID NO: 33632 - DNA, 2264 bp, Cannabis sativa
  modified_base (1156)..(1158): a, c, t, g, unknown or other
  modified_base (1523)..(1523): a, c, t, g, unknown or other
atatgttgtaactaattaaaatacatatacatttttttctcgatttttttttcagggggggcgactgccccccctcgctacaatgtgggtccgccctagaaactactcccaaaaatatagacaataaacctataacttcttcaaacagcaccctatcatattgaaaaatacattcccaataataatagtggtcgccagagctagcggaactgaaaaaatatcgcaacccaaatcaaaaaacacagtaatattagaatgacaatctctaaaataaattaataaataaactcagaaagtaacacacaacccatatcattagctcaacacttcttaaaaactaaaaaaccaataaaatttctaagtaaaactagccaaaggtattaccctttggctagcaacaacaaactagcaccctaattaaaactgttaaaaattcacatcaaacagattatatttaaaattaaagttatcggtaaattccctataattgtaggtcctccacaagataacccacaaaacaacaaaaataaaactctattaccacacaataaaataagaaatgtaatgtgaaagaacgagggtaatccatattaaatataaggacttaaaaggacttgaaatatttatctgttaaaagcgaaaagatcgttgaagtagaaaacatgagcacgaaaaggatcacttcccttgctcattgaccctaccacaaaactaccttaaacaaatagggataagccataagactagcacaaaagccataaaaggcacataagccgtaaaaggcatcaaaaccatcaaaattgtacaaaaatctatgtagactcatatatactttaagcaaatataaatactattttggaccctgtattttgtaaaagttactaattggaccctctgttttgttaaatgataaaattgaccctttgttttgttaaatggtaaaaataggaccatgagctcaattttttcaacaattttattttttaatataatcaactttatgacaatttctaagacgaacagatacagaaaatgtaactagttttgtcataatatctctagatcggattattattaagttttattttgaaaaaagaaaactcagttcagggtcctatttgtaaaattttggaaaatatagggtccattttgtcannnaacaaaatagagggtccaattaatgacttttacaaaacatagggtctaaaatagtatttatcctttaatttacaatttatcatttaactattaattaattgctaatataaaacctttccaattccttagtgttaatgcatattttcgttaaccaaatatgagcataacaatgataatctcacatagaaaataaaaatagtaaaggaaaaagtatagacgcaaagaatttttttacgttgttttgcagttaaaattctatatagtccacgagtcaatcttattagatttctgatagtttttcagggcctttttctttatgattttttttcgtctctttttgatctaacttgcctctatttataatnacatagtaggcagttaattacatagttgactgtaatctttacaacgtttattccctaaaatcgtgaggtttgattacatatcacgtagtataaatgcggttatcatttgaatatcacacacagagctgtgatttatctactcttttactcggtgaaaatgatcatgtgtttaaacacgcactactacaaattacactattcacgtcggtcaacactactgttcactttgttgactgacgtgaatagtaaaccatgtaattatgtgtgttttaaactgtcactaaaaaaacattatttgtggctgttacttgtaagacgagaatgacaaaactgatgggaaaagtaaaatattaaaaaaattaattggtatattgcgtcagtttagaaaggtcgaatataactatgcgtataaacactcaacaaaaatacttttgacttcttaaaaccgacgctaaatcctatttcctcaacccaaatcgcaaaattagcagactattcattctcttctccaaatcaaaagttattagggtataggtttggcaatattcgacccccgtcgttccgctcccacccacgattctctctctctgaagggaaaattcaagttcctcatctgcttcccccttgtcatctttttcgcagcgcacccatcgtcgactatcttctctctttgggatcctcacttaccagtatccccttctattttctctctctgtaatcctcacttgcattcccttatca

SEQ ID NO: 33633 - DNA, 1577 bp, Cannabis sativa
  modified_base (1416)..(1435): a, c, t, g, unknown or other
actcttactactttgtcaatagaagattgttttctattggatcttcaacactcacctaacatgcatgtaacttttctttagcccaactttcaaagggattgagttcgtttctaattggcgcttttgaactcattgtctgtcatttgtcataaacagtctctataaacattgataggctaatgattgagtgatatgttatatagtttactatttgcactttttgtttatgatttgtatgtgatttttctttttttttttgtcttgcttttaatcactgtaatgttttattcagccataagtgaggaatatgtcactcatggacatattcttcaatactcagtagtcaaattactcttctctgtttcaacttttaatgaggaaatagtaaaagaaattactcttttctctttattgttcaatactgttacaaatgcaaacttcatccataaatgaataagataaaaccatatacaaattattttatttggtgttattggttatttccaacttgtctattttatgagctattcttcaatcctatgatgtcttttctgatgctacatattcgagtctcatgaatggttgatctctcgagcacaagcaatgataagaagtatgttcttgttgagaattatgaggttacatctcaaaactaattggtattgagtggagtagcccatgttcttatatatggcttaatacttttacatttaatacatgtgagacaatgttctccaatagctattaacttaaactattcgccttaatcgtcgcctttgaattaagcacaaataagttaatacttgcagatgaaactattcctttatagagtcctctaagcctttcatccatgaaaattctcctaaattacatcaaaaaatttctttgtaggcatcattaattagccaaaacatagtttctatatttacttacattatcttccaaaaaatttaacaagcaactaggataatttttagtattgcaacaaaaacgtgggatttatcttttcaaacctaccggagtcaagttcatggcaattgcctctctcattttcactccactctcattcatttctccattaaaacccgaaagcttctccacattttcttcttcttctttgtcttcaacaacagtgagctcgagagttttgatcagaaaattgtgaagcaaacaacatgtaacgatcacaaaaggtcgaaactcaatgcactcttctttccactccttggaaagaatctgtcaccgattaggaactttctattaaaaaaactattttaaaatgtaaaaaaataaaaaaaaaaactctaaaataaaattagaataatttttttgcatatacatactttttttaataagtgagttctatttgcaccctataaaatgataaatccactctattattaaaaaaatataaannnnnnnnnnnnnnnnnnnntactcttaatatttttttttaaatcttttcctcacatcattttatattttatgttaattttaacacttattttgattttatttttataattctttctaactcatgtatatatatgtattttaaaaaattcatataatttttt

SEQ ID NO: 33634 - DNA, 1760 bp, Cannabis sativa
ccataaataacatagaaatgctaaatagtacctagcattttcaagaggtattatatctttactgacagacctcacttagagcttaagggggctagtcccatacttaaagtccaccaaattttgagaataaggtgaggaatacttcttttttgtattcattaatcaaaaatactttcatattagatttcattaaaatctacccacttttgtgagtaggtaccctcacccttccatttaagtaaatcacatgatttatattaatctaagagatataattggaacatcatatataaaagtgggtatatctcaatgaatatagaaatgaaggtaaaaattaaatagataaagtaaagtaggtatacaatgcaattttctccaaatcttgggcacaaaacatatgtataattgttgttttttttttgttagtttttaaaattttataaattaggcccattcatacagacctcacgatcccaaaccccaacccaatcttgaaccggactcagacccgggttcgaaattggacacagacttagatcctaatctagcttcggacccagaccccaactctacacctggactcgacacgcaactctcgacccccaatcgcaaacctgggtctggggtccagatttgaggatgggatttgattccatgatcggggtcgaagttgaggtcaagttttagggatggaaatatattggttacgggtacccattattattcaatccgaatagtgaggggaataactgttcaaatggaaaaaatgactggggcagagaataactgcactgcacatatgcaggtatggtacgagtacgatattagtatacactgcccatttcccctcgatatatacatatatattaaaaaaaaattattaattatatatttattttattctattatcatcatatttttaatttaaaacttcattaaatttgtggttattgtttgatttttgttttttttattgttttgacgtgttaactaatagttttgaataatcaatatatatatagttggattttgagtttgaaaagcatttacactattgtttaatataattttatcaaaattcaattaaataaaatattataattatttttcaaaaaatggttattattagcggttacaaatcgtggtttttctcttataatttactagttaatacttgcatcattaccgatagttagtaggataagtatgattatataattaacttacatgaatatggatgataatttaaaaaccgtcatcgattcccaattgttttcttaatacccacaccatcactgagttatataattaatctatagtaatttaggtggcatttcgttggaggtaataaaatgattagaaagaaaataatatatattttatttttttagtttaattgcattttaaagtattagaatgacattctaatagaatgctctttccatcattttggcggaatgattattccatttaaaaaaataatgaaacactatttaaatgtaacaaaagaaaaaatttaatgatttatttattaattttttttatgcattttaaaatatattctattttattcctatttttattcagattctcattcccattcttatatttttattcttcctaaccaaacaacaccgtaaagattgtataactttacacaacttaagtgaataccaaatataatattatattaaataatattaattaggggtgttcacaaagtatccgatccaatccaatccgcacgattcaatccaatc

SEQ ID NO: 33635 - DNA, 2070 bp, Cannabis sativa
  modified_base (87)..(87): a, c, t, g, unknown or other
gggcaaggctaaagttgaagagtcctgagtacgagcaggtgaagattgtacatatcgaggcgattaggcctggagcgtacgatcttngggacatcgaggcttttgctgtatagtcactaggcggcaaactttgattatatgtatagcgaacttttgtaaagtattttataaacgggatcccgaaatattatatatgtaatactttaagtttttaattaaataagcaaattttaattaatcacgatttttaataacctcgttgattagcaacgagctgcacagtatgtttaaaatcacgttaacacgcctatgctagttagggtgttacttattgtctcagaatatattgtatatactatatatatcatatgtatatcaactttatatgccaagaactataatgttatacttttaaattcactctagggttcggtttaaaattaaatcagctaaataaaatactataatgagctttaaaacaacctcagggttgaaccctcactaaggcccatgagtttaaattttgtcattattttgttttcttattgatgttttattcaaaaatgccatttatctattctaattatttaaatgccaaatttttttatttaataattaaaactaattatttaataaaattaccatataaatatatttattgattaaaccctataaggtctcttaattaataaataaatcctaaattctctttttttttttttttctcaaatatgtcattccttagtaaaatttataaataagacacattcttagttgtaatcttaattgattaattgaaacaaattaattgagactacaaagtaatattatctcagttagtgtgggaaccatgggcctatataatcaagctcctaataagtacatctaaaatttattgagtaaatttcctaacttattaattcctcttggcattacaatagatttgtaattgcactcctaattacatagaatgctctatatgcaaaatttagatactctatgaattatctattatttcaatcacaataatcattgatcctctattgacggtttacaatgagtagggacaaaattactattttacccttcaatatttttatcctaaaaatacatagctacatgtaaatgatactttgagaaactaatataattaccaaaataagtgctcaatcatttatcacgttaagaaaagctctaaggaaaccatagttttacttctaaatagttgtagaagatatagatttcatatctatgattagcgctcccactcaattttactaccgtattgccaagatgtaagtatcggacaaatcatactggtaaggtgtaacaaacaagtcaaagaacacgtataatacaattgagctagaacctaaccatcttaagaatgagatcaaatgacctgtgatcaactaaatgatattgacatagaaaagtgttaacattaaattttgccaaccgacagtagagtcgtatttataattgaaattaccacgtgtacactattagaactggaaaacaaaaaggacacaatatttttatagaggttaagcctcattagttagcgggtaatgacctactccccttgtagttatattgatactagagataataccactcagatcataagtgttgtggattctagagtggctctcttaagattacaatagtgagaataagtagaaaatctcaagtagaagagatgagggagacttagtcttttctacactgcaaggggcctgtagaagtgaaaatgagttagggtttcaagacttaagggctttgagcttaagacatagcatgtagcacttagagcgtaagacttagacttcaaagcataaagagtttaggtttagtttagtgccctttatgtaggagagcatacaagtgatgataggttgatatctcttaaaaagagcagatataacctatttgatacacattaaattaagaagtaaagaacatgttgaatagtccccaataagaggtaaataactgaagttaatctcttaattttgtgggttgttgaagcccaatttgtagcttgaaatattgtctaggctaaaagct

SEQ ID NO: 33636 - DNA, 1509 bp, Cannabis sativa
  modified_base (1228)..(1230): a, c, t, g, unknown or other
tacccattaagagcatacccattagattatagtttataatcaacatacttgttagtaaatctaaatcttggtaaaacatattctaacaggtatatggttctttcaagttctctctagctttcttttatggtgaattaatagaatcaatatgagtcgtggacttgaggaccaataccttatatttatataggtgacacattttattaaagtatttatcacaattaattattagaatttatgatatttaattaacaaaattaaattaagtaactataatatttgttaattaaattagaatattttttaattatcaaataattaattatattttatacatcaaatcattaatttatttacttatataaaatattctaacatatattttaactcttcgatcgttggttgattcaaatatttagccatttattttttaattatatggacaaagttgagaggtacacctcttattccactagataaactttgtaagactatgataaattaaaaataatatatttattcatttgttcttgactgaataagatgattgtataagagtaaacatgacatagagaaatatatcacttcacttgatagtgaggctttccactaaatggttaatggtttgattttgtactcaaaaaatctatatatttgcagcctttgtttgaaaacctcaatgatagtggaatatctaaaggcagtacctttagttttaatttctatataataatttttatatacaaaatctcgttatctaatcatttttgttaatttaataaaatattttaaaaatattagaatatttcattaaatttaactgtgttgtgttagtaaagttagtttaataaatattaatattatttattttaaattaatttaaatatacataagtattaatatcatttattttaagttaattgaacttatattaatgctaaattaatttaaatatatataaatattaatatattattattttttatttttatttttaatattgagagtatgttcaattttaataatcttaagctttatattaatttttctaaaatttttaaaacattaaataatattttttaaataaaaataaaaaattaataagtgatttccttcactttataatttttttgtaaatacaaatgataaaaatacaaactaaaaatataactaagtatacgtgtacaacacgtaacaataacctagtcataataataataataataannntaataataataataataaaacaaacaaacaaacaaaagagttcaatgtttggatcaatacattgttgaatattgttagtaggcggtgcctaacaccttttatagatagcgccctacgattgattagcgatattttctaaaaattattatcttaagttatgtaggactcaataattatactgttgggttttgtgtcctaaataaaactctattttaatgtaatcttgaatattcatttatcaataaagatacagatttatttcattacttgtttaatgtg

SEQ ID NO: 33637 - DNA, 2407 bp, Cannabis sativa
gatatccaattacacacctaaatttcaatattaacttaaaaatatgaagaaaaatgcgtaaaaactaattattaccttttatttaagtttaatatttcataaatatactatcgttacaagtgtaatgtagccaaattgttttaaataattaaaacaacaatatttctaagtaataaaataaaacaaaacatcatgaaaataaatacacaaaacaaccaagtgttgtaaattcaacacacaaaaaaaaaatctaataaaaatataataaatatgtattatatttttcaatattttttattatataaataattttttaacatatataaatgtaattggattggatcagtttttaattagattttgagattgacatccaataactgatccaatccaattagaatccaacttttagcatctaatctaatccaattgtaattggatatccaactttttgtaattggattagattggatcgactcggttcaattggattagattggatgatgcccacccctaatacttattctacctaataattagtcttaacattataacttaattacatttgtgtcattctaattaaattgttctattattctaccaatttagcaatttcttttttatagtagaataagtatatttttaattgtttagctttttcatcagttaaacaaaaactacaattaattatgtatttttgtaaattataaattttataaagtttacatattatttataggagagttataacacgagtacacgtaatttttttcttaatgtatgttgacactcttttaaatttgaagtcactaatattataatggtgctagatatattattattttccatttcattttttaattaattgataatttttattatatattgatgaatactttagttagttttccttatgttacttatttgaattaattgatgatctcattctttcttagttttgaatttaataatttattattttcgatttactaataaattagaactattttacaaatgagaaataatttaatatttttttattttttattcacaattatatattgtgactattgagttaattaaattattttcattataatgttgtagtcataaattaatattcattgaactaattaaatttttagtcattatttacaaacgaaaataagctctaatatatttacatattgagttaaagttgattttactttaattgtatgtattatatcagtagtttattgatgttggacaaagatatatagtgataattaattttgttcaatttaagatgggagaattaaaataaactaaagaactttatatctatactccacaaatttatttatacaccccaattgaataaaatcaactaaaataattttaaaattcacacttaatactttttttaaaaaatatatttgttctcttgtcatttttttaatcttgttttcatatattttttttttaaataatagctttattttatttttactctaatatttttctatattattttttaatttttttatattaatattcaaaatatattctattttacatgtatacatcttttcacaacacgagaaagaaaaaaatgaattaaatatatatatatgtattttatgcaaaatatatttatattttggagtgtacatattatttcacttaaaaatatttattcttttatcaataaatgaacaaattatttaattaggagagtaatttaattaaaatggcacaaatataataaattatgatactatgattagatattaggtataaataaacattgtttaaaaaatgacacttgtcattagaatatagagagggggcaaaagagagtgtaaattagggtgtgattagtactcctctttatagtattagaatttgctacatatttctacacaatttaatctagaaatttctatacacttgtcgaaaaaaaattatctaagaacttaagagatttctagattagattaagtctagagtatactagttatgttgaactctagaaatatttagatttatttggatataattccttctagtaaaagaaggatctagagaaataattatgaccataaaatataaggggtgagcaactataaataccccatcaagggtttcaagttgtaaccaacacccaaaagtcaaagttccaaactatcaataagagcttactactttacatacaactctctcttctaagccaaaattaatttcatacactaaatcaacaactactcatcaacttcaatacttcactacattaccacaacaaaccattaaccacatatccacctattctaaacaaaaccaatagaatttcattctcaaactatcacactacaacgctaaagggcattagcggcggacctcggccgctattggtgtcctttctggc

SEQ ID NO: 33638 - DNA, 1548 bp, Cannabis sativa
aaaataaaaaataaataaatgaaaagttattttgttgaagtttttctacgtacccaccatgcatagatagagctcaaattatgctctatatttttttttatatattgtttggtaatttatatattcattacaatattttggcaatcaaagccttgagtgagtttgaaataatataattaattctttttaaaagcttttaagtgtatttttttttttcaaatatattatacacttttaaatatatttttcatatgtgatactatgttgccacacattatcatataactcgattacaagtaatacttttagctcacaattgttcttttggctcttcttttccgactagttattgaatttagattagatactcgttaaaattttaattaattagttctaatgccatattgttagaatgtggaagagtggtgggagaaagtaagataaagtggcatgtatgttaagatgtgtcgggccccgttcctcccacattgttggatcgacacttcactttaactctcacattagtataatattatccgctttaggtttcctcacaattttatttttgggcaccttcccaaaaggcctcatactaatggagtagtatgtggtcttcagtttgagtatgtcgatggaaatggaaaagatcatgggtatatatggatagacactactccattagtatgagaccttttgggaaggtgcccaaaaagaaaattgtgagaagcccaaagcgaaaaatatcatattaatgtgggagttaaaatgaggtggaagcccaataatgttggaggaattgggcccaacaagtagtatcaaagccaaaaattcatgagttaagtagtgggttgcatatgcgatgtgtgagagaagccctcaatatgatgacctcacaattaaagatctatatagtgtcttgtatcgaaagtcaatctaatgtagtcaattggcgtgtcccgtttatgattacgatggtacaagatggagatcgatgtttagggtagttttattggaggggaggtcacgagtagtatgtggtccttaatttgaggagaggatcgttgcatacccaacacgatgtatgtggttccatctcaaaaccagttggtcgtcgctttgagttctttggcccttgagataagcaaaaaagggaagtacggttttaattttttgggttgtatactcaattctggaccttttttctagggtgagcttgagtttagtttatgtgttaaactttggttaaagttagcattatttttgtgttaatggtgtgcttttatgggggaatttatttttgtgattttgctaactttgttttaaggtatttgaaaatttgaaaatattttgattatctaaagtgtcaaaggcaaagattgataggttttttcttgacaatttagttgtcaaaatattatttaatttattgtaaattaaatattgatttttgtgtgttaattttgtggctttgattgctcttttcttttaggaaaaattttatttacagttggtatcttttgttttggaaacttgccttacaagagaatg

SEQ ID NO: 33639 - DNA, 1369 bp, Cannabis sativa
gaatttcaaagtactgtgagttgttaagatctattataatgataatgataatgataatgttataatctactttgttataatcacaaatatgtaaagacttatattatataatattttattttctatatatttttaattttttttgtaaatataaatttataagcatttgatgataaaaataatttatagtatttttatagtatattttatcaaatataaaaaaaattagaaactaagaaaaattgatgttgttggttaatattaaaataaaatataaattatttttttaaaaaaataatagatttaataattatttattttattataattaatttattttaaatatttttattttttttaatatataatatacaataaataagtaaatatagttttagtaaaaaaatgaattatagttttttaatcaaaattgttttttttaaaagttggattggagcagccttagcttttagctttagcttcttcaaaaaattttcaaaaaactattttttaactccttactaaacacatttttatcacagtttttttaaaaagtagcttttagctttttcaaaagctgtgctaaacggacccttactcacacaatatatattatcaggtatttttacaatacaccccactagaatgggtgtagtgatgcaacctctatctacttcggtatttagaagaattttttagtttaattttttttatagtcgtgtacgttatagtattttatgacatcctacaaaattttgaaaaattcgaaaataatttataatgtagaaatcaatattcaaaccgtctattttacactcatataaaataaaaaagttactcgtgcaacagactctttgaaccatatttttagcatgttaaatttttttaaatttctcaaaattttgcaagatgtcttaaataattacaacgtataaaatcataaaaaaaattcagactataatttttttccttatgccaaaacagataagaatgtatcggtacatccttttcaaagaatacattgtagaattcctatattatcctatctaataaaatgtaatggattacaattttaatcttcaatattatatttttttaacttataaataatataacccaattatataagagcgtgtttacgtagggagagatcatacaaaattaaagccaaagatacacgaacctacttaattaagctagtagatccttcaaaaaaagctagtagatccttcctagcagcctggtcagtgtagcttagaatttagaaattggaaacataatgttcatcacccaatgaattaattaattaactaataattaatgataattaaaattattaaaagaatgcacgaacgtacatatgggtgtt

SEQ ID NO: 33640 - DNA, 1686 bp, Cannabis sativa
ttgaaagtgctcaaaaggaagccaaagatcatcgcgaggccagccaaaaaatttaggaagagcgcaatgaagacaataaaaagcttgagggtgctgaggctgatgccaaggggaggtgcaaaaacgttgcaaaatgctatatctacagagcctggctagccaatccaaatatggacttcaacttcctgaatgatggtactgtggaggtgtcggcttattgcgagcagactaaaaagacgaagcagtgaattccaaagaagaagaagaagaagatccatccaagtctccagccatgtagacttggtttttattttatcatatattttattatttttttaatttagaaaaatggccctttggtcgagacaatggttgccccttgtggcattttgtgaaaacttttgcatcgttggatggccaactttgcttatttatgtatttgtacctttcgtgcctcgtatcttatacttgaactaaatatgtttgcttattgcgttttatttcacaatctaatcatttgtatcttgacttagattaagatactttatgttgaatgtgtttccatcgtacttggtttttttgagatacttaagtagttattaatctattgtgtttatacgcgagcagttttaattcgcgagcagttctaatccacgaacagttctaatctgacttgttatacgcgatcagttctaatctgccctgtatacgtatatattttttttgaacaaacttaaaatattttgaataaatcaccttaggaattattttgaatatcttttgattgctcctatgaatagttaattgtctattcatattttagcttaagtattatttttcaaggcattcgtgtgcctcgtttataatacacgccagaataacgcaagccgttaaatattcaactcgcatatagcttaattttgttttatgagttgatttcacttacaactgctatttgttatttttttttctttttaaggaaaaggtttttcaattcttcgactttatattgtccatagacaattttaatcaattatcctttcctttgtcgaaatttttttaatttgtttggtttccaatatatatatgtatgcccccaagtaattttaaagaagataaaatttgaaattactttatcaaactttaactttcttcataataagaatttgactatacagagataaatatagtatttacattttgaagttactagttataaggtcataaatgttcactatgtcagtggttctttattagcgagctgttaagctacgataatttgtaaaccccagttcccacgaccgcttcgatgacataaggacctttctaatttgggttaaacactccagcaccggatctcgcgtatttgtaaaatacacctcttaacactaaatctccaaccttaaagagccttttttggacacttttttttaaaatacctcgtgatttgatgttgataagctgcattagttatttgcgactcattacttctttcttcaagtaagtccaaggacaaattcaaaagttcttggttttcttcttgattatagaattcacatctattggtcacaatgttaacttctactggtaacatttctttcgagtcgaatgccaatgagaatagagtgtgtcctgtcgctgttctctctattattctctgaccccaaagaacttgtggtagttcat

SEQ ID NO: 33641 - DNA, 2477 bp, Cannabis sativa
acatggatttccacttatattccaagtggttgtatttggttttattccccactttccgaataacgtatttagtgctctcactgtcttattcataaattcataagtatacatgttataacatctcaaatggaagtgtaaataattgataaaaagttaaaatatactttacttaacaaaaagtgtgctttaataatgtgtaaaaaagttatataaatttggcacatattaaattttgtgtcaaatttaatacaatatttactataatataaaatttacaccacaataaatacactacttttttatttacatttatcttatttctattattttatatttaattattacattaaattataaaatatttatattatttttttattatcttacatattaaactaataataaaattaattataatgttattagattttattttatttttttaaaacaaaattaattaaatattaaattttacatttattttataattatgcacaaagttaaaatttgtgcaattacaaattaacgtgatactcatcacttttatacttcaaacacctgaaaagctggaagacttaaacatgagtctgccacctttttcaaaaaaaaaaaaatctaaaagtgacttataatatgaaagacagagatttgaagaagaagtagtaaaaggtaaagaaagatagatatgtgtatacaaaccttcagaaagatctgttgtggcgttttgagtttgagccatggagggatgaggtgtcagacaaattaagaagaagacgatgaaggagcagcagaggaggctccacttaatattatatttcacataaaacatctcttccaatttcaatatttctgattcttctttacttgccttcccaaaccaaaacacatatcatcaatccatttaactaattcatctcctctctctagaaactgtgctacttcaacttgttgtgggtactagtgttgagagaagatgcaggacaggtcattacattacattaaaaatatctatttatgtacttcatttttgtgtaatgtttgtcctttttcgagtgagaaaggataggtcaagtcaactatatacatatcaatatcaccatcagtcatgtcaagaccaagaacattcaggtcttcaatgggtgacctttctttaattcttttattaagctttatttaattgacaacttcatttattacatccatactcatgtatttatttgctataaatgcgcatgtatattaatctctttaatttcccaaagaataaataataaatacaaattgaaatcttatctatatatatatatttataaatgaaaatgacttttgtggttaatttgtgtagataagaaaagttttccttgacattttcttaattatttgacgccgaacacaatagcaaagcaatttattgctttttccactcgaagtactacatctatattataatgcaaactggtaatatagtggctctttgggcgactattataattttttttttgtataataacatacaataatgattaattaatataataaataataactcaaccttaaaaaaattattttaatatataataatattgtaattacattgtgtaattacttattattagtagtaattttatttatttggaaaaaaaataaaataaattatttttacattttaatgcagtttttatttttttatttttacagaaatttacatagcgactaatgaaattacaatccaaattcatatagcaacccacatagaaattaccggagcaatccaaactataaataaaaaaaaataaaaaaataatatatggagtgattttttaaaaataaatgaataaagttacttttaatgtaataagtaattacacaatgtaattttatttattaaaaattaaaatatttatttaattctattaaataaattattaattattattaggatgattgaaaagttttattattttttattaagaagttgaaaatttataggaatatgtatatatatagaattttaaattgctttcttaaaaaaatattaataaaaaatggtagaaaaattggagtgttattattttttatttaaataaacacttttttctgtaatgcatgatctttatatttttatcatttaaaatcgttagcattattgtattttaacagttgttatcatcttatcttatttatagttatcagttcattattatcactgtatcttacttatatatagtcattattgttattatcaccgtatctcacttatactcatcatcattgtcatcatcgtatctctcacttatagtcatcatagttgtcgttatagtttatttcttataaaaattatgatataaaattaaaatcttaatataaaatattataaaatagattgtgtatattaaaattgaaaattaaatatatatatttatatagatatggaggagatttcaatagttacattaaatatgtaaccatcatggtta

SEQ ID NO: 33642 - DNA, 3621 bp, Cannabis sativa
  modified_base (465)..(467): a, c, t, g, unknown or other
tggttggtaggtgctgggttttgattcttgtcttcttattttgggttgttttaaaaattaaaaggtattgattaaaatttgtaaaaattatgtaggattttttctatgcattacctaaaatgcaatcaaacggataaaaatatctattataatactaataaataaatcaaatatttttaaaaaataactaacaagaatagtataatttaaataaaaagtacatttattaaatattatttaatttcttaaatttataaaaacttataacatatattaaaaaaaattaacataatttttgacatattgattttttttttatttttataaaagtcctaaaatatataacacttcaataaagatactattaattataatcaaatattacgctaagtttggttatgtgtgaaaaaaattgtttattatatagagataaaagagttaattatattgtgtcaaaatttcaannntaaataatatctcagagcaaaaataaaaaaaaatatatatttattttaattttttataaaaaaatgtcctgttttaaatttcgccctaggcctctcaacaccttgagacggcctgctaaaactacctctacaaggtatcaataaatggtatagccataatttttatcaaaaaactacctttaaatgttaattttgaacttggatattttacactatttagcttccctttttataaaatagattgaaaaaataagctctgaagcccataattatagtagtatctaatcctcatatgtttcacattgcacattctcttcctttctaaactgtgcttcaaatttctctttatgtagacctttattattctacctttgagtttcctgctctgtttccttttaatgaaacagtgtgttcctctttaagacctgcaatattataggatcaacttcttacaaccccttttacttgtcttcagtttttataaaatctatgtcttgtcctcaaatgacttcagtagcgagtatttttaaaaacataagataaattgatataaaaacttaagagaaaagtattttttttttctagtagtgcaccaatgagaggagaaaagaagatggaaagaaaaagaagagaggagaaggggatgaaggtggtgagccataaatttaggagaggagaaaaattggaaagaaaataagagaggtggcgagccatcaaggagcggagaaacgaaaggaaagagagggtagacgagaggagaaagaaagagaaggaaggaaataatgaggggctcttggggttcacttttgttgggtgtattttatcatatcatcatgtgctcaatgatagggttaacaatgtccaagcttcaacataatatttttttggacttctcttggcccaaatctccaaaccaagctaagttggtaatatcaattatgggtgtgggaaaagattcaccagtgtagagaagtggcatgccgcacaactgaatagagtacatccatttttcacacacgaacactaaggcagcccatgtccaagctgtcctacactcgtccaaaaaagctaacgtacgaacacatgatttatctctccatcgactttaattaatagtaaatatcatattgtaacttataattaacacactgaagtgttgtttaagttattgagtaatgcatatctttcctttaggtcagagattagactagtaaacatagttaggttaaaccaaattttcattttcaaaaacaaaaaataatcgccaaatcaataatttattgatttttgaaaattttccataaattatagtacaaataaatttatgataaacaataaatgaggaaaccaaaaacattacaatacagagcaagctaatacaaatttctctttttcttttatcagatttattatttaaaaaaaaaaaaaaaaacatacacactgctacatatatttttttattcatttttattaagttaaatctatcaggtcgtggacgagtcaatatgatttttttggtcatgttcatacttatacatggttgcacaaaccaagtagtacacgaaattcactagtccaatggtcgcgcacaaccagtacacattatctactcgcccttggtttatattatcaggtaaccaaccagttgcactgtttattaaatcagtcactacagcactaagataataccctaatccaattaaaagtgatatcatagctgttgatgtacttttcagtgattctggaaattcttggtaatataatgcaacttgtcctgggaattgtaatgcctcgccaaaccccataatggctagaatcaacaccaaccacaatgctgacatgggcaccactgagccagactggtcaggcgtcacaactaacccatctgctcgaaccaagtgtagccgtcttgattctagtagggcagacccaaccaatcctaatatattggttgcatggcccattcctattcgttggaggtgagttaggggcttgccacttatttttttccacatagggagcaagtaacggttaatgatgaagattgaaatggatgttgatatgaggctggagactaagaatgtggaagctggaattttgatggagcccaatcgtctgtccatggttaaggcttggacagttgagaggctgttcactatggcgattgtgatgcttaagagaattccagttgaccatagtggcatgatttttattaccttttttaaatcttcgacttcttcaacagtgcataacttccatgattttgagtaaatgccgttttcttgattatcgttttcagtttttaaggctgctcggttgaggaacctacatataaataataatacaatctttatgtattagtaactatatccaaaaaaaaataagggataagtactataagaggtgatataatttaatattaaattttacatattttaatttaatcaatgcaccaccacatcaaaaatatgatgttggtctatataattaaatataagaatatagtgaaggatgtaataaactcaaaagatttataattaaatgaatgatattattagaatatatgtagatgttatattatgatcggtgggtaggatttgactaataacttattgttgcaatttgcattatttgttagtggaaaatgttatttcatagcgagaccaattaggtgtgtttatcaagtgcaatacgatatcatttaaaacttttttttaatgatatatcatataagactgtatatctactatttatatataaattatagccacgatgcacattattggatatgtatgtaccacaagtaattattagatgacacattattcctttgaagtggagcaatatgagtaaaccacaagaatacatcattttcagtgagtcttccaatagaagaagtattcacaattattaatgttaaaaaggtgaaaagtataaatcacacttcacaaatactaatctctatatatatgatctaaataaaaatatgtatgtgactactaatgtgataatttttaaatcaaattaagtagcactaaagatatataacgagagagggaatattatgccaccttgctgagcatccaaaaaatttatttgctgagacgtatggtgatggttacacaaattattataaataaatatgttttacatt

SEQ ID NO: 33643 - DNA, 1867 bp, Cannabis sativa
  modified_base (1814)..(1819): a, c, t, g, unknown or other
ataataataatatgttttaacaaaaataatatattgagatttcttaattagggttacccagtctttagtattttggagggcaattcgtacatcctccaactcttgtatagagctctgttcgttttttttttcaatctgaaatagcaaggtgatacatttagggactcagtgtatttttatttatatacactgcaagatcctttcttttttctatacaaccaaacagagtagttaggtttctcgatagttctctgataatctcagggttattgtattgtattgcaagattaagctttattgaatgtgccaagaggtatattttagacgactgtacatacgtttagtttactgctctggcttttttattattattattttgaagatcactatgagttattcaaaaaaaaaaaaagaagaagaatatagtgtttttcgttttgtggttgatcctaataatatggaaacttcttgttaaggttgggagtatgtttgatctttaaattattcaagctaaccagttgcttactaacaccaaggagttgctcaatctctttaatattgtttttatcagtaatcacaataggttcacccctgtcctttatactcattacatgtctgaatgcatctagtgttattgggatttgtcgtccatatatgtttagagttgatgccgtagtgtccaccatcccaacaatccattaaagtaaagaatgtttgatgtatggaccatcatcccttatgcaagatccgaaatcggtagcgattatggtctcaatctactcaggcataaaacactcataaattctaaaaaagtcgatcaaaggcacaccttccatgtactttcgattcattctccacctcttcttgttccccatcactgttgtgctccactgtttctcctcctttacatcggttcttcttttctttaatgtttcaccaacctcagtcttttctgcttccaattttttacgcttattctccttttcaactctttgcttctgtctcaaggcatgatcattatttaagataacactctgcaagatgtgattaaatgttttattattaaccttttaatcattgttacctacatactgaataatatattttacaaaacagagattgtacgtaatgtgaaatatgcatacccactatattacctatatagtactatagataagtgtcaacctgggcgctggatccccgttctggccgttaggttgatccgtatctcccctaaaagcacttgtttcctcatttatgaagacaaagaaaaaattcttgggatagttcttcagtattgcggatggaagtgccccatgtagacaatatgtcaacctgggcgctagttgcatggggcacctggtgctccgggtgctcaaaattgaaagttctttgattttgatatcgttgccataaatatgttcatgacaggtctaattcatgtcccagtacaaagtttgactcattttcactaagacgggcccgtaaaccaaaatcctagttgggttgtcaacttgggcactatgcactcgtattgacttccaggttattatttcgtgtattttcaacttccagaccttagatttggattctttatgtctttgtggtacagaatactaaaagatattgagttggaaacaacttagtgggatccaaacacccattctggagttctcgaagtcaacctgggggcaaaactagggactcttcctaggtcgactgccatgacttgagactactcaactttgggatgttttctttcttgccacgtatcaaatattgatgtctgcgttgttggaaatattttaccaggnnnnnnatttactaccatgtatgtttcattgacatcctaatatgaattctaaaa

SEQ ID NO: 33644 - DNA, 1347 bp, Cannabis sativa
actgtaacgtgccttagcattagggcgttacaacaacccaactaaactaagcccatgataatacattacatatatgtattatattagacaactacacaaaatatttgagcccactcaagttaatttgaagatacttatataaaaaaaaaaaaagttaatttgaagatgccatcatcacttcaacatttatttcaatttttttattggccgagttgatatcaagtccaaattagctacaataaatctttatttgcattcaaccagtagtaacgtgcaagaggaccaccaccttacttcttccttcagcatcgcacggtccccactccacctgacgcccccataacaccatttcatctgcttttaagtcatttctccactactcacactacgtaaatatcagatttgagaagaaatttcgcaccataaaatggagccaaatacaatacaaaagacatcagattttagagtaaagaaaatacactttgtcattttattttctctcttattactattttaattatacttattttagtgacaaaaatgagtgtattagaataataatattagtgaggttagagtgtagctattgtacttctaattcttaatattaatattaattttttatacttcatcttcatatctcatttattaaattgtttatattttctaatttttcttctaaatttaatagtaccttttatataagttcattcatgctttttctttttttatgtaagtttggctattaattattttggtatatttattatattgtatgtcgtttactacattctactaatagtggtattttgtcgatttatgatatataatatgatatgctcttaagtaagaagcgatcttcaatttatccaagattaattcatttgtgattttaatatatatcttccgtttgtaaatggtgtagaattgcaaccatatattgaattaacatcggtattagaaataagatttgcataactatatttctaccttatcgagctctttatttgatcaactttcttatctcatcatttctattatttttagttcattccaatttctactagtttctacctatttatactaatatttagttgtgatttacttccctgagaataggataaagcacgtttactaccgtgactgatgtgtaactaattgggcgacatcagtaagtcactcccggagtaagagaagtaggaagaaccaaagtcggagtgaagctttgaagaaacaaaaggactatgatattaagtgtagatcatctatagaggatctttgactattaggattgtaacaatgaattattataacgtatctatatcttggtacatatagagagttcta

SEQ ID NO: 33645 - DNA, 1797 bp, Cannabis sativa
ctactggatgaatctatttatgcttcccctaaagatgactgctgccattgataaaagttgtaaggaatttctctggggctcaaatggaaatcgcagcaaaatgcacatcccttcttgggagaaagtgtgccttcctaagaagtttggtggcattggatttagggaaggaaagaaatggaatgtttctctcatggccaagtatatatgggccattttgtgcaaaaaagacaacttatgggttaggtggatagatgccatttatttgaagggtcagagtatttgggatgttgaattcaaacaagatgccaactggtactacaagaaacttcttcgtctccaatcggttattggtgaagctgacattatgatggcagagaagaaacgtaaatttcaacctaaactgttttatgtctcgttgatccaagagcagagtgctgaatatgcgaggaatatatggaatagattgatcttcccaaaacacaggttcataggttggcaaattgtgaatgaacagctgttaacgagagacaaagtcagcaaaatcatgcctattcctactgatatgtgccctgtttgctgtactgtgatggaaactcacagccatgtatttactacttgctgctacacgcagagagtaatataggaagttatgtcctggtgtggtgtcttttgttggccgaacaacatcaacttatggttgtccaggccttcgaacaacttgagggacataattctgaatgctgttgtgttagctacactgtattcagtttggaagaaccgcaatgggtgcatattcgagttcaaatgcaaagctgctgggtctttaagcagggaaatcaaagaggtagttaaacaaagagttgtaagttgcaacattagagagaagggggctctagacaatcacataattaatgtaatagaaagttggtaatgctgtatagcttcttgctggttttgtagctggttgtggttctgtgtaaaactttgctagtttgaataaagatcctttcttgttcaaaaaaaaaaaaaggttagcttactaaatagaaaatgacactaaaactaactaaaattaagcaaaaaaacacattttcactactcttctcacaatacttttagtttaaaagcataaaaataactctataccataaagttatcagtcgtgtttcgcaaacctaaacctatgaggaatgtaaggaataagtgggatcagattaaatattgtcactttcacaaggacataagtcacatcactgaggagtgtcgacaactgaaagaagagattgagagtctaatctccagaggttacttttgacaatatgtgaagaatagaggattgaggaaactcaacctcataaccaaaatcaaaccagaatgtccagtaaccacccataaaagacgaggacatcttggtgaattctagggggcctcactttgcaggaacaagtaacactgcacaaaaatgatacataaaccaagttaaaaaccaaacttcagcttttgcaccgaaattggcaaaaagaactaagactggggagcctccaataactttcactaataaagacgcgatgcctgtaaggttttcccacgcatatccactagtaataactatttagctagcaaataagaaagtgaagcgagttttagtgaataatggaagcttagtcaacattctgtataaagaaaccttaaagaaaaggggattgaaaggaataactctaaaaccatgcatggttaatttatgcagattcacaggggatagcattgcaagtttgggaatagtcgagcttcccctaa

SEQ ID NO: 33646 - DNA, 863 bp, Cannabis sativa
tactttaaaaaaaaaaaaaaacaccacaatgcaatttatgctaaaaaaatcaaaattaataaaatttttgaaccaatttacgaaagaattattttagacaacataaaccttgttaactttcagaattaaatgtaatttcaacttggttaagagagatttactctcctatatatgttgatggttattggttaagctactgaaactagaacaaacactactggtttgagaactgtgattggggagggatcttcgatcctaatcttttttagtttcttcgaaccagtttcttgcaaaaaaaaaagaaaaaaataagtaagatttaaaagaatatcatgtgcaagtatatatgtatgtacctgaatttttcactgggtcgggttttagtttgaaaagtcttattaggagtcccatcagcagaagaagaataatagtactcgttagatgcctccgtaaagcttcctttgaatattatattccttttgttaatggctgcaaccattactctagccatgctcacaaaggggcttcccttgggcttcacatgtcgatagaatttttttccaatcaaaaacacggtcaacgcaatcaacgtggagactagacaaatcccaaaccctaaaccccaccctacattatcctcgatgtacacgaggaccatgaagctgaaagcgttgccaatgaacaagacaacgaagtaccagttgaagaagctggcctggtcatctcctttttcgaactggtcagctcccatggtggcaatcgtgaagcgagaccctcccactccaactgtggtcagccccatcgccgcgtacaggatcaaatattgaaaatttgtggggctctcgcatggcgatgtattagtt

SEQ ID NO: 33647 - DNA, 2694 bp, Cannabis sativa
  modified_base (678)..(682): a, c, t, g, unknown or other
tgagccccataccctccaaaacctccaggtattatttcatcttgttcttattttttttttttgttgaaactctgatctcggtcatcattttggatctctctcctttcttttctcaggttgacagagctgatctttggtcattcgtcggtcagggtgcttctaagttcttggcattttgtggtgcacgaagattcgttattggtgttcttcaatggtttttttaatgctgtgaacccttgttgatgtattaatttgtatattttgatatacatttttggaatctaattgtaaatatttcaaaaaactaatataatttttttgggttaatttttttagtatattttgacttttaatctcgttatttcataaaaactggaatataaagggattaaaagtctctttttatcccagattttatgtaataaccgggatattaaaagtcccccttttatcctagttttttaaagactttttatcccacaagcatatattttagtttttattttagtgaaaattaggataaaagccttaaaaactgggattaaaggcctttgtttgtagtagtgtgaagggattcaaatttagatctgtaatcgtctgaggggaggcaaaatggtcctttgtttgaggggcagattgttgagtgtacaaccaaagtcccacattggctagaaatgnnnnngatcttgggtatataaggatggactctatgaatgaggccttttgagaaggtgcaaaaaaaaatcctcgagggcttaggcccaaagcggataatatcataccaataaagcaatagatgggttttgatggtccttacaacttcctcttaatattgtcacaatatcctttgtaattcactcttctaataaattttatttgagacattaaagtgttgaaatatcttagttcaaaccaacaacgaatgctctctttctctcgatgagagactttataataataagacttcttccgaacgttgtatcgcacatccaatgaagaacacacaacgtgtaaataattaaaaaagaaaaaaaaaacagagtgccaaatacaaagatcacaaaagataaagttggacaccttaatctccacaaaaaaaaaaaaaaaaaaaaccttcaaagaatgaaccacaattaggttttcaagagatgaaagaggtatcattttgctattggtatatgtctatttatagagataaatgacacctcaaaaccgagctcataagttctaaatacaaagaaaaaatcaataaatagctttcttacaaaaactcatcaaatgacgaaattttgtttgaacagatatgaaaagtgcaaagacaaaatcctaatttttcaagttagcattatgaatctagacaccatcaaagttagattcatcttataaattctccttggccactaagataattagttggatattaaaatttaaacaaagtcaagataaaataatagaataagataaatatagataaatatcaattacaatgaaataccacacatagatataatatttatttcattaaaatatacctaataaataattttattcttcctatataaaatcgcgatctgagtaagaatatatactcaaataatacaccacatgtaatgcattataagtaaggaaaaatctcacattaaatatgaaatattctagaaaaagaaactcacagacaatttaaaaagatctttgaagaagcgaaggtagcaacaactactttgtatttatctggggataccaagttatggtggaaaatgaagtacgaagacattcaaaattttaagtgcagcattgaaacatggggtgacctgaagaaagaatcaaatgcataatttctatagaaaaatgtcgcctactgggtccaacataagctgagagtgctaaatcgagttgggacagcctgagaatatgtaagaaaattctctgggttgatcctcgatatctaggacatgaatgaagtcgataggctcttttatttccttgaaggactcaatcaatgagccagacaagagtacagaggcagcatgtgacagacctagccacgactcaagctgcaaacaaacggctaactaattacaccctaaagcattcataggcaaagcagatgaatccccaaataatctctaataatattgggagtatgaagtataggaagcagtgtcatggtaagagtgggggaagggaaaagaagactcttgaatctaactcatcctttaagtgttgtcctgctaatggcaagaagacccttaactgttggctttgtcaaggaccacacatggtagatgcttacccccaccagtccaagttgagtgccatcaaggcatccatttctcaagaggagtaaggttataaggatgaagacgaagatgaagactacgcaccaattccagcaacagggagctacttatcatggaaaagaaaccttcgatagttccagcaaaagtaaggaaacccctggaagtcaagcttctttctaccctgcaacaaaagaggggtctgaagaagaagagacaaagttttgtcattgtatctgccaagttcgatgataaggtggaagaatccccccaacctaaattttcgcaggtgttaggtgagtataatgatgtgatgctagatgaacttctgaagaaattactgttgggttttgtgccctaaataaaactcatttccatataatcagatttacttatt

SEQ ID NO: 33648 - DNA, 2239 bp, Cannabis sativa
catatattagctaataatcatacaccgaataaatataaataatcattattatgaaatactatacatacattatagtttatctataaacattataattaacaacaaaaaattgttaaaatattctaatctcttatataagtataataatatattgttttaatcactctttatgaataattatatattagataataatcaaataacaaattattttaataattatgtttgtattgatgaataaaaattatttgcaagcatatattataatttaagtataaacttgatgaacaattaaaaaatattagtaaaataatttgattcttttattaattatcataataatatagttatttatcatatataatttaatatacaaaataattatttacaatatatataataaaaatattatttttaattttataagtataattcacgagcatgtataattttactagtaaatccaaaaataactaatcaaaatcccaaaactaaacaacaaaagaatattatataatgaaatcagcagcattaatgaatgatattattatattgtagttgtagcttggtacttctactacgcactccaatttgacaatgttcaaagtcttcttcaacttttcattagacacattcttcatctcattcaagaatttgaccacttcctccttcagtggaatattattactttcattgtcaaacactcctgactccatctgcagtacataatacatatatacatatatatatatatatatataccctatattattgtcatatatatatatatattatgtatacaagatttaatttcagaataattaaagtataccatcttagttactgaaaggtcgatttcattgtggaatttgttccaaacctgaaattaacaaaaaaataaattaataggggaactgttacgtacatttcaataatataaagcaaaatcaataataataattggaattataacataccatgtcacagaacttggctttgcaaatatcaaccaataaaggtttgaaaatccctaaactaccctttaccattttctcaggatgtaaaaatataatatggagatttcttctgtattcatccacttgtgaccattgcttagcaacttcagtcataaacaataattcttccccaaacttatgattttccaatgaaggaatcacctgtaccaaattaatttaacaataataatttaactaaatctaaagatgaattcatttaataataattaaaaaaaaatcaaataataattaagcttacatagtttgaaatcctttgcatcagcgtcctctcaaattttccataatactcatctattgcgaaagaatgaaagccttgtacctcattcgagctgagaatggtgtaaaccattctatacgtacaacgtataaaacaaattattaaaggaaaaagataatttatactaataatattttaacaatgaaaacaaaattaatattattagatagatttacttacgtgtatatcttcattttttcctctacattccaagattgtgctctaacatcaacagggttattaggattcaatttcacatttattttttcaatcgaatcatctatagcatccattgattcaattatcattcttgtaagctctagaaaacgtaaattcttctgttgctcatcagggaacaacccaaaattattcaccatgattaattcttgattttggttgtaataagtacaataacacagtacttcttgctaagaaaatcacccaagatcatatacaaattaaaaatcagattgaaaattcaagactatgtgtacattaatacatttcttgagaaaattaataaaaagaagattaattcaagattacgtatgatatgtatagttaatggcctaattaaagagattaattattagatatatgtgaatatgaatgagttaattaatagaagatgtgtggaaaattgaagaactaaaaattaagagatgggaagagaagaaagggtacgtacctatgcagtaagaacagccttttgctcaaaatctttaagttagaagagacaccatagtcgatgacttactgagctatatatatagtggacatacatatatgctagtaaccgtaacataccaagatcttgcaaataaccaactagtcctagcttttcactttcacccaaactttaatgatcatattagattttatgccctaaataaaactttttctgtaatctcaattattaattcaa

SEQ ID NO: 33649 - DNA, 1466 bp, Cannabis sativa
  modified_base (108)..(110): a, c, t, g, unknown or other
aaatttctcttttattattctctatcggaccagaatctaatggtttaatatttttaaaattaatatttatagtgaaatttgtttattacccattaatgggtaataccnnntaagaagtattccatatatatatgttgtggacttaatagaatttatacattaaacatataattatgaaataaattatgtgaaccatgcaatataaaatgatttctgatcttttattaattagcttactctccttgtgttgtattaacttgagagaaagaacaaagtgttttcctctctaaaaactcttacaatggatctttgagtaattctcttagatctctcttttctctcaagaatctctctctgaagcaattcttccgatcccatttatagtgaggctaagtcactacttatagggacttaatgcatgagggatggttttacttttcctagtgactttgaccaagagtcttttcaatttcagctcattaatactgattgaccactttatctagacatcgctgataccttgcccgaggaccgtccaaaccctaccgctgtaggtaaacatgttgccatgtttggtgtgactattgctaggcacacacacaaagttctgtccagacgtaaaatgatggcacgaaccaaaaaaaaactgaacgaaagtcttcattgtccgacccacacatctctcgtcttgccactttgccaaatgctgaacaagcccgtctcgctactgaagaggagaacacagctggggacgttgaagtccaggagatggaggaccagggagaggtccgtcctgctactcctcttgaagccaaaagagatgaggaagaaggagtagctcgagtgctgccatttgatggcttcaataaagaaggaaaactcgtgtctgaggctggggagatcctagaggccagtgaagactatgttactaaagagtacaccgaggtttttcctttgaggagactaggtgcactaggaaatcgatgggtctctccaccttctatggtgaccatggccaagatgaagaatttactcaaccgtagttacttagagagtgtcaaatgcttccttccctcccccgaccagcgggagactagcctgggagaaggttattgcgcttggtcgggcgttcataccaagcatggtgctatgtagcccttgctcccatacttcaggaggattgcaaactattaccatataagtccgacccagtttactcccaagggcatcaagtacttgtccgccctattcgtcctctatgcctcacaaggatggggtgagccgtcctcacacgacaccaactagctctttgattggaagtcaagtcccaagcagaacaggtcaggatacttctatttttctcagatcgagaagaaatggttgacgggcaccatggccaccgaggtgactaagataagggtactttgtggacgagtactacttcgttaagggaatggacactgtcc

SEQ ID NO: 33650 - DNA, 1474 bp, Cannabis sativa
aattttaataaacatgttttattattaataatttttaaaacattaatataataaacataaggataaaatattacaaaataatattataaacattaattaatataataatctatttatggtaattagtttaatcattaatgatttatattatttaatgattaaaatgtatgattttatgtaataaattttgaaaatgtataaatttttcaaataattttcttttacacattttttgtaataattttatttttgttgtgaaaaaaagcctaaaaagaaatagttgtttaccaacattaaactataatattaatattatatggtagtttgtgtaataaaaaaaataattgtttatattatttagtgattgtaataaaaaatagttgtttgcaacgcgtggacccggcaataggattgtacgtcccacgctagatgcaacccaactactttgccccacttggttacaggcccacgtgactggacccggcgataggattgtataaagtaatcaatataaacatattaaaaaagttatgtttcgtccatgtgggagggatgggatttcttcttccttaaaccaaatcaaaacttgttcttctcagttagtgtaaaaatcaatctcagatgctatcctactctccactcctcatctcactgcacaacagactcagagacacaaaaaaacctctttttccctctccaccaaggaacccactcaccggcggcggcgcagttgcatcgtcctctaagatcatgtatgtatgtcgtttcagtatttttttttcctttctttctttctttctatgtctatctcttcgtgccttatgtatgaatttttgttattgctcggtattagttctcatagggcttgattatcttccttgacgctcgctgggtttatcatacaatacaagtttggaattaatttgttttttggcatttttgctcgcaacgtgtttgatataatgtctctttcaagattatgcatttttcattagttttatcgtgcaaagttgacaattttgtaattagttttgttggtttaaatcatttaaacacctagtaaaatccatgaaaggtaaccatattctacttgcatttgtctttttagaaagagattaatggacttagtagcatttttttctatgatgtgattgaaagtttttttaactcgttgctttcgatttttttaggattgaaaactgtataatattttctgtgtcgtaacatagcataaagattttttttaaattgatttggatttggggtgctataattgtacaggacgtgagtaatattcgagaagtttctgatcatcaggtgaggagctatgcttctttctagttttcacttcgtttcttcgaatgcccaatttttcattttaagcttctgggcattaaagatttgttttttcttatgttgtttatttatgcactattgactgtttttcttgacaattttgtgggtttaaaggagg

SEQ ID NO: 33651 - DNA, 1389 bp, Cannabis sativa
  modified_base (49)..(58): a, c, t, g, unknown or other
atttagtgacaactttttagtcactattatttttttgtgactaaatgtnnnnnnnnnncacaacaaaatgttacttgtgaaaaaaacatagtatttagattcaagttgtcactaattagttttagtcacaacaagtgttctggctaaaaacacattcagtcacaacaaattgtgatttttgtgactaatacttttagccaaagaccttatagtcacaacgtagaaatgataatttataattagtcacaatttttttttttattttcagtcacaaattttgttgtaactaaaagtaaaattatttgtagtgcccttcattcgtagagaacttgttattcctaaccactaacattgatttgatggcgagcctttaaagaacaaagaagatttgacaacaaaacaaaactatgtcatacagacaagactaaacactcaaagccatgtcacgtacagagacaatattaatcacagagtaacaaaaaacaaataacaaaacacaaccctcgatgggcctaatcggagaaaaaagacaaccccatataactataaattttgaaataatctttttctttatattctaaagcaataaataaataaaaatgaaagtatcttatttatttaatattgtacttctcaattttttattttttatacattatttttttattataatttctgtcatttttacacaaacgatcacttcagaaaaaataaaattaattgatgaagatgatggacagatattatgataaattaatatacatagaaataaatatttatagcaaaaaaaattgttcactagtcaccaatgatccctagattatgatttttaacgatagaagagagccaattacaaatcatatcagtttacaatatcgatctaattaaaaatttgaatatatattggtgtgataatatttatggataacttgtcaaggtgtgtaatatatttagttagttaagaaaatatgtagatgatattatatattattgtatacatttaataatcatacattaattgaggcactaaatttggatgatgaggatttaaattcttattaaaaaatatgtacttattgaaaatagagaaatctatcaaaagttgctagttcatttcattcatgtgcaaaatattatagataattctaaaatagaaatttaataataacaaataaatacaagtatacctaacaaagttgtaccattagtaatatatatctatagataaatgttaaatagtatatgtatagtctactattatattattctttgtgtaattaaatattagtgagatttttaatttaataaatattataaatatcactagcgatttttaagacgacatcttatatcgtgctgaataataatattgtctaatactaaattgta

SEQ ID NO: 33652 - DNA, 1362 bp, Cannabis sativa
taaactgtaagtatacaatcattgtaactattttatacttgatctctaaattaaagtaaaataaacaaaggtacttatggatttacaaggcctactatagtatgcaagcttaaaattacagttgaataaaatgggagaaaaagagataatcttcaatgaatatgttttttgatacaatgattgaactcgaaccacctgagctagcctcaagtggcctttcatcaatatgtaatagggacccaacccaagtgtcaaattttgagtgtgaaagatttctagcaaagtgagttaaattttgatattaaagagtgcaggtattttactttaagggtctaagagactttctagaaacattgtgtgtatatttgaatagtgaaaagagtgattgaaaggggaaaattcattgtactgagagctgttgctcttggggagaggggtggtctctcaaacaccaccaggttatatatataatatatgtatgtatgtattgttatacagaaaaagtttatttgttcaactcttctattatgtgttcactgttcaggtagtttgtgagtgaatttatttgggtcctaacatcaaatcataagcacaattaccaatgaaaaaaagtgtaacaccacttcataagggaataatttgttagaagacaagcactaagaagactaaatcaaatttaagaagaatgtgataaagacatcaaaagtatgaatgaaaatgataaaactgaaataacatgcattaaaatatcatcaatcaagtaaggtggaaaaaatcctacatggttatgtttccccattttagtaagaaacaattatttcattatgaaaataaatgactaccgacttccaaagaagctaatgagccagcaataaaattctttgcaaaattccatgcatgtagttatgcaaatatagcataataggctgggtatgtggctatgacaatttgaataaaacaccttctaaaatacaatataagagtgtcaggctttctgctgctgggagaggaaaggaaaaatgagagacctaaactctgcatatactacagaacaatgtctaaacttcaaaggtcaccaggctttgtgtaaatcaaatccaaatagttcagcaatatatggtagagtaactgggctttagcattcaaatcacatgtttaaaatttaacaagaaaaatttaaaatctaaaagagaacaacacacctcaattttatccattgagcgatttatgtcttgttcattaaacaacatatcttcaacagaaactttgctcactttgatgtaatctgttaaaagcaacttgtagatagcttttgtagcataagtcatgaaaacccggcctttgaatgtggtctaacaaata

SEQ ID NO: 33653 - DNA, 1719 bp, Cannabis sativa
  modified_base (29)..(67): a, c, t, g, unknown or other
gcaacataaaatattatttctgatctttnnnnnnnnnnnnnnnnnnnnnnnnnnnnnnnnnnnnnnnttagagcataaaacccaacacttttctctctctttctcccgctcttggagttcaccagcgttaatggcagatagtggtagacctcgctgacgctaatggaaaaattcaactagcactaatccaaacaccatggcggcgacatatcctcctcctgcaatcagctctgtcgacgttgttgactcaccaccatgggaggtcgtctttcctgaccatcgatctattagatctctgtgttgacgtccacagtaggttgtgatttcgttttaatgtttttttgattatttagggttttttcctccacagattctaagtttgagtttgtgtttatacgaggatggttgtaattgtgtttgtagaatgttttgatttgttaggtttaattttaatttgttgcagatatatttgtgcatttttttctaatctgatatatattatttttctaaaaaaaatctcttttcaaaaaaacaaatccgatatatgctttgttaggtacagtttctcagatttattttattttaatttaatttttatatatttaaatgatttttttaaaaaaaaaattaaaatgattttataacttttaaatgaatttttatatatatataaaaaaacaaatgacttggaccaattaaatgatgtcacgtgtatatctagttggcatttaacagagaacttaacgctaggtatcctatttgcaacaaaatattaacagaatgtatttttactgccaaaaaaataagttagttatttatttgcaactcagacttaaacttaggtatttacgccgcaaattactcttaaaagattaataattttcaaccaaatttctaaaaggttatatattaattgcttgtaatatactgataataaaaaataaagtgtccaccataacacattatttttacatcaaacactcaagttttacaaattttttagaacaacaaatctatatatataaaggagaagtatgaggcggtgacatgacactctacaatccctctaaaactatttttctcttctctccttaattctctcaattttaatatttaattaaaacataaatctacaaattaatattttactattattttataataataattaaaattttaaacaaacatctatattactattttctccttccatctatttttaattcatcttatatttttttaaaaaaataattaatttaataatttttttttaaaaaaaactaaaatatctctccataataacacatatatattatattatatataatcatacacgttaccctacttcactatatattattattttataataataattaaaattttttaaaaatatctatattactattttctccttccatctatttctgattcatcttatattttctcattccatctatttttgattcatcttataatttttttaaacttttttttaattcaataattaaaaaaaaagctaaaatatcaataatgatacctccgaataaatggtgcaactccgaataatggggtaaaaaaagttttctactcttttgatgaaaacatacactagtctacattctcttcaataaatggtgcaattccgaataatggtacctcttaaaattaaacgacatgtgcaattaataataataatgatgatgataataataataa

SEQ ID NO: 33654 - DNA, 2699 bp, Cannabis sativa
  modified_base (62)..(64): a, c, t, g, unknown or other
  modified_base (867)..(879): a, c, t, g, unknown or other
  modified_base (978)..(979): a, c, t, g, unknown or other
  modified_base (1015)..(1019): a, c, t, g, unknown or other
  modified_base (1763)..(1771): a, c, t, g, unknown or other
  modified_base (2103)..(2116): a, c, t, g, unknown or other
aaaatgccctctgcaattattaaaaagcactttttactaaaaagaactttttaaggggcaannnttatacccaaaattcggctaccatttcaatggaggacactcatcaagataaagggaatatggattgatgaaatcacttctaatggaataactcattaattgcataagtaacagagtatacttgcaactccctgactatcaggtcttacgcgaggaaaagaaatacaaactgttatttagcgtattaacgagaaactatatgcataaaccgaggcatcaacctcgttacatctgggaacacgaaaacaacgcatatctactatgaaaacacttagtgtaaaatgcataaaccaagtataacagtcgagtggactcagtaagcgaggtgcctatttccctataggaaggctcatccctgtaacttccaccatttaacttcaaacatctttttagtgagacttacaatcttgatgagtcagaagctaaacattcaaatgagcctcgagaaactctttgctgataaaaactgcgattgtcacaatgaagcgttaagctttcaaataaagaagcaacgaggcgtatattatcgacctcagagagataggaaaaaaaggctccagatcactatcaagatcactagaaccaagttcttgtcgaggtatcatagaacgctacaattaaagacatgtttaaatacacgatcattttgacccagataaagcaggaaaattatagttgtatgattttcaaataataaccgcatttatactacgtgatatgtagtcaaaccccatgatttcagggtgaaaacgttgtaaagattacaaacaactttgtaattaactgcctactatgtgattatannnnnnnnnnnnnaagatcaaaaaagggatgaaaaaatcacacaaaaaaggccctgaaaaactatcagaattctaataagattgactcatggactatgcagaattttaactnnaaaaccacgtaaaaaatcctttgtgttcatactttnnnnntttacagcttttatttttctgtgtgagattgtcactattaggctcaaatttagttaacaaaaatctacgttaactgattctttgtgaaaaattaagcaatttcggtttttatggaactcgattctgataaaagttagaaaagttatgttgatttgaagtttcgggtcaaggtagtgtcgagaggctcgcatcgcacgcaccagtcactcagagaaggtgctcgtgtgcacgtgcgtgcctcaaacatcaccttgtctgaactcgctcacacggacgtttagacacgatgcacacgacaccttgcccatgtgaatgctgcaagcgccgagattgctcggcatatgaggctgcagatcaccccttgcgcgcgcgtaggaccctgcgagcaaccttttgcatggcagctgggtgcttgcacacaaaaatttgattttcttgtgattttttcaccaattttaaatcactaaaatcaaaagaaaatattatttttaatataattaaacttaaatatcaactttgcaaattaataatattgaatttaatagattattattaatttttgatattttgaggtttgaatttaaaaattgattagtttattttttaaattatggtcaggatttaaaatgtgttaatttctttaatattatatattatttaattataaagttagatattttgatattaagtatatttttaattaaatgatagccttatattatattaaaattatcttatcagatnnnnnnnnnaattaataaatttgaaattaacctagatatattttatagatattctaaccataatattttcaaattcaaaaataggttattttgtgaaatatttaattgtttataaattataaattagaaaaataatattttgtatcattttacttatcaaaaatttataaatagtattttaaatatttaattaacctggatatttttgtaaaaattttaaaaagcttaatttgagatattttgacatataattaggagaattattatttgtttattattttattcctaaaacaataattgcctaaccatatctattttaaaattagtttattttgttattnnnnnnnnnnnnnnttataagattagaaaatgatatttaaaatatctatttgattattttcaagtcatttatcttattagatatttaatttaatttattaaaataattcaaataaacctagatattttaaattaattttaactttaaatttttgaaaagatattttaggttgttttttacaaccctaaatttttaaaatagttggttaattaaaataataatttaattatataaatatcttaattcacaatttgttacatggacattgttcgtttatttaaattgtttattcaaactttttttttaacaaacctattatttatttgatataaattgctacgattaacttgttgacaaattcaatgatctaattttaatcatactccaattgtcaatcaatcctataaataatttgtaataggtaaattttatatttttttaatctgtgtaaacctagaaacatgataaggtccatctaaataaatttgacctgtctgagcctttatgtttgcttttgggcttagatgcatataggaagcccatttatttctagatagataaatggactaggttgctaaaataaaatgtcacctatga

SEQ ID NO: 33655 - DNA, 2540 bp, Cannabis sativa
  modified_base (1135)..(1138): a, c, t, g, unknown or other
cacacaatcttgagcttcctcgttggctgggtcgggaaccaattgccaagaagaatacttgggatatttataatcactagtaaactccttatcagttaggagatccacagaccttaagttgacctcattcaaaataaactcagatgatagaagaccaaattgaagacctagtaggagcttgcgtcgctcggccatctcaggagtcagaattggtctatcaaaaacaaaggcaaaattaagatcaagaaaagtagagaaaaaagatatggaataatttcaccaagtcatacacaaaaattacttacgtattatgcaaaaggtggttgtgtcgattggggaaagaccagtcatcctgaagaattcgtctttaaagggagttttatttggtaaatccacaatgatcttacgatcacctatatgtgaatctcccccaaggtagtaaaaaaccccctgctgcgcatattcttcctcgcaggaacaaccttgacagagtaaagatactctatttcttggggagggggcactcccaattcaaaattttgtatagaaccttctaacttgcgaggattctgtatgaaatgggattcaattggaatggggcaagcccgagatggtttaggaagtccttgaaatagtctcatagggggatattggctccaaccctaatgtgttcgaggctccaagcacctattcctgttgagccactcgtactggccacaccactggccccctcagatgctttgcgagtaagtcgtactggtgcataacagctgaactcgccaatagccaccagtctaacccggtagtctcgcttatactcaataccacaagccctcagggtattacctacgtaatctgcgatggctcgctccttcgactctattagttcagccttgaaggtgacgttaggatcctgggtagtctttgatttttaaggcttggaggtcatgatttcaaagtccaggtgacctggttcaaaagcaattgtgactctgggtaaaaataaaggcctagccataggtattgacgataaattggtgcgttcaagctaagcagcatctcgcaagaaacaacatttgccttttgtaaattcttacaaggcgtcatcatcttggtaggtttttactaagtgttnnnnaatttttgcatcatttatctctaatttggatttgggttctaaaattctaggtttgtatggaatggcaagttcagtgggacactctgtttctaaatattttggacgataaatttctgaactagattgggacattgctgcaaggagaaagcaatcccaattcctggatgaaatttatcaaactgtaagttggtaaattggagagcctcaaaaatctacgttcttcttaaaccctaaaatttgcccagatacttaatccaaccctaaaatctctaaaaccagataaggagatgaatgagctaattaaggaactattgatcaaacccaaaaatgcaaaattaaaatcatgtaagaaaataaagagagaaatcacttactgcttgaagttggtttatggagcgatggatggtcctgcaatcgacggaacaacgaatgacgtgtgatccgtgcttgaggtcgaaaatcaaatcggacaaaacttgcaagcagaatgtcaatgacaaagatggatgcaaggtttcgaaataatctggttatggtaatctaggtatggttttctgcagagaagctcaaaaaatttccagagttttcgaaatggcaaaggtattgaaaaggtggttccttttttcattttatactcttgggttgatcttcgtcagattaaggagacaattgatccaacgagtagaatttaaaaaagataagtagaaaagatggttatcaaatgctgatgtgcctcaaaaccacaaaaccgccaaaatcagaggacatgcatttttttaaaatggattatgacaaaaataccctccgtaatcatttaaacatttttcaccaaaaagaactttttaaggggcaattgttatacttgaaatttggatggcacttcagaggaggacacgtgtcaatcttggagaatatgaatcaatgaaaataatggcaattatattaaagggtattaaaatggaataactcattaaatgcggagtttatagagtatatctataactcgttgactgtaaagtcttaagtgagacacgaatgtacaaactattaatacatattgacgagaaaccatttctaatatgaagacacaatcataaggatgacgtcaaaatacacagcgaggcatcaacctcgctgcatataaagaagtgtcgatgagacatgttggactgttactgttagaattagaacacttagcgtgtaatatatattatacaaactaagtataacagttggacgaatctgaataacgaatagcgaggcatctatcttgatataggaaggcatatttctagtaccttcaataattagctctagatatctttcaatgagatctactgctctgtcgagttagctctctcaaatagaagatgacattcaaatgatgttgactgctgaagtt

SEQ ID NO: 33656 - DNA, 1138 bp, Cannabis sativa
  modified_base (975)..(982): a, c, t, g, unknown or other
aacagatacagaaaatataaacagttttgtcataacaactttagatcagattattattaaattttattttgacaaaaaatcagttgaggatcctattgtactattttggaaaatatagagcctattttatcatttaacaaaacaaaagatccaattaatagcttttgtaaaacacaaagtccaaaatagtatttacccctttaattattatgaattactactagaatcatgtagttttagcatttcccacttacgtggaagtgtatgccttttatgtgtccggaatggtatgtgttttcctttttaaaaaaaaagtatgtcttttatgtgtatgttgttgtaattgaatttaagtaaaaatacactctctaataattatacatttaataaatattaatgaaattgtaattttaaataaataattatataagatatcaattttttatatatatttttttatagtattttataaaaatataagaaaacaacaaaaaaattatataaaagtaacaaaaaaatagtattaaaaaaatataaaaaataatatacaaataacaaaaaatcaacaacaaaataataatattacaacataaaaatacactaaaaaatcgtattttatgtaaataaaatctaaaaaaccgtaaaattgttgaaaactctatacagacagtaatcttgcaattttttttttttttttgaaattatcttatttttaaacaagtttgatatatttaggaatacaaattttttcaaaaatacctttcttttatattttattttaattttacggcctaaaatttttaattacaaaaatacatttgtaaagttttaaaattagaaaaatataccttgttcaacaaaaagtaaaaaaataaataaaaacagcgagaaagtgacagttataaattaactataaaacaatagaaaataattaaaaaaaaaaaaaaactcatgacaactataatacaactatannnnnnnnataaaacaacaaaaaaataatttatatttttactaaaaaagtatttttacaaataaaaacattcaaaagagtaaaaataaaaaaaattcttgatgtatttttatgatttttttacaaagttttggtctatgtaatttttttgggttaatttcacaa

SEQ ID NO: 33657 - DNA, 2698 bp, Cannabis sativa
  modified_base (31)..(33): a, c, t, g, unknown or other
cattcatccctgaaatggccctctttcttannntagtagcattgtttccctgcctttgaattggactttgacttgtgtgactgatttgaacccttgtactgcttattcttttgattagatttgtgaaatccacctttgttttttctggtttctgatctccctgtgacaaataaaccttcaccatagccatttgatctatcgtcatttcttttctaaatttccttggaatttagtgcagattttacttctatcatagacagagattcctttccataaagaattgtgtccacaaaattttcataactctttggtaatgtgctaagtagtaatattccttgatcttcatcttctatcttgacaccaatgttactcaggtccaagattattcgattgaactcatcaagatgcttcctcagatcttttgcttcatccattctcatagtgtacaacgtctttttcaggtagagcttgttggccaatgacttgttcaaataaatcgatgccaacctttcccataaccccactgcagtgtcctcatttgacacttccctgagaacttcatctcccagactcaacagaatggcactgcttgttctaaatttccttgattttcttcttgtcatctccaagagcagcaagctcttctctatcaattgcctctgagattccttgatgtactaggaatgccttcattttaattctccatagaccaaagtcgtttgtcccattgaacttgtcaacttcaaactgagtggaggcaattgcagattagttcttggttcttttcttgatgttcttgatgttcttgattcagttctttggtgatgcccctcgactgagctctgataccatttgatgtgatcaatacatgatcactcacctcgcaaacaacacatgacaaagaaaatgatcaaaaacagaacaaagtaattgaaaatcaaatagtgcaggtgtgaacaaaagcctataaaaccagtaataaccagtggcaagaaccagaatttaaacttacataaataagcaattaagagcaattgaagaaggagaaagaaatcaaacacagtaaggttttacgaggttcaaacaagtgatgttgattcacttgcctactcctcggccagaacagccccaatggctttagtctttattgatgctagaatagagaggattacaaagtgttctttgacacattaactcatgaatcaaagcttcaattacataacaactctctctctcagaattaatctctgtttcactaaactagcactcaaaaatctctcccaaaatttctacctgaatgctgcagcaattggctatttatagccttagtttagagacccgatcctaactgtcataagtgacagttaggtaaaaccgttagggtagttaaaacttgtcttagccgatgttgacattactattccatcaacttgttgtattctttataatcattaaatggtggcttaattgaaaaaaagtctaaacagaacacaaaaaagatctgcactcagtccaaattaaaaatttcaaattaaccagagaacgaaaaataggcacttaagtttactggttgaataaactcatctcttatgttctcagagaatgggataattttgtattaccaatttgatcacatgagcttaaattcagttattttggtcatttttgttttgtatcaaataattttgttgtggaacagaacaaaaccattatgaacaataacatttcttttatgccaaatagattgaactcaaattactcattccaattattgagctcagaatcagatacacagcagcacgcactgagtgttgtggatttcaaaggttctttgacaagtggattccatttttctaaaaacaattcatttattacttccataattttataattttttttggtttatttatttatttttgtttatcgggaattagctcaaaatggatatataatcgaatagtgttggagtaagataaagtaatagaaaaatggatatggcataaatattggtaataatatttgatatgacaataaaattcattattccatagtatgcctattcttttttttctttaacataatttttgatttcatgtttctctttttttcttttaagataaatttgcagaactctaattttttgtgaaatttacaagaattgactaaaaagtttccctatttatttttttttaaaattaaatatgtatatttttttattttttatctttttctgtctttagtttaacttttatacagtattagctagtttttagaataaaggctgacgcgtgtgggtctagcttgctgctggtggaaggaggacgcgccatttggcgcgttatgtaagattttcctttttaaaaaattaaaaaaggtaaatatgagctgagaaaaaaaattattaaataaagtagatttatgatcattgttatttttttagaacaattatgattgaaaacactaaataaccacaaatattatccactttaatattttactatttttttaaatttattttaaaagaaatatattttacttttaagaaaaatattttttttcttttttattttgctccttttttctttttcttcatattgtgtcacaaatgttactttttctacaaaatatttttagataaaaatatattagatcaatttgaaaaaaaaaatattatataaaattaattttattaagaatt

SEQ ID NO: 33658 - DNA, 1078 bp, Cannabis sativa
gtgttaccaaacgacaccataactgtttcattgttgttttttagttgttccactattatttttaattgttttgttttgttgctttacaattatttaataaaaaaatagtatttttataaaaatttctctgtgacagtaaaattgtaaacttttacccaaaatctagtatttttgtaaaatctccttgaataaccttaggcagaattaacagcaaattacattatatatccacttttataaatgatgttcttattataccccttaagctgatgtaaattatgtgctgaacttaagtggagggtgaaggcatattaggcaacccactcacaaaagttggtacttcttaataaaatataatatgaaggtatttttaattaatagatacaaaaaagacgtattcttcaacttatacccaaaattaataaggttgaaattgggttgagcaatacgtagcccgttgaacttaacccggcccactgctacatagaataaaataaaattaaaaaatatatatattttacctactcgcaatttattttagcccagctcactagccaataccccatagtactgcacttgaaaaataagaaattacactacataccttttttaaattaatgtcttcaatttttactcctatttcaaaatcgattatatttacctcttttttaatcattctaccaattttgcacctatcattttacgatagtcctcattcttctctaactaaaattgtgcttcaacttttgtacaaactcacatatccatctccaaataacacaatttattatgtttgaaattgtgtcttgtttatgtgaaggtgtgagggtaatttgggtacaatactcataaaaggaggtatatttgaattaaattttatttgaatgtaaatttagttaatgtatataaaaaaggtatttttcaacttctccccttgaaaaacacaaagaaaaccttactaaagcctcctcatttaacttatctctctcaaatgaaaaactgaaatgaaaaataaaaccctaaactaacgtctctacctctatctctctcctccctcgcttctctctctctctctctc

SEQ ID NO: 33659 - DNA, 1025 bp, Cannabis sativa
agcttctttgttaggataactgtctacaattatctttcattttattgttatgaataacaaaataattacattgttatggatataatgttatgaataacatagtaattaaattataaaataattccaaatattcaatcaaacaaaataataataattgcatatctttcattttcaattattacatttgaaatccaaactgttactttatgatttctcaaaatgtaataacaattaataagatataacataatatatatttctaacattataaatctttttttacaatccaaatttttaaaatactcagatttaactttatatattcctgcataacacatattaatatatttataagatatctaacaacgaaaaaaaaaacaaaaaattatttcaaaagaccaaactcaaacaaaaaaataatacagataatacactgttatatgaaatcatcaaaagtaaaataaataaaacaatactatcttaacgatacaatcagatttaaatctaaaaccatagaaaattaaaataaaataatataaaacatgactaaaaagagaaaataaatatcaagtgacaaaacgatgaactagaaaaatcaaatcaaagaaatgaaatacctttcctatcgtgcatgagcatgttggtggcttgtactgctcctggtggtgcgataaacaaaggggttcgtggagagagggaactccggtgtggcggcgtaacttagaattttcaaaccaaaaaaaaaaattagaaaagaaataagtgagactgagattgagaatgagtctctttccaggaaaaaatccaaaaaaaaaagaagtagagatgaggaaagacgagttaccttcttcacgcccttgtgtgagttttcccgatcaagaggcggtgacctggtttgttgtagtgtatgtatgtcagtcgattcaagaacaagagaaagaaaggtggccagagacttagaaaggggaggcggtattgtgttagggttagggttagggcaactgttagagagagagagagagaga

SEQ ID NO: 33660 - DNA, 2914 bp, Cannabis sativa
  modified_base (690)..(693): a, c, t, g, unknown or other
  modified_base (1360)..(1363): a, c, t, g, unknown or other
ttttgtttgataggtaatttttagaattattacatagaaaataaaaattgacactttatttacaaaaatacgtacctccataaagtaaggacaacatttataccttttatgtgattttaattaccaaaataccacttacacaatcacttacacaatcagacaatcattgcatggtggttgttgtgtggttgtgtgatggttgcatcagaagaaggtttcaattagacgatagttacaaggtggttggccgaaggttgcatcagacgaatttttcaatcagacgaaagtttctgggtggttgttaggtggttggctgaatgttgcatcagacaaaggtttcattcatacgaaataactattagcaaaatgtttatgcaactgtaatgcaattgttgtgaaacattaaaaatcagaacagttttttcacgtacgtaactttatctacatgtctctttatgatttaatatgaacaaattcaccattaaaaatttggaaaacaacaaaaatacaccaggataaacattttactatagtattgatgtaatttttttagattatacttgagttggattgtttgggaactccagttcagcattttgagatctgcctttcatggatctaaaaattgaagtcgggacattagttttatgcaaattaaactagatttttggttgaattttagtttcgtannnntttttctacacttttttttatgaattcgaaacagcccctgttttgattgattctggttgtcttcgcaggtgaagtcgccgaaattaatggtgattctctttctggttgaattttcgtttcggttgggttgggttttcgtatggttgcgcgatggtttagcgatcatttcccaggaagcatggatcctgggttgaaagtttgtgtaagtggtatttgtataaatttttttatttgggctgcatattgtctatttggccagctgaaagtatttttgtaatattgtactttttttggttaaaactaaaaaaagtcctatattttttaagaatatataatggaagaaaaaagttaaaaaaacttactaaaactaaagatatatattttatataaagttaaattattaaaatggaatgtctttgaaattttttgaagtgtaaataaaattttctttaatttattttgggttgggcggctatctgcaaatttttctaataaaaaatatcaacttttgagaagttgtttgttattttctctaagtgcatgtgtttacgttataagttgcttctacaaatacacccaaaaggatgtattcatatattttttatttgttttggcattctatatacattattgttattaaatatatcttacaaaattttaaaaaatnnnnaataatttacaatatagaaagaagtatacaaatagtttatttcatacgggtataaaataaaatagtcacgtgtgcaacaaactgtttggactctatttttgttttttaaatttcttaaaatttgtaagatgccttaaaaaaataactataacatacatgacaacaagaaaaaatttaactaaaaaattattttgaataccaaaatagataatcttcttttaaagaagtatgttctagaatttttcaatattatattatgaaaataaaaggaccgtactttgggatgtcatcctcttggagagacgtagtattactaaactaaaaattttctataaataaactcaataaacaatagtcgattgcattctaattaattaatataacatattaaagcactacatgcaattaagtgttcaatttatgtacaaacctttgttattaggtcgcaacaaatgtgatgtaaggatataccttaaattcaatgccaaaatcaaccttatatatataaaatttatgcttaaagtatatagtatatactactatattcaaaataaaaactaattaaagaagtatatactggacttctactatatatatctccactcatgtgccttaaatgtacattttagagagaaaagtagagtcgagagtatcgatcaaaatttaaaagtgattgaatgtctctttgattaacagaaacttttttttttcggagaatatataaaatgaaaaagtaaacaaaaggttagaaggaataatatggtgaaagggttcccattcattatatacttcactacttatcccttaaatgatgtgattcctttcccttatataaacctttttccacaatactgtggtcccttctttgttgggtatgatcatcattatcggcatgtcaatataattataaatatatatttaaaattagaacttaggcatttttacaatgcaattctaaaataggcacaccaccaatgcacccaaatttattttggcattttggaaatttttaaaaaattctacaatgcaccccttaaaaagaaatgcaccgtgcgatgcacctaaatctgttttgatataaaataattttttagtcaaatttttcttatgctcatgtacgttataattatttaaaacatcttacaaaattttaagaaattcaaaaaaatttaacacgccaaaaatacagttcaaatagcgtgtttcatgcttgactattttattttatacacgtatgaaatagatggtttgaacactactttatgtattgtaaattattttaaatttcttaaaattttgtaagatatcttaataactataacgtatacgaatatgaaaaaaaacaacttgactaaaaaaattatttttgatgccgaaacagatagtgggtgcatcagtgcatcccttttaatggggtgtattgtaaaatcacctaaaactttttactcaattttttcttagtttttaagatatcctgcaaaattttaaaaaattcggaataatttacaatatgggaagcaatgttcaaacagtctatttcacacgcgtata

SEQ ID NO: 33661 - DNA, 2140 bp, Cannabis sativa
  modified_base (1398)..(1400): a, c, t, g, unknown or other
  modified_base (1908)..(1917): a, c, t, g, unknown or other
ttttgtttcgtgcagacatgtctctgaagatgctcgatgccctgaagaagagagttggaggaagctcaagctcatctcctccggccaagaaatctaagggttgagaggcaaccccatccaagggaaaggcatcggcgggggaggttattgatctttctgaggagctaattgtcatggacccttctgccccaaaaaatgctaagtccaaaaattctcagggaggaagctcggagaggcctgaacagtcgaaaggcggatccgagctagccaagagcggatctgagcatatgtgggctcctaccccacctttgccagtgcatccagatggaaagaggggcaaggagatgcttactcactacataaactggttggttcctgaggtgagtgagcaactggctggcgccgacaacgaatcgtccctagagctgctgatgggaggagtcttgagggaatttaccagggtgagtctttcttcacattttcccttaattcttctttacttggctcagactctaatgttttttctctgtgtaggctagtttgaagttggcttacacctcttcctaagctaagtctgctgcctccaagaacactgccatgtccaacaccatgagggcggaggtggacttggccaggaaagatgctgatgatgctagggtggaactcgaagctgtccgcacggagctaggtgaggtcaacaagaggctctttactgctgagaggaaagtaaccctaaggacctcgaggcttccgaccaaccgtaagataccatcaccactttgtcagcagaagtgaatagccttcatgaggaaaggggagttcttcgggctatcttctgtcggctggaagcagagaagaattctaaggaggaggagcttacaactgaggttgagaagtataaattggaagctgaacagcagagggcggaggtgacgaggctgggagagaaagtgaatgccttagagacgaccggtctggagattttttatgacttttggaaggctaaccctcaagctaattttgattacctaggcaaggccaaagacatgtatctcgagtactgtgcttcccaagtggcctatggtgaacccaaggtgaccacttctacttctggccagaatgttgacgtgccccccgctcagacaatagatcctccagctctaccgcccggaagacccaaaccaagatcctggtactccagctgtttaattacttctcttcttatctttctttcccgccataaggccttttatatatctttccatccataaggcctttttttaagacattgcgaccgaccagtttttaaacttggaattatttttcattttatagacaactggctgaccgggcagcttttaatcccggtattacatgcttttgttatctttaatgaannncattctctgtttataatcatcgttcaactgtgtttgttttatctttacaaatgctttgtacaggtataggtgccccccaagtgaccgagaagatttatgactctttgtcacttgttttttgcaagtatgcttttttattttattcggggttttggggtcgaccaaaccttttgtacgcactggatggtaaattaacaacatgttagtaatttcgactcaatttgaattttgaaataaacatctttattcatttatttataaaaaatgtgtttgttaccatagtaacttacatcaaagctatttgatctaatctgatcttttatcttaacctgaaataaaatagattgcagaaattagaaattgcactttaaatggtggtcatccgacctgagtactttttcatttttgtctgaaccttcgggcctagtccgcccagcaggccactcactttaaagtaaatgttctttcagtacttaatatggccatccgacctggtactttattggtnnnnnnnnnntaaatgttccccattccaatactgtggtactagaacaagttccattttttcatcatacttacccaatttgtatgctcctgattcgagaactttgaccacctgatatggtccttcctaattaggtctgagtacacgtgccgtgctgtctttggtgtttataaatactcttcttaaaaccatatcacccacaaagaatttctgagccttcacttgtttattgaaa

SEQ ID NO: 33662 - DNA, 2869 bp, Cannabis sativa
ttttatcattattttattcattttttaaaatatttattaattttctaccgtatatatattatgttaaattgatcaactgagaacgctaaatttaaaaatacaagtttatttaacacaatttttggtaatttttaattagtagttttgattaaatactattttttttttaattttttttgttagcatcatcaattttggcactgtagtgtagggtgtgtggcatttaattagtttacaaaatatagataattagctactgaggctatttatacattataaatataaaaatttgctaaaaaatattaaaaaaattgataaacaataaataatataataaatagtatttaatcaaaattttaattagaaattatcaaatattgtgttaaataaacttgtatatttaaatttaacgttctgactaatttaacataatatatgtacggtagagaattaataatattttggaaaatgaataaaataataagaaaacaaaacaaactttttttttaaaaaaaaaaaaaattagcactttttgttattcaaaatatcaatagaatcaaataactttgttaaaaaaatagattgaatagctattgaaaaaaaaaaaaaagatgtatatataccaaaaatactagccattatttaaatcttattaatgttttgaattagtaattttttttaaaaaaaatgaatacacaataaactaataaatatataaaaatcttactgtatgtatatataaatttcttaaaaaattgtatgtgttttattttttttccttaaaaaaactgtatgtttctaatcaaataaatattccttttaaaaaaatttacataaactataaaaaattattataacctttagttttagagagagaattaacatttattaggaaagagaattaatgctgacaattaatgattattttaatatacaaaagaaaacaaacggagttaacagcatcttggtttgttcaatgtctatttggcattttaaatgatgtggccaaatataactggtggggacaggagtggaacaggcaaaatgggacagaagatttttttcctggaccccaaccacaacatagatcaccgtcacaatgagatgttcaaaatgggcaataaatggagtctacactacacacagcatcagctctccaaagtccctccccgttcagcatttcaaattgtacaatatctctgatgttgactgtttcttcttttcttcaaaccttaagtttatatacatattgccatatgcaaagtaatggatttattattactcattagttgacacaagagacccgtaaaaattaaaagataataataataaaagctttcatattcctgaagtaatatactaatatcgttagtcctttttgtgctttcatttggcattagggaatcctgtacaccacttctcccatacatatctcccaaacactaaaaactaaaaactaaaagcttaaaaagagcacaaggtcattgcaaagtaaatacactaaacttaaattaccaaatactaaagatatatctaagacaccaactccacaatcctcttctccgaaatgtcgagcaaaaaagaacctgtagaaacgagtactctctcactaaaactaccagtcaaataaggcagtaagtcactaactagagaaaagcaggtccattaggctttctctcctgctgaccttcccacttgtctccagatgagctccgaccaccacgccctccaccataagatgacggtgctgtaatatcaaaaccgttgctgccacccaaggaattgagcaaagcagaaagcccactggaagaagccccaacaccacccccaccaccaacaccactgcctccacctatgctcagaccaagaagatcacgcgtcatgggcggactcgcgaaggtcaacgatgggcccatgactagatctgtcaagccagaatttccaccaggctgaagcccaagcccaagcccagctgccaaagtcgacgaaccactttccggcttgatttgagtgctgttccactgcgtgccaagactgtctttaacggaggctgaagatgttgatgttgtcaagccaaaactgcacaacagcgaggaatttgaagccgaagcacccatttgggctgctttttgaagcaatgccgttgcagacattgctggaggctgcagtggtgatgggctgaagttgcggtgctcggcctggtcttgtgtttgatatagggaggagccgccgttgctggacaagtaaagtgacgtagagagagagagagatgtgggctccatatcggacactgttggaagagtagtggagcaatgtgatcggccagccaatagattggaaaatgaggaattagctaaggtacggggtgggtgaggtactggagcaacgcttgaaggagcaaatacgctggcaaatacagtactactgctactgacattattactggagcaagtggtgacagaagtagtggtcaagacagttgtggtcgccggtgtgggtggagaaagtcctattccgttatcaggcaattctgggataccaaaaacaagttaacagaatataccaataaagaaaaagaaaatttaatacggaaaaactgaaaaaggacacgaaaaggagatatgggggaaaactgaaagataaaatacaaagggaaatcaactaaaaggaaaggaaaaagggcgcaggcgagaaaggattccccttggaacttttcaagtcctaattaaaaaacgaaatatcagcttaaaacttgcaagccccatataagtaaaaaggacaagcaattatggcgtcctttcccatcaatcttttttttttcttttttaaaatgttaagccatagtaccccctcgatccttgagcttctt

SEQ ID NO: 33663 - DNA, 1948 bp, Cannabis sativa
  modified_base (864)..(880): a, c, t, g, unknown or other
agaggctttggccatctcttgagattgaaggtaattgggaccaaaagagcaccttccatgacttcttctctctcacggattgttactataaaactatatgaggtgttacagaaaaaagtggaggaggcacaataggtgttgttgaaggaatttttacaacaccagaaataagtattatatgaataattagtgcgagtacttgacccaaaacggcgagtattcaaattaagaacaaaaatacttagcaaaagactagaaatacaatgaacacaagagagtatagtggttcagtcagatctcggtctgcttagtccactgttgcaaggattctgtcttgtttatttcacggtggatcactcctttatatacaaagcaagtgtcctatcatttacacaaggatttcattcattatcaatccgttcatacattgaattacactaattaaactaaaaaacgtaaacataataaacgaagaacattttccagcttttcactaaatacaaccgacttctatatagttagtgcgtgcgaagttggttggttgttcatattcttgcataagctcgtaggcttaggatgcattcgagactaatcgagtctaggatatctgcgtcctttaaagtcgcttatatggacatcatataataagctgatagagccaagacatgcgagtctatattggtttatcaaggttgttgggtcaatgggaccagctcgcaacatagagaatcgatctctatgtttttgcaggaggatcgcggggatactcgcatatatcctgatatatgcgggttaaagccgttccttggtcctacataatgcgagtcatataaatgcgattagacttggtcatattcgcatcannnnnnnnnnnnnnnnncaggcgaggttcgtactcgaggggtctttcattgacatctcagctttccttgaggaaagtgagtacacgtgttttttaaataggagtccggtcctgagtttctaggtgagaaaaatctcactataacaataggaaactcagtattcgaggcagcagtatgaaacacaataactctacctcaagatattcgaagatcagtttgagtatctctctcgggctgtacctggtttcaacttatcttctattgatcttccaccattccccactcctccttgtgctggatcgtcatcacatcgtctcgagacacagaacaacaatgacatgacattacatgtctttagaacaatatatattttataattaactttacaacttaactttttttactgaacatctcttaatattttgtttatttactaataattttagaacttttattacttactaattttagtacaaatcaacatttttgaatattattttgattgtaatactttttaattatcaatttgagtaccttttttaattatgcttctttaaaatttaattttctatttaaaattaattgtaatattattataaattattaaaatataataataataaaataaattaaaacaaattttgagttggtaaaggtcatacgtgccaaaatcctaattcacgcgaaatcttttactgatacgttattgcgctgccaaaataattcacgccaattagaaaaaatgcacaaaacttttgctggcgcagtaatgcactggcaaaagttatttaagctgaccattggttgatttgggaccaagtttactctgcgtatattaccaccagcaaaagatatttttccgacgcaaaggtgaattgccctagcaaaagtccttttaccgatcaagcttcactacagcctttactggcataattttgcgtcagtaaaagttttttgacgcgttgtgactacttttactggcgcaaaaatgcgccaacaaaagtcacatttcttgtagtgtaacgagagtgggctgtggaaatgatgtggtgttttggacttgcacaatttgtcatgtggatatt

SEQ ID NO: 33664 - DNA, 3573 bp, Cannabis sativa
tatcatcaaatttttaactaaaaggacatttttgttaatttttttttaaaaaagggacatttattaacttaattgttaaatttagggccattttacatcttgaccctttatagattgaattgaattagtttagttaccagctaagatgagtctaatattaattatattataacaactcactcaaaaatttataactaactctttacacctcaccaaaaccaatcaactaactaacagaatcctaacgctccccctcaagaaggacggcatatatctaccaatccaatcttgtctttaagcattttgagttgtgttggaaacaaagcttttgtcagtatgtcaactagctgatctttagttgaaacatgagttgtcttaatcactcccttctgcaccttctctcggatcaaatggcagtcaatctcgatgtgttttgttctctcgtggaacattggattagctactatgtgttctgcagctttgttgtcacagtacatcattgcaaggcctttgtcctctatcttcaattctttaagcaatgatttgagccacactaactcagacagtagttgccatttccctatactcggcttcttcaaattaccttgacacggtgtgtttctttttgctcttctacgaaatcagagaactatcaagaaatatgtagaaccctattatggatctccttattttattgcaagatgcccagtcagagtctgtgtaggctttcaactttagatctgatgcagcaaatataaaaatactttgccaataataggactttatgtattataggatttggtatactgcttgcgagtattttttttcttttttgaggagctcaacttatttaccgattaagatatgccaggtgatggttaagtattgcaacttaccaatcactttttttttttatataaggttgggtctgcataagtgtctttctcatcttgacacagtttcaaattttcctccataggtgagttaacaggcttgcatcccaaatcttcaagcaattattctatcctatctttggtttataactaaaagatcaaatcaagataataattttattttatgctatcttacaatgtcttatgctattttatgttaccacctacaaatttttattctcaatttattttatactatttacaatgtcttatgctattttattttatgccttattactagaataattaaaatttaaaaattaattattactaaataaaatattatttacttattcatcaactattttaatttttaatttaccaacttattaaaattaaaaaaattatcatgttaaagttgccaacttgttcaaattaacattttttttattattttaaagttaccaacttgttaaaattaatattttttttatgcttttaaagtttctaatttattaaaattaacacttaattttcattataaagttactaatttattaaaatttgactattatttttaattcaatttttttcttctaaattaaggcctaagttagttatctacatttaacttaatgattttttttttaatttattactcttgtaaataattttttaaactaattaatactaaaataaattatttaaattattttaaatattttaatttgacttatttatatatataatattagagatattctaactactttttataaaaaatttaattatatatatatttaaaataaataataatcaaattcaagatgttatctcccaaaaattcggcagcataacaccttagaattgatcattttcaaatttttaatattttataaacaaaaccacaaacacaataccagaacaatctaagtattaatattcatcacctatccggccgtagtatattttttcacagatcctacttcactatgtatgaatatataagatattcaaactctactaatatgtattttcattttcaaaactaaagtaacatattataaaatcatactaacctctaaatacaacaagaactgatgatcaactggcacaacaggtaaagcgacattgcaaacttatttactaaaataaattattagaatacaaaaataataacaataattctatacactaatatgtgtatgcatatatacatacacacaaatatatgtgtctatatacatactattataaaaaatatatatatgtatatatacgtagatatatatgtacacatgcacaaaaatatatatatatatatatttacactaatatatacatacatatacatatacataaagttaccaaaaaatcaaattatatatgttatatccaaaattcggcttcactccaaaagttgacacgtgtacaacagaaggaatatgaatcaattctgaatgatataataatattatatcaataaatgcatattaaataactcgttaatattaaataaaagtttgatagataatattcaaacttgttgactttatagtcaaaagcgagacaaggataataactattaagccgagtttaaacgagacatatgtatgcctcaaaatatatagacaagaaagaaatattcatctacttgaaccgaataaatgtagtaacataactgcctcgcatcacacatagcaagcatgccacctcgcattgttgataccaacaaaagcatatgacgagatgaactacttcccaacacttagtattttttcttattaagatggacaaggaggataactcgtatcaagcgagatacaaccttctaagtcagtaatatatgtctaaagaataaaaacaaagagcggttggatagttattagatattatcccacctgtgactaaaatgaaacgtgaggaatgtcgacgtttcattaaccattatatttgaatcaatcccaaaaaagtaactaccaacttatattcttataaataggggtagattttaaaggaaagggggacgaaaaatttgagagtgaattattattattcaaattgtgtaattgtactctatattcaataaatatctctaataatgactcgtggagtatgtagattttaactacaaaatcacataaaaatacatggtgtcaatatatcttttattacttattaatttctgtagagaatttattgctgaaaagctatttagttttggttagcaaaaatttgcattaacagtttcgggctttcattgagagccttggtgataaaactcagaaaaaattcctccttataaacttgatttaatcacattcaatggcaaatgatgatcaaaacgatagaaatcaccctgaagaaacaactcatcgccctggaaaagagcccatgggatctcaaaggcccaatacttttgaaagaacggtgatggtgatcaaaattcagaaagaaggaatgaagatgtcaataattctgccagatacgtgcctagaagtaaggatgcttatgacctaacttaggggtgttccaccaatccaatccgtactatttttcgcatagtacatccgattcgcactaagtgcggatttcatattttggatccaatccaatccacacaatagctcaaatccaatccaatccaattcgccaaagtgcagattggatcgattatttt

SEQ ID NO: 33665 - DNA, 2053 bp, Cannabis sativa
  modified_base (1758)..(1765): a, c, t, g, unknown or other
gatttggtcagatatcgaatatgccgaccaggagtacttaatagattgaaagaatgaaaaatgttaaaaaataagtcaaaacttagaagttagaaatttttgggtttagagttaaagttcacgaaacttcgaatgagcaaggtgaaagatgaacaaggtgtgtgcaaaggcaaacgtcataaaccgtgagctataaaaattattacagagaaaatcacaaagtttcaaacctagattttctatctactttctacaataagtcaagaacgcgtgtatgaaacatagaaattaaacatgcaaagtcaaaaaagaaggaaattgaaaacttactcactgtttgacgactaagttcagtccagacgaagctgctcggatgctttgggtggaaatctctcgacagacttgaagtaaaaacccttttcgctctgagtttgtttagtggagaaatcggtaaaagtaaatttgtgaagaaaactcaaccttatttataggcaaagtgggaaaaaggcaatcatttcaaaatgcctttagacccatcggttcacttccaaaagcaaataattgggaaatcatatgtaatcaagtgtaaccgtcaaacgtgatgagagaaaaccgagtttcgaggcactaattaagcatgagcattaattagccaaaaattgaagagacgtctggcagcctcacatcaagtcgcgaacagacgcacataacacgtgtcacccattcaaatgcaagggcagctcagataaagtctacacgcaactttggaagtctcgtacagacttgggggcaaatgttatcccaaattttgcactctgacatggtatcacccgatggtgacacgtggaatcaacttcacatatctactcgcaagggatatgctgagcagagcaccgcatatatttgcacggaaaaagccttcttaaccgagcagtaagcaatccgaacagaacgccaacacttagcagtttcaactctcgcatcgtgaataacgaaatcaatctctataattttgggatcatatcacatagatatggaaagctgtccaaatcccttgatcagtgtattgtgtatttaatatgcaatcttgcaaattatatctattgtaaacataaggaaaactcttccctcgaagcttatagccatataaatagtgatctactctcactgggcaaaggttcgaaaacttatctaagaatacatattcagagatattattgtaagagctctaagaaaaggaatcatcacatcctttgttcttcagtcaatacaaatcaagaggagtaggttattatagaactgctcgtgtccgaacctctatgaaaactcttttgtctttgtttatttcattatattatacctctatcatactatttatcgcttacaattaagactcactatatttggccaaaagcgaggtcaactgagagtatacgaggatgtcatcgataaacactatgatgcagttatcaaggaaatccttgaatactctattcatgagatccataaaagtcgctgcaccatttgtcaatccgaatgacattaccaagaactcatagtgaccgtatctggtttgaaatgcagtctttggtctatcttcttcccgaattctgagctaatgataaccggggcacaggtcaatcttcgaaaacacagtcttttcctgaagctgatcgaacaaatcatcaattctgggtaacagatacttgtatttaatcgtcagcttgttcagatctcgataatcaatacacattctgnnnnnnnnatccttctttttcacaaacaaaactagagatccccagggcgatacactgggttggataaacccttactcaagcatcccctgaagctgtaattttatggcacgtttactatacagtatttagaatcagaataaattaatggagaaatgtaacgaagtaaatgaaaaataatcggaatcaatatttgtaagatgctgttttactaaatttttttagaaatggaatgatagtgatttatcttgtttactttattaggaaacgtaatcggaatacttaaattgactaaattg

SEQ ID NO: 33666 - DNA, 1460 bp, Cannabis sativa
aattttcaacttaaacatatttttctatttaattgaatatttaaaaaatataaattagttactagaatttactatatagaatttatttcattaaactaagtgtgtttttctaaattaattttaacataatctaatgaaaaattaattttatttatttttaaattaattatgttgctaatcaactttaatttggttaaactaatataattaacctaatacaattatcaaaataaggtaaaatgggccttcacagttggcgtagttcatgtgagggagggctgggtttagtatgttgtacccactactatgacctcttaactctcacacaaggcccaaaagagaggaatttgggaaaacttacaaaaatattgactttttgccaaatctttacaaaaatactaccatccggcaaaaatttcttttatatgaccaggcctattttttttccttttatactgtctaggcccattttttttcttttatactgtgaacagtaaaatgggacaaacgacccctccttcttcattggggatggacagaggaacaccgaaatcatagaaacactagggaaacacccataaaatccggcaaagaggaaaattagtaaatcgaccactaatcaagatccaacaacaacatttaagctagattcaaaggaaacaaaagaggtaaatacacctaaacccacattattttaattttaaaataataaaataaaacacacccagatttagatctggaattcaaaaaattaaaaagagtataatttgaaaatgtttaattatacatgccttttaaaaaagaaaaaaaatattcatatagatcatccctgagaaacgatttataatgtcattacaaaattcaaggttgttcttcgcttataacaataaattcattgctaattaggggaattagccaaataataaaaaggataacagaaagaatatatttatgaattattttttagtgttattttacatttgttttaattggagaaaaggtcaagtaaatgaaatattgtgaaacatgagaggttatggaatctataccagtcctgataaagagcaatggacaatgggaagaagaacataattatgtcaaatatgaggctagtggagaattcataccaaaagattacaagtatgaagagctattacaaatactacttacttcattagggtgtgaaaacacaagaacaacactgcaaatacagtaccaagcgaaagatggaataccaccgattaaaatattcaacgatgcgagcctcttcttttactcgcaattgacgattaaagagacagatttcaccacatatccattatgcttcaaccaacagaacaacaagacaacacctgctgaaatcccaaaaatcacatccacaacaacaccacatcaagaaaatatggcaatgcttgaaaacaacacagcaacaatagaatcatacacactcgaacaccaat

SEQ ID NO: 33667 - DNA, 2616 bp, Cannabis sativa
atgtttatttttttcacattcaattgttatattttagttattgtgataatgagataaatataaagattgaatttaaagttcaaatcatccgttataaaaaaaaaaataaagtagtttgatctttttttattatataaatatgtatataaattatatataataaaaatatatatataaaaactttattaatcgggttggtcgggttagttcgggttgattgggcgggttatattttcgtcgggtttttcgatttgtatttttcgtcgggttatctcggtttggtttgggcgggttgttcgggttggacggtttacaaaaatttatgtacagtcctattaaatacattgttatgtaataaatattatcataatacatagaagataaatactctccataaaatgagtacttatcgttataattcatgtgtttattatataataagaatcgttgggtttgagcgataatataaatgttgaccaagtaagagaatattagaatattttatataaaataagtcaaatgtatgatttgatattgattatatttgacttattctatttatggtcagagttaattactaaatattttagttacctgatttaattttttaaattaattgtcaaaatattctaataattaatatgacacagatacgtgcagtcccaagctcgctactcattctgtgtaaaatattaagagagttagagagaagttggaagtccgaatatccacactaacatcagtattggtttttttttgttgatcctatgtttgtggagttgaaactcaaagaattaataattgaaggtattttaatctatttattgtatatatttatatatagatataaatctaattctgcgttcatacatataattcatatatttttataaatattttaacaagataatgataaaaagggtgatcatagtgctaaaagaataatttattgatgtcttagatgggatgagtaaaaatgttattgataataaattatttgttctcttcctctctcttttttatttatcataagagtgacccatttgactataattttttttggctttgttgatttttttttactctattaaattttttattgtcttattgctttcgatgtgtatgctactttttctttgtatattattgttatttttatgaattatgtttgatgtaacgcttagtaagaacagaaaaaaagtacctattgaatatgtttatattgtaagttttattatgttttgttggcttttcaattttttatatgttgtttttccgattattttgtagtaattgtggtgtttttataatatcattgagatttttagagggctgtgggtgggtgaggagggttcgtgcttgggattctttgacaactgtgggtgggtgagcgttcgtgttgctgagaagcttgaaattgagaaaaagaaagtgagataaaaaaaaaaaggagaggcctttcaaataggtgggatatttttgaaacattatttcactataaaaatatcataaggagttaatagtaatttattaatagttttatagagtttataagtatgtaattatttagagattaataatgaaaaagaatttttggtttattttgagagatttgttagagaattattcactaatgacaaacatcctaaaaaggaaaaaaaaaaatcaatttctcaaactatattcattgatctttaaacaattacatatttgtatactttatgaaactatttttttaaaaagaagtaaagcgtaatatatagattaaaaatgttacatcttgtgatcattataaataagtttgattgtaagtctgcaacattacaacaaccatatatattgtgggtaaacgcccatttggctatgttatgggccataaaattataagaccgactaacattagaaaagttacaaccaacaaacgaagaagaagtgcatcgatagtgacactgtaatttgcaatctcccagttgtactcaatcccaataagagcgttgatcaccgccctagaatcactttcaaccattacaaaattaaaccccttctcagccgccaaatccaaagctaagcaacaggcagcaacttctccacaaacagaatttcaaaagtcaagccttgacgtagtcacccaatagagcgcacccaaatgttttttagcgccaacgcaatacacatgtgttccaaacctactttgacatcacaattcagtttgatccagtccgtcagaggggggcaccaagtatctctatgcactgcagggtgggtaactaagaaagaagctcgatacttagtatagcagaaaaagatagagtcaatataaaacttaatgctacccagattatttttatgaaacttatcgttccgtgcccgccaaatggtgtccaccacaatgtacgcatacagaaaaaccacattctcatcaaagcccttgtcttttaacttccaaagaaactttacccaattccacatacgaataccagtgtcaagaacaagaaaaatacccccacggagaagacctccataaaagataagccaaattgcaacgaatgaaaagatgctccattgattcctcctcaaccccgcaaatagggcatatgggatcctctaactggaatc

SEQ ID NO: 33668 - DNA, 1866 bp, Cannabis sativa
  modified_base (1800)..(1817): a, c, t, g, unknown or other
ccactttttaccctcacgaaagccaactcccccatactttttagggagacaaaccttctcccacgaagcaaagtgcatcttagatcggttcctagaggttccccataagaactctcgacatctcatatcaatggctgctataacatggctaggaagagtaaaaatactcatccaataatttctaatgtcgaggaggactgagtggatcaattgagcacgactcgtaagcgagagatttctgctagcccagcagtttaagttcttgtttatcttatcacgaatcactccacagtcttcagacttccatttagttggacaaagcttgaacccaaggtatttgagagggaaggaaccttcttctattttaacgagatccaagatcagagatttgataccatcctttaccccacaaaaataaatgtgggatttggccttattagccgaaagacccgtagcttggcagaatctcagaaaagcctcatttaagcaactgaccgagttgaaattccccttgcaaaatataataagatcatctgcaaaacacaggttagttagctttagatgtttgcataaggggcggaaccgaaaaccttttctcccagagtaatgggctaccattcttgtaaggtactcaatgataagcataaagatgagaggggacataggatctccttgccgcagccccttttcacctttgaatttaccctagatacttccattcataagatgattatagctagttccctttaaacaagtcataatccaactgatgaatctagcagggaaacaaaggtgctgcagaagatcttctacaaactgccagtccactgtgtcataggccttgctcatgtcaatctcataatgcatcttgctgaaatgtttttcctcgaataacccttaaggagatcttggaaaatcatgatgttgtgagcaagaagtctatttttcacaaaggctccttggttactttggacaagagaaggaagcacctccgagagtctagagcaaatcatcttcgagatgcatttatatatagtataacagtaggcaatgggtttataatcacttgtagataaaggattcactaccttggggattagagagatcaccgtttcatttagactttttggcagtcttccatcatggaagaaacccagaacaactgtggatatatcttcaccaatttccttccacagatttttgaaaaaatccgagccaaatccatccaatccaggactcttagaggagtgaatgctaaagatggtattcttcacatcactcttactaaaaagtctgatgagattcacttgttggatcaaactgaggctagctccatggtggagacaatctgtattgattcggcaagtagctgaacttttactacccttaaagtgttcaaaatgagctagaaagtgatgtctcacattgtcaaaataatcttcaataatgttatcttgagaaaaggttgttattctgttctcgagctttcttttcctcatagtcgcattgaagtaactagagttttcatcacaatacttgacccaagtaatcttactctgctgtgtgacaaagctagaataatttttctgcatatgttgaagacgctgcaaatgttgggaaactgccagttggaggcagatatcagtgggattcttggccgcttcctcttgaattctgctatataattccttggcttctctgtatttcaatgtgatgtcacccacttcactcttactgaactaaattagggcctatctaacccgagaaagcttctgcatgataccatccaaaccactcctnnnnnnnnnnnnnnnnnnagcatttaacaccctttgcttgtaattaggataatcaacccaatagttg

SEQ ID NO: 33669 - DNA, 2184 bp, Cannabis sativa
agagagaaaaaacacacaaagaacattctctgcaagaaatactctcattaataacagagactcgtggactacggctcattaatgtccgaacacgtaaagatcatatgcattaattatcccaacgctctcattattatcttatttaattagttgccaaaaacttcggtcaacaggtgataatcgaaattgttttctattgtaggtcatgagatcctcatcaaggcaattattcaatctatttcaacttatatgatgatttttttaagcttccaaaagattttgtcaaaaatgtcaatcgtatgcgtgctcgttttttgtgggagtataaataatgttaaaagaaatatacactggtgttcttaggagaagatttgcttgcatatatgggctttcgggatcttcatctgtttaatcaagccctttttggcaaaacaatcttctcgcatctacaatattcttgattctttgattggtcgtgtgctcgaagggttgtattttagacagaggcctttttcccaaatcactaagtccaagtgtggcttttatgtttgcaagattttttttttgggggggaagaaactctttgattcgggggcactctagcgtgttgagaatgtcaaggatatttccatttatattggcaattggatccctacagtgtcgcccgacttcttatcaacacctcatcgacttgatgggttaataaaggtctccttgcttcgtgacaattcgagaggatggaatagagagctaattcataccagttttttggatactgaagttgtggctattctttctattttatggtcaacaaacgatgtttcagacaaaattatttagaactttgagaattcaggttggttttctgtcaaaagtggctattggcttgttctctgtaacatgattttgcctcgtgcttggattcctacaaaagttaatctgactcgacatggcctcttatctgatggattatgtcctttgtgtgagtggaagaggaaactacccatcatgctcttttgggatgtaattcattgatttattgtaggaaaatctatgattttgtgttgggagatccgtgataaaaatttatatgtatgatataaaatatatatgatcgtgtataaaatacaaatttaatcgaacatatatgcactgtgaacaaaggatcgaaatacctttatccattaattctttgagcttcaattctatattagctttagatctacaaaagaaaaggaagttaattagtgtgggtagtcaggcttttgagctctctctgaatgtgtttttcataatttttttcaaattttgatagtttttaaatctttttcatgcatagattaaatgtataacacagtatgaagacgataatgtagataagattcacaatatacctcgagaatgaaaataaaaatttgtcataccccacgaccagaaactgaaaagctttacacatatatacaattgcatatagtgattttatttcttttatcacatatttaacaaagttatctctttcttaattttaataaagtaaacaaatgtaagaaatgactacattactattaattcccaatagttattagtaaacatgtcattagataaactttagaaatgcttttaagaatttttgagccttatatgtttaatctagtgtttaaggatgagcatatatcctctcaaggttcttaacacaacaaagcgtattcaacaatattttttcaagtgaactatatatgacctctcatttgaacataaatgaccaccatgaatgaatcacctctttttttttttttttttaagtgtattcaacaacagttttcactctcatttgaacatgaacgaccatcatagagctcttggttgttactattgttaaattgagtgtttatggacttaaatgggtgatttaggggttatgggagttgttggaaccgagcacaatgttcaaaaaatgttaaaattacatgttggaaaatggtcaggtgacatgtcgcttgttgtaaaatctcaaaattttggtaactagtagcctaccatttttttttccagtatttagcaatataactcaaaactaggagtggacatccgatccaatttaacatttttctccttatttgatccaatccaatcaataattggatttagaaaattatcattaatctaatccaattagacctcaaa

SEQ ID NO: 33670 - DNA, 1575 bp, Cannabis sativa
  modified_base (1314)..(1320): a, c, t, g, unknown or other
aggctctaggaacctttgacacatggaagaggctgttagaaaactagactagaaacaaactcatggtcctaagaactgacaatgcccttgagtattgctcgaataagttcaagggattgtgtgccaaaatgggaatctaaagagatagaattgtgatcaaaattcctcagcaaaatggtgttgctcagaggatgaatagaagactgattgagagggttaggtgcatgctactaggagctggtttagatagaaccttttggggagaagctcttaaaacaacctaatacctaatcaatagatcatcatctgtgccaaataacttcaagaccccacaagagtcatggacaggtaaaccctcaaacttagatcacttgaaagtatttagatgtactgcatttatgcatgttagagaagataagttgtagcccagagcattgagatgcatgtttttaggctaccctgaaaggggttaaaggatatagagtgtggtgcttagaacatggattcaagacgtgcttgattagtggagatgtcgttttcaaggaagatgaaatgaccatgaaaaccaagagcacttccaaagacaatgaacctatatcggatcagaatgtctagattgaagtggagtaggttgctcctacaacaccaactaatgttgttccagatagaactgaggtaacagaaggtgaagacaatgaagatcaggaggaactaaacagctatgagttagctaaggcccctgatcgatttggttatgctaaattcattacttatgcacttatgattacagaggaggttgatgacagttcagaacccactagcttttgagaaattatgagaagtaaagatgctataacatggttgcaggccatccaagaagaggtgcagtctattagaaagaataaaacttggattgttgtgaagaaacctgaattctacaagttggttcagggaatgaacctactaaattcaagggaaggttagttgctaaggggttcactcaaaaggaaggtattaattaaatgagattttctatccagtggtcaagtaagcttcaattagagccatgatggcaaaggcatcaaacgtggacctagagattaaatagatagatgtaaggacaacttttttacatgaagaattggaagagaaaatatatatgtaatagcctgaaggctttgaaaatggaaacctagatgagttatgccaactcaaacagcttcttcatggcatcaagcaggctcctaggcaatgggatttgaggtttgacacctatatgcatgatattggatacactaaaagcaagtatgactnnnnnnngtatttcaataatcaaacctatttactactctatgttgatgatatactgatcttcagcaaagcaaggtcagagattgagaagcttaaaatgcactacaacaattatggttattagaggcggaccactccgctggtaataatcccttattccgccgataaagagtaataccggaggggtccatcggtaataatccgctggtaatacctggtcgctaataactattattagtggcggactgacacacccgccgctaa

SEQ ID NO: 33671 - DNA, 2029 bp, Cannabis sativa
cccgataatataatcaatatcaatacaatacacattctgagtctgagagaaccatccttctttttcacaaacagaaccgaagctccccaaggcgaaacattgggttgagtaaaccctatatcaagcatcccctaaagttgtagcttgagctccatgagttctgctggagccatcctatacagagcttttgaaacaggttcgtttctaggtgctaaatcaatcacaaagtctatttctcgtcgtgccgataatctcggcaactcctcaggaaaaatgacgagaaaatcattaacaactttgactaccttaggcccaaatgtttcgggtctgctggagtcaatcacaatcgataaaaatcctacacatccactgtgtagtagatccctagcccttaacatggaaataatcgggatcagagacgcctgaaccgatctaacataaataaatggattttcaccttctcgatgaaaaaagtcaccatttttcacttgcagtctatactggccgaatatttggatagaaaatccatcacaagtataatttcaaacttcgttaattccagttctataaggtcagcactcaactccctatcttcaattctaactggcatagacctaatgcgcctattggagataaccaactccccgctaggcattagggttgcaaaccctcttttaaggaaatcataaggcctacccaaaagatcaattacctgtgtagccacatatgagtgtgtacctcccaaataaaataacatagtataaaatgagttgttgataggaagctgacctgtcaccacagaaggacttgctgcagcatcaacttgaatgatggcaaacacccgagcatatcttctagttgcactctccgggatgatgtttctagcgtccacctctgccctggttcccaccgaactgcttgctcttccccgagccaccagatgtcggagtaacatttctttactgatcagtggttgaataaccaccatccctaccatggacagcagtaggaagagtggggttccaccaacactcggggtcacattgggctcctaaagaaacttaaccgcacgctcagctcgtagagctttctgaaccatctccgcataaaatgttgcctcattagtagtgagcaccaaatcatgtctaattttcacattcaaaccgccaagatattttcctttcttactaaagtctgttggcacgatatccaacgcttggccaaacgatcaaactttgttgtatactaattaatcgacataccctcagtctgtaccaactcagtgaatgcttttttcttagcactgcggactggtttattgtaatacttggtgttgaataactcttgaaactcttcccatgtcattacagtgacgtcccgagtgagggacaccaactcccaccacacgagagcatcttcttggaactgaaatgtagcgtaggttaccagatcatttctaaccacccccatgaaattcaaaattcgctctatcatagtgagccactgcttagccttcatcacatctggacctcccaagaacactagaggcgcttgcttacaaaacctctcgataacggctccatacggttaccaggaacaggttgttctgctagcaccgttggaactacaactttttgaacttgttgtggaggcacggtaggaggaccctgctaccttaatctctgaatttcctcatcttgttggcaaatacggtcttgcatttccacaaacctctgctcccaatccggaggagcttgtggtcgattcacaaggtgaccatcctaaattcttccacagcctcggtcgcgatcacagggattataaggaattcagttttccttaccacctctgatctcaaccatattaccctttcttgtatttctctaggctttcatttaataggacttagcctgtgaacccataagctaagtaggtgacacagcgatcataaaacttaataccgctcttatggattttaaggcaacgcattaaaataaacaaccatatctaatatgcttcctaacatgct

SEQ ID NO: 33672 - DNA, 906 bp, Cannabis sativa
ttatgtagtcaaccatattaatttcttgagcaattttattaggtgtctagcaatttttcgatatgttgcgttgtgattggctagtgatacttcttaaaagctattatattaaattatatgagactcaatacttagttggaccaataacgatattgacacataggaaggtgctatagacaccactgataccttttagcatttctctaattttttagcgagcattgttattaggcaccagtgatgcctagcacattctcgacatgtcactttgcgattaattagcaatactccctaaaaactattatattaaactatgtaagacccgaaacttaattagaccaatagcgatattgacacataaaaaggtgctaggcaccactggtgccctctgatatttctttcttagctaacgttaaaaaggttaaaaagatagagagtgagagagaaatatatcaaaaatgttgcttttttacttatttactttctttctattttaagtgaacaggttcttcaataatattctaattttatgttatctttttcctgcaaagtgatgttatatactctccatcgagcaattatggattttcattcacccaagtagtgtacatattctatggaaaactactaaataatttgagcttcgcaatctatgtttaaaaatttttaaattatatttataaaataaattatatagtttatttgatgataactaattaataaaattatattaattttaattttattaattttttatgtaagtttttttaaaaaaaaatagaagttagatgtaaaattggttaattcgacctaacaatttaaaatttaggttttatttgtatcatgtttaagacaataacgaagtcattgttgacaaactgttataaaattataattttacaaaca

SEQ ID NO: 33673 - DNA, 2362 bp, Cannabis sativa
caacataaccgacatacaaaataatagaattaaccgaataaacaaccaactaaacttaatatctaatagatggacactcatgctttcttagaaagatagtgttgatgtcaccttgttatcttagggccccacttatttttaatcttatatggttgttaataatggtcctatctttcatttcactcaattctatggtgtacgtgagactattaaccgtgttgattctcggattcttttaaagtgtttgaaagatgcacctcttcttccatggctggccatacgtgattttaaagaaaaattgtacaataataacaagtctggaagctctcttcgtaatgatcacaatgctttcaaaacagttctagtctattgaatcttgcaggaactcccttaggagggtgatgttaatgtttatgtcctcaaaaacctatgaagacattattgattataaatattaattgaatattttgatatatccttgaatgttaaattattaatatttaatattgaataatttataaataaatattaaaaaattccttattcatatatgaggttgtgacttgtattgtacggataattaagatcacttagccatgaataaaatagtcagtaataagtgcatatttacctattaagttgtgttattttctcttattattattattaaattaactctgtaaacctttgattagtgtgattttgatttgttaaaattttgaatggctaatcatgaataaacacacataaatacttgattgacaattactgtatttcataattcagatgatacgaattttgaacatgatgcaagaaataaggtcctaatattatgggatattgcaataaattattatgatttggagctaaatatctgaattcccattaatcgctcatctagaaaatattagactctacaacttattctttttagttcgtttgtccaggagtggcactgtatccaatttgtgaagctccaaactaaaaaaaactagcttgtgcagctggctgcatgaaagtacttggtccatatactgtaggagtagtaaaagtagtcgatggaggataaatggatagagttgtcatctgcgaaggttgagcatttgttacatgagtgggaggtgctagaagtactctatacgcttgagcatatggatcttctaggtttataaatccttgagctcttgtcaagaactcagtcaatgtatctgcgcttttacgttgaagatctccccacaacaaagatccagttgtaagtcctgatgttagggccactattttcatgtcatcgctgaccttggctttagcagccacatccatcattcgttggatgaacttcctcaagatttctccttcttgttgcttgacgttggtcaaggaattggcttccaagtcatattctttggctactataaactactttctaaacattacttgtaggtctctccagttatggatcgatcccaaagataacctcttccaccagtcctccgtggacatgcttagtgttaatgaaaaacataaacattttgcatcatcactggcctaggcaacttgcatgatgcggttgtatttggacaagtggtccctggggtctctacatccttcatacagctccatttgtggcattctgaaatgctctgacagtggtgcatcaatgattctttttacacaaggcttcgtatcttcttcctcagagtttgacacatcaccactttgctttctagaaatcttctcagtgatcttatcaattccttgactttgcatttcaggtgttgagtcttatcacttgaaaattctcttttgtgaaaacgatcgttgatgtggtttctcagatcgttcccatagggtctagcttagtctgctttggctttttctttcttagcattcaatcttcttcaaagatcatttgtggaaagacttccataactgtcatccgatactggatgtacttttccaacatcctcgtcgtgattactggaatcactaagagggtgcttatccatccgggactttggcttttgaactttggcattagttttatttttctctgtgactctacctctagagttggtctagtcaccatgccctgaagcatggtttcctttcctcctctattgaggttggtcagcagttttagactttttatgctgcttgattagaaggagtttcttcgattcatcggcgactatctctttgcttttgtcttaatttacactacaacaattaacattattagaggcagaggagtccgctggtaataatcctttaatccaccggtatttggctttagcgacgggggtccgccagtattggcccgccgataataccccgtcgctattaatgattaatagcggcggac

SEQ ID NO: 33674 - DNA, 1405 bp, Cannabis sativa
  modified_base (478)..(503): a, c, t, g, unknown or other
ccttgttcctttctgtcgcaaagtattatcaagatctgagcccaattctccttcaggtgtttagattcttcacagtcttacacactatggttaagtactatacttgtaattggtgggcatgcactcattcactaatggctcaaaaatttatgaagaacactatgagatttcgaaagtataagaagaagaaagaagaaggaggtctcaaaactctagttgtttgacaaaatgaaaactaggttaaaaagcattagttggataatgagatcatcctattctttttattcacttagggttaggattgaattatatggtatacaaatgataaaataatagccaaaaataggacttagtggacaaccatgtatatgggccccactaattatatttttgctatttttttaaccatttatcttttattttacaaataccatattttcaaattttaataaaataaatgccaaaattatttatttannnnnnnnnnnnnnnnnnnnnnnnnnattatcatttatattatttattaagtatcaggtttactaagataatttatagtcttctcaaatatataaacctcaattatatgcactttttctactctcgtgataaattaaacatgtaatacgcattcaacatataaaccctactctcagatctcgcatcaaaatcatagacatttaattggtgatcaggcagttaaaaaaaattaagtatgaatgacatagaatacatagaaattgagggaaaattaaatcataataaaaccacaaatcaatatcaaacaatctccatctagaccctaatgaactgtttagctactcatgttcattgtagcaaattcacacatattaatttaagaaaatagagaagaaaaaaatactgaaaaaccctctcaaaaatgcctccagtattgaattcgttctccgaaatatgtactctttgatttctctgatttccttctgaattactttctaattaagagtttctaagttttttcagctctgaaaacatactaaaaacactaatgataatgtgtttatatagactaacaaggttacctaaaagatactaaaaggatataaagtttaaacttaaagaagataaaaatcgcaccactatccttttttctcgctatctttttacctttttaattttagaaatttcctgctgcaatgactgatagtattttagtcataactctctcgatattgctcaaaattagaagattcaagatgttccgaaaagctgaaagagagatctagaaattttatgttttgactttttctaaaatatgaacatatcatagtcgaatttagacttgaagtttcagctttattttttttacataattttctctattttatagataatcttattctaagatttgaccaatttatacattcca

SEQ ID NO: 33675 - DNA, 1449 bp, Cannabis sativa
actgtagactcccaccaaaataggtttacttttagtgttgggttggaggcttttggtgaaaaaattacatcatatttgggtttttaaagtcccattgaagatggccttagggcaactctaatggagaaacccaaatttaacgttaaatcaacactaaaaggatactatttcaacactaaatttttttccaattccaaccacaacactaaaaattacactaaaaagtatattatttattattatattatttaattaataaattagattattatataattatttgttttttaaaaaggattatttagttatgaaaaagtacaaaaaaacagaaaaaagtaaactgtagttatgtacaatgcccactattattagtgggacactgtagactcccaccaaaataggtttacttttagtgttgggttggaggtttttagtgaaaaaattacatcatatttaaacaagagagtaaattgcaataggctcagacaatattgtttttcattatgactttgatattagatttgaaataaattgcaattgtgaatttataataataccatattttgttgtggacgcataacaaaggtaaagttttttaaaaaaaaaatacaatttttataattcttatattaatttgtgtttttaaagttgtgttgggattaaagctattaaaaatccaacaaatataataccatatgtatgagctacttttatgtgatccaaatttaataattggttcaaaagatactccaaaagagctctttgcgagagacggaggcttaagccttcactcaaatttataatatataaaaaacttttatattagatacatgttagttagctttatttaagattttgtttagtatagatgtaaatactaagtcctcactctgtttctatctaatttcgttaataccactaaaatttaacactaaatttaaaaaacaatcaacactttttttcttctaagtacatatataacactctatttaacatgttttttttttttttttattatttaatttttttttaaataaaaataagtcatttgattcaatttttcattcaagctcttgaaaaaaaatattcaagctctcactaaaccgaaattctggctccatcactgctatttgcgattagggatagtaagccaaaagtgtcgtcaatcaaggaagagcggcttataattgaaaattacatgaaatatggaattttattaaaaaaaaaattacaaaaatatggcatttttaggtttgccactcttctatagcatttttttacatttaagaatttttatagtatttaatatgccatatttttgtaaacccaatatctaaactcatatttcatgtttttatttctagcttaattagtttttattaattctttagtttattttacatttgcattttagggtttcttctatttggaaaatttacaccaaatact

SEQ ID NO: 33676 - DNA, 1277 bp, Cannabis sativa
acgtgaggatatctcacgttcttctcatcctcctctgaaaatatgattggaggttcctcagtttttaccttcttggaaggttctagagcaaatgtcgatcgtccgttctttatctctttcacatatctcttttgaaataaccaagatgtcctctccttcagcaggaagaggttgtaacccctggttatttgggttattgggcaaaccgggctagttgtgtccattgccatatctcttcacgtactgtttgaagtggcctccagtatgagactttctatctcatctttcaactggcggcattcgtcggttgtgtgtctaatgtccttatggtatttacaatacctgttaggatctcttttgttcctcgcatgcctcatgggcttgggcttgctgaaggcaaccttgtgctcatgtgcgaggtaaatatgctctcatgtttcattaagttcgatataaaaagtatacactagcacatacttatcgtgcttcttctatttttttttatcctttgatagttccttagaaccgccgtttctcttcgagccaaaagcccccgagttttcaactctcgttgagacagtacttgtctaaatattgctgggtttgcctcccgagcctgatttcaataaattcatttctttttgggcgtcctctttttgaacgaacacctgagccctttcgttgaactcagtgatgattttcattggacgaccctgtaagtcatcccacggctcgcccccagcggttgatggatcagtagagatccccacctgaaaggctgtaagttgtgtactatcatccaaatttctaacccttgtagcagccgttctaaaatgacttaagtatgccttaattgtctcaccaggctgttgctttggttagcgaggccgcttcgggtcgtctatcccttacaacagggaactgtttcttgaaatccctggacagctattcccaggaagttattgaatggtgagtaaacttgttgaaccagatacttgctgctactacaggtaacaagatacaacgtaaattatttgtcacattactagcttgcattactgtgttgaagttgttcaaatacgagaccagatcgttggttctatcatatgatgagacatgtgggtttttaaatctcgagggaaaaggggtattcatgatatctgggtggtatggctcaagctccttgtctaagtcgtatctagattgtctccctaattcttgcatttgatatctcctgaacttaccctccaactcgtctattcgcaattggataggat

SEQ ID NO: 33677 - DNA, 1197 bp, Cannabis sativa
tttttttttgctctgtttttttttttttggcaatagaacttggctttcctctgtttcttgctctctcagctctcgagctggtgccatggcgaaaacgagatccaaggtgcaaaggaagcaacaatctgtaactaagaaacctggtgcgaagaaacgaggccctaattcatcaaccgaagctaagaattcaaatccatggactctatccttggaattgaagcagctgagtttacggatgatgaggagagacctatcgaagagaatactacactggacgaacaatccctgatgttatcgcctcgatcatcacttcgagctctgcagcaataagaggatgttcgtgcttattttgcttttttcctagaaggtaatattcagtgcggcaaagaccttgaggaaggtaatcactcagttccccctatcttgagatctggctctgtcttaagaaacttaactgattcctttaacaatgctgaaaattctagtgtcaataagagagataatactgaaaaagggaaagttaagattgccatggatgacattgaagaggaaatctcattttggaattcatctatagtttgttatgtccttggggccaatccgcctttatcaattttggaagggtttgctcgccgaatctggaaggataaagttgacaaagttggattgctatcctatggcatctttatcattcggtttactaccattgaggacagggacaccatccttaatggagggtataccttctttaataacaggctagtgataatgaagccatgggatcccgacaccaactttgagaaggaagatattcgagctgtcccaatttggatccaactcaaaaatctggatttgaagtattggggccaaaatactctcttcaaaattgtagggcaagtgggaaaccctataatggtggatgacaatacaaaaatgaggcataaactatcctatccctgaatccttattgaagtaacactgcagcaggatttacctggaactatcagttttaaggatgaacatgggttcaatatcacagtgggcatcaagtatgaatggaaacccatggtgtgtaaaaattgtaatgttctcggccatatgactgaagaatgcaggaaaaaaccagggcagaaaaagcaacaatggatagtcaaggaaccaaaggaaccaattccagcaggggccacaaacacagat

SEQ ID NO: 33678 - DNA, 1250 bp, Cannabis sativa
ggatatgattttgtcctgtactttttgtaattcgtgatgtacggcatccgtcatatgaggaaattatttgatctgacggttgagattgatctaggggtaattaaggttaaaaagtaaaaacgtacccggacactcatttaatgtaccctgagacccatctagtgtactacggaatacattccgtgaaagtatatcacgagacaaaatcatatccctaaattataattatattgtatttatatacaaaagtctcttatcatgttcttgtcttttgtgcctagaacaatatttctacacgcgtagaccagtgatttttcataaatgtcgcactcaattattacaatacgaaaaaactagttagacacagagaccatattaattaatttcctttattatgctgtaatcttattttcaacttctccaataattcatgtggctattcaagagaatattacttcatagaactttttatagtattaattatatttacactattgcaactaaacccttcccctaaaaggatatagaacttcataaattatttagttatatttctgctttgcaagatatttcttagacattttttataatattgtaatttttattttggcatttctaatttttaaaattttagcgattagaaaagaaccagaaaagggtgatttagttacaatttggaatcttttatcatatgtttggtctcatttttgttgtttttgaaacattaacgtaacaagcatgcattaattcttaaaactacatatatatataaatacgaatattatatataatagaaaaaatttgacttgattaattaactataatatatatttcttgattaaacaaattatacaagagagtagtgtgtatctgatacacactgatccgaatcaaaaaggagaactgcgtgaaataaggattgagaaaaaaaaacattatattaaattgattaaggtacgtatacgtgagtctgacgccgggccatgccattgtcggagagtataggtaggaccctcctatatcatatattcatatgtacaaatgtatatatatttataattaaggaacaccacttcaggctagctctattggttatagatgagtgtgtgttggaggtgttggattagtttcaagtaaaacataacatgattgtaatatataaacgcttaaataaaaaaaggtaaatatcattttggaccatgtgttttgcagaagttaaagattggaccctgtgttttgttaaatgacaa

SEQ ID NO: 33679 - DNA, 2721 bp, Cannabis sativa
taccacatgcactcagtattctggtgtactagtgttggtagcactagttcatgctttcgaaagtataaccaaccataataccatatgcactcagtaattcggcttactagtgttggtagcattggttcatactttctgaattgcaaaacacatacattcacgatataaaaatataatcatatatatacaccaactatcgttctaatggacatgtcatacatctggaaaacataaatataaacatgtacatatgtatgtgtgttatactagtcttacctcaattttgatttcaagtgtgtcggtcaacctcagtagaaatagctgctggtaatcaaaggccctaagtcacatttatagaaaaaccaataagtgttgccctaatacttttgggacttaaattgacaactaaaagttttcttattgatagatatcatggaaataccctatatattgagaaaacactcaattaggttcctgggaaaagtcttaagatggaaccccaaattctgcctaaattggatggccaaaaactccactatccaattttaaaacttacataactcttgaaattcaaagccaaaccttacaaaatttggcagggtatctaaaaacatcacaataaatatttttcatgaagaaatcttaatcaaattatcaacaaaaataaaattaaatggccccgtcctaaaattacctaaatcagatggcttgaaacctccctgtccgagtatggaaatcccataactcctccaatactgatccaaacatgaccaaattttttagatcacctaaaaacatcatagtgaacatattttacgaagaaaccttaacccagttcacaacataattcaagttatcacaaacaagttaatttttagttctttgaactcaaacttgcataacttttgctacaaccacccaaaacaattcaaaccacttatgaacagtcctaaataaaattaataattatttcataacctttataaacttattcaacatgttctactacaaacaaccactgaaaactaaaaaaaaacccttgaaaactaataaatttcaagttaggttttaccttagaagtttggaggagctaggggctgaactccttgatgaaattaagctaagaaaaggcttgaaaatagtggaaaacgctgagttttggccctagttcagaagtcacaaagtagagggagaaggagaaggtaatttggtgttttttaacttttctttttgcttttgactttgctttttgtttttggttccttttttactttgcatttcctttttgtttgcttcccaagcagctggtcatcctcaaaaggatgagccacagccacctatcccttccaaaaagagtgactaatctcttagggtaaaaagactaaaatgctcttacttccccgcaaagttatctcgtaaccctatgggtaaaattgtccaattctgttatttcgttaaagctcgatattctaagatatctaataatattcctccgtaaaataattgatacaaatttgtatccatgtgactaaaattgccattcgacccatttccactgttatcgagcataaaaatgtaaaaatatgaaaatttacatatagcttgcatatcacacctataattcaataaaatcttcgaaattgagaaataataatcataacacatattttcatgaaaataggatctataaagcgttagatacataaataatcacatagtcagattatttagtgctaagtctcccactaatcccatgtctatgtataacagtcattacaccttcgcttcaaagattgtgcattgtggaataataagtgtgcaattgataagtttatttagaccattgctgctaaggataatttttgggtgaaatagattcataatgtttacttaaaggataatgattggtggagctactctgctccaaccactgatagttggtattggactcaaaatgtttgaaataaagatgagttaaagaatggtatttgtattgttgagctccaaaagaacaatcatataattgcaggtatttatactaagatgaaggagaatgttgatcggtgacacaactcttttatctaagattgcttaggcgtgcctaagtacaagctcattccatggttggctttaaataatagattaataataagagatcgtttattttgtttcagtgtgacttttgatcttcattgtcttatttgtggtcagcacaatgaatttattgagcatttattttttcaaaatgctattttaatttgaggtgccttaaaacatatagttctttggctcaagattgagactcattgttgtatcttaattggtataagtaaagatgcaagcacaacaaaaatagaaaaaaggtttttgcttttgcaattactgcttgtgttttttatatttggagtgcttgaaatgatgattttttgatttctgatgttattagaaacattaagattgttgtttgcaatagcattaagtttttaaatacaaagaaaacagataaaggagatatagattggttggggcaattatttttgtaagtattattcttttttttcttaagtggtatacggttggggtttttttgtaaatggtactggatttattaaaaaaaataataataattataagaaagggcattttatttttcataaaaataagatgattatatgcaccccaacaatttattaatgcatccattttaataatttttatttt

SEQ ID NO: 33680 - DNA, 1355 bp, Cannabis sativa
ataataataaaaaaaagaattaaattctataattttgatatgaatcttagctatttgtatcatttaactctagacgagacttaggtctttcaacccaaaacatcatatttagaaattagattccacataaaaatgtataaaaagaaatatggagaaagaaaggagagggagaaaatcaaacactttctaaagtattttcttcaaaataattatctgttcattatatagatacaaaatttaagagtaataattattttcattacaaaaatataaatatatttgccaaaggatcaaaaatattaaaaataactttttaaaaactttgagatctaacaaagacaaatactacaatttttatgtgattagaaaaatttaaatagaaaagcaaaaatcctacccttaatgagaggaaaaaaaaaaaaagaagtgatagtagcataatttttatttatacaattctttttattaataccaataagttaaaataatagtctgcaatacaatcgaaacatctcccgcattgaagacacaaccaagattaaaattaaaaaaacgagtctaatcaactatcttattctcggatcgtttcacaaaaaaattaaaaataaaatcaaataaaaaaattccaacatcacatttaaccttaataatacttatattcaacttcatctaccgttcaaaagacacaacagtagaaacttaagactcaagttactatgcgaaaaaaacttaagaattaatttgctaatttatatagcaaaaaggaaatttctttatattttatcgaagaagcaaataaaatagagaaaaataatccacaagtaattagggatgcaacaaacacatgccattacaatttaagccactttaaggcaaaaacgtaaggaataataataactgaggcaaattttgttaccacaacaacaatttttctccatgaccaataatagtcttcttcttcttctttttaattattaccccattttttaaaggggaataatatattctttaacaatgaaaggaaaggacatggagtttctgagtagtaatagtagtagttttagtttgttgttcttaaaaatttcttaaaaatcacataatatttttttgaccagatactgccactagtgaaggcaagtgtggtgtgtgtgccactcatctgccaacctgggcagccaagaaaagctccaaatgtttctgtcctaagttgctaaaatctaattcacaataacttattttttttcgtttttttttttttgaaaaaactaaagtcgtcgtcgtcgtcttcttctctcctttccttttgccccctcaactgtagggttataccggcttttctttctttctttcttttt

SEQ ID NO: 33681 - DNA, 2513 bp, Cannabis sativa
ctctccaggtcctcatcccaagcctgccgcttccgggcttgcatacgatggttatcacggcggcgcttggcgcataagcgaagggcatgaaatttggcgggcacccttgtggtagctgaaatgttacgcccctcattctcaaagaaattctgaagccattcctcatcagaagacgaagacgcatcgttgcgtctagccctgtaagccctcatcatccttccgacaatagcttcgccactacgccggtagtaacgggaaaaaattgaaggacttgggggggatcgatccccgacgttggaatggaattcatctccacttgaagactcaggaagaggagaacctggagggtttgacatttctgaagcaggggaagagaaagcaagaaatatacgtgtgaagagaggaacttagaagttacaccaaaatgacaccataaacaaagaagaatgtctgtttaaatagaactcaaaaggtggccaaggtaagataaaaggaagatgaaaaggtaaatccacccacatataaggcattaaatggcaataaatgcacatccccaagtgccaaaacgctacgaaaaaatgccacacacatgtaaataaccataataagaaaaataagttgaaggtgcaaatttaaagaaaaatccttacaaaatccttaataataataaaataaataacaaataagaaattgttccttaagcttgtcccacacacacaaatataacacattaggaaatttattaaaataaggacagggcgaaattccctaccatctcctcaggctccgtcgacatcctcgccctcgctaccttcatccgacgtactccgaggaagaatccaccaaatcctcatccttcttaaactcggaatactttgcaaaaaactcatccagatcccaggtagcagatttgccttccttaaactcggaatacagtttaaaagacgactgataactctcactaaggaacgccttcttgacttggcttgtcaggactttgatctccctagtcagggattccttctcatccaccgaagccttttgggcctgagctgatgccttttcagcttctgacaacttcccacccaaggaagagagtttgtccttcaccgcctcagcctcagaacggaaggcattgcgttcttgcaacaaagtagccttctccagattcaccgtcgacaggctagtctccagggaagccaccttgtcacttagaaccccattttctgactcaagggctgagcgagtaagatcccaacccctcttctccgacttaagactgtcggccttactcttcaaaagcttgatgtcgacctccaaggcgctaactttagtaagagcagccatcttcgtggcaacagctgcttcataattcttcttgttgcgagaatagcccttagccaagctctccctctccctatcagtctgtggagcgaacttcatagcgtgggcacacctcaaagccgtctggcaaaaaaggggtttttttaaaaaaataaaatatataaataaaataataataacaataaaaataaatatgtgaatgatgacaagcgaagcaataactgaagtaaaatgagatacatgcaaggaccagattacctttatccccgagatggttgtatccttcaaaatagaatcacacccatgagagatgtaaaaatcatcattaggttttctggacatccagaagagttttgaaataattctcaatcgactcctcgaacggaacatcctttttgatcctgaaagcagggatctcgtcccattcggccgaggcccgcgggggatgactgggtagaggcggggagccccggctggaagaaaaggttgaaggatgcgccagagcaggagaaaaggcatgatgggaagtctacggcgctccaaggagagaagcagaaatccgagcaggagaggtggatgagagccccggattttggcccagcatgaccgccgaaaggttctcgggctgagaaggaccttcttgatcaagaggcgctagattggaaggtcccgtcggggccaaccccccggaattaccctcaccctcgcccgcaccagacgaaaccttagggagggcgcaaagcagggccccaatggcgtcgtcagtggccgagtcatgctgagatgacatgccaagattcgattgagtagtttcttcaagcctcgctgtcttccttttcttggccttgatttttcgcttaggagactacgacataagcctcttccgacaggcggcgttctgggcctcgatctcctcaatggtcaactcgaatagcctcattttgggaagatgacggggataggtctcttcaaggcgggaatgatcctcagaatactctatcaagagtggctcgggtgtttgattcaagtgttttaaagcacatttcagaaaatcaggccaaataaagtaaggaggataaggagtggggataccttgggggattctgagttcgcgaggccaggtggaggattcgattaaggcttcatgggatagaaggaacttgattgat

SEQ ID NO: 33682 - DNA, 3326 bp, Cannabis sativa
ttttttttttttttggtttttgagtttgagattaattttatgacaatgatattggctaatgcaaaaattaatggaatttgattttttttttttataattaccaaataaaattaataaataatttaattaatacatgatagaatttatatgtgttctattagaaattaaacttgaagatcaaaataaaaatgcagaaagtaaaattacataaattaaaataatttgggttgttcatcaaaatgcttatatcgccaaaccgcaaaaaaaaaaaaaatagtttgaaattttttgcggtgcgatcggattttaaatttttcctaaactgcgtggtgcggtttgcagttctgaatggttaatatgtgattcacaccgcactacatattatataaatacacatttttatatttatttagatcaaatatgtgaaggcccaactcaaaagccactaattattgtattgttgaaacttgaacatttttttcacatttattttcaagtcttaatggtatttttgacacgtgttgctcaagttttgttatatttgtgataatttaattacttggcgataatccaaactgcagaaaccgcaccgcaccacatcatttattgcgatgagatttctgcagttttttagttttgcggtgtgggtacagtttgggaaattagaaaaactacatgtgcgggttagtttaaaaaatagtcaaaaactgcaccactcgcaccgcgaacaaccctaaaagtgtgataagacccgagaactccaaactcaagaacacaataaaacagtagcaataataggagtagaacagtagcaaaacaataggaaatgtatattgaatgtatgagaaacccaattacaaagtataggagcccttaggcccctttgatgcaaatagagatttactcaatacattgcatagcttttctactatcttactcacctatatatactattgtattccctcctaaacattaccctcaaaataaagactgaaataccctttatttaatatatactagcccaccatactaatcccaaggcctaacattaccggccgcccgaaattcaccttgtcctcaaggtgattgatcaaatcactcaagtctagagccctatgctatgtgcgacctctgtcaaagaaccaggttagtaatgtggtattctgacatatccttgatgcaccattggctggctgagtagtgtttggtgccctctatcaaaaacccaatgcttgaatggcactagcaaagcaccaaagttatacttctcatccatcaaatgcatcctcagcaacacaaagtcaagcaaagacaacttgccaaacttcattacagcatgaacaagatccaatatccccaaagcaccattgccaaaacttagtagtggagtgatagtggcattgacaccaacatagagacccctaactattgatatactacaagggcataaccagtacatgtgtagaaattcttctattattttatgttgatgttctactttgtcaaaaaatgtcttaaacatattaaaaatctcactccagaccaatcttagatgttccacatagtacttttcagatgcattgaggcaacctcttaccattcttgtatggttaatcttagtagacaacatggagtactgaagcatgacctcaagagaactaacaacccttctcttggtatggaaaatgttcaactgcaccatatcctgatccttaacaaacccaaagtcttcacctaattgtatagtaattttatacctttgctgagtaggccacttcatcagcaccttcaaatccgcatccctttcttgtgtttgaatcatatgaccaaaagatgcaaaaagtgtaaaattctgtacaaagaaatggtagagaagatgaagcatcctctgtcgatcaccgcctgcgaagcttccataaatgtcgaggatgctgcgaagtggaagtgcataacaatttacttttggtctaaggcctggatcccaaatggtaaatgcctttgctgagtgaaaaattgggcccacgtgtgatattatatgagtgacatatggaatccaattaaaaggaaaagagatgggtctagaatttcttagaaggtgggccggatatagagcccaattaaatggactgggagcccaattaaatggaatgggttgattgtggtagggcttgggccttaaataattaggttttagtttcagtaaactgaagctcctccccatcatcgtcttcttcgaaacaagatccccgtgtgcgactgcctttgtggtgtttagcagctcttctctttgagatgatgtcttcaagcgatatccccaacgatttgttcttctctaaagtcgttcgttgccgaggtgcgagagaaccccatgggacaacttccagatctggcgccgttcccaacaaatccttctgctcagaagactccaccagcagccatgcctcttccttcctcctctcaggcggcgaatctcgctgctgatttttctttagccatttatcttcttctccatcggagatgatcttcgtagcttcgaatatctcaggcgagccacagatggaagggaatcttcatttaagagcttcgattgtatagctgcctcatcaccgtcaacaactgacacccactgtgtcactcttggaatcgatggtgctacttcctgaacttgccatttgtgttctctgaagctgtcgagtctagcaaaggctcgtttgtgttctcttattgccatttccatctcttcatcatcttcaatatccgtctctcgtgttgaaggagatccagaagttcggttcggcgcgtagcgatttcggattccttcttggttgcgaacccatactgattgcacagcttggtggatccactcattgagatctttgtcctccgatattgttgcgacatgacttcggagatcgcgggcgaggtggagtaaccttacttgcccaagaattacttgatccaaaagcaacgcaaggtcctccagtgtgttaaattcaaaatgatattaataagactccgatttccattgttcctctaatttctcctccattcttattatcggcatccaaagaatcggtgctctgacaccaattgataagacccgagaactccaaactcaagaacacaataaaacagtagcaataataggagtagaacagtagcaaaacaataggaaatgtgtattgaatgtatgataaacccaattacaaagtataagagcccttaggcccctttgatgcaaatagagatttactcaatacattgcataacttctctactatcttactcacctatatatacttttgtattccctcctaaacattacc

SEQ ID NO: 33683 - DNA, 1594 bp, Cannabis sativa
ttttccttatgcacaattttgcctttagaatcagttcggtgaccttgctccgaagcattggttcttttctttttcttatgacgttgacttgtagggtttgctctcttatgttgatcattaggagcaacttttttggaggtttctcctatttttcctttctctttatccttaagaggattatgggagtcaggatctttaggttttgttttcccgacattatttccatgaggattggtatcattagtttccatcaatattcttattttctcctccaaatatagcttccaacattacaaatttatccaacatcattcgtgtgattccaatttttgtttagcttcttctatttttttggccatcctaacgacttcaggatctgactcaaggtgctcatcttcctcattggcatcattatcttttggatccacaggatctgagtccttagactcgtcttctttttctccttcattgataggatcatcatgaaggtttttctcatcatgctaatctttccctttttggcacctggtcaccgtagtgggatctttgtcgagcctagttttggtatttagatcaacatcatattggtaatgaagatcaaatttttttggatgagtaccataattagtaaacgtaatcttagatggtatcactgctttctttagctctcaatgaaagtaccaaaatatttaccaaattttttagaaaactaattattaaatatgaaaggtaaggaacatataatttagagagaaatatatgaagaagacactcagagttttatgtggttggggcattaatgagccttagtccacgagtcaatatattattaagtatttttctagaaaagcttaagggattacagtaagtatgagcactctattctttgcctaagcaagtatgccaagaatttctaaccctttgtatgaaagattcaatgagtagttatagttttatagagatcatattagttaccattttccatctaatggggagtttacaaataatatattgactttggacttatctggtaaagcctgacctatgaggcaccttgtgcatgctgacgtggagtccttatcacaaagttaattgttcatactgtatcctatatccatgggtaattaatgacatattaattatctaatttctaattatccagttttcctttttagcaatatcttattctctgtcagagattttgggaaagtaattccttattttgtgcgagatagtaactggaaaattatatgagttttccatatacacactgaggacctcttccagatacacagatatataccctttcagatgttgacttggcttgacagaaccttaccagggcgagttgtatattgatattttcccaaaaatcagaatggatcgtaaaccttgcctgatttatgttatttgggcccactgttccttaccagaaacacagataattaacaatatactataagaatcctaagttttaatgacgacactatcagtgacgcacgaaattcatcactgatggtgagggtatcagtgatgacatcaatgagtcgtcactaataaaaactaattattttttgtaaaattaaacatcaat

SEQ ID NO: 33684 - DNA, 2561 bp, Cannabis sativa
  modified_base (2098)..(2105): a, c, t, g, unknown or other
aatggaactttgaagatctctacaacttatattatcttgatcaactagacgcataagttgatacaaaaatttttgttcgtaatatttatataattttaatttttatgatcataattattatcaaattactaatgatatttctttcaatgttaattacagataatgttgcagttgtattaagtgttgacccaatgaaaaaaatccacgcaaggtctggacctgcaaatattcaagaattcctccttgttgatcaaaggtctaaaactaatatgttttatattttcaaaaattactgcatatgttatgttaatatttaacaaaatatatttgtgcagcttgcaaccaaaaattttaactatgtgggacgaactaattgagaccattggaaaagcaatatgtgaaattcttccacaaaatcctattataataggaacacacctgaaaattgtttcacacaatggttagatttatttcaactaattatttagtattattaaaagtcatcttataatatatttttttaataattcaataggtatatctttatcatccaagcaacaaagttcatttaccatcaaccttacgaacattccacaaataaatgagattcgccaatggtaaactaatttatacttaatttttataaattatttctcattacacctgtccataaataattcttatatatctaatacttttatcctataaattaataggagcattaacaatgaagaatacctatctccattatcagtgagaaaagactcttcccaacctaaactgctttaagaactcttcaatataataatatcattactattaatggcattcaaaatcttccacaagaggtatgtaaaatatgtttatttaatttttaattaactaattagtttcttttctcaatgtttataattatttttgtctttacataatattatatactttatttcaataactatattatgctttattagcaaactactttttggatcaatgcatcaatctctatcaaaaatttaagacaactcttctggtacatggcttgcacaaaatgccgtcaaaaagcagatcttgacaactgtggatgcaacgaattatctgttgagacaattctaaggtttatattaactcaatttagcacaaatcttattatcataatttgttgctaaaataaattaatttgtatttgaatatactagatggcgctttcaagctcaactaacagaccacacaggctcactaatagcaacattcttcggcaaaaatgcagaaaagtttgtaaattgtaccgcacaagaacttattcacatctcaaatgtaaattctactacttaaactcattcacttcattagcatatattaatattactatctttctcaatgatgttgttaataaaaagatcaaaacatattatcggttgcaaggctttttacaacgagtaaattttttatttacttaaaagcaagagcggatgcatatagtggcggaagagtcaaaccaaatacaacattatctcactgctcgaaagtgatgctgagtcgagcatttcaaatactactaatgatacttgaagtatctacaaaataatataaatatatatatatatgtacaaatattataaatacaatgtaaaatatatttaaataataagcatctgatataggatactattatatgtagttaaaatgcttagctttaattagtttgtaattattattgtataatataatatatatttacattttctacttcattttaaaatattaaatcttaatttcatattttatattttatcacaattaattatacaataaaaatgaaaataaaaaaaaatcaaatgaacagtttaacacgtgcaattgcacgtgtaaactcacctagtatataaaaatatattcaagaggttcttatcattatttctatgcataagaatttaagcaacaagtagatatttaaccttttgaaaattcttgtaaaaatatatattattgaacaataggtaaaaataggataacaagtagttcataaaatttgtactaaatgtaacacttagtaatttccctatatatatatagagaaatttgattttttatgctnnnnnnnngttaaaaaaaatttcttaaacaaataataactaatatttgtaagatatgataacttttatgatatccctaaaataccccccatttatatcaccccatttacacaatcggaccccccatcggaccacacatcggatcccatatcggacccatcggaccacctatcggaccacccattagaccactaggacccatcggaccatatctgctactattttttttttttttttatgttttaatacataaaaaaaatagcaccaggtgaccatcggaccagatctgctaccaattttttttttatgtttatgtacatacaaaagtaacatcaagtgaccatcggaccctatcgaactactaatttattttattttttttttttttatgtttttgcactaaaaaaagtatgagaaatttgagaggggtatttttggattttagataaagtggtcatatatttt

SEQ ID NO: 33685 - DNA, 1165 bp, Cannabis sativa
acgtccccgtcgcttcaccatccttaaaccgaaggatgtgatccttgaattgccataattgtgactcaagttcccaacttgcctctgcatcaggcaagttcttccactttaccaagtactcagtataccgaggaattctcttctttctgacttcccgtgaagacagtatgcaatcaacttctttatcataagaagtcactacagcagtcggggagcacttcgacacttcgctggaagggtcttcctcatcaccatggtatggcttcagcatacttacatgaaatacagggtgaatcttcaactgttgtggcagctgaagtttgtaggctacttcgcccacccgcttgagaactggaaagggtccctcacacttgcgcaccaacgccttgtgaaattttcgcaatgccttaaactgttgtggcagcatcttcactagtactaagtcgccctctcgaaactcaaggaaccttctcttcttgtcagcccacttcttcatcctcttttgagcccttgctaactcagcttgttcactccagttcttagcaaacttgaacacagcagggctttgcccttcgtatcttgttgccaaggcatgaggcgtttgggactggaaccccatgatcagctcaaatggactcttgctagtagactcacttgtttgaagtttgtaagaaaactgggcaatgtctagcagctttgcccaatctttctggtttgcactcacatagtgcctcaggtataactcaaccaatgcattcaccctttcagtctgtccatcgctttgaggatggaatgaggttgagaaattcaaatcagtgccgaggagcttaaacaactcagtcaaaaacctgccagtaaatcgcgggtctcgatcactgattatgcttgagggcagcccccaaaatttcaccacatgttttagaaaaaactgtgcagtcacttctgccgtgcagtgcgttggggcagtaatgaaagtggcatacttgatgaaccgatccaaaaccaccataatactcacacagccatctgacttctgaaagccagtaatgaagtccatggagacactctcccatggtcgactcgggataggcaaaggaacaagcaaaccagcaggtgcttgttgaagaggtttgtcttgttgacaaacaaggcaggtgcgaacata

SEQ ID NO: 33686 - DNA, 1451 bp, Cannabis sativa
  modified_base (1392)..(1392): a, c, t, g, unknown or other
atatatatatatattaatataagtatatggcatgctgcatattttaaatgtaagtgcaacaaaatatttaaacattattttcaaaattaaaaactactcgaaatttttcaaaaatttacaagcactacaagaaatgtaacttttatcagcgtatttcgcaaactggactggcaaagaggtcaaagttttaccagcgtatatttgtagtggctaaagtctaactttcaccagcgcatttacacgctgggaaaagccatttttgccagcacttttcattttatgctggcaaaagttctaataccaacattgatttaccaatcaccttcacaagtaaattctattttaccagcgcaataccaacttttgcaagcataaaaatgtgctggcaaaaatgacatttcttgtagtgaagtgatattaaataactataatgtacacaatcatgaaaataataattaaaaaatagaataaaaaacttttctggatgtcgatacagatatgggatcaactaaaacatctttttttttaaagagtgatcagaatcacaggaagacacacgtcgatgcagagggacttccaaccaacaagtcaattgtctagccaaaatgtatacaaagtcagaatataaattgctacaaaataaagcgacttatatatgaccaagttactctgaaaattcaaacaaaactacttgagactatctcaaataaggcaactagtctaaatgaacaatttctacaaacctacaaaataaagacataaaagtaaaatattgattagcacactaaacaaataaatgtttagaatttatataagaaaagaaccaactattttccttttttggcaaaattaaaatttaacaagaaaacttatcttttagaacttcttgaataagtgtaatgtcatattcagagggacgcgtgttgtgattacagctagctaatcctgttaattgggatctataagccaaataatttaaagctaataataaactaaatttaaataaataacttgcaacaatacaaacttatttcataccaaaatatttaaagttatataactgggatcccgtaaaatttatttttaaaatattacaaatcatttcttacaggctgacctaagcggcaaaaattggaatttctacataattccatgttggacccaaccctcgtggtctagcttggaatgaacatgtacaactcatcttcaaagaccctgaattcatggttgaaatgacatcgcgtaactactgcctgtacattagagcacccgtgaattaaggcccaacaagacagaataataatacaatatgataattataataatactacacttcatatagtacgccactacgtatatattgtgccaccgcactttatatcacattattcnatatataataatgtcactataattaatatatataacatagacccacgtgatacgctcac

SEQ ID NO: 33687 - DNA, 1350 bp, Cannabis sativa
ttttttttttttttgtaattatagataatatagtctctatagttttttgttttttttttttgtcctctttaagttttagattttctatgtttctactcagtttagaatagctaatgtagaataactaggtaaaaatatagataaagagttaaaaaaaataataaaaaaaaacatgtacaatagaggagctataataaaacaatttttagctagtagttaaatacagctaaaaactcttgagattctttgacatttttattttaactcttagcaaattttttaccttttattgctatagtaaatgcatataattttgtattatatttttcatgtcttctatttaattaataagtgtaaaaatatttgtcaaaaaaataaaaataaaaaataagtgtaaaaataaacaaataaataaatataacataacataatataataatattttattatttgtgtattataaataaattatttaaattatatagaaaaaagtttaaaaagttgatgtatggtgtaaaataaatggtgtgagataaaaaaaaaaaaaaattgataagaattttgaaaaatagagtgaaaaagtcattgggagtgttcttatctacttatctatttttcttataataaaaatatatgtcctaccctataagtaacatctttatttattgttattgtatacattattactttaatagatcaatttaaattttgtttgtttatacttaatacttagaaaattatttctctattttcaatggttttttttattaactagataaataattttatagtttttaaggttttttttaactaatttattaaaatcttcaatcaactatgttaaataaaaaaaaaaattattagtttatattatttgtgaaattttaacaataaaataaaattactacagagttttctatttatcgctccttagggtaaataaaaaataaattgattaaaaaaactaattttttctcttcaaattctaaaatatgaactaaattatgtactctgaaatttcaaaattgttaaaaattctccttaaactattaagattgtagatttaaagatttttgtctaattttactaataaaagtatgacgttaatgaatgttcagaagacataatttagtatatatcaaagctcagatgacacatttgatagatggacaattgtcacgttagtaaaattaaatggaattggacagaaatccttaattccaacaatagcaatagttcgaggaaaatttttagtggcctgaaaagttcagaaggcaaaaatcacacaatagttcatttcttttatttactttttttaatgaaccattaagttgttttagtaatgtacta

SEQ ID NO: 33688 - DNA, 1491 bp, Cannabis sativa
  modified_base (211)..(213): a, c, t, g, unknown or other
accagtagaacactagtgaaacttaacacagtatactgcagtatgaaatttataaaaaaatacagtaaaaaagtaaaaaaaaaataccgcctacaaaaatactgctaaaaaaattggcaaaagctagtatactatgtaaattttcctacaataattagtgaactttgggttggacattcacatattggacctaaataaatataaaaagtgnnntttttataatgtgcagtgcggtgcgatttgaaccgcatattaacaattcaaaaccgcaaacccgcatttttttttgcggtgtggtgcgggcggtttgagcggtttgatgaacacccctagtaaaaacatacttatagctaatgattaattaatggattattataaattttgtgattagggttgcggcatggacagaatggaaaattctatatattctatgcaaagacaagaagggattgcttcacaaagagactgttagaggtgtttatgatggaagcttgttcgagagattggagaaggaacattcatccaagaagaagaaacagtaattaataaataatcgacttcattatttatttccaatatattataattatatgtgtgtaatttctacataaatctttaaaaaaaaacataaataagttgattaaagggtaataatatttgttattaatttatgtattgtatttttatgcagttgtgaacctgtggtctagtaaagttggtggaactcttcttcaatttgtcaaaatttgttggtgttgaatttatatatatagtaagtgtagatatgaacttttatatatattgtggagtatatttatatatattatctagaaattgggattaagtcaaatgacagtgattagagtactttgtggtttgaatatttagttatgtatgttgtatcttgtgtgattaatttcagaataagctttgttatctcattttttttatgctattttttaagtgaagtattggaacaagacaatgttatgggatatggtgccttgcctactaataccacagatgtaattaagaatcattgcactaattatactcgaaattatttatgagtattatacgtgggaaaataaaatatagtttttttaaaagaaattattttatataaaaaaaaaaaaattaaaaatattgagaaaagctaaccagttacttaaaggtaaccaattacctcctcatactttatattttaattttaactttttgttaaaaaaaaagttgtatttttacaaattattatcttttcttaaaaataacactatcatatacgaattatgaagtatgcacaaaattgtttccaaaactaaactgttgaagttcgataattttgtaacaaacattttgaagaatattattgggccttggccttcactttttccttattgggccgggcctgcatcctttcataagcccctgtatgagaaatggacttttgataactatttagcagtagagcaattacttacaaaatagccc

SEQ ID NO: 33689 - DNA, 4326 bp, Cannabis sativa
tattttagttataaccggtttgaggtatttcatgttatttgtttttattcattataacactattatagaaacgattatattttaattatgactgatttgagttagttcatgctatttatatttatttattatgttacagaaccggttatatttaaattataaccggtttgagttattagtttttattcatataaccggttatatttttagttatatctgagacatttacttcttgtgactttttcagtgacttttcagttgacttttccggcggtattgagttttccggtgacttttccggcaaatttcccggtgccggtaatttttctggcaaaacttattgttgttttacaaatatggaatttctatctttttttacaaaaatatagcataaaaaaaaccatataaatgtaaaaaaataaaaaaaaaacccataagcttatagtgtcatttatttatgccataaaaaagtaaactatactctcaattcccatatttatgaaaattctctttttatattatcttcttttatttttactctattttttaaaatctagcatttttacctctttttttaaatactttattatttttgtcactgtcatctcaatatactctccatgtgactctgttaatgtattttggatatagtacatataaaagaggtatgtttcaattaaatataaaattagaaggggttaattaataaagattttttttttgttagaattaggcccggcccaaatgttcgtgatccattatatgagcgaaacgaacgagggaggagtaagtaagagaccgttacaatcattcaactgttcaagaaacaaacaatcaatccaatccatcgcagaaacgcggctatgaagtgcgtgtgtgtgtgagttctctctctctctctctcgatacagcagaggcccggagatcgtgaaacggaattaggtagtggaagggaaccaatgcaaggaggttcgtcaggcatcggatatggtctgaaatatcaggtccttgaaccctccaaacccttacatttcttctcccttctctctctttttcccttttttttagagagtactctcaaaacaattctcatttcccaggctaggtgcatatccgatgtgaaagctgatacagatcacacgagctttctcaccgccactctcagtctgaaagaagaaaatgaggtttttgttctctaaaatcagttcttgttctgattttgatcgttattgttggatctgactgtaaaggagttcggtttacaggtccatttgatccggatttcgtccggaggaactgaactagtatgcgagggattgttttcgcacccaaacgagatctgggatctcgcttcttgtcccttcgatcagcgaatcttctccactgtctactttactggtaattaatagggctttaggattttgatttgttttcacttaataacttcccatatttgtgttatgcttctgatcgagtggtccgtacgtatttaccaaaagtaattaaataaggtcactcgtttgatttgcatttcattatttttttcaaggcgaatcgtatggggctgcaatatggcagatacccgagttatatggcgagctgaattcccctcagttggaaaaaattaccccaattggggacaatgttggtaagattaagtggtgagtttgattatccctatttttcttaatggtattttagatttgacaattatccgggaaatggataaggcccgctttaatgacacaataatgtatatgattcatttatgtagttataaatagattcagtatgttttcctgttgaaatgaacaaacatttatctttgttgaatgttttagagcttaccttatgtgctatatgtggctatctacactatgaacagcattctttggtggccatctggaaggcatgataagctgataagtattaatgaggaaaatcttttcttatggagcttagatatgccaagaaaagctatccaggtacagtcttatggaacttaaaagctgaacattaataatttgatgaacttacacttttgttatcccatatattcattggctaagcaaaaacagttttccatttctatttcaacactgctctaaggtctgcctcacgggatccaagttgagagagagaaattgaacaagtataattgcccactattgggatgtactattaaacctaaattggggttaatgactaagaattatggtagagcaactagttgccatgctacttgtccttgctgctttaaaatttcatttgatgtataatttttatgaaaggaacgtattgtaaatatattttttcttagaccactggctttcttggcgttcccacattatcatctcatgtaaaagttcaaaacaaatgacccaagagggttagttcgagtctcttctgggtatttacatagctattattatagtttcccgtgtccaaacatattaggagggctgggcaggggtcctagtaaaaaaaaaattaaaataaatgacacgaataaacttttagaactgaatttattttgagctcaaaattatgattaactttacctgttcgcataattttgtgattagtaggtacaatcacaagaatcagctggtatgcaccacttatctggaggagcatgggatccacatgatgtgaatgcaattgcggcgactagtgaatcttcacttcagttttgggacttacgaacaatgaagtatggcttatctccaaattaatttcagtttcatttcaattcgtggagtaataaaaaaaatgactcgtggatttgtttaaatcctgtatttctcgatccccaataagcttaacaatggtagcctacgcgtttgttttatttttttattcccccataatggtactgttggaaattttatttctgttggcagagatattttgtcattttagataataaataaaagattagcatggtagttgagctctcacacgacaattatcaactatataaccacgtgcctaattggaattctattaaacttcccccacattagagcctactaagatggtttggatgtgaggtgcactctcatctcatgtactgccaaacaagtttttttttcttcaaatttcaactatgtattacattgaacacttgtcaatgaatatggaagaaaacttttgggttccattagcttttctgttttcaccttttttataatattgatcattcaatgcaggaaaacaaattcaattgagcgctctcatgtgcgcaatgttgattacaatcccaagaagcagcacatacttgtaagactacattttttatcttggtcttatggctgtggttaagaaagttatctaccaccatttccatatgaaattcagactttgagtaaacgcaacatcatttgtattttcttttcgtagtgacctttttttaattcttattatattacttgagccagggatatagtgttgctaacattttattgaaaattatgtacttctaaatgctttgtaacaaaaactaaggaaatatttgctaactcaagttgatgatcaaatgtgactggcaaacaatttccacatccatatagagtctacgaagtacatatttatatatatgtatataatttgaaaggaagtttgtcaaaaatattgatggggtgtaatgtcttccttgcaatggatgtgatcaagaagttgaacagaatttgttgatgttttgaaatttttacagctgccgatggaatgaaataaatattattaatacctaagaaatctatttgagaagttatatgaaacctaggtgatctttttatggatattcttttcttcatgttatcataattacaaggtttgtgatatttatgcaggtcacggcagaagacgaatctggagtgtgcacgtgggatctcaggaagccaaagactcccattcaggagcttcctgggcatacacactggtatatacattttctttaatgttggatccatctctttgtgacctgacgagcaatttcatagtgatttttgattgcctttcctttaatctttgccaggacatgggctgtcaagtataatcccgagtacgaagggcttattctggttgtttctctctccttttcaaattcatgcatgttctataattgataacaattttattttccgcacccctctaaggaaaattcataaggaaacttgatttgactgctgatactgatagggtatagtgataagccatatacagtaaaaggaagacatgaaacaattgttgaaatataggcatttctctaaacattggacaaaactaccccctcattttcaatcccctttctctctctctctctct

SEQ ID NO: 33690 - DNA, 5646 bp, Cannabis sativa
  modified_base (643)..(648): a, c, t, g, unknown or other
aaaaaattattttgggtactaaaacaaataagagtgcatcaatatattcattttaagggggtgcattgtagaatttaaaattttctatttataagtatatttacatttagtttttaattgtcagattattagttttatttttgcatttatttagtctttgtgataaaagttaacttatttaaattaatttgttatatcatatttttttaatttattatttttaaatagtatttatatatttctttatttacaacttttttctatgtttgtttttgactttctttcaaataaaagagtataattattttttgtaatttaatagcttttataagattgatactattttataatatactaggtaaggctagcacacgtgcgatgcacgtgcctagctcttcttgctacaatttatttttatttttgtttgtttaattttaatactataaatatttgtaacaaaaatcaaagtatgatattttaattgcagtacaaattaaaaataaaaaattataaaatacaaattttattattgtacaagtgtaagaaattgaccttgggcacgtttggtacgccgtattgtattgtgttggattgtgttgtattgtattgtattagtattatttaatacaatacaatgttttgnnnnnnacttgtattaattgattgtgtaaatttataatatatttttaatacactcgatcccaacaccaactacgggtccgggtccgggtccgcgtccgagtctgagtccaggtccgggtccggtccgggcctaggtcttgagtctgggttcgattctgggttcgtgtccaggtccgggtccgggtctgagtctcgggtctcgggttcgggtcggagattggtgttgaccctaaatcctttgtaaatattataatacaagttaatacggaccatttgttatgtattaaataatacaacatatattgtattacaaaatttggtcgtaaagggcaaaaatggtatggtaattaggggtgttcatcaaaccgctcaaaccgcctgtactgcaccgtaccataccgccaaaaaaatacagtttgaaattctttgaggtgcagtcgtggtttgaatttttcctaaacagcacagtgcgatatagtttgcggttttgaattattaatatgcagttcaaaccgcaccgcaccgcacattataaaaatacaaatttttatatttatttaggtctaatatgtcaatgtccaatccaaagcccactaattcttatattattgaaacttattattttttaatatttattttaaagtcttatggtatttttgacaagtatctttattgtatttgtgatagtctaaactgcgaaaaccaccgcaccgcaccattttttgcggtgcggtttttgtggttttttagtttcttggtgcgggtgtaatttggaaaattaaaaaaactgcatgtgcgggttggtttgaaaaaatagtcaaaaatcgtaccacctgcattgcttcttattattagtattattattcatttttggtgttgcgaatttttctctacaaaaagtgttatggattcgaacccatgacattgtataatatatcatacacctcaatcaactaaactataggactatttgttgtttataatacacttaatttactttaataaaaatctaatgaatttttttatttttttttattttaagccccccaaaaagagtaggccctaggtgcgggcctagcccgcgtatgcctagggccgcctgtgtatattgttagttgtaaaaaggtctagttagttattagttttcaattagagttagttagttactgatctatgctttgctcttacagaactctagtataaattcaaatatgatatttcccttatatattttcttagaaaaaatcacacgtgtatttaatttatacgatcaagtatcaacaatttaattttcactattcagttacaatgggaattataagacagggtcatatttcctttcactacgatccttaagtgtatgcgaacacttgaaacacaaagccttaatcaaagcacgagaacttggttgcatggcccatttaaaccccgccttctcactaaaaaatctcactaacattttctgagactttgttttctcgcaaagtactgttggacaagaatgcaccacagtatccttacacggtgggcttagatccacctgatttccaccaccccaacatgaaattttttcctcaatgctattagactcactaattttaatcccctcctccacggctgcaggatcaccttcctgcaccctctgtgcaatctcaagagccttcaacacatcagccatcgtgggccgtcgcttcctttcactacgcaagcatctattagctatcttaccatagaccttcaaacactctggcctaatctcacccctcaaattctcatccaccatttgatcaagcgtcccattcttcacattatactgagcccattgggccaagctctgttgttcttcatcaaggctcatatccacagctgctctaccacacaatacttcaaaaagcacaaccccaaacccatacacatcagatttagcattgagatgtctagttcgaaagtattctgggtccaagtacccaaaagtcccactcgcatctgttgtagtaacatggctttttgatgggcttattgggcccattctcgaaagcccaaagtccgaaaccttcgcaacccaattctcgtctagaagaatattgttagtctttacgtcacggtggatgatcccacgctcagtcgctgaatgaaggtaagccaatccacgagccgcgcctatacagatctctaacctctctttccatgtcaaaatcgattcatgaccaccggttccgtaaagatgatcgcggagtgttccgtgtgccatgtatttataaactatgatcatgaaccgttcatcatcacagtaaccaatcagagagaccaaatgagagtgacggagtttcgaaatcgtttcgatttcgagccaaaacgcatgaatttcctggatcaacgacgttgaagttgaggttgatttcaacttcaacactttgatcgctactggattttctttgtcgttgtctatgtaacccttgtaaactcttccgtacccgccgtctccgattttgagatctggatcgaagttgttggttgcggatcgaatctcgtcgagggtaaaacgacggcagtgttgttgattcttcacagttacgaaaactctaggagatagagatgctttctcttcgtcgttttttattatctgctgatgatgagtttttcttcttagtctccagaacatagtaaaacccagaagaaagaagaatattgctaatagagttgctgaggaagcaagagcgatgggtttatataattttactgttttgaccttgttgcagtttttgggttgttgggtggtggaaggaataggaggattggttttagaaatattcagtttggaattatggggtactactcttgaggtgcttgaaactttgactatactgattagaaataagagaatgatgaaaatgagtaaggttttcatgatcaaaagtaggagaatttatctaaatttcgattcttaagacgttggtagtgtagtgaggaacttaataaaaagatctgattaattataggttctaaatctagtactaagaatttatgtggacatgatagtactggaaagagctaggttggtggtgatgagtcaactaccgagtagaatatagtgaaactgtgaatggcataacaaataatattgcttcactctcattttgactagaactagaagaagttattccatattaggcgtcttacgtggcctgcttttttgctttcttatcaaagtttggtcaattttagcaaaagaaagaagtatatgagagtgaaaaagctcggtaaacatattacggcgagctggaatttcaaagaaaaatggtaccatatttgatgaaaaagatgcactcatataaagtaaggccttttgtaatttcgggagagtatgaagactatctactcctaattaccccacgagtcaactctcaacaccacatctcatgtggataacgtattaattttcaaatgtattaacagttctaaatgtaatgatgtttaattattggggtaataaacaaaaatttaaatggtaggttttgcttttcctaaagcaaggttcacttttatttatgcatatgttgtgtgcataatgctgggtccagtactcacgacacatttagaatcttagctatatctaaatagcaaaaggtgcctagctatttaaaatgattgatgcattagttcaataaaatatgacagtagaattatatatctttatacataaaaaaatgactataacttagtttaaaagaatatatttaactgatgttcttagtaatgtttattttataaatatttaaaattattttatttaagttttttttggatttatttttaccatatgaattatataaaattaatattttaattcgattttattgtactattgaatagatatagtttagaattcttaccttactctttaataaattcattatttaatttaattaattaaataatatatatacttttaaatttagttaaaaaaaatctccttgagtgatattgttaaaacaaattcagttaaaagttggaaagtttttaccattaaaaggtaaattgatttgtgcttaaataataatatataatattagtattttatcgtatataataaccttaatatatatacattgtgctataacctttcattatatatattatttagttattgtaacttaatataaaactatttgtgtgtctcgcacgtgtatatatatatgtacatatgtatagtatggttgttgcaaaattatttagtattttttgaaaacatgatagaaaaaaagtacgtgtagtttaataaattagtgagtagactcatgactcaagacgacatatatcttcattttgttttgaaagtattagtcaactcttggtacaggagtcttctcaacaattttaatcatgcaagacctacatagctttttttaattattttttcttttgctgaataacacagatcattataattatagtatctttattatcctgtagtccctactcactggaagtgcaaagaggtgatatatattcttattaggaaaaccacaaatcaatcataaagtaacacttaagctgcgaaataacaaagaaagcccatagaggactccaaagatgtaaaactgatatttttctaatttattaattgttgtgaaaaccacacagcatgctcttttataatatctgagtactctagctacccagaacaaattagttaccttgttcttttaatactctctttctctctctactcatgaagaatctcccagttgtgatcatcaccccttcctacttgtttattctcttcttttatcacatctctaccgttaactcctctaccactcctgcctatatccccgtcgataacattgccctcgattgtggggcctcgactgaagacgacacggctgcaccagatggccgaatatggatagcagaggaaccctctaagttcgctcaaacacaagctaataatagcagctatgtttccgtggccaagtcccaacccaactctggcaaaaaggt

SEQ ID NO: 33691 - DNA, 1785 bp, Cannabis sativa
atattttagatcttttaaattagagaataatttttttttaaaacaaaataacgtaagtattggtttctataataaacaaatctatatgtatttgttttagaggaaaaaaaattaaaacttacgtgtgtatatagattgtataattaaattttttatatgtatttttatttagaaaataataaaataatcactcaatatttatatagctaataaataatttaaaaaatgagagaattaagagaaaacaaataataatttttgaattttatataaatatttataaatttattaaaaaaataagaaaattaaggatgaaatccataaatatattttaaatgattttactctaataaaaacattaaaaagtgagagaattaaggaaaaaataattagtatggtttggagtgattttagatcgccacgtcagcgcctcatacttctcctttatataaatatatagatatatatatagatatatagatagatatatagattttagtatggtctttatataccattttattagtttattttttctttaaataaataatagaattttagtaataataatcaatcagaataaatagccaacatcaatctaatcaagacattttatcaaaattagaattaaaaaaataagataaatgatcaactatctaattctccgatcatttaacaaataaactaaaataaattcaaatgaaaaaagattataaaataaatcaaaaaagattacagcatcacattaacattaagaacaattattctgtttcatccatcattcaaaagacacaacagtagaaattgttccagcaagttcattcaacattttaacttgagcactcaactattgtataaggtacgtaattgtactactaacaaccctttcgatcgcaaagaacttgttattcctgaccactaacaacgatttgatgacgagccatcgaagaacaaggaagaaccaacaataaaacaaaataaaacaagactaaaacactcaaaaccatgtcacaaagacaagacaaaaatgctcaaaactatatcgcagagacaagactaaaacactcaaaaccatatagacaagactaatcacagtagcaaaaatcgaactgcactagcaaaatacgaccctgaccaaaccacacctaagcccaagaaaagctagcggacttaacagagaaaaaagacaacatctaatagctatagatttaagaataaaaaaatctaatttgaatgttcattgtaaaaaagaaaagaaaagaaaatataaaagtaatcctagaattatttaaggattttacttgtatagtatcaatcaatcatcaattaatatatataaaagaaagcataagagtagtctacgtgtcatcttatcttttttctttcttaattttcttattttttgacacatttttttttattttgtttataaaggaatccacatatacaaactaaagtcccacatgattctggagatggggcttttgctgatgaatctcaaaagagcgatagcttcatccccacatcattatcagaagacgaggttcctgggaaaggagcccgagaaagtttgttatctactagcaagatagaccacatggtccaagagttagaaggaccactagttaccatagaggtgcgagaaagcaaatccacggtgtctgctcagggtagttttatttacccacaagttgctctagatgcaaaggtcaaatagatgggtgaagactttgagttacctgcttgcggggttgaagatggtgtcgatggtgaggggagtgaaac

SEQ ID NO: 33692 - DNA, 2107 bp, Cannabis sativa
agttcctgaaccatcctatctatctcgttagtagatagtgaacccagacgcgcatctctagcaacacgaacctcctccttggaaattgaggttcgtatgaagctggcgctcttattctgttcgttagcgaaagccccacctcctgagtcgagcatttgggtgtctgacaggttgctcatctgaaatatagaagatctttttagtgtggtgcaagtgcgagaataatataagtgacctcacctgcataaaagaaccattaaaaataaagaggattaactagacatctcttgaaatggctgggggtgtcacactaacataatgatcatgtcgccccatgaaaattaaggtaatgagacacacccaccatttcgagaactcagctactcctcgcaaaggatacatcgcacatgtacaactagcgatgtatctcaagaaatggctgaggttccctagtatcccaaggggcatgcattcctcgcaagagcattgggttagtgggaaatcctcactgtttcgagaaacttggttagtcataacatgcgattaaaaagcaagaaaaaaataaaaattggttgtatattgcaaatggctgggtgtatcacagtaacccaaggaacatgcatacacgcgcatgagcattaagttacggtgaaacacccaccatgtaaaagacccaaccaatattcgtaacaaaagcatgtataaatcaaaaggcaaaaataaaccctaagttctaaataagggttgaagcggctaaatcccagattcactaaaaatacatatgcgagtatgcaagatgttcatctcaatactcgctagtattcaaaacactcaacaaaaagatgcggatactcgaagtgttcttcctgaaacccacggttactcaagtttcaggcccatattctctagaaaactacccagtttttaacaggaaaataagattctatatacacttccgattatgtcatgcatattatatctcctaaaaatacagaatgtagatcaattctcagaaataagggaaaatacttgcaaatagatttttgcactaaccttggatacatcgatcactccttggtcgattccgtgagattcagaaagttatgaggattgctttctggaagaaaggagaagaaatctagaagaggtttggaagtttcaaaaattcagagtaaagaaaagagagaggtgaaaatgggagggaaaaatgtgagaatcatttcgtatcaggaggcttgaataccattatccctcattaattgagattaatacacgtggcagaagaatacctaaggtcttccaatgtaacaactatccataaccacgcctgcacggatttcaaagagtttcgtgacgttgcaccccaaatgggttaaacagaataattaaagccgtcattttgaaaccctcgattggacacctaaaggtcaccgtctcacatcccttcgcctgcctctcgcttatagtttccctcatgacataatctgtcagtcgcgaaactagggacatgtcttatagtgagattttctcacctagaaactcgagaccagactcttatgaaaatgacacgtgtactcactctcctcgtggaaagctgagatgtcagtgagagaccctttgagtacgaaccatgactgaactagactcagcgagaagatgtgaccatgagagagtctagtcgcattcgtattgctcgcatagagtaggaccaaggaacggtttaagactcgcatataccgagatgtatgcgactactttcgagatcctcctgcgaattgtaaagatcaattctttactctgcgagcaggtcgaaatgacccaacaacctcgataacccgataaaggacttgcatgccttaggttgccgacttattacagggtgtctgtataagcgacttaagcaggacggagacatcttagactcgattaagtcttgtatgtatcttaagcctgcgagcttatgcaagaatatgaacaggcaactcgcagtacagaagtcgcatacgttgtggtatttagtgaattaagctaaaactgtccttcatttattgtatttatgttttttattaatttaattgttgtaattcaatgtacaaataaattgata

SEQ ID NO: 33693 - DNA, 1688 bp, Cannabis sativa
gaaaggcatctaagacgaagtgtaggaagagagataccttcaaaagggaagagaagcaaggagataatgcgaatctaaggccgcttaggccactactacaatttagccttttagtgacatgatttagtgacacacacaaaaatgtgggtcactaaagagttaggagtgatttttagtgacatgcacaattcaactctaaatgtttagtgttagtctcctataatgtgcgtcactataaatatagagtgtcactaaaggttaaaagtcaaaaaatttcaaattttatttatttgaaaaatattgacatatagtgacacgctaaaagcgattggataagcatatgccgacacacttagcatgtcactatatcataatcataattttttttttttttaaaaaaaacaataataaaaataaaaacagctgtaattttttttggaaaggtaaatagctgtaaaataatatatttaataaataaataaataaaaaaaataaaaggtggatattaattggggtttacacaatctattagaagacaaaatgtttctctttcttctccctctcgaccgcctctcttcttctccagcgaatggcgagcaggtcacctccaggtaatggcgtcctccagcgattggtgtcctccagcgattggtgtccatggctccactaatttgagcttttcatctcccaaaattccaatcggacaatcagcgtctctgcctcttctctccagtacagggattaatgagaagacaaaaacctaatgtcggtgactctacaaaaaaaaaaactagtcactccgaagctttggcactgtcctctctacaggagaaaacagaataaggaccacaggtaggggtcattcttcttcttcttcttttcttgttaacatatacaaagtgttgttgttgatataccaaagacggaggcagcttcttcttggtagagtcttggatctcgactagagagaaaccaagagaatactgataatcctaccaagtggaaagcgtacaaggttcctcaaaaaccaggaactgtagtaggtagtaattacattgaggtttttgtagatgaagaatgtgaaaaagagatgcccaaagaagatgttgagagcaacagcatcaggggtttgaattttcaacttagacagggaaatgaccaacaccttaagacggaaatccagtgacaagttttggtcttctcgattcaaaattagcgagctggaaagcgaaagttctctctgaagcggggagagccaccttgttcaagcgaggagtgaatctggatattttttagtctctttttttcttatgttttgttcataatctagtattgtttgtgtaatttttgtttattaaaatttatgcctaaactcagatttaataatctgtttaaaattttgtattgttgttattgaatcattgatctgatttgggctattaatgtttgtatttgaaatttatttgtaaagtttttgtaaagttctagtgtgtgtttaagtttaatttttttatatattattttaatttttttttgttactagtatattttttattgaagtttattgttttattaaaaaataaaaattagatattcttttcatattgaatatgattatattttatatttagttaattaaaattattattgttatatttaattgtatttatatataattaatataaatt

SEQ ID NO: 33694 - DNA, 1659 bp, Cannabis sativa
ccaagtgaaatggctactgaagtagcacctactccaggcttctctgttgtagttttcctgtgctgcaacaaccaaccacctttttagcttcttatggtaacattgatcctccaactgtggcctcttctgtgcatgttatctcatccaaatcttgcgcatcatcatcaactactcatgatgcaacatcaacacacgcttcaatagtatccactagtatcagtgatgcatcatcaccacaggctccaacaatatccaataacatcaatctcgattacatgtgcctcctactactgctaattctcatagaatgcagacaatgtctgcatctgagatttacaaacctaaagcctatcatgcaacaacttatctcctgtctgaatattttctcccacaggcacctaccactttaaaataggctcttgttgatccaaggtggttcaattcaatgcagcgagaatatttttctctagaaaagaatgatacttagacacttgtaccctatgacccccatatgcatctagtaggaaacaaatgagtccacaaagttaaactcaattcatatggcacaattaactagtttaaatccatacttattgctaaatgatatctgtagacccctgagtctgacttcactaatacatttagtccagtggtgaagcatgccattgttcaaattcttctcacacttgttgtatccaataattggaaagtcactcaactcaatgttttaaatgctttcctcaatggcttattacaagagacaatattcatgccccaaccacctgggtttatgaatccaaacaagccaatacatgtgtgcaaatttaataaggctctatgcgttaaaacaaactcctagagcttggaacaacaaatcgaagaaatccctattcaccaaaggctttaaatcctctcggtcagacatctcattgttcataaaagtcatggagacaacttaataatgttactagtatgtgtggatgatataccagtcacagacccaaatgatgatgctatttcccatctaatcagtgaactcgatcaggtgttttccatcaagaatcttggatccctacactactttattagggtaaaaattttaagagacaacacagaaatgtacttatcataaaccaagtacatctctgatctattagtcaaacttcatcttgatggagtaaagcatagtccaaatcctaccaattccactcacaagctttatcttacaaatggagaactatttttgatcacacttcatacaaaagtacacttagaattctacaatatcttacattagcaagatcaggtgtggttgttagaatttatgccctaaaaataaataattaatgaataatatagtagagaatatatgaaatacaattatcagataaataatacattaattataaaagtattattattaaatatctaaaaattccttattcgtatggaaaatatataatcttgtaaggacgtacaaaagaattaagattatacaatataaataaaataagtcggtagtgtattaaagtaataaaaatctttattaatatggaactgctaagtacaatttactatacactatgtgtgattttgattcagatcacatatgtaaatagacatgtagtaaatgtgttatgtataattcgattatgcatg

SEQ ID NO: 33695 - DNA, 1980 bp, Cannabis sativa
ttcatattctttgcttacataaaagtcatatgcaggaatagcttcattctagatcttgcaattaccatctctataattataatttgtgcaaaacaaacattattgaatcaggtctttcgatctattatttatgctaataaatttgtcattacaaatttcactcttgctgggttcaagtttaattagatagaacgaacttgggttgagaggggaaggtcaattaaagcaaagaaaaatacaacaacaaaaaagttggttcttcctatgcttagccaaatatgtttaagttttagtaatgggtgtatacacatctgttaccttatgttttgtctaaatacagatttggtatcctgtatttttaataatgcttatatggaagtcttattatacatcacagggaatagttcggtgattatttttattgggttgaaaagttcaaggtgcacaatcatgcatgtgtaatagttcggaaggcaaatatcataaataaccatattgaattatttaatatttattaaaaaatatatttttttttcacatgactaacaataaaataaaacaaagtctctagcaacaaattaaaataaataaagcgaaaaataacaaattcaaaggaagaaaaaagaattgtacgtataaaaaaatgtttaattttgttttagattatatttttcttataaataggaataaaatatacatttaactattgagttttaaatatatttgtatcatatatattaaatttttaaattactattttttagcttaaaataataattttatacgtaacgttattaaaatatatatataaatatgcatagattggattgtatcagttacttttaggtatcaatcaacattcaatctttgtacaagtatgaatttagatttttcaatccaatccaataaaatctaatctcacaagtgcagatattcgcactttacgaattagattttgatcgtgcatattgaattggatttaattaatttattgaccaactaaaatgagtagccattttgggctgtcgggatttaaaggcaatcaaacgtctattccctatctaagtccttttattgtggaaccgttctatgtatttcttattattagaggtgtctaagggagagttagaaaaatttactattctttgttagaaaatttgggtcaggaggaacataacagtccacaagggtgtgtgattatctgactctcatgtgattaacaattctatagatttttgagattcttatcaacttgcacaagggaatgaaacacatggatatttgtccaacacaaattcacaaggagactgaacacccctcaaagggttttatcaaactcaacattgatgttgttcttgatccattgcttctcaaatttggagttagggtggcccttcgtgatgactttgattaggtcatagggtcctttgtggtctctttgagcttgacaccgaaatcccatgttgctaaagtattggctatgagacaaggccttcttatatgtccatatgattagggtactcctctattttattagagtcaaattatcttagtgtgtacaatgctatcaacgagaacatccacaaaatctctacttttgatatagtcctaaaagtcattgggtttctttgtaagaattttgttgatatttcttttatgcaaacgaacattttagctcactctcttgcaaagtttgtgctctcttgattgcacaaaggtttggtcgatttgcttatggccttattcttagtttttttttgtaatatttaaattgtttggcttttgatggcaaaaaaaaataaacattgttatagggcaccaatgtgtctagcacccctataatatgatatcttatagttagttaatagtttttattaaattaaaataagtgagattctatattcaattgtaccaataaccatattaattttagacaaaacaaatggagtagggatcacatattttctaactcaaaactct

SEQ ID NO: 33696 - DNA, 2555 bp, Cannabis sativa
  modified_base (940)..(944): a, c, t, g, unknown or other
taatagattgatcttttgaggtttaaatttaaaaattgattattatatttttaatttatagtcagattttcaaattttgttaatttctttaatatatatatattattgttatacccaaaattcggcttccatctcagtggtggacacgtatcaagataaaaggaatatggatcgatgaaatcactttttatagaataactcattaattacgtaagtatcatagtatatttgtaacatgttgactaaaaggtcttaggcgaggaatcaatatacaaattggtgctcactatattagcgagaaaccatatattgctgaatgcgaataacgagacatcaaggaaagcgacacatatcaattgcaaaagcccttagtgtataatgtacaaactaagtgtaacaatcagatcggctcgaaaccaaataagcaaggtgaccgtctcgctatgggaagacttcctataacttcatccagttacgtcagcgaggcttataaccccggcgagtcagaagctaacattcaaatgagcttaaaaaaactctttgtaaataaaagctacgatcgtcacaagacatgcatcatcgacctcggaaggaaaaatggccgcaacttgctattgagatcactggaaccaagcttttatcgagacatctcgagatacaataattaaagacgtgttttaaacacgatcattgttgacccagtaaaagcgggaaaatcacagctatatgattttcaaatgataactgcatttacactacgtgatatgttatcaaatcccgtgattttaggggatgatcgttgtaaacatattacaacaaactttgtaattaactgctcactatgtaattataaatattggaaaataagatcaaataggagacaaaaaactcatacaagagaggccttgggaaaataatcagaaatctgaataagattgannnnnggactatgcagaattttaactacaaaatcacgtgaaaaacccagtgttcatacttttacttttatatcttttattttttttttatgtgaaatcgttactgtgaggctcaaatttggttaacaaatatctacattaacagtttagtgctttcattgagagcctctgtgaaaaagctcagaaaaaccctctcatcttttgaagaaaaaccacctccttcatggttgaaaatccaaaaaatgttaataccccacatgaggaaactaatcatcgttctgggaaagagcccatgggctccagaaggtctaccaacccgcgggcgaaacggaccacccattccaggaggactcaacctgagggtggccccagcacacggaccacatgttcccagaggacccaacccgacgttggtccgagtacgcggacaaacacgcttgaggagaacttagcgtgggagtggccagaaccctgggatgagggatgaagagattaatcgtggaggtgcccaatcaatgggaaaaggtacttatgaaacaagaaactgccgcctgagatgccgtctaaaagaagcgcaccgtcggaacgctgaattagagcgtgatgcagcctcggccagagtggcactggggatgaatgctcaaaatcaacctgaacctgtagtgagaagaccacgaggcaggcctcatggctcacgaaccaggagacaggaaaatgcctaggaagaacaacctaggggaaatgagataccccctgagaattagaacgaacagccagatgggaggcaactggaaactgatgaacgagaaattcctcgtgacaatgaggaggatcttggcactcaaacaggagaacgtaggtcacctgcgagaaatcaccagcgttcttcccaaacccatagagcgaggactcgtatagaccctaatgggggaaatacgacgaaccgcactcagggggaaataacagagcgtgaagaagcaagtgtgaccttgaggcggtcaagaacccaaagtcgatcaacttgaagaggagaaagtactcaacaagctaaagatcgagaaagtatggatacagtaaatctgcgagtcactcaaagataaagtctatgagtaggacgcgatctgtgagtaagacgaggtcttccagcaattactcccaatcgaatcttcaaaagcacttgaattagaagaaacctgaccttcgccaatagcttggtccaaagcaagaggatcccatccaattgcgaataaacgagctggaggacaagttcaggagatatcaagtgggggaactagggagacaatttggatacgactcagacgaggagcttgagccgtatcatccagatataatgaataccccttttccttcgggattcaagaacccgcatggctcttcatatgatagaatcactgatccggtctcgcatttgaataactttaacacaataatgtgagcgagtaatgtgacgaacaatttatgctgtattttgttccccacctcgcttgttggagcagcgagcaacaagtttaacaagtttactcgtcattcaataacttcctgggagcagctgtccagggatttcaagaaacagttccaggctgctagggatagacg

SEQ ID NO: 33697 - DNA, 1987 bp, Cannabis sativa
tggcccccctattataaaattctggctctgcccgtgcttgtttaatattattatacaacttacaatgaaaagactccttgtatgaattcttctcaaactggtcatatgtggttgatggaaatattacaaggaagtaaaagtagatgttatataatgtttaggatggagaaagatatttttattaaattgtgcaatgaattggaagctaattatggatttgaaggttcaaggagaatgtgtgctcttgaaatattaggcatatttttatttacattaggtcacggtgctggaaaccggttaacacaagagcgtttcgagcacacaggtgagacagttagttgatattttgataaggttttagatgttttatgtcatatgagtgtagatgtattaaaaccaccaaatccagaatttaaagataatcctgaagagatattgaaagatttctagatatatgcctcattttaaggtaagtcatactttacaattatatattttttaaataattttttctctaactagagtataatataatctcggtattctttttctagaactatattagtgcaatagacggtgtacatgtgaatgccgtaattttttgttatttttttttattctgattcagttatttttagtttgttattgaattgcaagatcacatgtgtttctggttgtattgtatgatggtgtttggagtgttgaggaatttaattggatgtataaaagcgaaagaagtatgacgttgatggttgaaatggacacaaccttataaaaaaatgtgcgacagtttatatgaagagttggaggttgaccaattgaagtatgatttgaaattggtgataaagtagtaacacaatctcgaaattgcagcaactgtggcggctccggccacaacagagctacatgcaaagctcgtatttgaggcacagtccaatattacttgggtccctaaaacaggttttgttatatttaatgttaattgaaactgttattgtgaaacttttgctaaattctcgatgttttttgatgcttttaaaaatttaacttaaatgcatgttttgatggtttctcgatggaaaattgatgtgttatcgatgacttttcggaaatagttcatgtgaaggctccagatgttgtcattgtaatttttaaaatttaacaatgatttattgatatgttctcgatgtattgtccatagtttgtgcagtcctttacaaaatttagtaaatgtgttctatgatggtttctcgatgggaattcaatatgttctcgatggtttttcgataaaatttcatatgaaagctctgaattctattattacaatttttaaatttaactttgataacaaggaaatattacactaattgtctccaaatgtataaaactataaaaaaaatattttctaatataaggatcctgtttatttaatttattctactactttttaggctggctttcgaaaatagtaaggtcatgggcgtcatattcatgatgcgtctcatcgacacccatctcaatcactatctcaacatcattgtatgtgattgtcctgacatacacttcttcatctgggtgaggaaataaccctctcataacaatcagttattgttgaagaaagaaaacaaaataaatgttataatcctatcgaaaacatattgacaaccaatcaaaaatctatcaacaaatagacataacacaacaggggaaaaaaacacaacttatcaataatatcaacaaaagttaaacaatacaataataatataataaaatgcaaacgttaaacaaaaaaatgtactaaatcctatcgagaacctgcagagaacgcatcgataatcagtagacaatcaccaaacatgacaattaaaaaactaattcttaatcctatcgagaactgttgataatatgtcgataatcaagcaataataaccaacataacaacaacaaaataaaattttcacttttatcgagaacctattgataattc

SEQ ID NO: 33698 - DNA, 1054 bp, Cannabis sativa
actccaagatagcgcctccttgatgccaatagcttcgaccacatgaggctgcaaatagccacttttggaaataactctcgcttccaacactaaaccagcagcagtccttgcatcaaaccccacaccataacgcccctgagtagtaaagagtgcaccatcaacattgactttaacataagggagatcaagagtagtctaatggtaaccactttggacattcaggccatcaacgggtgcagtagtaacattgtgttgttgagcactaaaccagtctatataattcagtttagccaatgtcaccacgtccctagagactggttgcttagagttccaaatcaggtcattacggtgagtccaaattgaccaaaaagtcatagcagcctcaatgacttcggctgtgttcaaatacccaatccaagctcaaaccaaatagagaaaagcatcgcaccaagtgcaaccattggaacattgattatgttccagcaactttgagcaaattgacatctcaccaatacatgcaaggctgtctcaggagcagcacgacaaaagggacaagttgaattaattggtacatgtcttgacgaaagctggaaccgagttgggagactgttagaggacgccctccacagaaaattcaacactttgggaggaagcttaagctgccataattgacgccaaaaaccagagttatctggtaaaatattactggttttcaacgattgtagcatagcataagcactcttgattgtgaacatacctgactcatccttcaaccaatactacatgtcactcgtcgataatgaagagagaggaatcttccaaactagtgattgatccctatcgttgagcacatctgtaacaacgtcctcatcccattcaaccaagcctactttcatcaaagaatcaaccgtcttccccacaaggcctggatgcaatgattcaataaaagggttcacatcatcaggaagccaaggcttagctaaaatagatatgttataaccactacccacaatttgcagtacaccagactgaactaactgttgggaatatttta

SEQ ID NO: 33699 - DNA, 1650 bp, Cannabis sativa
  modified_base (1578)..(1607): a, c, t, g, unknown or other
actcacgcgtatcatgaagaatgcgttgttaagtggctacaagttagtaaattttgtcccaattgtagagttgagatagtttaataatcaggtgttacttaacaaatttttagtgattatatatgtatatgtatatatatataagaactattttcatatacatagaatgttgtatgttatatagacatcttgaagggattcattaataaagttttatgatccgttttgttcaatgagtttattattatttttatttgggtagtttattgaattacttcataaaccaacgacattcatgattctatagcattatctttaatctagtttattttttatttaataaattgtaatatcatatatttaatttttaaactattagactttttttgttgtttattttttatcaagaagatgaatattcattattaatcaaacacacagattatacatctcttctagtttgcttatgactaagcaaagaaactctagcttcaaaagtacttcttatcagttatagtccaaagcaatttttttttatcgtatagacaactatttctattagcccaaatatgatagacgattgttgccaatagaatgaatctatacttaagagccgaaagtctacaccaaattgcattcctaatattgagtaaacttcaactgaaaataaaataacaggaataatattaccgaataaaatttttgggttgagtcatgaactaggtcgctctctttaagatgttcgtagcactgcccaggaatgtgcaagcactcaaaaattatcagtcatccccatgtaaaatagcctagtcgaaataccactatatcggagctttactgcacgatagagaaccatcgaaacaccacactaaaaaactactgctcggactatataatataattatcgtaaataataaactataaatgattttttttttctttgtgagaaagatgtattttctcccgttggttctaatgtattagggaacccattgaagattctcttactctgagtttggtgcaagaggaagtggttgaccaagatggaacagaagcaatagagtatgctatgtggctcgattcttatgggccattgaacaaaaagtattatgaagagctaagagtaattccaacaagatcattgtcatctattgagaagccaccataattagagttaaaagtccttcctgatcacttgcgatatgagttcttggctgagaacaagacaattccaagtattgtatcagcttcactttctgatgtagagacgaggaagttgtttagagttttgagaaagcatatgaaggccattgggtggacattggccgacatcaaggggatcaacccctcaactgttatgcatcaaattttaatggaggatggagttaaactgaccattgatgcacaaagaagacttaattcaccaataaaggaagtagtgagaaaggaggtagtgaaatggctaaatgttggggtgggttatccaatttcaaatattaataagtgggaagtccagtgcatattgttgtgcctaagaaaggggaagtcaaatattaagtatgtttcattaacatcctnnnnnnnnnnnnnnnnnnnnnnnnnnnnnnacataagggtttaagaaatccttacattggatgcagcagaata

SEQ ID NO: 33700 - DNA, 1227 bp, Cannabis sativa
taaaccctttggtttgagaatcagaaatctagaacctagtgagatagtaccttttttcctttgaaggtaccatgaagtcttctatttagcatgagtgtataggatgttctacataagcaaatcaatatccacttaatgaacttctggggaataaagcccttttaacagatcagccataatagctcaatctattgtgtcatacgccttactcaagtctaccttcatgagacatatagctaagatattcttcctagtataaccttttaggaggtcttggaattttagaacattatgagtgagttgtctatttttgatccctttgtttttgtgaactagagaaggcaaaacttcacttaaatgcaaacacatcatcttagaaatatacttgtataacacatttcaacaagcaatgggcctataatgagcaactgaggaaggcgaatctaatttgggaataagacaaaattactatgcggttcaaatcattggggatcaacccttcatgaaaaaaagggcaaaacagctcttgataagtcatcaccaatatcagaccaaagacctttgaaaaatccagcagcaaaatcatctaaacctagacctctaattgaatggatgttaattaaagtgtctttgacatctttttcaatgaacggtttaataagctactaattcttttacatggaacaatcaaagcaaataaggaagtaaagattaatttaacattacacaattttaatataaataatatgggtataattacatagaatacaaattaaaaatgtttgttatatttttttagaaaaaactgttattattaaaattgggagtcattaataacaaacgagtagattagggagggaatttccctcaaccaagaaatatcttcatctaatcgaagagcaaatttagccaaagcatgggctgctttattagcatctcgtttaacatgagatacctttactctaagaaaagaggataaaagataaataatatcatctaccaaatcatgaaaatgagttacaaatctagtagaggataagttgttgatcgcattggcaaccaacagagaatctgtctcaattgaatgtattggaagttgatactcaattgcccatttcacactatgaaacatagcagcagtctccatctcttttggggaatagcatccttgaattgtcttggagaaaccaacaataacaataccaacacggtcacagattagtgctc

SEQ ID NO: 33701 - DNA, 2838 bp, Cannabis sativa
  modified_base (2777)..(2787): a, c, t, g, unknown or other
gcaagcaaacaaccaaacaaccacatgttgaaatttaaaaggcttcaggaattaaaaagcaaagttggccatccaacttcgcaagtctgtctttacagaaaggtgccaccaggggaaaaccattgtctcggccaaaagtgcactttaaaaaaaaagaaaggggaagataaataaaaaccagatctacatagtgggagacctggatagctcttcttcttcttctgcctcgacctcttcctccttcgtcctggacttctcacagaaagccagagtttcctcttccttttcctccacaaagcttgtttccatattaggattcaccatctaggcttgatataaagtatgaaggccaaccttgttgcatcgttctatggtctcgacttccttcttggcaagctttttctcaaattcatctgcttgggccttgatggtcttttcggctttttcttttgacttctcggcttcttgtttaaggcaggtgatttcttactgggtgtcgtcacgttgcttaatcacaatcccacattgcgacagtaatttctggacctcgccctctaaatgtttgagccgctccaagagtcgccgatttgaagcgaaagagatgaaagaagcctagagaattacgaaaaattgaataaaagaaaagaaaaaaaataaataataataatattatgctcaacttaccatgaagttgcagtccaatatcttcaaaagcatctcttctggattcccaagattgattaaatcccaatcagggggaacgagagccttaagcttgtgccaacaagcaatcccttatgcctgggcaaattcaaatccagcctcctctgctgcagctgacaaggtctcactggcgttgctcgaggaggcaaaacaatgggctgtctcaagatgaggagtgtatgtgttgggagcaactggaggaggaacttggtcttaggactcggtatcagagacctcgaggttaataggcttggagagtgactttttttttgtgggcggtggttttcctttgccttttaggagttgccaccttggcatttgtggaggcccttgggttggttcccctcttcttccctttccgatccatgatatcttgaaatcctcccatgtctgcaaaacaaaataaagtgttacaattagtaaaaaggcagatgaaaggggagcgaggggaagtaaaattttccacctaagggatttaccaaagtcactagaaggcgagctatcactagacgaaggggtagaaggaccataatatccactaaaatccctacagcctataatcttgaatatatcaaaaggctctattggttctaaatcccaactcacgtctatatgacttgccctatcttccatagtgtagtgtcgtattgcttagctactatactataccataatatgactcgtgacagtttatcaggacgtggaatctagggtaccagttgtcaaacttatgagcaattcggtctacgagaagggaatcccaaatataaaaattaaggtgggagtcttggaaggtgactaatgtgtacgttcaaccctaagtactgtgggagacctaccacattgattaccccaggatgctccttcaccaggttcctgagggacagtattttgaagaaactgtgctcgagccacgcgatcccaggccttatcctcatctggaaggtaatctactgccatgaagaatacttgggaaaataatcataagtatactccttatcagcgagaaggcccgccgatctcaggttggcttcgttcaaaagaatgtcacatgaccgaaggccataaggaagagtcattaggcgcctatgccgactgaccatctcgggggtaggatggcctcgtcaagagagctgtaaacaaacaaaacattggtcaaaaaatggagagacaaggaataatgtacctgagcaagaggaaaacaattacttacgaagtctgcaaatggtggttgtgccaattggggaaagactagaagtccagaagaaattgtctttgaaagacactttgttttgcaagtccacaatgattttaggctcgctagaatgagtaccaagatagtgaaagccccctgcggcattctacctcgctggaacggccttaaccgaataaagatactcgatttctactggtgtggggcattcccagttcagaattttatacaaaaccttaaaactagcgagaatcttgtaagagataggattcaactagaatggggcaaccccaaggtgatttatgtaatccttaaagtagtctcgaagagggagtatggccctagcactaatattctccaggctccaagcgcccatgccagttgagccactggtactagtctcaccaccagtccctgggatactgcttgaaaagcgcggaggggggaaacaacggaactcaccctctcgtactgaccgcccaagtttaattccacaggtctccattatatcacctgtgtagcctgagatagattgcaccttcgattctattaactcaacttaaaagtttactttggggtcctagggagtctttgatgtacatggcttaggaggcattattttcaaatccaagtcacctggttcaaaagcaattgtgactttggttaaaaataaaggcttttccaaaggaataaaggacacacttagaggttccggccaggccgcatatcgcaagaatcagtgcttgccttcagagatttcttgcaagaaacgcctatagcgactagcattatcttactagttagttctcactgtttgaaatattttaccaagatctagatnnnnnnnnnnntatgtttcattaacatcctaatatgaatttttaaaataatgaaataaacac

SEQ ID NO: 33702 - DNA, 1176 bp, Cannabis sativa
  modified_base (677)..(685): a, c, t, g, unknown or other
atatatatttatatataaaaattttatttcgttttttactaaattttataaagattaataataaataatattatgtttagatataaaatattgtattgtaatattaattattacgaaaataaattttaatatattaatgcgaatcatattagttattcaattctttggtctctccaatgcggtgtagttcctggattcgagtctaagctgaggtcaggtttgaggtcgaattattgtaaaaatattataattttacacaacctattagtacaagtcaataccaaacataatattgtattaaataatactaatactaatactatgcaatacacaatattttacaatacaatactagttgttattttactattataaatagagtttttttacggctaaaccctctcaactattattctatttgtatttaattctccaagttcaaattttagtggtaaaattctctaaactactgaattgttaacaaattttaggtgtcatctatttttcacagtaaggtgcaaacatatattgcttacgtgtacacttctatgtacatgtgacgcgtttatattagtatatttaatattattatttaaaaattataaaaaaaatatttcaaaatttataatattttttattttttaaatatttttttattttataattttatttaattnnnnnnnnnattttgaaataataatattaggtgaatcaatataaatgtgacacgtgtacaagagtgtatacataagcagtccatagtaacagttaacaggatgacaccttaaatttactacggttcaaaaatttgaaaaattttactatcaaaagttgaacttaaaaaattaaaatgcaagtaaaacgatataattaaaatttaattagccactaaaaactcttataaatatgtgaaattgcaaacagtgtaatatgcgtttattctaccaccaatgatcatgtagttttactattataaatatatatatatatatgtatagtagaagtttatagtgatcaaaaactcaaaactagttggactacgactatataattattagtagtgttgtacgtataaaattaagtggtgcaatatcatattacatgcactaaagaaagaaaaggtcacatttaagtatgcatttttattattaaccatgcatgcatatatatatatat

SEQ ID NO: 33703 - DNA, 1153 bp, Cannabis sativa
  modified_base (994)..(996): a, c, t, g, unknown or other
atttatttactaaaataaagatcattaattgtcttgtctaaatgtaagatgatataatttattccactattatatactaataaataataaattaataataattaacaaaaaaattacaaaaaaaaaagaagaataaaaattaaaaaaataataatattatatgtatgctcgtataatcttgttatacctgaaattcggctggtactttagaaggtaacacgtgtcaatctcagagaatatgaatcaacgaatatattgataattatatcaataaatattaaatcgcataactcattaaatgtaaaatcaatatagtatatttataactcgcagactgcacagtctttagcgagacaagcatgtacgaactattaattcacgtattgacgagaaaccatttcgcgccagaaggcataatctcaaggaagagataaataacgcatagtgaggcatctacctcacaatatttaaagaggcgctgacgagacgaattgactatcagaacacttagcgtgtaatatacattataacaactaattgaagtaacttaaaggacatgattgtccagtctggaaggccttatggtcaaagagcagttcttaagtttgagcaatacacttgtgctcatgccatcgctggaaagcttataaataaaccaagttgttcatgtactaagcgagatacctcagcgagatacctttggcagcgtgtcctaatccacgtcagtgttgacttccttgaaaacggtttaaatcacaattgtgtgattttcaaataataactgcatttatttacgtggagcataattaaagtccacaatttcggggaatattattatgggatttgaacttaaatgtaattaactgccaacctatatcactataaataggggaagattatacaaaaaaggggacgaaaattcttagagagaaaaagaaatacactgattgtgaagaacctaaaactgtatcagaaaaatctgaataagattgannngtggactatgcagagttaactgcaaaaccacgtaaaaacctggtgttatttttgcttctattatttttcttagatttctataattattgtgccaaatctattacgaaaataggctcataattattaacaaaattctgtgttaacagtttggtgcttt

SEQ ID NO: 33704 - DNA, 2481 bp, Cannabis sativa
  modified_base (51)..(55): a, c, t, g, unknown or other
  modified_base (2431)..(2452): a, c, t, g, unknown or other
aacgcgagtttttctagagggggatatctggattctgcccctagtaacctnnnnnttacatagtaaataggttgctggtgcttgccctcttctcaccttctagctgcactaattccatcttctgagatggcaacatagagaaacaacgtttctccagttatgggttttgccgaaactggaggcgtagctagatgccatttgatgttctgaaaggcctcttcgtactcttttgtccactcaaactttttgttgcctcgcaatatattgaagaatggcacacacttatcagttgacttcgaaatgaatctgttaagtgcagccatttttcctgtcaagacttgtactttcttaggctttgtcggtgatggcatgtctattaatgccttgattttttcgggatttgcttcaatacccctcgcataaactatgaatcccaaaaaatttcctgaggaaacttcaaaggaacattttttcgggtttagcttcatgttatacttctttaataacttaaagcattctgtgaggtgtaaggtatgatccctactctttattgattttaccaacatatcatcgacgtaaacttccatgttcagccctatttggtttgcaaacatttcgtttatcaatcgctgatagagtcccatgttggttacgaagcttgtatgttcttgatccaggacatacatttttatctggttatatccagaatatgcgtccataaatgacataagctcgtgcccagaagtttcatccactaactggtcaatcttgggaagttgaaaacaatcttttgggcacgccttattaagattagagaaatcaatacaagtttttcaagttccgttaggcttcgggacgagaacaagattggctatccacgagggataaaacacctcgtgtatattgttgttgactaataacttgtcaacttcttgttttagtgccccttgcctctcggaatctaggagtctcctttttgtctcttcgctgggtagtttggatcaacatttaaatgatgttagataatattagggtcgatccctatcatatctccatagctccaagggaattgatcctggttcgccttcaaaaaacttattagctgctatgtccaggttcttcccgatgtatacacaccttgtgggatttcctgggtcaagaataacctcttccaattgctcaattagtttcaataggcttttctcatcttgaactcaagagtcaatgcaataacaattacgagccagcatctggtcaccacgaaccactcccacgccttcttgtgtttggaatttcaaggataggtgctttatagaattgactgcccctagtccgattagtgctggatgacccaacaatatgttataagccgatggcaggtcgacaactaagaagtcttgcataactgtggcagataggggtgcctcgcataaggttaatgcgagctcgattatgccaagactggcaatactatctctggttaatcagtaaagattcaccataaaaggccttaatttggccttttcaagccccattttccgtagagtccccttataaaggttatttaccaagctcccattgcctattaacaccctcttcatccttttattggcaagttgaatggtaatcaccaatggattgacatgaggatagctcacatttttctcatcttcctccgtgaatacaatgggagattcctcgattttcaccttcttggaaggttctagggaaaatgccgactgctcgttctttatctctttcacatatcttttttgcacgttattgctttcccctgcaatatgtggccctcccaaaataaccaggatgtcctctcctttaacaggaagaggttgtaacccctggttgtttgggttgctgggtagactaggctggttgtatccatggccatgtcttctcacgtactatttaaaatggcctcgatcaatgagactttctatctcatctttcaattggcaatattcgtcgatcgtatgcccaatatccttatggaatttacaatacttgttaagatctctttttctccttgaattcctcatgggcttgggcttgccgaaggcaaccttctgctcatgtgcgaggtaaatattctcccgagtttcattaacctcggtataaatagtatacactggcacgtacttatcatgcttcttctgtttcttttttatccttcgacagttccttggtaccgtcccttctcttcgaaccagaagcccctgagttatcaattctcgtggaaacaatacttgttgaaacattgctgggtttgcttctcgagcttgttttcaacaaattcatttctttttaggcttcttccttccgaacgaataccagagccctttcattgaactcagtgatgcttcttattggatgacctgttgggttttgtccctaaataaaacccatttcaatnnnnnnnnnnnnnnnnnnnnnnaaagataagaaataacattttatgttgca

SEQ ID NO: 33705 - DNA, 1403 bp, Cannabis sativa
cacaaacgtggcacttttgtggtttttatggggaacctaatatttctagaagaagattaacatgagatatgttggaacatttacggataatatataatggaccatggttagtaatgggagattttaatgagaatttaggccaacaagataaaaataaaggaggagttcgaaatgaagcacaaatcgaggcgtttcgaaacactttagagttctgtgcactacatccattgcaatgcaaaagtgatcgttatacatgggcaaaaagtgtgagtaatgaaagtttgaaggaaagattagattgggcaatggtcaatgaggtgtgggaggaatcatttccacaaataattttggctcatctcgattattatcattctgatcatagagcacttttgattaagatgacgggtaatttggaaatacaaaagttttccaagaagaggaaacgttttaggtttgagaatatttggtctacaaatgaagaatgtaagactataatttggaataattggatgaatgacgattctactcccattctagaattacttcaaaatatacaacgatgtgctgctaacctaactacttggcaccagagtaaatatggatctttatttaaagaaattaaagaggttcaatcaaaatttttaagcttacataatttacaaagtgagggagcggcaaaagaagagtcattacaactagaaaggaaacttagttatttgctcttgaaagaagaggtcttttggaagcaaagggcacgtgttcagtggctacaagcgagggatcaaaatactaaatactttcattaaaaagcaaatgcaagaaaaaaagaataatacaataaaaggtacgttgagttgtatagtaaattggaaattatagtatatgagtttaaatagtattggtatcataattttgaaatgttaaattgattaaatggttagtattgaaggttatggttttcctatagagagagttactcttattatattatgttaattactaatgggctgattacggttaaatttctccaattaggtttgctcaatgaagaaaatgtttggtgtaccaataacaatgagatggggaatataactaaaggatactatacttccctcttttcatcaattgtgcctacagttgagaatatcgaagaattgttgcaagcagtaggacgagtagttactgatgagatgaatgaaatgttggtaaaacctttttctctaaaggaaattgaagaagcagtgtttaatatgccagtagataaaagcccggggccagatgggatgattgcaatattttatcaaaagcattgggacattgttggacctttagtatctaaaacaattcttgattgtttaatgggggtagctgatatgacacttattaatgattctttgattact

SEQ ID NO: 33706 - DNA, 2091 bp, Cannabis sativa
tgtctcacattctgaacatttacctagacttttgtcccgcccagcagaaaagaagactactggacaaagagcgggtacaagcgctaaaagaagaggtagaaagactgcacacaaacaagttcatcattgaagctttctatccagcttgggtggctaaccccgtactagtgcccaagctgaacaagaaatagcgagtatgtattgattttaccgacctcaaaaggcatgtcccaaggattgttttccacttccaagaattgatcagctcgtggatgcaacatccggacataaaatttgagctttatagatgcttattcggggtataataaaatcagaatgcatccaccagactaggaacgtacaagttatcaaatagatataggtctatactattataaagtaatgccatttggtctgaaaaatgttggagctacttatcagaggctagtgaacaaaatgtttaaaaattagatcaaacggaatatggaagtatatgtggatgacatgctcattaaatctatgaaggctgggggcatatagaggatctggatgaatgcttcaaaatcctcaaaaaatacaacatgaaactcaatcccttcaaatgttccttcggggtcagctcgggtaagtttcttgggtttattgtcaatgcttggggaatagaatctaatctagagaaaatacaagccctcctggttatgaaatccccaacagaaacaaaggaagtccagagcttaatttgtcgaatagctgtacttagcagattcgtttcaaaatcaatagacaaatatgtttcgttcttcaacatcctctgaggtaataaaaagttcaaatggacgaaggaatgcgagagcactttccaagaattaagaagataacttgcaaaacctctcgtactctcaaaacccctagacagagaagaattgtgaatatacctggctaatgactcgttgaagctgaaggtaattatcctgataagagaagaaaataacgtccaaaatccagtctactatatcagcaaatgactcgttgaagctgaaggtcattatcctctgatagaaaaactcactaattgcctaatcttagccacatggaagttgagaccctatttccaagctcaccctgtttaggtatacaccaaccaacctttgggcaaagtactgcaaaagccagatgcctctgggcgattattcaagcgggtgatagagttgggaaagtatgagataatcttccaacctcgtacaatagttaaagggcaggccttggcgaactttgtagttgagtgcacagggaaagaagagagcaacagaagggacaacccgaagcctgtgtaagaatccctaccagaaaagaatgaagatagacctacctagaaattacatgtggaaagatcagctacagaccaagtttctggtgcaggaatttccctcatcacacctgggggcagcacccgcacggagcaatcaaatttgggttcaaggcctcaaacaacaaagcagagtatgaagcactcatagctgggctaaaacttgcttgggaggtacacgccaaatcaagtctcaggagagtacatggcccatggagagaaaatgatggcctatctaagcaagatacaagacctgctcccacaatttaagggttgcaccctcaagcagattctaagagaagaaaatacaattgctgacgccttggcatggctcgcgagtagcatagtaacttatcaggcaaacttagtcccaatccaattcttagaagaacccaacatcaactatgtggaagaggtcaaaatgatagacacaacaccaaattggatgacacccatagcagcctatctcaatactggagaaatttccaaaccacaagaacaaggcttagaaaatgatgagcgaggttgcgcggtatatcatagttgaaggtgtaatgtatagaagaggtttctccatgccattacttagatgtataatagaagaagaggcagcacgactcctgtctgaggtacatgacagattctgtggtaaccacgtagcgagacaaagtttatcaaagaaaatactaaggcaaggatatttctggccgaccatgatggaagat

SEQ ID NO: 33707 - DNA, 1327 bp, Cannabis sativa
  modified_base (774)..(784): a, c, t, g, unknown or other
caattccattcaattttactaacatgacgattgtctatgtactaaatcatattcctcaaacatttaatatctaaaaaatcgtactcttggaactttaacatgtacaaaaccgtgtattttcattcacgttaggtttttgttagtaaaattaattggacaaaaatttttaaattcaacaattttaatagttttggcagaatatttgtaaccacttgaaaagttagagacataatttaatacatataagttcaggaccaaaaatctagttagtctaattagcctaattattatacataatatagtttatttacaacgaaaatcttaccttgtggcgtgctaaaaaatttatttaagaatttaagtgcaacaaaataaaatttttgataccaaaaaatttgtataagaattttaactacaataaaattgaactagataagaatatttactaccaaaaaaattgtataaaaaattttaagtgcacaaaataaagtaaataaatatttatatggcaaatatatataattgaccatctttgtcctataatttgagggtgtcgatctgaatctaccatgggtagtttggtcatatacttatattatatgtattacgtaccccaatcatgattaattttgatgcattatttattgtcacgtaaatatttcaccaaaagtaataattatagtaaatagtaatgcaacttgtaaaacaaggcttattcatttgttttaagtgtactaatcttattcgataaaaagataataataataataatannnnnnnnnnnaataataataataataatatgtctttggttcacaaaaatcgtggcaaaatcgattttagtcgcgtgtccataaataaataataagaataactctttttaatcctttataataaatatatatattaagaatttttgtcaaaaaaattatatatatgcatttatttatatattagactttaagtaaaattatataaatatttatatactattctaatataagtacttatttatataaaatgatgttgctataacaaatcttttagtataaccgtctaataaaataattaatttgacacaagaatggacttaattcaaatccaaataaatggatttattttaaacaacttaattattttgaaaccataaatagatcataaactaatttttacatttttaatttgtaacaattaattgaagaattatcactctaattattctagctataggtattgttctatttaataataaatctctctctatatataaatgtatattacaatagcatgtgcgaccactattttttctattttatttaaatttttt

SEQ ID NO: 33708 - DNA, 1397 bp, Cannabis sativa
aaaaaaaaaaaattcaaatttttttgtattttcttagtctccattgtctaaaggcttgtttcccaaaattccacacaagtgttcaaaaaatcatcaattttttttagttttcatcattgttcgtttggtatgttggttggaattgctgcttgaatcatctcttgtactgtttgcttagtttttacagaacttaaagaagaatgcaagtggaaaaaggcagaggtgtgagcttatttgagggtaaaagccatcaatttgagtgaaaacatgagtgaaattgagtgataaattatttctttgagtgaaacacgtgagggagtgtggtgaggtctttttgttattaactgatctaacattatttttttttgcagaattcaatcatgtaaaaatttccaaaagaaaataccggtaatgaaactacaccatatacggtttcaaatctacaacttcaagctttgtgggggagatgaggaggatgatgagagaggagtgtgaacaaatacatgcgaggttagatagggtagaagagggaacccaacagaggccctgcaggaataggttttacaagagggatgataatgaagtagatggggaagggataatttctgatgaagagtttgatgggatgccagcgggtaaccatcggaggtatggtcgggatagagaagttaggaactaggtagataactatttgggaaatataaagatgaaaatttctcctttcaaagaaagagggatccagaagcatacctggagttggagaagaagattgaattggtgtttgattgtcacaactattctaaaacgaaaaaggtaaaacttgctgccattgaatttattgactattttattgtttggtgggatcaattatgcatcaaaagaaggctgaatggataacgagagattgactctttggaggctatgaagagggtgatgaggcagcattttgtaccatctcagtattatcgagacttgtaccacaagttgtaaagtcttcatcaaggctaaaagtgtgttgatgagtattacaaggatatggatctagatggctatgattagagcaaatgtggaaggggatcgggaggcaacaatgggaaggtttttgaatggattgaatcgcaagattgctaataccgttgaactacaccattatatggaattggaatatctggtgcacatggaaattaaagttgaaagacaactcaagaagggtagttcgagctccaaaccaaggccaagtccacacaatctaaatacaacaccttggagatcaaacatcccaaagaaagaggatcaatctagttcatcctctgcacccaaaccagccaccgcaactacaactcctcaaggaaaaacaacccctatttcatctcattctagtgagattaagtgtttca

SEQ ID NO: 33709 - DNA, 3432 bp, Cannabis sativa
tagccttgcaaatgtggtgcttatcccgaaaaagaaacaactagaacatatgggggatttgaggccgatatcgctttgtaatgtgttgtttaaagttatcacaaaggttatggcgaatcgtatgaagccttttatggatcaaatagttgctgcgaatcaaagtgcgttcattccaggccgtctcattattgataatattttgttatcctttgaaattttgcattacttgaagcgaaaaaggcatggcaaggatgggtatatggcgctcaaactcgatatgagtaaggcttacgacagggttttatggccttttttgagagcaattctgataaagatgggatttgcacatggatgggtggatttggtaatggcttgtgttagttcggctaagtataacattgttcatgggggacgtgaaatgggaccagtgattccaagtagaggcatccgacaaggggctccattgtctccctacattttcatcatatgtgcagaaggcttttcagctttgatacaaagatttgaggcaatggggagaattcatggttgcaaggtggctaatggagcgccaaggatttcacacatggtttttgctgacgatagttatatgtattgcaaagaaacaatgaacgaggcttcctatgtgcaacaaatgcttcgtattttcgaaaatgcttcaggtcaacaggtcaatctaaggaaatcctctattttctatagtgttaacattaatcatcatgtgaggactcagattggtagccttcttcaaatgacaatggctgatgctaatagcacatatcttggtcttccaagcaccatgggaagaaacaaaaatgcagtcttggggtatttaaaggagagggtgaggaaaagagttcacaattgggatacaaagttcctttcaaaagcagggaaggagattctgataaagactgtggcccaagctttaccaagctatgccatgagtgttttccttcttccattggatattagttgggacatggagcaacatatggcgagattttggtggaagacatctaattctaaggataaaggtattcattggatgtcttgggacaaattgagtacgcacaagagtgtgggtggattgggtttcaggagtctgcgggatcacaatttgtcactcttaggaaagcaaggttggagatttttgaatcaaccaaatactcttgtttctcgaatttttaaagctagatatttcaaaaatggtacatacctttcgaccaagctgggcagtaatccaagttacgtctggcgaagtatttgggaggcccaatctgttgtcaaaaaaggagttcgatggcatattggtgatggttcgagtattgatgtgttgggggaaccttggttaccaaatgatgaggagccgattgtcacttctcatcatccagctcttacgaatgcaaaggtgtctaatttaatggttaatgataaacttgaatgggatgatgaaatactagctgaccttttcaatacaagagatcaagttttaattaagtccattcctcttcaactcacttcaggtggggatcatatgtactggactaaagacacttcggggacatacacagtgaagagtgcttacaacttgatccagaaaacgagtggccaatggaatacaatcgaagcaagtgagttctggaatgagttatggagattgaagatacctcccaaagtgaagaatttaatatggcgaggaggtacaagttgtcttccctctatgactatgctacttactaagagggtggcggttagtagcttgtgccctgtgtgtggaacctgtgcaaaaacgattttgcactctctggtgcaatgtgaacttgctactgcttgctgggagaaagtaggtgttgttacacctggtgcagccgggatgtctttcctagaatggtgtgttattgcctttaaaaattcaagcaaggagaaaaaatgcctaattgctactatttgttgggtaatatggggagctagaaatgacaaggtatggcaaaataaagtgtctacagcttcttttattgttgcatttgctgggagttaccttgaacaatggaaatcagctcaaagctccaatttggagtcatctcaaaccggcctagttgctggtgatggtgttgagagctggtgcgtgcctcaaagaaattatgttaaggtaaatgtggatgcatctatattcggagttggtcaaggctacggtattgggatggttgcaagggatgatcatggctttttcctagaaggagttacaaagagctataatggtgtggttcggcctgagatagctgaagcgattaacttcagagaagctttaagttggattaaaaaccagagatggaaccaagttgtagtggagacagattgtttgatcgttgtgcaagcattgcggaattcttttgaaatgttttctttatttggtttgattattaaagagtgtaaattgttgcttacagaactaagaaatgtttcttttcattttgttaaatgttcagcaaacgtggtggctcatgcttttgctcgagcttcaagtttatatcctggatgtactttcagtatgggaaatatcccaactgaactggtatcatgtttggtagcagagattgagtttaataaagctttgaatattttttcaaaaaaaaaaacaatcaaaacctatatataaatatataaacatcattttttgttcaaccataccaagtaagaaatacacagcaagaaattttcttaaaaaacgagatctgtatatataattgtatacctgtacaaatcaaagcaaatcagtttttgatttgcttgaagagatctgaggtagatgatggtagtgatcctcatgatgtgtttgacctattaatctccagagagactataaattcgagagagagattgaggaagtgttagggttagaagaaaatattatatatttatacatagggatttttagggtgtgaaagttcatttgtgtccttggtagagttgaagaatgtacaaaaaaaaaagggcctttgagtaattttaagttgataatagaggatgttccacttcctaacttttacttttttaaaacatagaacttttttaatcaatttgggggcaaaataattttcaaaaaactgaattgaaaaaaaataaaattagaaaatattgaaatattgttttttgtttttaaacacaatttttattcttttgtctaacatgtttctctttgtattttctcacatgtacccggagtctgggtctaagttcgtggtcggggctcaaatacactagcaatgtcgagactgaattcagggttgggtctggggtttgggtttgggtacatgtcaatgattcgggtcaggtttgaaatccaagctgggtccaaggtctaagccggagtcgggcaaggtatgggtcggggccatgtacggatccaagggc

SEQ ID NO: 33710 - DNA, 1762 bp, Cannabis sativa
gtaaaataatttccaacagtgattccactctttggcttggccaagtttagaggaacttcaccagaattggtatggatggtcatgccaaagcccattttgaggagttgggaatcttgggcagcgtacacaaaaagccgatgatggaaggttgtagatgatgtgcagctatcgttgggtaggagttgatcatcaagagcttgagaaggagtgggaatcttctttgttgcagaccgtatagtgctcaagataggctgaggcttcacgaaggatctgatctggggaaaggggtataccctcatgaatccaaatgttcttacagttccagagcttccacagcaaacaaacaaagagatgataatgtccagtaataaattcaatggcagcaagatataataagtccatacagttaagtgaagagtgtgtcgtgataaaagtattaaaatcagttaatttccataccttctgggcagcagggcatttgaagagagcgtgttctagggtctcatcgtgatagtgacatcggctgaaatggggggagtatagagtctttctgttgaataggttttggctagtagggaggatatcataacagacacgccaaaggaaatgtttcaatttaggaggcaaaggaagggtccaaagatttttccaccaggcatttgaggacttttgatctgagggggaaggttcattttgatgaagttggctatgggctaggtggtaacctgaattgaccgtgtacgaaccatgaggggtgatggaccaaaaatatgtatccagagtggagatgtgatgaaggggaatagccattatagcttgtgaaatgtctgtaggaaaaagggaatggataggggcatgattccattgcttgttaggtgtgataaggtcagccactgtcatatcggcatttgaatgatacctcaaatagtgcaatttaccataaccaggaatccaagcatcattgaagatgttgatggtagtaccatcaccaattgacttcctaaggcttgattgaagaagttctttgccccaagtaatactagaccaaacaagggaaggtctatgacccttgccagagtgaaggaagctagtttgtgtgaagtatcgagctttaaggagtgtggccactagagaatgaggatattggagaagccgccaagcttgtttggccaacatcgcctgattgaaagctttcatagaacgaaacccaagaccgccatggaattttgaataacaaagaaaagaccatgttttccaatggattttcctattgttctcatttccgccccaccaaaaccgagccataagggattcaatcttagaatggaaagatgcaggaagcttaaagcaagccatggcataagaaggaatggcttgaacaactaattttaagaggacttctttaccgcctttggaaaaaaacttcgagttccatttgtttaagtgagaccaaacacgatcgttaatgtagttgaaggcatcctttttagatcttccaaatgcttgaggaagacccaagtacttatccatcgtctcacgtacggggatgccgagaagcatagcgatttcatgttggagcgcaggagtcgtatttggagaaaagtataaggccgatttagtgaagttaaccagttgtccagatgcgtggctgtagtcacaaagaatgctttggatggtagtcgcaacttcaacagaagctgagctaaaaaggaggctttcatcagcgaaaaaaagatgcgagatggttggggctcgccgagca

SEQ ID NO: 33711 - DNA, 4028 bp, Cannabis sativa
tagtattgaaaatagaagattttaaaaaaaggctcaaatggtgcaaaaatgggggagatataggctggaatatgggtggttggtgaaggtggcgagggtttggttatgtctatgcttggtgtttggtttcgtgaggaagaagaagtgaagaagacgaatctgatatagggtttctatgtaaccatataccgtaagttattaggaaataaccaacgacatatggtacacgtgtcgaatatcatgtgtaccctatgtcgtcagttatttcctaataaccgacatgattcaaatcaccctcagaaatatcttcctcccaaccgactctaaatggtataatccaattctatacctatagtttttataaaaaaaaaactgcctctagaggtcaattttttaatagcagagtattcttacacccttcagcttcccttattatgaaatatgtggaaaaaacagcctctaaagggttattttgtaatagtaaaaaaagaggtaaacatattaatagattttgaaagagaaggtaaaaattaaaggcattaagttaaaagaggtatgtagtgtaatttcttgttatttatttctatgttggcagaagccctgaaatttagtaaacatagaaatagaaatatttggacccttatttagaaaaaaaataatattttttaaaattagtaaaaaattgtgtaattttaaaggagaaatggtttttaaaaaatactgaattttgggtaaaactttttactgtcctcccccctttttttcttttatactgtaagcacaaaaaaatgaggcctccatcttccacatctacacacaaaaccaccacatgaacatcagaacatctggaaaataactattaattctggtgatattgagcaaaaataatgaaatcgacataaaataaataatcatgacaacacaactgtaaaacaaatcaaacaaaaaaaaaaatgattaaaaaaaaactaacaatctttagcatagcctcaacaccagatgcaatagcgactatatttgcaagcccagtcctagaaaatcaaaataaaaaaattactaaaacaaaactaaaacaacaaaaaaattaatataaaacaaagaagcaaatatataaccacttagaaaaatataaaagaaccacacacttcttgtttccagtgagttcactagctaaatgtatttataggagaaccagaacaatacaaaaactacaaaacaactatagagaaagaagaagaaatgtatatatagccttcatatctttcatacccacggatacaacaaccactgcaacacaagaacacccaaaaaaaacccattaattgcggcgagacggagcaagaacagtgacatcgatgtcaaataaataaattatggaaagcaactgtaaaacaacactaaaacaaatgaaaaaaaaaacaaaagaataaaaaaaatgattaaaaaaaacaaccattctgcacagcctcaagaccagatgcaatagaagcgatatttgtaagtttagttttggaaaattagaataaaaaaaccacactaactcttatctttcctaaaaacttgactaaaaactttgattactaaataaaaaaaattatgtagaggtatagaggatttttaaaatttttcctacccattgataatttactaacaaaaataagagaaaaaaaggaagagaaactgaaacaaaaatggaaaagacaaaggaaaaaagttaaaaagaatataaagaagaagaaagaaagaataatggtagtggaaaaacactactacaataaggacttttgcttcaatttttaagtgacatataaaaaatttgctttggttggggtaactgacattatagtcgtagacgcaaatagtaaatttttttgcttcggttatgagctgacgctaattatttttttgcttccgttatgaaccgaagtaaaaaaaaagattttgcatcggttcataaacgaagcaaaaaaccagggcaccaatgttatttattttttgcttcgattatgaaccgaagcaaaaaaaatgataaaaagaggcggaccaccgccactatcaccaccatattcatagtagttattacgaattcctccgccaacacaacatcataaattacaaaaaaaataccaaaatgaccacaaccctttttcgaaccaccaccatagtgccatctaaagcaccgtgcatgttttcttgcaataagaaaaaaaaaattagatctaaaactatttagaaccgagatcaccaaagagaaagaaaaagtgcgagagagagagagagcatggaagatctacaccaccggagctgaaaaccaccgaagatgagagagaaagcatttgagattgaaaaagagaaagagatgtgagaaacgtacctgggtgttgtcgatcggggtctggctgttggtaggcttggttcgacgtcgtggggtgtgactagttgctaggcttggtcaccgagatggatagagagaaagagaaagagggagatagatatggatttagggtttgtaaaaatggtatatgtggtggctaaattaagtggtaggttatatatatatatctagggtttgtgaaatgttcttggtcgatctgttggtttaattttttttacgtacgagtttttgcgtcagttttagattgacgcatagttagcgtcacttctaagcggacgcaaatagtcttacaactgacgctaattttgcgtcagtgcatatactggacgcaaaattcacgagttctttaacagtattggtttttaaattttgccaatgtcaaaactgacgcaaaatctagtttttgtagtagtaaaaatgataaaaataaagtgaaaaatgaagaagaagatgaatagggcagagagaatggtaaagtaaatgaattttttttaaaaaaaatataataaaaatacaaataaaaaacacaaaacatatataagaatggttttgatcacatgactttatcattaaaacaattaaaggtggagaaaaagtttttaaaaaagtaaaaaataatgggaaagagctgaaaagaaaaaagaaaaaagaaaaaaaatgagaaaagagaagagataatgattgacataacaaacttaaaaaataatataaccgtgttacagtaaaattaaaataaaatgcaaaatttcactgttcagtatgaaaatgagtaagaattagtagtgactatccaacacggcatgtttgaaatttcaaacttgaaaggtaatattcaacacggcatgtttaatagtggtattagcccttttctcataataaatataattaaaccatttcttttcgataaatagacagtaaaatcgatcttatattacaatgagcatgaggaacataataacattatttctgttaaaaaaatagaactgctttattatatgatctaattgactttttcatcaaaaatatggagtgatcaacggtagcttgacatgtgactccaagaaaaacaagtaaaaataaaaaacttgtaggtgattctacgatatactctcttaaaacggatggtttgatacggtacgttatagttatttaagatattttacaaaatattaagaaattcagaacaatttacaatataaaaaataatttcaaacaatctattttacacacgtataaaataaaataatcacgcgtacaacacattatttgaatgtagtttttagcgtgttaaatttttccgaatttctaaaaattttatagaatgtctcaaataactataatttagatgactatgagaaaaaatttgactaaaatattatttcggataataaaacaaataaagatatatatcccttttgaaaaagtccattataaaattttccaaaactttttattctattatctgttgacaaatattataaaataataaaaagtatagaaatgcaaagagcattgctattgggcagcagtggtgcctagcacccttaagacgtgtcgtattgcgattggctagtgatactccctaaaagttattatattaaactatatctgacccaatacttaattagaccaa

SEQ ID NO: 33712 - DNA, 1167 bp, Cannabis sativa
tgaactcctccgagtccctcacaatgtccctccagtcaaccaagtagcccttgcaacattgaccctgaagctaacacatcatctgatagtagttcactcgccaatgtccaatgcatactccttttgacaaggactaagtatggtgtaccccttggggtgaggttcgcaaaccaaccgtacccaacgacacctacagaacacgtttccactgaagccaagtccctctggacaagtccctctggaaacttcacacgccaactccatagcgcaccatcctcctgatgacaatcgaacaagacactctcatcgcaggataaaatttggtgtgtcccatctggacgaggctcgcaagccaactgcacccaaaacagcaccaagtgcactcttgcactaaatctcttcgcaaagtactcaactttggccctccggccctactgcatacccactgcttcatgcaaaaggcccctttgacccattgcatatcagctcctctgagcttctttcacgtggtcaatgatcaaacaatcactcaaaaccataaatttgccctctggctcctgcttgtatcggctcactaacactgtgtcacaagtccatctcccaaaatcaaccttgcatcctctgatgactcactaactttcgacaaacttgattacacaaagtcttgctcttaagacttgaagtcatcccaatccgctatctctcatcggtatatgttctctgaaccattcggcttacagtgtcccatacaacaccagtgtccccataaacacaaagcatgcccataatatgccgcaaactagctcagtattgatctcagcctacgcctctgcatattgtctatctgcaacttgcagcaatcatgcaagtctttgcactgaacaaaccatttgttgtagtgtttccctctggattcacacaccaaaactaaacaagtaccctgattcttcaaacatatgaattagtgggctcccccacttcaacttgggaagaactactctcttagaggaataccccttaaggtatagctcgcaagctaatcgcatactcgcatatgatccctccattccaaatgtcactttgatgaagatgttgaactaatgcctcggtcattcttcgcccctcgacatttctatgttgccttagtaccttagtcctgctgacttt

SEQ ID NO: 33713 - DNA, 1505 bp, Cannabis sativa
agattcgaattgaagaaattcgatagaacatatgactttgtgctatggagagaaacattgaaaggggtcttagtgcactagaaagtctctaaagttcttaaagatgaaaagttattagctaaaatgaaaccaaaagagaaagcagaatagaggagatggtgtattacacaatcatatgcatctgtcaaacagtgtttaaagaaaactcatctcatagaagacggcgaaaggagtctagaacaagttggaaaaattatacttaaaatcatcaatttctagcaagattaatttgccagaaaagttgtacgattttagaatgattttatttatttatttagatgataatattgatagatttaatgagattattgtagacagggaaggacccactagtattaatgtgggggctatacccctcactaacaaaaatatttccttttaaaaaattaaatgtaattttttaatttgataactatagaccaaaatagtagaaaagcccctacaaaattaaataaatctagtaagactgattataaaataagtataaatatttttaaataataaataagctcccacaaagtaaaaattttaagttcgtcactgattgtagaattggctaatataaatcacaaggttgatcaagaaagcaatgccatcattttgttgagattgctcaaaattgcatatcaagaagtaaaggctggtatcaagtatggcaaagatgtgattgcattgaaggatgttcttgtcgtactttagtcgaaggatttcgaattacaattagagaagaaatcctagaaagaagaagtgtatttggcaagaggaatatcacccaagaaaggaagttcaaatagtaagcaccttcactctcaatcaagatcgaagtcgagggagaaggaaaatcgaaagtgttacttctatggaaggtccgaatacttacaaagaattttgcaagaagtatagggagcaacaagacttcaacgaaattcacaatggagataggaaggacaagaagatacttgaatatatgtgcatgttgatctgtgggggccttacaaagtatctactccttttggtaagcaaaatttttttctatagttgatgattatagtaggtgtatttggacctatttactagcaactaaggatgagtgcctagaataatttagaatttgaaaaacttaggtagaaaactaaactgatctaaaagttatgaaccttaggacaaacaatgggttagaatttgttaacttcgagtttgacaagttgtgtcaagaatttagaatcactaggcttagaaccgtagtgaagaccctagagcaaaatggtgttgctgaaaagatgaaccgaaccttgttgaaaaaagttagatgggtagaagctctagcaactacaacctaccttataaattgaagcccaaattgagttataggcctaaaaatcccttatgaaatgtggtacaacagaaccccaaacctaacacatttaagaacttttgggtgtaca

SEQ ID NO: 33714 - DNA, 1958 bp, Cannabis sativa
  modified_base (154)..(154): a, c, t, g, unknown or other
  modified_base (850)..(864): a, c, t, g, unknown or other
  modified_base (1533)..(1535): a, c, t, g, unknown or other
gtagggaacttccgaaggcggggaagaagatggggatcctcgacttggggacccaagcagcaatgttggacttgtggaagagttagaagagatcgagatcaatccagatagcccgaatagaaagctaaagattggaaagggtttgttgctcgangtaaaatcagaactgataaaatttgtgagagctaacccagaattttttgcctggtcacatgcggatatagttggaattgatccttctatcatttcgcacgttctaaatattgatcccaacttccggccaatccaacaaaagcgaaggctactggacaaagaacgagcattaaccctgaaggaagaagtagaaaagctgcgcaacaacaattttataattgaagctttctacccagcttgggtcgcaaatcctgtattggtgcccaagccatggtattgttgcaaggggtgatgtctaaggtttctggccgtggtattagatatcactcggcctgactctatttagccagaagacatcaaagtggttcaggaatttctagttgtttttcctgatgaacttctaggtttaccccttcagcgagaaattgattttgttaatgatttggcatctggagcagaaccagtttctaaggcccttttcagaatggctccagcagaatttaaagaattgagaatttaacctgagggggaaaacagtcttttcgaagatggatctgcgatcgggctatcatcagttgagaatccgagaggaggacattctaaagatagctttccgcactaggcatgggcattatgaatttttggttgtgtcttttggactgaccaatgctcccgcagctttcatggatctgatgannnnnnnnnnnnnnnatttcctcgatatttgtgttattatatttatcgacgacatccttgtgtactctcaatcagaagaggagcatgaacaacatcttctgatggttctacaacgacttcgagaacacaagttatatgccaaattcaagaagtgcaaattttggctatctcaggtgtccttccttgggcacattgttaataaagattggatcaaggtggatccgggaaagatagaagccgtcagagattgaccgagaccaaaaatagtgacaaaagttagaagcttcttgggtctcgctggttattatcgatcagtttgtagaaggattctctaaaatttcaacacccttaactgagctcactaaaaagaatcagcgttttgtatggatggataagtgtgaaacaagttttcaggagctgaataaaaggttaatcacatctctagtgttagccataccttctgacaagttttcaggagatgcatccagacagggtctggggtgtgcactgatgcaggctgatcgggttattgtgtatgcctctcgtcagtttaaggtttatgaacaacggtacctgactgatgatttagaacttgccgcagtagtatttgctttaaggatttggtggcattacctctacggggagagatgtgaaatttatactgaccataaaagtctcaaatannnctttactcagaaagatttgaatataagacaaaggtgttggttagagttggttaaagatttcgattgtgagatcctttaccatcctgggaaagccaatgtaatggctgatgccctgagtaggaagggtcccggacaagtaactagtatggttcagatttcacctcagttagcagagcaaatggtcagatcaagcatcgagtttgttgtaggtaaacttcataacttgacactgcaatttgatctgcttgaacgtattaaagctgcttagataattgatccagaattagtaaaaatcatagatgaggttttagctggtcaagccagagactttacagtgttacatagtggatgctgttattcaagaccacggtttgtgttcctaatagtgtggaacttagaaatgaaattcttgaagaggctcat

SEQ ID NO: 33715 - DNA, 3265 bp, Cannabis sativa
taactatattttcatattattttcttatgtagttatttatatacttgacttgccgataacaatagacaacacttgtggatgtttgtaaatttaaattaagttgcaattttgataactaagcatgacgaccgggttagtttcttggtggagtttttttttacttgtcaagcaataacaattcttgttccttgaaatcatgggtaagcttaattaataagtatatatatacatattatacgtatgataatataatatatgttcaatatataatatttatttttattatttaattaattcatttctcttttatattttgtagctaatagataaaaaaccatatccaaaagctatgattgacgagatgagggaagagtgggcgacagatatgcttccacacttgcagagtcatcacattgtgggtcattaattaatttttttaaaaaatatatatattaattatgacaaatatttagctaacaatatcagttaaatatatatttttttcctctaatataatatttgttaattttgttatgtatatatatatatatttgaaaaatattgtaaattttgagatatctatgatagtttaaaatttgtattcttttttttttttttgtttattaattgagttaaaagtaattataaataatttgttggaaaaatatatattatataaaataaattatttatgatttaatataaaaataaagaaaagaaattaattttacaatatttaatttagaaaaataaaataaaaaaatcaagtttcaagtccaacttagctggactagaaaggggttcacgctttttaagtctagcacattgtgttttgtggacactagagaaatttttttttctagtccaacaattaagtttcatgttgtgggactgctttttaagtccaacaatgttggactagaaatactttttattattggactataaatgtttttctagtccaacattattggactagaaatgtttttctagtccaacaatgttagactagaaaaatactcctgttatgtcccaggctattatgtccaacataaaatggactcaaaaaatttatctagtccaactttgatagacttaaaaggggtttttgtagtagtgacatgtcagaacttgaaaaaatagacaaaagaatcaaaccttatcttcaaagaataagatacaaatattgtagtagatgccactgccccaccagaaggtacacaatgatgatatccaacatagctgaatcgataaattcaggaattcctgctacaaaaacactgcccatcagagagtcttcgaagtttggtacaaaaattagtttggacaaacggcaatgaagcacatggaacattcaccaaattttcaacagtaacagaaaaaatactcagagaaaactttattcaagcgaaaaaatatgaggtaaaacactaaacatatatatatatatacaaacagtataaattaaaaaaaaattgaatagaagtataaaataaccggttataaactaattttttctgtttaaaataacagattacaccagtcacaacaatactccaccaagtgaatgtgctagagaaagggaaattccttgtcaatttactggacaaaacatgtgaatgtaatcggttccagcaagataaaatcccatgtgctcatgcaatagctatattctcgaaacaagaattgtgagtttatgactatgtggcggactactacaaaattggctaaatgaaagaaacatatgacactacaacgaacccattacaaaatataagtgaatggacactttctgagagcttggaaatgatagtcctaccaccaaacacgaaaaagagagccgggagacctaggagaagaagaataaattcaaaaggagagccaaaggtacaaataatgtgtggacgttgcaaaaagacagggcacaatagaaaggcatgcactaatccaactctaccaccaaagcaacaagaaccaatatagccaaggcgaaagaaagcaaagacacaacaacaataagagcattattgaatacaaagatacaattacaataaaaaaaaatactatattagattttgtatgttccaaaaatgatttcaatatttttttaacatgaactatatcttcgaacaacattgcttttgaataaaaatgaaaattttcataacataaaattgccttaaaaaaattacaacaataatgaaaccagttatattcaacatgcaccaaaagaaagtaatcaaagaaaatttaaccggttatatttaaagatgtaccgacaaacataatcaataaaaaaaaaaccagttctatataatagatacaacgacaaacaagttaacaaacaaacaaaaaacatataagatcactacaaaattaaccggttaaaaaaaccattagcgtgataggatgcatgttagtagcgtgatagttgaataggtgcacgatttagtttttaaaataacctataattagttaagttattcttaaccgtgatttgataagcctagttttttattttgcaggctattatattagaatgaacgtcaggcagaatatgagaagctagggtaatttggtcaggtgcactggcgattagggagtcagtttcccacaaatagacgttgttgagatagaggcccaagaggcagagcatgcaatcggggagatgtcaaccgaccgcaggttacctaggttgggaaataggtttgtggctatgcaagatagaacccatgaacaagacaaggatatcatgcatttgaggtagacagggttggttgctgttaagaacaggatagaacaactgtacggaaggttctgtaagcagatgccactagtatttctaggaggcccagacgtcatgagagccgagtagtggctaactgttattacacagattctgaattttataggattcactagaaatgacaaagtggcttgtgtcacattccaattttaggaggataccttagtcttgtgggttagggtggctctgacttgggatgttactaccattacctcggaagagttccaagaattattcaatacaaagtattaaaacgagacagtcaaaagtgtgaagagaaaagagtttactcaactgactcaaaaagaaaatatgatcgttactgagtataaaactcagttcaataggctggcaaggttggcttcagtaattgtgccaactgacctaatgatcaaacacgacctaatgatcaccaccaatgataaattctcctaagctgatatggtgggaaaagcacta

SEQ ID NO: 33716 - DNA, 2519 bp, Cannabis sativa
  modified_base (471)..(476): a, c, t, g, unknown or other
agttaaatattaccgttaaatatcaactggatgaccactatatacacctctgtatatgtaacagtaaaatctcgaaatcgatacggtagtaatctatttagtatttaacaacaatgtctaactaaaactttaaatttgcaaagaaaactaacttaagggggttttgccacaaaaaaaaaaaaaaagataaggagattaagtatataaaaattaaaatataaaggggttttactacaaaaaaaaagaattaagtgtataagaattaaaatataaaggagtttcggtgtaaattgctcatatattgggcaagtacttacatttttcagagaatattacttatctttcatatgttgtttttaaaagagttatacaatgtatcatttaaataagaattattaaaaaatactactggtacctaacacattttttggtgtcatactgctataagtataattaagtatcgagtcttannnnnnttaagaaaataacttttagacaatatcgctaaccaattgtagagtgccacttatgaaaggtactaggcagggtcggtcctgagttgacataggtcataggcaaaaaaaaaaaaattgggcccttactataaagataaatggtaatttaaaaaatatgtatattttttaaaatatatatttttttttatttaggcccctaaatgagtgggccctaggcacagacctagcccgcctaagtctagggctggccttgctaggcacctctagtgtccaatagcaatgctccatttaagtgtcattttttaaaagcaattaagtgtgattattaatatgcaccatagatattttcaagaaaacttaaatgtctcattgctataatcaataaaaagcctaacgcaagaaattattttaatggtagtagttatgattttaaaacttaaatatatacatatattcggggcgggttcgaggcaggtatctattcccctgccccgtttccaactcggttatgaacatttaaacccatacctgcccccgcccccgaatgttaacccttgcccctgccctcgccctattaggggcgagtacccgcaggtatccaaacccacatgtataattgtcatccctatttaaatatatagaaaattaattaaaaaataattttaacttttttgttatgagaaatcaaagagttattatattccaactaatccaaacatttacaaactatcaagaccttataaactcaaggcatggcaagaactatacatttgtaagtccaaaaaagtataatttataacttctcaaaccactttctatatcttgcttgctaatgttctttaacaaacaatactgatctatttttaacaatttcaacaatctaattatatcaatacaaacaactttcagacatcatttctagcttacaaatatatgataaccaaaatatcaatgcaattagaaaaataatgattcttgaacttactcatctttcctccagcaattcacgtactgagttgttgaagagaatcaactgagacattctacttgagctatttctttacttccatcaagcatttcttgctaataacacattccaaaaataaatgagtaattgttttcttcccgattccatatagtaagcacgagcaatcctgcaccatattatggtgatacaacctatcctgaatattcaattaattttgaatagctaataaaaccatgtttggagagattaaatctaccccaaatctccttaatcaagtgtagtttatccgcttctggacagatgcgcttatacccctaatttatcttgtatttttctgttgagaattgctgctcatcaaccagatttttaggctcgtccttcactgtaacaacctttttccagtagcaactacattgagaaggagcagtgtagtcccatcaattttgctcttttatgtatacattattgatctatttgacccaaggtcatccttctttgttgagatttcctagacatatttaccaattgccgctttgttctaagtgaggatattttaaaagacaaggcctccaacctttttaagcttagaaatttgatcccaagcaatcattgccggacttgtactgtatgctttcccttgccacaagaacactcagcaggtgacattaatctcattcagaattttttttgggatcaaaaatatatttgactccaatatgagtgaatggagataagaaccaatttatgagtgtgattcttctagcaaacgatagatttctggtactccaccttcttattctcccaatcatctttctattaagacttcacattcttttgtagatatctttttagcacaaattgggactcttagatttctgaatgggagggtgcttcgttgaaacccaaaagcatctagtagatgatacaccttattttcatttagatcatcataataaatggcagattttacttcacttaattagatataagcctgaggtttttgaaaaaaaaattgagcccttgtaacatgtaataaacttatttgaagtcaccat

SEQ ID NO: 33717 - DNA, 8920 bp, Cannabis sativa
  modified_base (5347)..(5351): a, c, t, g, unknown or other
gaagacagggggttaaatctttgagttggagccccattttttcatatggtgttttgaacaagatatttgtagaggctccattatctatcttagttcgggtcaccattttgttggatatttgtacttacatgaccaacggatcgttgtgagggaaatttactttgacagcatcctctacgttaaacgttatggtgggttcccctgcccgtggacttttagcgtcttttctttaacggccaggaccacttctttttgttcgggctgtagtgttcgagcatacctttcccgggctttgcctgaatctccagctatgtgtgggcctccaataatgacttgtaaatgcccatctactagtggtggcactaaatcttgattactgtctctttggcggctatctgatcttgattggtcttgacatatttttgcacgtgcaggttattctttcttattaaaaattcaatttctcgcttcaaattgttacattcgtttgtgccatggccataatctccatgaaaacggcaaaacttggacatgtccctcttacttatgtcctttttcatgggaacaggttttttgtacggagctactgactgagtagccatgtagatagtctccaaattgtcagtcaagacaaacaaagcagtgaatttgaaaggattttctctaggggcctattcggctttgccaatgaactttcccttttcccattgccttgcatgttgttgttgttagaccttttaccgccagagcttgaattgcttgcatactaagggtgctgaacagatgttccagcagagggagcttgtgattggttcggtttaagctcgacttctgctcgctgaatggcctcttcaagcttgatgaaaccatctgcacgatcgaggaagtcactcatagaatctactagtctttctctcttgatgtctttccaaagctctctaagaacttcgatgcccccaagtatcgcagttaatttcccttcttcggttaaccatgcaacttttgttgcccccgtcatgaatctgctgatataagctcagagaggttctcctagcctttgcttcactttgaccaggtcctctaaatccaatgggagttggcgagaagaagagaattgtgcatggaattttgaggagaaagccttctaatagttgaacctccccggtgtcaacttaaaatactattgttgggcggcttctgagagtgtgacaggaaaaactctacaacatacatctccttgtactctttgtaggtccatttgcatttcaaaatatttaagatgtgataagggatcttccttccaagtatacatcttccaggtcggcatcttgaacttgtggggcaactctagaacattgatctctagagaaaaaggggacccacgtgctcggtccaactcgaagtcattgttcttccgaccgaccagaccttggagcatgttttttagttcatccaactgtgcttacacagatggattaacttgttcagtctcttggccgacgagagtcacgtcaggatccctttgagatggattttgagcatgggcctcaggctgagtggctggtgagacatactgttcgtctaaccctttccttctattcagatcacccctgagatcatgagttgttcccagtctattaaatacagatgcattaggttgtcttagtgactgatgggtttggccgatcaatttctccaaaaccgttaacctgggtggagttattaggtataacctctcctgacgaattacaagacaaggtctggccgcctaccgcttggcccataggcgaaacttgtaaccggggattgggcacctgaccgttcagagtcctagaagtgttcccagctagatctttgtctggctcgcccagcgggatgctagtcacaggttgctaattagtagcttgataggctctttgtattaggacggtggcctgttttgttcagtcgttaatggctgcttactgagccctcaacgaacagatgccttggctcttcaaatgcaaggttcacagcggcatgaagctcttcctgatcatgatgcagggtattagtatggccttgcatgagtccaagagcatcatggaggttatggatctcggtgacgtctccaacggttgttcaaacatttgttgctggcagaactccagtactgggaatacccagattggctgctgaactagtatttctagtctcttgaacactgggtgcgattccattcaaaggagatgtcataccatgacctacgtttggtggttgcatcattggttgttcaggatttgtcgctggtggaacccttgcatttcccggattctgcagtgcgagatccactgccggtggatttactagattgaccacgcctctacgagtttgtaccaccatcgtgtttattattaaatttgaagtaaacgagcgagtttatgattctggctctcaatgaaagcaccaaaatattggcctcgcttttagccaacgataatgagtgttaactgtaagcgataagtgatataatttagatataatatgaaaagataaataaagaacacagagtttttaaagaagtttgtccccgagcagttcagtaatagcctactccccttgatttgtattgacttaagaacaaaaaatacagtgattcttctcttagagctcttacaatgaaatctctaagtatactcttagataatttttcgaccctttgcctactgagaatagatcactatttatagggctatgtgcttgagggaaggtttcacatttgtttacaatgtctaatattggtacgattacatattacgtacatagagtacactgattgatggatttggaaggcttgccatatctctgtgatacgatcccagatttataaggattgcttttgtgcttcacgatgcaaatgctgaagttgctaagtgttgatacgctattcaaattgtccactgctcggctatgaggacttagtccgtgcaagtatatgtggtgttctgctaggggtgataccaacatgtgatgccacgtcagagtgtgaaaattgggataacattagagatttaacagaaaaatataaataataagaaaagatccaaagtcttttctcttcttctttctctctctaattttccaaaggaatatgagaatataattaggattcaaatccaattaatcctaatgccacaacaaatacaagaaatttcaagttttcaaagaaaaagataaaagataagtgaaaaaatgataactttttcctctttttctttgttacttaattttcgaaaattcccaaggacaaagcaagagagttcaaagtcctaattattttttgaatgcttgaagaacaaaaacaattttcgaagacggtcaatatttatgtccatcttgtggtttcaagagaaacgggctcggttcacatcatcaagtcaactccacacaagtatgaagttgacttggggggaaaatgtttaataagtggcaggagagatgacatggacattaatgcttaataagtggcaggagagatgacatcacagatttgaatagacttaagtgatagcagtcgacctgggaagggtccctagcccttcaccgaagttgactttgggagctcaagtgtggaagttcagagtttaataacatgaatctaacccaatatatttcaacattatgtaccatgaggacagggagcaatcaaatccagaccctaagagctgaaattacacgaacctgcagcccgaaagccaacctgggcacctggggtttcacccagcgccaaggttgacatttccaactagggtttttgttttcaggaccatcttagtgcaaatgggtcaaaatttccatcaaaacataaacagtacataacatagacatatttgagtcatcagaattagattcaaagaaagtttatttttgagaacccagagcaccaagagcccagtcacccaagatgacaatttgtcaaccttggcaccttccaaggattagatcgatgatttgacttttgaatcttcttcttcttcatcaaaaatgggaaaataggtactttcagggaagaaacaacacttcctgggtgccagaagctaggcatactgcccaggtttacacttagggctgggccagcattaagaataaaattttatcaacctgcgccaaatttgatgatgttttctaagagctcttcctagaatcttttctgttttcaacaaagattaagattgaaatatttttggggtaaaacggaatttttgaaatgccataaaggggacacaacgccctagttgtcatattgtcaacttgggctgtttccaatcaagttctcgaaaaagtgttctaggcattttttctatcataaaaaataatgaagattaaagccaacatggggagaaaactacaatctcgagaccctagaaatagggcccagtgcctaggtttacctggtgttgggctcaatttcatggttgatagtcaacctagtgcgctggttttgatcactaaaatgccaaatctgatttgaccatggaatacaaaatggtccaaaatggggttgaagaccttgtcctcaagtttaaaaacctttgaagtatcaaaacgacaactagagagctcaaaaatgaagtacctagtcctcaagttaacaaatgacctggtgcgctggattttgcttatctaattctaattcttttttaccgtctatctagtttttcacaatgactatgatccttgaagtcatagaaataaaattcacaacatcgcatttctcatttccaacatgggaactcactctgaaatgaagagtttcgagtctctcatttcctcaaaacaacaacatttctaagaattggtgaccagctttgccagagcacaaaaatagactaagtgatgtcaaaatattacttaggcatcacaaagtacatcccttaagacgtttcttcacttacctagcatctcgattgacgtcatatgtcaacatgggtggtgggaggtcaacctaggcgctagatgtcaacttgggcactgggtcatgaaaaaccttcagtaaaatgaccttaactcactcaatattgatctaactgatcaacttgatttttgaagttatttcaatgtttatcaagtcatttgtgacacttcaatcgcaatatttaggttatcgacctcaaattacacccccaagagggataaaaataagctccaaattacctacagtgggtcctgccaggctctaaaaatgactatctacctcagaagttaattttgactttttatggtcaagattagccaatttagattttttcatactttgaattattttttcctatgtctgtggggctccttcacctataaaaggagagcnnnnntagttcatttttcacattcaaaaagctacctcaaggttagaacttctctctttagtttctctctctagaaactagagcttgaaacacttagcctatttctataattactgtctcgtgagaaataaaaactcaaagtagacgtaactccattactgtcgcaatagagggagtgaactactataaatttgttgtgtctctcttataagtacataacaaatatttcattatcgcatatctagcgagcgtgtatgtcttaggaatcccagtcaagatttctgagtcaacatacataaaggtggtgatttgtgtgactccagatcaatggctaggattacgtccaagaaaacacaagataaatccgacggtcgaggaaaacttttagttatgcatttaatgcaatgcttggaaacaagatatcaacatgattatattcttctcaagatgcgtgctgacgcaatcaacaattatttcaccaagacctgttgcacacaccacattaataaaagaaatatccaagagccaaagacacaatgcaatgtttttcttcatttaaaaaaaatgttgtcaaccacaaacaattttgattggaatttaaaaaggtttgacctagcctccacttttcctcatatcattcgagaggaagggtgcaactttgcataacccctagagtttcggaaggttagagataaatattattcgtgtttctagatgaggacacttggaattctcaaagcaagttacaactcagtcacttcatgcccaatagaacgcccaaccaagataatgggctagatccactagcgaagtcagctcttccagctgacggatggacaactcgtccatgttagatactcctccagcatagcgagaatctagaagagatcatttagagcgtccagagaagtagtcagcaaatttttagaatctcattgctaaattgctcaggcaaaatctagggttcaaatacttgtgtaaattataaggcttttctagtcttatcgtaataatattgactcgtggactaagacttgttaactctctaaccacgtaaaaaatttagtattattttttttattaatcatcagttagtcgagttaacaagattgatgcaatttttattccatcaaattaaggtgaatatactagagatcatcatcccaatagagtcgatgagagattttgggttgaaaatgttggtgcttatgttcttcaatggggtggtgtgcatcaatggtgatgtttccttcaaaaggtgaggttcgaagttttcgactattgtctttaaattttatttttctccttacattttcatatcatgtattgtatccaaagtgttcgttgtcaaatttgaagaacaatcaattttataaatctttcattcatcatccatctatttaattttatttcaaacctaatactcatttaattttatgcttctctcacattagctatgctgttatatctgcacaagaatcaacatattggaaaccactgactacaaatgataactatcttgtggttccatatctgatgaaatttttgagaaattaaatttacaatacatttgtaacatattatgggaagtttaaagtaattgtccccataaaccagagctctctatttcatgtttttactcattagctgactaaatattaaacaacccatttaaaaagggcagtgaatgatattaatatagcaattgtttttttttttttttcctttttatcctttctttaaactttatgtacgtagtactcttttttcctttacttttaagaaaatcatacaatgatttctttcaatttttaatgacttttaattatcaaaattacacactatgtttttttatcaatcatcaaaactttaaaaattattttagttttaatttcattacttcactattattacttttaatatattttactacaattttacgtttaatttttatttcatcaaactttatacattattttacttaatttttttcaatcacaattatattttcttctcttatcactctacattaaataatttttatttttaatttaaataaaatatttataaattaaaatataaaacttaatatacaatgaagcatacgtaataagaaaagtgcacttttacagataatgaaaaactcaactcaattatgctgaggtactgtgttttctttaaatagcaaaaggtgaagcaatacaattacaatgatggacacttgtcactggcacacacgccacaggaccacaagcaaaggaaaactaattacaaaatttgtacatatacactagggatcacattaagctaaggcagactttaaccaacacattacaaagataatttagtgaaggattagtaagcagcaaggttcttaacaccacccctcaagcgagaggaagattctttcactctaagcttgtcattgagaagttggaaccttgagtgtgaaagacccttggttaaacaatcttcaattttgtcagaggaaggaacatatgtgatgtcaagcttcttttgtaggactctatcttttatgaaatgcaaatccaattatatatgctttgttcgagcatgatagacaggactggatgctcgtgcactagcagtttagttgtcacaccatactacagatgttgaagctggaggggacttgatttcactcaatagtgactatccacattatgtctacagtcacatgagctaaagctctatactctgattttgtacttgaccttgacactaaagattgtttctttgatgaccatgagacaagagtgtctccaaagtaaacacagtaaccacctattgcttttctattatcaagaaaacacccctagtctgcatctgaattacaaactagattcaaactgtcaatttattgaatatgaatgtcgtgaatttgtgtccctttcaagtattttagaattctcttggttgcactgtagtgattttttgtcagacacttttgaaattaacttaatttattcactacataagtaatgtcttgtctgatgtggaaaagatattgtaaagcacgaatcaagctcatttattaagttgaattttcaagtttttttccttctagtaatgatagggatttttctccaaccgtaggtgaaggatagggtttgagattcttcatgttgaacttgcttagtagctctgcaacatatttttgttgtgatagttcagagctcctagatctttgagtgagaaggcttgattgagctttgtgatgaatttctaaagttctgcattgtcgtttcctctaatgataatatcatctacatatacaagagccatgatgataacttgaggtgtcctgtatatgaagtggtgtatcagctttggagtgctagaaatcccacttcaccactgttgttttgagcttgtcaaaccaagcttgaggtgcttattacaggtgatagagagttttctctaatttgcacacatattctgatctgttaggatataaataatcctaagactaagtccttgtttcatcagtgttttggatttactctgatgtgataatcagcgatgatgtgtacttactcttggagtaagtgtta

SEQ ID NO: 33718 - DNA, 2883 bp, Cannabis sativa
  modified_base (57)..(57): a, c, t, g, unknown or other
ggactgaaaccggggtcgggtcttgggtcccaatcccactcctgggtcccgattttngttctaatttcaagtttggttccccaatctaggtctgggacttggttccaagtttgagtctctaatcttggtccaggttgtgcgtctaggtttgggtccaagtccgtgtctagattcaggttcgtgtcctgagtcccgatctgagttttaattcggctccgtgtcccggtccgggtctcggtcttagtcctagtcagattctagttccgggaatgagattgggtcccagtcccttggtcttgttcccgggtcccggtatgcttatagttccgcatcctgtttcgggtcacggggtacgggtttaggtccgagtccgggtctgggttcaggtttaggtctgagtctgtgtctgggtccgggtttaggtccgagtctgggtctaggttttaccctgggtatgggtcccagatccaaacatcgactatgggttaggtttaagccccgggtctaaatcaggatcccgatctcaagtcccagtctagttccacttcgggtcctaggtcttggtcctagtccgggtttaggatctgggtccggggtcaggtcctgggtctcggtgctagtttctgaagcccgggtcccggatccaggtccccatcctggtccagttccttggtcccagtccgagtctaggacccggatggggtacaagtcctagtccgagttcgggttcgagtttccgatcccggtctgggttcaggtctgggttcgagtctcgggttctgatccgggtctatgttctgaggcccgggtcaaggtcccccatcaagctccgggtcctaggtcctagtccgggtccatgtttgggtttaggtcctagtcccagtcccgatttcgattccgtgtccgggttcgggtttgggtctgggtctccgtctaggtcggggtttgagtcctagttcgagtctagggttgggtcttggtccaagtccagatgcctatctggatctgggtttgagtccaggtggtccaagtcttgggtacgggtccaggtttgggtctagatctcggtccgaatcccactcccaagtttcgatcccagtgggtatgggtctgggtctgggttcaagtctaggttcgtatccagatccatgtctaggtccgtgtttgggtctgggatcgggtcccaggttcaagtctgacctaatctcggacccgaaactggaatcagaccaggtctgggactagaacccagatattggaccgtaacagggccaaaacctaaacccaaactcagaccaaaacccataccgggacttggaccgagatcgcgacttgtgacctgggacctaagccaagactgggacctagatacagatcaaaacctagacccaaaaactagggccgaacccaggagccaagaacttgactaacacctagtacccgaaactcggaccagactgggactgggacccaaactcggacccgaacccaaaccaagatttggactcggactggacccgtacccaaacccgaaaacgaacttggacccagactgggacctaggaaccgaacatagatgggggacccaaacctgggaatcaggcccccaaaactaggaccagaacttgggcctcagaacttggatagggatctgagacccgaccccagaaccaaacctagacctaggaccaacctcgagacttgggatttcgaactcgatgcttttacccgaccagtagtcggtgtctagatctaggacttagaccagaacccgaacccaaactcgaactcaaacaaggacccggacacataccaagacccagaccaacactcaggaaccaaaacaagatcttgaactgggactggaccgagacttggacctagacccaaacccggaattggacccaccttcggatcctaaccgagaccaaaacccgaacctcaaccacgccccagacctaaatcaagacccaaacccagactcggaccaaaactcaaccccaacccgtacgccgtgacttgaaactggaacaaaaactagaatcggatggaaacccaagaacatgaccaggactaagacctggacccagacccaaaactgtaaccggaccaggacccgaactcagacacaaacccaccctaggattgggtccaaaacctgaatccaaacccaaaccgggacttgagacccgatcccagatctgaactcagacccaaacgttgaacatgactcgggacctagaactgggatcgtgacccagaactggaccctagtcttggtcctagatcaaaacccaaacccaaaccaggacctaggacatgaatcgaaacctgactcggacccatggttgggatccagatcttgtcccaaaatcaaagaaccggggcttggacaagacccatagtagatgtcttgatttgggactcggacaaggacccgaagctggactagggcctggacccatacccagacctgggattcaaaaccgaaacttgaaccagaacgtgaccaggaccctagaacaggaccgggaccgtgacaaggacctggacctagactgggacccgaaactcgaccaaaacccagccctagaactcgggctcgaacccagtcccgaatccggtcctggacccagactaggactgagactcgaacttgaaccccaacccgaactcagaactcaatcctaaactcagaccaagcccctaacctaaactaggattcgaacctggacaaggacacgaacccagacccgaataccgacctagaacaaaacgagaatcgaaacatgggacctggacccagactcagacctagacccagactaggttcaaaaacacccgtaccaagactcggactaagactcgaaccccgaccccaac

SEQ ID NO: 33719 - DNA, 1264 bp, Cannabis sativa
aaacatgcataaatgaatgaaaaaatacttttgtttctttattgatgttgaataaagtagattacattgaaatggagttttatttaggacataaaacccaattaactaataatcttatacctcacaaactatgtggatccgcccctatgtatatacatttacttatataccgtcttcctaaactattcagattgttagatttaaggattttttttctaatgtcattcaatttcgctaatatgtagttgtccatatactaaatcgtgccccaaactttgatatttacaaaatcatgcccgctgaactttaacatgtatagaattgtgcccactaaatttccatccacgttagactttctttaataaaattggacaatagtccttaaatccaacaatctcaatagttcaaaggaatttttttacgacctgaaaagttcaggggcataatttggaacatgtcaaagttcagaggcaaaaatccaaattagccttaaagaaattataagtcaatgttttttatttatttatttattattaatttgtttttttatcaaaactactagaaaatataaaaccaaaattatatattaatttattttaagagatgtagatgaaaaatttgagtatttattttaagtattcaaagtctattaatataattattttgtgatgagtaatgatatgactgtgtaaattattatttaaaaattacataaaaatgattgaaactaaaaaaaatacgtagtggttagtttattaattgtaaaaaataaaaaataaaggtaaaaagtggaggatgaatttgagtttgtataagaaaatagattagttttagaaaaaatatattattctgagtaaagcatgttggaaactgtaatttcgaacacgactcaaagatactggacttaattgagccgactctatcttacaaaaagttggcacgagacactatagtacaacatgacccatagttttaagaattttttgaaatacaagtcaacgtaaattgacaaaacacgtatctacaatactagttgtctcgtaatttttacgctatttaggatttttgtccattaaattatgacatatgcatcattttgattgattaaaaaaattaaaaaagaaatcaaaatcttaaaacaaattaagggatttaaaaaattaattattttttattaaaaaatttatttagatataaaataagtatattaaaattttaattttcccaaaaaactatatttgtttaaataaacataatatttttt

SEQ ID NO: 33720 - DNA, 2970 bp, Cannabis sativa
  modified_base (595)..(599): a, c, t, g, unknown or other
agagagagagagagagaggtgatcgagacttacaggtgttctactacagtggttctcggtgactacacctgggtcggtggttctcaacaacagcgctggcttgatggtcctcaacaacggcgacagctcagtggtcctcgacaatgttgagtgctcctaggtatttgcatccattcgagagtgagaagaaggataatcgataaaatgaaagaagaaacaaaggaaaagaaattataggaaaaaaaagaaaagaaaaaaaaaagagtaggaaaaaaaaatacttccttcggatttttttattttaattttcttacaattaattatttccgtaattaataaaattgtgctacgtgtacactatgttcatgtggacaatctaatatagtatttaacagtcaaatttagatgaaaactctaaattactaacagtgtagcagttttaggagttttatcgccaaaatttaaattttgaaaattaagtactagaaaagtaaaactattaaatattttaccacaattaacttattataaaaaaaattacaaaataaatatcacagaaacacaaaaataagttatttatttattattattattnnnnntattattattattattattgtgaaaatacatgttatatgatatatctattaagactgtacataaatttttgtaaaccgttcaacctgaataaattgctcaaattaaatcgagataacccgacgaaaaatacaaactgaaaaactcaattaaaagataacctgctcaatctatattagacggggcgcaaataatatcaacccgcccaattaacctgaactaatccgaccaacctgattaaaatagttttttttttttatatatatatttatatattttttataatatatatttatatatcatataatttatatgattatttaaaaaaacataaaattgaaactagtatattttttttatggtagttaattttaattttaaattcaatttatatatatttatcttattaatacaattaattaaaaatatagcaattgaatgtaaaaataaaaaaaattataataaatattagtggtcggtttagacgagttaattcaactaaactgaccaattttattagacgagacattattttttttttcttaattggataaattgcacttagatttttataactcgataattgaataaaatttaacataaaccgaccaaaatacactcttattatatatatatatatgggcatgctcttaatgggtattacctatatatgtgtattttattattgaccattagattaaatctaataattgatgtttatgattattaagttaattttaaaaattaatatttctttattttaacctattatttcttgatggcatggaaattacttttttttttttttttttgattctttctattccttcttcattcctaaaataaataaaattattaaagggaaaaaatattttgtgtatgaaagttttatcaaagaagaaatgagattcactaagaaattatttattactatttattactcaaaaatactcaaaaaaaaaaaacaaaaaaaaaatctcaaataaaaaaaattcaatttcactcgaaaaattcatatatcatcttaatcaatgttataatcaaattattatagatgaaatccttacaaaaaaaaattataaaagaaatctcactgagcagccatataacatataaatttttttttttctttttgagatgaatatagcatataatttgattatgctaattttagagaaatgtcatgaatgaaaatcaaagttaatacctttctcttcaactatatataaactaattacatatttttttccgtgtcatttcttttttttttaggatttattaaatcgtgaaagatgataatgaatattatttaattaatgtttattattagtgttataaagataaattagtaattgtaataaaataggctagtttctaaaaataacttctaattctttaataatattgggtagaattattgtttccatttaaaaaataatataattttaaaaaatattattagttacctactatagcaaattattagattctgattaagaagtgttttatatatatatgagcattgctattgggtaccggtgcctagcacccttaacacatgtcgacttacgattggatagcaatactctctaaaagctattttattaaactatatgggacccgatacttaattagaccaatagcgatattgacacgtaggagggtgtttgacaccactggctctctatatatatatattggttggttgactactataagtaaaaattataggaaaaatgctaaaagacaccagtagtgtctagcaccttcctatatgtcaatatcgctattggtctaattaagtatggggtcctatataatttaatataatagcttttaaggagtatcgctagtcaatcgcaacgcgacatgtcgcaaaggtgttagacaccactgttgccttatagcaatgctcaaattatagggtatggattttaaaggcccaccaatagcatcatctctaattgagcacctcgaatctcgcaccctaagagagaggggcccaccactactaccttcccagcattgaatgggaaaacgtgtccattaataaggggtggggatgattagatgcgtcaacaattgggcctcttctacagtccctgtcctacttgctcccccatcaaagtcttttgggttaccttaccatttatgatcagcaagtagaatttcacatttattttatattactgcaatgcttaattcgatacaactatactatttaaacgcataataatatagtataatagcaaaaggttcacaaatcacaataaaaggatcatacatattttttgcgtttaaataaaatgtgttcacattagtactgatactaattccgaaatgacataattgtaaatggcaaggttttttttt

SEQ ID NO: 33721 - DNA, 2088 bp, Cannabis sativa
  modified_base (1077)..(1077): a, c, t, g, unknown or other
caaatttactcatcattccattacgtcctgggaacatttgtccaaggacttcaaaaaacagttccaggccgcaagggataggcgacccgaggcgtccttgctaaccaacataaagcaacatccaggcaagacagttaaggcatatttaagtcgttttaacacgctgctgcaagagtaagaaatctggatgatagtacacgacttactgcccttcaagcggggatcactattgatctatccaccgctggggcaaattgtgagacgacttacagggtcgtctagtgaagaacatcactgagtccaatgagagggctcaggtgttcgtctgaaaagaagaagctcgaaaaagaaatgaacttgttaaaaactggctcgagaagcaaacccaccaatgtttcaacaagtactgtctcaactagagttgataactcaggggcctctggctaaaagtgaaaagacgattctaaggggtcatcaaaggacaaaaagaaacaacagaagcatgataagtacgtgccagtttatactatttatacggaacttaataaaacttgggaaaatatttacctcgcacgtgagcataaggttgccttcagcaaacctgagcacatgaggcacgcaaggcataaaagagatccgaccaggtactgcaagtaccataaagacattgggcacacaacagacgagtgtcgtcagctaaaagatgagatagaaagcctcatcgcgcggggccacttcatgcaatatgtgaaaagacagggcaatagacataaccagcccaattttcccaacaattcgaacaaccagggattacaacctcctcctgttgaaggagaggacatcctggttatttcggaagggccgcatattgcatgagagagcaataattcccaaaagaggtatctgaaggaaataaaaaataagcagtcggagtcggtatttgctcaagaaccttccaagaaggtaaagctgaagaacctctaatcgtatttttgggggaagatgagaagaacgtgagatatcctcaagtcaatccattggtgattactatctagctcgccaataaaaggataaagngggtgttgatagataacgggagttcaatgaatatccttttcagggaaacactgaaaaagatggggctcgaaaaggccaaattgaggccttgcatggtaaatttatgcgacttcactggtgacagtatcgccaatcaaggtataatcgagctcgcattgaccaagggtgaggcacccctatctatcacaattatgcaagactttttggttgtcgacctgccatcggcttacaatatattattgggtcgtctagcattgatcagactaggggcagttagtttgatcaagcatcgatccctgaagtttcaaatactagaaggtgtgggagtggtgcgaggcaaccagatgctagctcgcgattgttatcgcatagagctacaacacagaaaagtcggtcaccagttaatgatagtcttcgcggaggaaagcgaaaagaaggatgaagatcttgatccttagattcaagataaaagaaacttactaaaaccaattgaagaattggatgaagttgttcttgacctaggaaatcccacaaagtgtgtttacattgggaagaacctggacgagcagttgaaatagtagctaataagtttcttaagggcgaatcaggttagtttgcctggaaccatggaggtatgatagggattgaccctaatattatctgccattatttaaatttcgatccaaactacccagcaaaatggtagaggaggagacccttgaattctgagaggcacggggccctcaaacaggaagtggataagttattggccaatgaatttatgcgcgaggtgttctatccctcgtggatagccaatcctgttcttatcctaaaacctaatggaacttagagaatttgtattgacttctctgatctgaataaggtgtacccaaaggattgttttaaactacccaagtttgactagttggtggacgcaactgctgggcacgagcttatgtcatacatagatgcatattctagatacagccagataaaaatgtatgtcctgga

SEQ ID NO: 33722 - DNA, 2149 bp, Cannabis sativa
ggggttttggggatttctaccaccccgaccacctccggtctcaaccatttttccctatcctatgatgtttcactgggcgtccattatataggacttaggctgcgaacccacaaggcatgtaggttagacaatggtcaaagtattttcaagacctcatttacggtttaaacaaaaatctacccatatatgcaataaatcttatatagtttgcaaaaagtaaagcttatggaactgtgagttgagctcaacactggctttgactgtacatatcttgacgatcaccagtgaacaacctggtggctctgataccaaactgtaccgcctgtatttaaaaacttgttaaactaaaattaatcttattatattataattatataaccttatagttcgggatcctgagttttaaaatacaattgaaaatttcatgtactaatacaaagtctcgtaatatatttattttacaaacaacaagcaaccataaaatacaacttaaaatgttgaaagacagaaaccctccaggctgcacttttgcgatatgtataatcattaagctcaaccatcctctagcttagcttttcccttacctacagaaggtagcaagctgatgagtcaagagactcagtaagatatgcatggcatatatataagcaatgctatatcgactttatgcttaagtcgtcctgagctaaacagccgagctcaccaaatggttaagaacgttctcaacggaagcacgaccactgtaccatatgcactaaagtaccaactccatactcctgttggtagggcctttatcgtactcctaggagttactaagtgttgtaccacaagcacgacataccctctgatactcgtgttggtaacactgtaactatcctaaaattctacattgtactaggacccttaaaataacttttccattagtgttagtagtgtaaacaattaataacaagcatacattcacatatatattatctatgctattttaccttgtttttgcgctcaggtgtgccgatcagcctgagtagaactgcagctcgacgctttatagggcccttggatcaaagattttcaattcctaccaacaatccttgaaacaaatcaagcagcccccaaacactagctgctcccttgagaattcgagagaaagagagagaaaaaggagagagaaagatcaatgtaaatttcctaacttttcaaataatataacttgattttttttctagaattatctaacctctatattaattaaaaccctcagatttcttaagtccaataaagacaaaagtcttccttagcaaattacccaaattgcccatagccaaaattccatgattaaataacaaccaaaggttttttagtaatttacaaacaatttcccgactctctaatgccttcgaatgatacctcagtattaataaaattctataacatacaaaacgcaactctctaatggcccaacgtcgccttctatcacttccgaacacagtcataggtaaacaagaaattcacatataacataattaacatatattgaaattaaataaatcttcaccaatatgcaatattataattaataattcaatttcataattaaaccctaattattgaataactcagcatatctccgcatatatcaattccttacccttgcccaagtttaagatgctggtatggaagatgtatactagacaagaagacccgctggcccacatcaattgcctcaagatgaaacttgttagccaaaatattattcgtgatgtgcggtgtcaaatctttccggtaaccctgtcagagatagctcaataatggtactttgagctagctccaacaagattcaattcttggaatgaattttttcgagaaaattctacatagttctcattttcgatgatgataccattatagctggaagaccttattgaggttaaacaacgacaagaagatcctttaaaggattacatccaaaggttcatggccaaggtcaccaaggccaaaggcctaatcgaagaaggccaatatacaaccatactaggcggcatccttccattttgtgacttttggaaagatatctaaaggatctacaccaacaacatgaaggagttccttgacagactttatggctttatcaagctggaggaagctgtct

SEQ ID NO: 33723 - DNA, 1035 bp, Cannabis sativa
taacaaaatcttccatccctttgactctctttcttcagccttcttcagctcttcccaagctgctccatatcgaacctccattctttgttaaggtgagcatgaccccttatggtgatatctcgaagtcgatctagtcctttcgcatattatgatcaatcctccatgctttgttgcaccctcttccttttccagcctaatcttctcgtcgtactactttttttctactagtcctttcccgtacaaacagttaacaaaatcttccatccctttgagtctctttcttcagccgtactactttctacttcagctcttcccaagctgctccatatcgatcctccattctttgtaaaggtgagcatgacaccttatggtgatatctcgtagtcgatctattcctttcgcatattatgatcaatcctccatgctttgttaaggtgagcatgaacacctttatactgtgttctacaactatcaacaccatatttatatccaaaattagtgggcttaaggatagattacttccactggccagcatactagttcttagagaaaccttccatgtccattccgacaatgaaagtccctatcgttaggagaaaataattttagctaaaataaatttatttggaaaaaatagagtttggagaaaccaatggggttaaggatagattacttccactggctagcatactagttgttaaccttccatgtccattccgacaatgaaagcccctatcgttaggagaaaatgattttagctaaaataagtttatttggaaaaaatagagttcggagaaaagattttactgaaacgaataaaaatgattatttcaaaaaaaaaaactttggctaaaggaatgaaatttttttttggaaaaaatagagttaaaagaaaatgatttcagtaaaggaataaaagattttttttgaaaaaaaaaaaataaagaattcaggcaaaggaataatatatttatttagaaacgaaaaatgtaatcagtcctagtcgaaaaactctaagaaagccaaataaaaact

SEQ ID NO: 33724 - DNA, 1418 bp, Cannabis sativa
tcatgatttagaattggccgcagttgtttttgcactgaaaattttgtttttttttaatgatacggcgaccaccgagatctacactctttccctacacttttttttttttttttcaaactaagagtttttccaagttgattttggtggtaactttagttttacttttgcatgcagtcttttctttacatattaagttattcttcgctctctgatgattttatcatagttttgtagcataatttctccaaattaaataggctcatgagtccctgttaaaaatgtcttaatttttccaattttattttatgcagaatttggcataataaatcttcattctttatatttttaaatttggtttttggaatgagttttggttcatttgtttttgttttcctgaagaatagctccaagttaagatgacacgtatattagttgttatgaaaagaattattaccaaacagatccttaaccctgtatctgccataggaaaaaatctcaactttcttccaatttcttgaccattctacttcttgaacaacaattcatcatattggtcttggtgggtcgtagccaaatgtaatatttgttttgggttttatatcaacaaagttaaaatatgtttcctttgttagagtttgtatcagtaaaaatggtgacaagaagagtggacctccggtctgacacagtgaccaaaccaaccgaaacaatgagagctgccatggctgcggctgaagtagacgacgacgttttgggaaatgacccaactgcgtttcgattagaatcagaaatggcaaagataatggagaaagaagctgcactttttgtcccatcagggactatgggaaacctcattagtgttcttgttcattgtgacataaggggaagtgaagtcattcttggacacaattcccatattcatatttatgagaatggtggcatttcaaccattggaggtgttcatccaagaacagtcaagaacaatgctgatggaactatggatattgattcaatcgaggcctccattagagaccccaaaggagagcttgtctacccaactacaagacttatctgcttggaaaatacacatggaaagtgaggacctttttgttttttattttgtctttcatctcaactcttagtaatacagctttttctcataaaatatattataatacattattggcagaattttcattctctggtatttattataatgataaactttcggagtttgtattggtttttttttttttattgttgtcacatgttgcaaaatggctgaactgtcactgctctgcttttcacttgtgcccaatatctgctgacgaaatgaaatgattatatttatcatatgtatatatatctatatatatatttggtatgtttgagcttcaacaagtattaaaataatgcttata

SEQ ID NO: 33725 - DNA, 3679 bp, Cannabis sativa
  modified_base (749)..(751): a, c, t, g, unknown or other
agtcctttcaaaattcaattgtcaagaagatgataactgcaaactgacaaggcacccacatttcttcttcacgaatcatagatgcaaacaatgtaaatgaataccttttaggacattttgaaataacacatttaaataacatattgtgatattggattgtattatacgtgggtcaaaaaacatattttaaactctaatttgtatgatatatcttaaacaattttaatgctatataaaaaaattaaattagaaccagaactatatgatgttgttgacataattatttttgaataatacaattcgtataatgtgagaaagtagagtgtttaaagaagaacagagaggaaaattaagaaagagagagagatcaagctccttcttttcgtcttcgcaaacgtaaaccatccacattattttctatcagattttcccttctgccaaacaccccacttttctcttctcttctctttcagtccactttgagtgaggggaggaaaattaaaaaatataatagaaattagggtaaataccattttaaaccctatgtttagcaaaagttaccaattaaaccctctcttttgttaaataacaaaatagatcctatattttttaaaatggtaaaaataagaccttgagctcaattttcaataatttaatttttttaatattactaattttaagacaatttttaacacgaacaaatacataaaatataactagttttgtcataacatctctagatcaaattnnnattaagttttattttgacaaaacatcagtttagggtcctatttgtacaattttagaaaatacaaggtctattttattatttaacaaaacatagggtctaattggtaaattttacaaaataaaatgtccaaaatggtctttagcttaaaaattacatctaaaaaattaaaggtttactttttttaatggcataattaaataatatttttttgatgaatttttttattttgtttacaatcttacaattttttttttttttgtcttttttatatttttactgttagagcatctctaatggtacactatttcaacaaattagtgtagaatctttacactatttcactctaatggtacaccaaattgtgtatcaaattggtgtacatcaaattctacaccattaacggtgttggattttgaatctacactaatttggtgttagatttttttttttttacattctaatccttattttaatttatttttaaaaataatcttacattttagtcctcaaataaaaatttatcacaaaaataggaaaatacaaaataacaataacaaatacttcatctcgtttcttgcttcttctttgcgcacaaatacttgcgctctttcattgaattcattaatgttcctcactgggcgatcctgtaggtcatcccacaactcgcctccagccgtagaaaggttagttgtgatccctacctaaaaagcagtaagctgaatactgtcatttaggcttctaacctttacaacggctgtgctaaagcgactcaagtaagccttaagcgactcgcctggttcctgctttatgttagttaaggatgatgcttcaggtcgcctgtctctagcagcttgaaattgtttcttaaagtccttggatagttgttcccaagacgttatagaatgatgagtaaatttatcaaaccagctgctggcagctcaagttaaagaattcgggaataagatgcaacgcaaattattcaagacattgctggctcgcattatagtattaaagttattcaagtgagcgactggatccgtagttccatcatgcgagacacgtgggttcttgaatccctgaggaaattcagaatttaaaatatcaggatgaaacggctcggtttcctcatccgaatcgtaaccagggaattttccatgttctccatcctgatactttctgaacttatcctccaattcaatgattcgcaattggatgggatccacttgctgttgatttgcattaagttgatggcgcaaattaggtgcattttgatttagtcgctcgcaaagatcaggctgtctttgattcaagtgctcgcgaagatcaggctgtctttgcttgtaattactcacagaccttgtctcttagtaactcttagattggtagcttcgtgtattggtcatgctttcttggtcatcataatgttgaggtctacttccttctcatgtttgcctacccgatcgactatgtcctcgagaccttgagtgtcctgaactagagcttgcttcgtcttctatcggccttctccttcagaagaggttagatacacgccctctatttagatacgtgtatacatcttccctttctgatcgagaaggacgctgagggtgtctaggaggtacccacttgtcctgggttggtttccagggtttctctcgttaccatgagggattccccgatccctaggttgaggctatctcgcgtcctcattcgtgtgagaagcttttggtacatcattttgttcattccttaggttcgtaaatccttgggatccttgaggaatgtctcgctgttgttcttgattatttgtttgattgtccactaaaacatcccttgtaccgtcaagttgttcttcctgagtgttttggggatttccttagtttgtctcctatctcctagttctagtacctcgaggtctacctcatggtctttttactgcaggattaggttgattctgaggatttgttccttgtgtcgctcgggttgctacagcctctctttccaactcagcgtttcggctaagcattgttggagttgtctattctccaactccactaatggtacatacctagttggatcgtaagcatcctcacttctaggcacgtacctatcagaattattagtacattccttccttctttctgaattttgatcaccactagcatcgtttctccttgaacgtgatgttctagtggtgtggggtctttgagatcccattgactctttcccagggcgatgtatagtttcctcaagacgattttcatcattttgattgctatcagccattgaatatggatagattttttgtttgtaaggagggatttttctgagttttttatcactaaggctctcaatgaaagcaccaaaccgttaacacagattttcattaaccaaaattaaatagcctttcagttttaaatattctacaaaaattaataagcaataaaagagaatattgctccagatatttttacgtagtcttgtagttaaaatctacatactccacgagtcattatttggggtcctttttgaatatagagtacaactttagaatttgaataataataattcactctcaattttgtcgtcctttttcccatagaatttgtccctattgataggagtataggttggcatttattctttttgggatagatttaaatctaactgttcatgaaacgtggacaatccccatgtttcatttaaatcacatgtgagataatactaaataactacttggtcgttctttagttttatcctttagatggttattgcagacgtggaaggttatatcttctctgatttgacttatcttccatatccatctgttggaattttatgccttaaataaaactcattttaatataatctgatttgttatcaatagaagattagaactcatttatgtttacatgtagtttttgttgg

SEQ ID NO: 33726 - DNA, 1934 bp, Cannabis sativa
agctacattctctctctgtctaaaccccttggctactaaacgagccttgtatttgtcaacagttccatcaggttttaatttctttttaagaatccacttacaacctatagtcttccagccagagggtaagtttacaacacaccaggttttttttagtcacaagagagtccatttcatcatctacggattcttgccaaagatccttatctaaagaagacaaaacttcttggaagttagcaagatcctcttctaaggcataagcacagaaatcaaaaccaaagtctttagctaaccttgctctcttacttattctaggttcaatttctaaatccatagtttgttcattactcctaattactggaagatttctagttgatgcgcccctactatttctcaatttaaatggaaatctacttttgaaaaaatccgtctcattagattttactatcacatgcgcattaagatcatagaacctataggctttgctattaacaacataccataaaaatacacattcataagctctacttcactactagaaaaatgggttttcccgacgtttttaaacagttgtttaaagtatttccgtcggtttctataattgtttcctatacgaccgtcgtaaaacgggcagaataagcgacgattcaaaaaagtcgccaatctgggtttcccgacggttgaaaatagtcgcctataactgggtattggcgacggtttataaccatgccctatactataggggacggtttaaaactgtcacctattgtatagggcacggttataaactgtctcctatacccagttataggtgacaattttaaactatgccttatagactagttacgttttttaattttttttagcgacggttttttttagtcattacatttgaaaaataggaaaaaaaaatagattttatgcaattttttgcctgcattaatttttaaattttgtacaaatctgtatagttacaataattaaactaatgctattatcatctaaatatatttaaaattatatatagtcacaataattgaacgaacgctaatatcatataaatatatttaaaaatctataattatattactgctagttatgataatctaaatataattacaaatctatgtagtaacgataaatctagatatataaacactcactaacacgacaactgttgttgctccactttctttcacaatgatccaccgatcacgcataatattaatttcatcattagtgtacagagtagagaacctatcatgtcagtcaacagttgtactggatcttctacgatcatgaaactttcaatgaatttcatgacgtagtatccacactatttgtcatcgggttgttcaggacagataggagtcatccactaggtaggtcgatcaggttgtcctatcatttggttataattggtgaacgatctacacaaaaagtaaatttaattagcatatataaatttataaataaagaacacgcttacatattaggatgtttgatgtagaacttacgtggatatgatcaagttcagatcatccggtatgtcatcgttgcctgaatcaaagtacgccaccgtctgcgtacttggctggatgagtacaagcatccagtgaaacatttcccatataaaacatcttcttcgagtattttaaatacatagaacatgttctctcctcacaaataggacatgctttgtaccctttcacactgtatccagaaacatttctaaaaattgaaaaatcattaatggtccacattaatatggctttaagattgaactcttctttcctaaaggcatcgtaagcagaaacaccctcatactacaatcgactcaaataattaactagaggggctaagtacacatcaatgtgattggcaggctgtgaagggcctgatatcaacaatgtaagcatagtgaacttcctctt

SEQ ID NO: 33727 - DNA, 910 bp, Cannabis sativa
aaaaatggtagttcaatctagatacttgattacattaaaaaaaaattgattcatttctaaatgcattcattgcctatagaatattactaacaattctaattacaattgcatcgacagagagaagtttttcaaaattaaaattaatcaagtcttatttaagaacgactatgttgcaagagagattgagtgaattagctaggttgtcaattgaaattaatttgctagatacacttgaatacaatgatttgattaacaaatttacatctcaaaaagcaagaaagataaatttttaaatgaatcaatctctgttattttttctaataattttgaatagatgaatgttattattaaattttatagattggagattgttcgatatgacaaatttgaagaaagaagacatatttttgggatagatcgatcaacaaatttgaataatattttgattgtacttttatttacaatatttaaattcattaaataaatgtaaaggaatttatgagatactatttttttttttttaaattaaatttatgaagtatagattaatgattttatttttaataaaagacccaattttatttttttgcccctgatgctctaaaattaattttaggtgttgtttagttgaaaagaataaaaatataaaaataacatgagaatgagaattagaataaaaatggaatcaaatcatttttttttaaaatcatcaaatcatatttaaaacacataaaaaattattaaaaaattcatcatcttatatttaaaattgaataattattcaactaaaatgatgtaaaagttatttcatttaaatgacattttaatactttaaaatacagctaaaaaaaaaaaaaattattttcattttattctattacattattttgaaccaaacactttagtctcc

SEQ ID NO: 33728 - DNA, 2176 bp, Cannabis sativa
  modified_base (1527)..(1530): a, c, t, g, unknown or other
tgagctattgtgcagattggattagatccaaaaaaaaaaatgaaatctgcacttagaatgcactgtgaacaaaataatgtggattgaattggatgaacactcttatatgaaatggcgtttaacaaaataaaaatgcttagtaattatttgcttcttgcttaaataaaatacaatttcatcaaatgaggtgtcaaatttttataggctctgagacaccccattaataaagtctttcagtcctatatttatatatattgggttattttattagaacaacaaccacaattaattatcaataatgagacttgagttaattgatttgtagataacagctattgatccaaatagagaagcttatgaaattggattaccgttcattcagaaagctggtgttgaccataaaataaattttattgagtcgggagcttcttctgctcttgatgaactcattaacaatgtaagtaatctcatataaatatgtgataattatttataattaattaaattttatatataattaaatatttttattaaaaaaagacaaaagaattaagtgagggttcttagttggtatgagacaagattcaaatcttggatttcttgtttttttttttattagtaatatcattattttattatgatttttgtttgttataaaagtatttatttataaattgtagatagaggtttttttaattcttcaattaatagggatatgacaacgtagaagatatgggcagtgcacagtagtgcttattctacaatcttcccttatttattctataatttattttgtgcaggtagggtatatgtatagagtactaccataccctaataaattttacgataaattaaaataatcaataatattaggttctaaaatattaaatgacataaaagattatgtaattacttgaatagtaagtattaattgtacttatatttgtaaaaaattaaaaattatatttgctaacaattaaaacaatacatgtatatttacttatattcttaattattattttggttgtatatttttaattgtataattaatttttttttttagaagttattcaataaataaattattttttacttaaaatatttaatttaagtattatttatataaaaaaaatacaataatattcaaaatttgttaataattataattttagtttagttaccgtaattcttttaattttataatacttttcattgttttttaaatattatataaattttctatcttttttaaaaatttataatataaatatatttttttgataaaaaatataataaaaatatatttttttttaaatatgtgcaataagtttgaatttgaattgtaatataaaaaaaactttatgttatataaaacatttattatatatagaaaataaaagataagagagatatgtgtagtttaaatttaaattgtaatgttttaaaaagtagaacaacaattttattatatagctacatttcttattaataaatttaaaattaaattaaattttatatatttaaaannnntaattaaattatattaaatttaatgattattattattattattattattaataaataaatcataacaattctaaccaaatatgcaagctatgttacaccacgctcttatatataatacatacatgagtatttatataatttttcactatggtataattacactattatttggcaggaaaaagaagtagggagctttgactttgcatttatcgatgctaacaaagatgagtacaaacaatatcacgaacaacttgtaaagctgattaaaattggaggagtaattgcatacgataataccctatggtttggaactgtggccctttctgatgaagaagaaatgattatgaaggatgattttgtaaaggcaaatagaaaaatcacgagagaagtcaatacctttctagcgaatgataatcgatttgagatatctcttgtttctattggagatggactcaccatctgtagacgtctctattgattaagagatccgaggaaatataacatttttatgaagacttttccaaaccacgtgatagacgtgtatttaaaataaacgtacctttaaaatttaagtcttatttttaataaatgagctccttcattgctactctattttatattttattttaattttttttaaaagtat

SEQ ID NO: 33729 - DNA, 1229 bp, Cannabis sativa
aggcgcttgggacaccagagcatcctagacgtatcagggctgctgggtatgctagtatttgaaatgttgtttcctaagttatacaaaagaatcataactaattttatttcatgatttgcaggttcttgactagggcatctaaactgtttggcaggaagaaaagagaagtttctgatgttgtggctcggcaacagtttgagattgataaattaaaaactaaaatccaatcccttaaacagaagcaaaacactgcccaacaagaggaataaggagaggtggttgatcaagcgtatgttccacaacaatatgctcgtgaggatgagggtcgaccagaaatttatgctgaggagttttcttccctcaacgagccacctctcctgtacaatttcgatgaccaaagggcccttgatcagcaagtatatctctgctttgacaatatcgataatattgtggcccgagcgtatctgtacgagcatgagggtccaatcaaagttcactgcatagactacgatgattcacatgcctgggtcttaatttcagaaatgctgcaagaggatgttgaaatctcaatctcaattgaagggtgcaaatatgttagggaagtagcaaacatgttccttccttggcctaaaacacctgagataacttttgttataaattaattattaatgattagtgatgtttgaatatcttaaatatttattcgcagtgaagtaggttctgcgaatatatgtgttgcgatgggatggatgaataaacaactgttatatctgtgttatttgtcattatataggtgtgtttaaaattttgggggcattcaattacagccattatgctgtcaaaattttggtagaattaggatcaaatttgatatattatggtgtgttttgtacaaggtccactcgctcaaccgccttcaagacgtgatgtgccgaaggagaaagtacccatgccttctccacaaggtagtcatgatgaagaagatgaataattctcacgaaaggtcatggatttgatccctaaatcgctaaaatggatggttgttgaatttctaagactcaaagataaacgtgaaataatcacaattcttgtgcctaaaggattcatagcattgcgtatccagatcacgttatctggagaggatttgcagcaggttgctacgtgtgactacatcggcaaccagggaatgctgtttggaatgatgtatactcttttttaatctaattaac

SEQ ID NO: 33730 - DNA, 1774 bp, Cannabis sativa
tttctctatattctctattttatgtgtataacttgtttagtcttgtaacattatttaatatgtgattttgtcctttgtattaattgtcatagagttgtaatcttattggtttggtattcctattggagtacaacaatttccaacatgaaattggtttgttgttgtacgtaattaagcattatgttttttttttcttttgttattttaggaaactggtttcacaatgtaaaatttttaactagctgataagtgaaattgggttctgataatttaattttataagctatttgttaaaaaaaatgttatatttttttttcttttgactaacttgtttttgtgttttaattttttttattgttttgttttttttaattggttgtttaatataattgatttttttttgtcaaatttttaattatttgttaatgtaattagtttctttttatacgatattccattggttgtttaatgtaaatggtttttccatgccaaattttttatttaattagttaatgcaactcgtttcaatgatttaagtttttttatcttttaagaattctcttattatggtggtatgcttttttttttttttaattaactaatttttctgtttcaatatatcattttattattttagatttcttatgtttttgttttaatttttttagttaactgtattaagtaactaatttttgtatttaatgtttattttagtcatttaggtaattagtttatgtgggttaatttattaatttaattattttacgtaatcgatgtctctatattaaatttttgctaagttgtttaatgtaacatttataggtcatttaaaatttcttttatggtgtgtattttttctttttaaaataattgatttttgtaattgatgtatcatttgattactttaggcgtcatatgtttgtttattttttagtttgtaatatgagattggtttatggattaaattattgctttttattatacgtaattggctctaagatttagtttttaatttttggttaatttacataacttgtttcaaggttttattcttttaactagctaataaatattagtgatttctctttgtcgaattataagatttaacttcggcgacaattctaacgtccaacatcgatcattgacaatttcaatctctaactacgttgatttttcgatagcgacaacttttttgacgatgataaaaatattgtcgaatattctcattctaatttctacttttatttcggttaatattttattttagtagatagtgactgtattgtgtaatgggttgatggttgaatctttgagcttctgagaaatttgtaattagttttaattttggtcttgtgttagttttagttttgatagtgagttggtggtaagtcttaattagaagcatataaaatttatgtacaagttttggtatttgtaactttttttttttttttttggttaaaaaattaatttttgattatatagaattaattagtttattaaattattgtcctactaaaattattttagtactattgctttagtttctgtaagaaaaaattcagttgagattatttttgttcttaattttagtatttttttaaaaaaaaaaaaagaaaaagagaaaaaaacacaattttaaagtttttttattgcatttatttttatacacaataatgtttccaatattttaaagtttttttggaaaaatatcatattgaattggctaggttgctgtctttggagcgtgcaacatgacagtggtgatgcttgg

SEQ ID NO: 33731 - DNA, 2727 bp, Cannabis sativa
tatccaaacttaccttcctagaaattcagtttgcatattgatgaaagtggaaggtctatgattggttactagtagttgcctaagttcttctagggattcacctagtgataggaaaattttagaatgatagaatggttatgtacttagtgtaaactattactagattcatgaatgtcctgatcgtgaccttaagaaaagctagaactgttaactaaagtttgcatgtttgatagctattctaggtgattaggggtgtcctattttgagcctaatttttccacctcttattctttgttaaaaataaaatatatatttatccttgattatgagccatgaacttaaataaattatcattaccttattttgtaccataaacataggttattgtgtacaaaatgaaaaatatgatgtaagtgagatgaaatttttttttgagaattgtgtttggaaaagatgtaggtgcatagagagttatgatccaagtatatttcgtggaacaattctcttgttatataaaaaaaaagtcatattgagaaaaaaaaattctataataccaatagataaatttgataggattataactttaattgtgtgaacaaggagacatcgaatgaaaaattattgtcgggagaaaatgaaatttatgatgatttttttttttatttttgattagatttgtaagtttctggtgtgaaactactctaaataatgacattcttatccactatatacttaagcctaacattacaagcctataaagtcattttgatctatatgactttggtttacattagtggagataaatttgttatataagcctatggttatcttgaatattttgtggtaagggaagtctttatgcacatagattatatgtatatagagttagtagaattgatatatacacattttaataaaaaaatacaatattagaagttaagcttaaatagtttgaaattctagtcctttgtttgaagtgcatattgaataatagaaagagagtttatattttgagataaattacctttcttctaagtttcttgatatgtcatccaacaattaatttgttagttttagtttttagtttttagttttagtttttttttttcattgcttaaggacaatcaatagtttaagtttggggatgtgatgagtgcacattagtacactcattcctagtcaattattagatgaattagtgtttatttttgtatagatttgatgtgttttctccaagtgtgtaagtttgtgcttaaaagataattttgtgatggactgagatctttgagctcatttttgacaatgttttcatcattttcttgaagagcttatgaaacccaaaatgatagagatcattcccaactttttgaaatatgttaaatcatctcatttggagtctagacgcaaaagttatgcatgaattactgagcaaggtcaaagtagtaatatagtgacgaaaaatgatttgtggtgctatagcgccgattttgaaaaaaaatgttttttgcgctaaaacgaagcctcaaggagtaccgcatagcactataagtcttctgtgctatagcgcaacacttatcgttttttttttttttataaaaaatcctaattttaatgagattcatctatcttttcttggcctatataaagaatgtggtaaatcaaatttagggataactggagaggtagaaacaagcaactttgagattagagaacacattgaagagcgagagaagagatttgaagcaatcatcatcaactttcattattggagttcttttcttcttcttcttcttctgtttattaattatgaacatgattattgtggttattatgtttgtgattataaactaaacactcattctagagtgttgatggatctattttggattatgaatttaagtatttagattattcccatatttgttcttgctatttgtttatgcaattttgtgctaattattatctttttaatgcttgattaccattaattagtatagagattttaggttttacacttgagagaggtaatccaaaatcaaacttaaaattgcatgacataggaaaagtgtgagattgagagattctactaattctatgagtttcttttaaagagaatcatattgctttatgagtgcttatttgattaacattgaatagagatatcttgttagttaatttaagttaaatttataatcactcgagagaggttaatagactacattaagattctagaaactacaaattataggataaattggaataatcggtaaattgagattcatagtttgaaatagaaaaatcaatgctctaagtttttactttctgattaaaagtcattgtttgtgtgtttattttattatttgattcttaattataagttactttgtgttatctaattaaagtataaaattaaaaagtataataattagtaaaatttaaaaatcaatccgtgtgggttcgacaacctttttagtattaaaactttgctataacaatgttgtacgcttgcaataaaaaattgtgtatcacaattctacagtttagcaacatctccgaatattggtgaccaccttcaccaaaacacgaaaatagactaagtggtgttaaaatatcccttaggtatcataaaataaatcttttggacattttttcacttacccagtgtccaagttgacatcatatgtaaacgtaggcgttgggatgtcaacctgggtgctgggtcatgaa

SEQ ID NO: 33732 - DNA, 2283 bp, Cannabis sativa
aacgtatctatggcatctgtgtttcggccatattggcctcaaaaaaataaattggctaacaaaggatggtcttttgagagaactaaaagtttgaactcttctggtatacgaatcatgtcttgaaggcaagatggctaaaagaccttttactatgaaaggtaataggaccaaagaacaacttgagccaatttactcttatgtgtgtggacctattaatattcaagttcgaggagggtacgaatactttgtcacttttattgacgattatttaagatattgtcatcttacctaatggccaagaaatctgaaactttttaaaagtacaatgactttaaagccttaggtgaaaagcaattaggtaaatcattaaaggcactttgatcaaattgtggttgagagtatttggattctgaattcaaagactacttgctagaagaagggatcttatcccaactcacagcacctttaacacctcagcaaaaaggtgtttcaaagagaacaaactagattaaacatggtcaaatctttgttgagttactcgtcactgccactgagcttctgagaatacgcacttctagaggctacttacatttaaatgtagtattgttaacgcagatttttattaaccaaatatatgaaccttttatgtaataaatatactatagagttaataataacaataaatgaacaccacatatttttacgtggtttatagttaaaatctacatactccacaagtccatcttattatgaatggttgatttggatacatagtacaaattctctctttcagtctaataaatagtttttttctctcaaatttgccatctctttttccctaaattctgcccctatttataggtgtatagggaggcagttatcttcattgggatctagttatttacaactgctcatgaaacgtggacattctccacgttttgttattttacacatgagataatgtttaataactacctaaccgctcttttatctttatccttaaacggttatgctgaccatgcatgttatttctctctgaatacaagttgtccttctttaccatctctataggaaaaaatgctaagtatagatagacttctcctcgtaatgttctcatattataatgatattagtgaggtagttattctgtcgtataaagggcgagatggatgaatgtaattattctctccatatacaaatatgtgggtcagcgagttgcaagctcttttttctaagtatgtgggtctatgagttgtaagctttttgttatctcgtcttaaatagttctattgtatactctttctatcccgagatggacatattgtctcgtcagctgtacctcgttaatagttattattcttatctcgcatatgcttatatggcagcgagtttgaatatttttatcaattgtaatttattgaaacgagttatttaagtcgcatttaataatgcaatctaatattataatcattgagctaattcatattccttttaaaatacatgtgtcagtttctggttgatagccgaatttcaattataacaattgcctctaaaaagtgccttttacttaaatagggcttttaaatatttttaagggtataattgtattttttccttttaaaacttgcatgcttagaatttggcgattcaaaactttgaggtacatcatttctcatttaatgctctgactattccttttcttgttcagtgcccattcgtttgattatctttcacttggttgaacggttgccatcctttaagtatatatttgaaaccgtgcatcatcttcatcattttcagcccacgaatttttaagctttgaagaaatctcaaccaccttctaatctgactttgcatgccgcccctatccctcacattcttcttgcgaatttcatctgattgtattccttttcttaaaaatcatcacaacccagcttttggatcatcaaaatcttcatcgcgaagtcctttcttacacagaacatttcacccaaccaataagtggcatttatctttgttgatttttttttctgtgctttccattttgaattcttaatgtgtatttttcttgttcgcattgttttgctgcttaggtaatttaattttgagtgttcagatatttttagggcaagaaaatttaaggctatacgattcacaaattttttgggttttatttgtgctctttttttccaagaattggggcattattttttaagcatgtcccaatttatccaaggatatacaatcccaaaatctttagaatctgtttgtcctcaacattct

SEQ ID NO: 33733 - DNA, 2047 bp, Cannabis sativa
aatttgaaaaaaaatatatttttttaaatttagttttacgtaattttttaatcattaattgattattagtttttttaaaaaaaataattgattattagtttaataatcttttaaaaataagttttttaaaaaataatcttttaaaaatacatattttttatttttttaattttaaattatacatgtggccctgacgtgacaactaattaagcaaccatgtcattattttgtttgccacgtatgacaaaacttaacagaatgattaatttataacaccgtgaatagtttaaggaccatttttaacggtctaaaaaattcagaagccacaataatgcacaattcatatagttcatatgagaaatacaaataccaaaaatgtatacaaacaccagaaacattgggaacattagaagtaataacatgtgtgttagatgtaaaaaaatttccatgaaaaatatatgggattcaaaatatatttattgttgatatcctcgattaatatagtaacatcctaaaatagaaattgaacacaaaataaatagattttaagcattgggcagcttggagccttgaattataacaggatcagcccaagctatcagaattggaaagcttggactattgtacaaagcctaatttttagtttatttttaagtaataaataataattattttttgaacaaactattaaattattgttaaatttaaccttaaaatatatttcatattttttaattgatcttagatgttgcaagtgtaatgttttttataatataaagaataaactttttttttggaatgtatagaataaactattagttaaactactctataaaatgtgcatatatgtagacccaattttaattttttttttttggcccaaaacacctaaaatgcttggacaggctctgccttatagtgtcccaagacctagccgagccttaatcgctcattgatcatcataattaagggtgctgatgcacttgagtatttcaacatgcttcacacgaggcttaaaaaccctagccttacccgagccataagaatgctcgggtcgcacatgataatttcttgatatctcactcgaatctttctcatgacttgagtaactttgcaccttctaattaacgctaaatgagctctctcgtggctcaagatctccttcaaccttcatgcctatatatctgagagccttaggatagctcgtgtgtgatacacgagtttctaaggccccatctgagccttgtcatggctcgaaactatacccattattctactcgagctataaaattttagggtaagtctacagtacaccatcctaaaggggtgttttggtagatcatctatctgttttagcacgtaggagaattttttagtttattttttttcatgattatatatgttataattatttatgactatttgtaaattttcaaacaattctgagtcgtttacattgtcgaaaacaaaattcatatattttattgtacgaacgactcttttttctaatacatagtaagtagcttttggggcagtttcaatattataagggttttcatctattctattaaatgaaggctagaacttttacttcatgctattttagtgtcaaaagctacatatttgtttacccatctcttttaattgaaacttattgtaaggttctatatgatagaatgacaattaataatataggatctctccctttgattgagtgatgtactttggtaataatttggagtctctatatctcaagtttgtaagataattaagcttataacttagcttacttacacttgctcaagtaatttgagagtttgattgtagatatttttcaattttcattatattggtgtaactttcagattatattgttcaattttaatatattttttttcaaaatagacaaaatcaattacaaagttaatactttaatatgattcacatttttttttgcttattattattttgaaatggactgacaaacacaactcattatatatattgatattttgtatgttcaattattttaaactagtaaacattc

SEQ ID NO: 33734 - DNA, 6445 bp, Cannabis sativa
  modified_base (596)..(596): a, c, t, g, unknown or other
aagttttgggaaagcttacaacgagcaatgggtaccaagttaaagttcagtacagcttttcatcctcaaatcgatggtcaatctaagaggactatacagatacttgaggatatgcggagagcatgtgtaatggactttgaaggttcttagaacaagtaccttcctatgattgagttttctacaatagttatcagagtactattggcatggctccatatgagatgctttatggaaggaagtgttgtttgcccattcattgggatgaagccggtgaacgtaggtatcttggacctaaatttgtccaaagaacgagtaaggccattgaaaagatttgagcttgtatgcttgcctcacagagtagacagaaaagctacgcagatccaaagcgtagagatattgaattccaagtttggaattttgttttccttcgggtgtccccaatgaagggaatttggaggtttggaaagagggcgaaattgagtccaagatttattggctcatttgagattcatgagagagtaggtcaggtagcttatcaatttgcattacctcctgctccatctggggttcataacgtgtttcatgtctccatgctncgaaaatatgtatctgatacaactcatgtattaagttatgaagatattactaacctgtcatatgaagaacaaccagttcagatcctggacaggaaggaaaaggtattgcggaagaagactattctgctagttaaagtgttgtggcgaaatagcgaggtagaagaagcgacttgggagttagagttgcagatgcgagagcagtatcccgagctttttaggtaaattttgaggacgaaatttctataatgaatgggcagttgtaatatcctggaaaataatattgtatttaattggacatattttattaaatatgtaattattctggtaatgaagtaagattatgatcttactagggttaattagtgtgaatttagtaaatggttacataaagagtaatttattaattacagagattttattagaatatgtgggtatcgtggataccatttttggaataaaatattttcaggccaggcgaccgtggaaactagacggagtggtcagaaatgtcacgacattaaatgatggattgtagggaaggtataccggactagtttaaaattttaagatgtcagtttggtagattagttaaattaccaaaatgcccctaggctttcatttttaagttaaaggtattgggaagggtattatggacatttgagtgggtgataaaagttttttctttagtgttaattaggatgaaatggatttatgataataagtttatttgtttttttatttattagactattaggcgtaaaataaaaatagacaaagtcacataaccttcacctttcttcttcttcttcttcttacccgcaaccgtaaggagctgcaaaccaaggattcttttgcttattcttcagctcttggatcagattggaaggggtagaagcttgtttagacgacattaaggtaagatcttgaaactttattcttgaattacttagcttttaagtaagaaaggtttatttttctttgaggatttagagctgtatctttggattgaatttacggtttgttttaggtgttgatattaaggttaattaggttctattaacctagattggtagttgtttagattgggttgaattatatgaagattaaaaaggtttcattcacttgaatatgtaatttcaatttaatggttgaattgctataaattagttcttgaaatatgttatatttatgatagtacactattctggaaagtgtgattaggtatggaggaggtctaggtcaaaattgtggaagaaaacctcaaggttttctggtctgccagaatcggtcgaccggttggttctagtgcaccagaaccggtcgaccggttgccctgcagggggaattcctaggttttcttcaagttctattttggctcgagagatgcgtagtatctattttcggttgtttaagtgttgtaagacctattttggagttgttggaagttaggttcttgttcagtttcggattagggttttattccgaagttttggtttaagatatttattgagttttggttgtcgtgacataggaccgagatcgccttgctttgtttccactcaggccggcccgcacacttgagctctggactgaggtaagaaaagtgttatacatgacttagggttaagtgattaacaattgtatggttgtagtctcgattatgatcgagaacttgaataatgtgtgctaagccttgattatgatcgagggttagaaacgatcattaccgtatgagtaattactcctaaaactgcggataggtttgttacttatcgttagctttctcaagcaatgatagtgacagatacagctcgtggttaacaagtggtaagggtactttatgaagtaccaagattgtgtgattacgatattgtgtaaatgtttaagcgtgttaatatgagattgaattgttaaatgttatattgattattgatttatttacttcacttgttgagtctctatgactcacaggtgctaaatggtccaggtaaagggaaggctaaggttcagaagccatgagtctgaggttgtaacaacattgtacatatcagctgcggtgtcatggcccaatggatagggtgttccattttgattatattttgaaataaaaacctatgttgtaaaagcattgttgatctggtttgtaaatattttgaaaacagagaaatctcgtaattaatagtacttatcttttataaaaagaaattttatgtgtgtgttttaaattgccaaattttaattaaccatactttttgatatatttatataaattaataaatgagaattttataaaagcacacacgtgacgtccttcttggacctggcgttacatgtaaggtaatgaattattaattttatggtaaaattgtgtgtaggtcttattattatttttcttagaaaataatgtaagccaattatagagcataagatttttcatgtaaatttaattttctgaaattattttttatgcaaaatatttttatctgtgtaatgctcaaaccatgtgagctcgtttttgaatcgaaacacagccatgcacgacagatgccccatgcatgtagcttgggttcgtggaagaaccccggccatggacgatgaccaccaccacacactatggtatcgaacaccatgccaagccccgtgagaccatgactgtcaatgatcaacgatgggtcatacttggaatctaatttcgagacccgtcaatctcttctccgcaagcgtaggacgacagtggtctgaccaccactcgacttaccttaggaccttcgtggttctactcgtgtgcatgcattaaaggcatacaaagggatgtggtatgttttcgttgcaagtagtagcaacagacttgaaggcagggacagagctactttggctccaaagagggccatggcccctcctaaaattttggagaaaaaaaaatttataaagtaatttaatgttaaaaaattattttttcaaaaaattatgtatttggcccccgtaattatttttgtttttatcttttggcccctcttattcttaacttatgcctctgtccctgcccaaaggggtggttatgatgacccgttcgatgctcgttggcctttaagtgtcccctctgcttgtctgccatggccacggtggccatggtggctctagcagccgccagccacagtgagccaatggtggttcgaacccatacccgaaatatatatatttgtatatataaagttatatatgtatatagtgtatatatacactataaattatctatattattttataaatattacttactattttgttgagatatttattttcaaattaatttgaattcaaaataaatattacaatttcaaatttaaaattcaaattcaatatttgtaactactttaattgtgctaagacaattattgtcttaatgtttattaaataataaaaatatttttttatttaagtaaaaaataattaaggcaaaataataatattttatgggatatttaatttctcaaatttatttgaatattaaataaatattattttaatttgaaatttaaattcaaaatcaataaccatattaagggaaatgttgtcttaatcctcataaaataataaatgttattatttttagacaaaacataaattttgaatatttaattttaaaaatttatttgaatattaaataaatattattttaatttaaaattcaaattcaaaatcaataaccatattaaggcaaatgttatcttaatcctcataaaataataaatattattatttttagacaaaacataaagtgatgattaagttgtcgtaaataaaggaattatttaagaataaattaattaaaaatattttaattaatttatagattataaaattatctcaaataaaaatatttatttaagaataaattaattaattattttacttaatttaaatagtttaagagatgttttaaataaaaagtttatttaagaataattaattaaaaatattttaaataattttgaggcttacgataatcttacgaaattataaaaatacccttgcggcgatatagagaaggatctgtaatttaattctaatttctccaaagagttctaaaattagacatacctaaattttacccgattcatcatcaatatttttttatttattttaaataaatgttcattaataattgattaataacatgatcatgcattagtgaataacatactatacgtagaaatcccacataattatattattatgcatctcacagtagaaatatgatatattaagattattctatgtgtttatgtgtttactgtttttaaaaccgaaagcatgtaaaccgactaagattaatttagaattaacttgataatttaaaattaacctattaattgaaaataattttaaattatgaattaaaaaaaataatttatatttaataattatgacaaaaaaattatttgtacttgacgtttttattatgaataaattaatcataattattaaagttgttaatatgtattaattctgagaattaataaaataaatacattaacttaaaatagtgagtgggagatggagtacatgacaaagtaacctacaatctctattattagtcaagactgaatgagtatagagtggccttgagacacttttgttttcgtcctcctaaggaaggtgtttgtctataatgttgttcaaggtttatctcttgactaagatcggaggaagtgatgtatttaatgcgataccaaccctaaggtggcgttactaaattaagtcgtagaatctgaaataatgagttacatttacaaagtttaactaaacttccatgtggttagtagttaacttgaacaaacagcgatactttatattttgaaaagggaaaatgatatatttaagtttcaaaattataaagatgtgatcagcctcataggctcaataaaatttactcgatatcgatcctaagacggtgatcaattgtccaatagttttatcgtgaaataacttaaacaatattttatgtgttttacttgtatgcgctcatgcatcacgtttacagtcattccaaaataatatttataatttacgtataatcgttatgtcatctttatttatttcagtcatgtctactatgccaattccccttactgctttactagcacttgaaaaattcaatggtgagaatttcatgaaatggaaatttaatctgaatttgatgttggtttgtgagaaccactaattatcctaactgagaagcctactgccaatgcctcaaaaaatatttgggacagatttcactcttgaattcaatccaacaacaaggccaaacgcttcatgcttgttagcatcgatgatgttctacgtaagacgcatgaacaaatggagaatgcatctcaaataatgaattctctacagatcgtgtttaggcagcatgttagaaatttatatgtatgatatgaagcatatatgatcatgtatcaaatacggaattaatcgaatatatatatctactaagagcaaaggattgaactacctccatccattgtttctttgagcttcaatcccacactagctttggatcagcaaaagaaaaggaaactgattagtgtgagtaattgggcttcaaagctctctctacactttttagatggattactatgatttttacagaatgagtagtcagctcagggaccgataccctatatttatataggtgagacattccatcaaagtctctaccacaattaattgttagaatattttgacaattaattcaggaaattataaatttggtaaatcgtaatatgacaatataaagaatatcaaataattaattgtgcctagattcaatgaacataaaatat

SEQ ID NO: 33735 - DNA, 1278 bp, Cannabis sativa
  modified_base (970)..(972): a, c, t, g, unknown or other
aagtatagatatctgcacttatacggattagattgatttacatgtaaaagtatctgatctaattcaatcatatataaattttttaaaaaattaaatataacatatattttatgaaaaaaatatagtaatttaaaaatctaacacatataatacaaatatatttcaaaacttaatagatcaaatatatattctatattcttatattaatctttttttacataaaatataataaaattacatattttcttgtaatacaattattttttctgctttcgaattttgttattttatttattttaatttgttgttagagatataaaacaacaatactttgttttatttttattagttaagtgaagaaaaatattttttttatatataatatcaaataatttaatattcaaaagtaaccaatttaaaataattgattcaatctacacttttacggattgaattagaatagatttgagctattgtgcagattaaattggatccaaaatatgaaatttacacttagtgcgaatcgaatacattatgagcaaaatagtatagattggattgaatgaacatccctatttattatattctatcttttaatatattttattcattttaaatataaaatattaatatacatacacatatacctattgctgtaagttcgtgcatattgtgctagcccgtaccatatttattcatgcttttaaaaaatgattcgtgtcgtgctgtgccacagaaacgtatgggttgtaccgtgccatgccaacatttttaaaggataggtccgacatggcccgtaggcccaatatttttgtatcttgctcagattcgtgttgtgctttgctcgtgctaacccgtatttcttaaaagggccaggccattttcatattcgggctcgaattagtgctttagttatatttatataactttttaacaatattttacagataatcatataaaaaaattattnnnattattaaaatttgaatatttacttataaaaatactcaaatttttatatcacaccctataaataaattaatatataatcttaatttttcatgtttcaatagttttaattatagaattataatattcaatattatatttaagttttattattattttaatttatttataattaataaatacatagatatttttttttattattaaattataagatttttaatatatcatgttgtgcttcctttcgtgcttctcgtgccatgttgtgcttaaagatatatttttcgtatcgtgtcgtgccaatttgta

SEQ ID NO: 33736 - DNA, 1866 bp, Cannabis sativa
  modified_base (336)..(343): a, c, t, g, unknown or other
ttatttattatttttcatataattttatataaaaaattaacaataataaataatcataaagagtaaaaaatatatatatagaaatgtcaatcgggccgggtcgggctcaacccggcgttgacccggcccgacgcgatatctctttggcacgattcggtcatgcccgaccacttctttcagcctggcggattaggccgacccccttcttttttttttgaatggtagaattttaaattttaaatatctctataattttttttttttataatacatctttagagacatttctcttaaattgatattgtattttaatgttgtttatatatatatatatannnnnnnntttttttttaaaaaaaacattaaaggctatatatctctcttttacaagaaaaaatcccaaattaccatacctatatatatttgtgacaacaattaattgcaaaattaatttgttaataatttttttaagaatcaataatttaaacaacaataaaagctctttaacacataatagtatattttaaaaatatgagttaaaatcactcaaaaaaaaaatattgattaaaattttaaattccaaaagtttgcatattatctagtttataatccaaaatatgacatactattttattgctaaaagtttcatccaaaagatgataataaccggccaaaagtttttctaaaagtaaaacacttatatttcataaagtcactccaatagtatttttcgaaataccatcaactattaaatctcacattacttatacaaatcaagaacgaatgccaacttgtattcatcatccaaagtgaataaaagatctgtataagcttgatcttggacaagaagtttttcagcttcaattcgttgttcaaattacagtccatcgatttttttttcagttcatcgaacactttcagtcttctacttgcaccttctgtctcgaactggaaacaatcaacaattcttctaatactaacaccagcagcagcttgtatttcaccaaatttgttcactgtggtagtcaatacctcaactaataaatcttcattcctagacctctttctacttctccttcttgattgtgctgaagttgttctcgtacttgtgtgactatcggttgcattaccaacaagctcatctattggggcaaatggatcgaactcagattgttgatcattttctgcttctctatcaatctcatccattgtttcagaaaatctcataacaccttgtccatttgcacgatgcttcccaaatatagtaacaaagtcatcataatgaggaaatgctttattccttaagccccttacatttggatgactctgcaatgaataaaaaacatattaaaagaattaagatatgatcaaattataaataaattaaataaagtaacatttacttttacccaatcattaaaaacactcttttcagcaaccacacactttaggttctcattccaacgaaaaccacttgcttgtcttaacatgtctgaaattgcattgaattgtttctttagtatcttgatacgagactcaatgtggggctgtcctttcaatccgtaatgggaactttttcattcatccatctttccaattgttgtagatagccaggtttgaaagtcccattgtctacttttcatcttccactatttaccaactccaacaaacactcaaccagttttgaatcctcaattgaagtttcttgctccaaagcatccattttcctaagatatgtatatctcacatctacttgtaacaatagtgtagcaataaatatattaagatataaaattaaattaaaaacataaatatataaatttgatgtccaacacataagtctaaaactgatatccaataatataa

SEQ ID NO: 33737 - DNA, 1857 bp, Cannabis sativa
gttattattatttaagtaattaaattgataaagaaattctaccactatacgaactcaataaaaaaattcatcaattattaactactacaaccattatatttaaattaatattattttctattaattattttttaactaattagtaacattgtaaaaaaaactgtagaaaattaattaatatataatgttatgattgatattatatagattgatcggttacaaaattaattaattactaatattaataaaagtgcttggagttatatattctaattaatgtatatatatagaaaaaataaatttatatattttcaaataactacaatttaaatcatactctattaaaagttataacaatatatatataaatcatatttttttacatagaatatagtgttagaatttagtgatgataaaattatactcacgtagaaatatataaatttatcgttaattttattttattattagtaaatgttatgataaaatttagcattaatttatttatttattattttttaaagatcaataatttatttctaataaatataaataccatatatttactaaattatcaaatatatataggaggaattatatcaataaattattggttagtgatgataaaaataaaagggtaaaataaatgtgaattgatataattcacacttaatagtataaaagatgtcagcaatgttaagattaattattctttttttttaaaacaaaaaagtattaattgtacattttgtctaaattaataaataataatattatataaatatatatttatgtattcgatttattaacaacatggaaaacattaacatgataattttgccagtgcataatttgtatattcattaaaagagttaccacacaactaaaaataaagaatggaataattatgcacatattgtgtaaattgtttgtatttttcacactcttataaactacccataatgaattgtgccattcaaatatcatattttgagatatgacaacaaaatttttatagaaaaaaagtaaaaacttgctatcttaacatatctggtttttgcatcaaaaaaaaaagaaaaagaaaatacctggtttaaattatccttttatgtatcatatattttgaataaataagaaaaatagtactaataaaatcaaaaaaaaaagattgaattgaataaaaactcaactgaaaaaaaaaaaaaaagagatatatacgtatctgatatacattagattataaaaataatctcattttgtatgtaaataatagaattaaaaaacatgatgtattgtgagatcttgatgagagaggagataacaaaaacataagaggtgtttgagagcaagaaatagttaaggtaaaaaggatatgcgtttctaattatagtatgtgatatcccgtgataccaatatatatacatatatacatttcatttacatacatctgtttgtatattattgcttgaattttctcatttgtaactgatatatttatgtacacataattgatatgtatataataacattaacattctagcattcaattatttgtaactgatatatttatgtacacatatataactgatatatataataacattaacattcttgcattcaactatttgtattaattacatgatataagttattaaaattgaaaagtctcatgtgtcatttattaagaagctggaagaaaaagattagacttaattgaattattattttttttaaaataaaaacatattagaaaattgagaaaaaattagaaaacaaagaagagtgaaaatagctcatataggctgccacatcatccatactaaatataatttattttactacctattaaaaaatata

SEQ ID NO: 33738 - DNA, 922 bp, Cannabis sativa
agctctcatacgtctgaaacacggtggcagactttctaggctttaaaattgccatctaaaatttgaatttttgcttggcgtgctttccatgaagctttacctgttgctgcaactctgcatcatcgacacatttaagcttctccccaatgtactctatgtcagctgcatttggagacgattaaccatgcacttttttggtgtactcgtgctaaacaagtctggaaaaattggaattcagtgatcaattggcaattatctaagtcccgctctttctctgatttttaatctatgtagcctcaaaacttcagactgaaaatgttgaactcttcattacaattctttggtgcatttggattgaaaggaatgctgaaacacatgctaaaacttcaaagtctgctttgtgtatcctgcaatttgctagcaactacttatgagattacaaacaagctcagaccagcaattgtaaaacccaccaacatgtctctggatgttcaatcccccaggatactgctgctgctagcagttcgcattctcagacttttgttgcagcaaataatgcaaatactcaggtttcagctactttgcagcatcgtttggtgcctccaaataagcctaaatggctagctccaccatcaggtaactcaaattgaatactgatgctcccgtcaacgtttcttctggtgtgttttgccttagggctctccttcgaaactccaatgatgatgttattactgcaatggctaaacttatgaaagggtgtgttaaatcagaagaaatggaagcattagctttggcttggagtctcaaatcgctggtgtctctcagacttactgttgatttaattgagtccgattcattaatggctgttaatggattagagtctcaatctaaaggtctctcagcattttatactatacttaat

SEQ ID NO: 33739 - DNA, 2269 bp, Cannabis sativa
actcggaactagacattataatgataatcataataaatagtaagagtttaaggagaagaaaagaactatgatgaagaacacttcgaaaccgcgatctccgtctcttcctcgctctctttctaagtttctagctcaattttgtggctttaggggtcttacattggcagcctaaaaggtcctattaatagaactagataatatctcacttaaaaaaaaataactcccttttttaagaaaaaaaaacgttaaaaactcgaactgcctagaaatcgcttgctcgtcgtggccactggttcgctctccgcaacaagccaactcgtggccgcaacgacagggcctgattccacattttttattttttcctttttttttgctcgcttcagcctttgctccagcgacaacccatgggtttttgctcttcatggacttccaaaactctaggaaaattttgttttggtgtgtcaatctgtccactaacatcacttggcataaaaaacaccaaattcattactttttactcataaaaataaattttcttacaaaactcgaattatttcaaaaatgatgaaaaatactaaaattactaagtaacatcatcctctaactgtggagaaatcagtaatattagagcgtaaaaggctcttatcagtcagaaaatggcactaacaaacacacttgtctattcagcgtgttatatggtttgggatttgttcagatgatagtcattgaaggatcacactttgatcagttcatcttagactcaatccctatgctccgcttaggtccaaatatattgaacacgtgtcaacttgctgagtggcacgtcacctatgcaaaatttaggataacaggtttattgatagttactagtatgcgaaaaaaatgaacaagggttggatcattgaatgggaggtgtcatttccgctatacaatctttgtaagtattttgtactcactaaaatttatgttatagaaaattagtattcttgtaaatataacaatttatgcaaaaaaaaaaaaaaaattggatcctgttaaattctcaacaattcgtccctccacgaataagtcttgcaaattttattgattctaccaagaatatacttttgcaagatcacatgttaagcccaatatgtatgaatggccaataaaaaataattacttaagacacatctatcaacataagaaatgtttctcaagctctatataatccaattcaagaaaattttgaataatttacaatactaaaataaagtttaaatattcactttatttttagtattgtagaatattcttgaatttttaaaaatttataagtaattttaaataactataaagttcatcattattaaaaataatagattaaaaacctctcgcaaataacaaaatagacctacatattttcactatattataataattcaatgaaaaaactttaatttttaatgagttttatttcattattattaaaaaagaaaaaaatatctttgtgagctgaagtaagatctgagtagtttgagaaatcgaatcaataaaaagcctatagtcttctcttctacttataacaatgaggttctaaaccttgctcaaatattctaagggcatcttcaatggtgatacctaaatttggtgttaaatcaacaccaaaaaattaggcatgtcaaaaagatccatttagttggagcggcttggagctccgatccgatggatcacctctaatccgaaacattccgatacttattggatcttggattagatccgcttcgccccgcctaattttttttttcgggatcggatctgatccgacccaaattaaatttattttaaaaaaacttaattcaagactcggaccccaaactcggatcccttgagacttggactcggacatggacccagactcggacccaaacccggacccaaacccagacccggacctagacacagacctagacctggaccgagacccgagacccaggcctgaacgcggggctgggacccagaccctaaccttgaccttgacccgaacccggacacgggactcgggacctgcacccagactcggacctggacccgaatctggacccgaacccagacctggaccttgacccgggaccccgaacccagacctggaccttgacccgagaccccgaacccagacccagactgagactcggaccttgacccggatctttatgttgggttttatgccctaaataaaactccaatttcaatgtaatctttatcttttaaatatcaataaagaagcaga

SEQ ID NO: 33740 - DNA, 1298 bp, Cannabis sativa
acgatagagaatagatggagtttaaatatattgggtgtggattttataaatggaaatattcttttatatgtattttattttttccattttttaagtttttttatttttttttccaaattttaagttttttcattaaatgtccatatttttcaaaatgcatttaaagaattctatatttataaaaaaaaaactcctttttttttgttttttgggctgatcttataagcccaaagtagaatcgtggccacaacctctctaaaacacagagttcttttaaaactctactaaaaaaaaaggaaaggtgataaattaagagagtaatcacatgacatgattcaccttatttgattcttttgcttatttatttatttttttaaaaaagacataaacatatatgaattaattctcattatcaaaccatgtcacttacacatattctttagcttgacgacgatagtgtggtaccacaatattactagtacaatcaagttttatatgttataaatcttaatttaagaataccaccgatgaaaaatttaaataaatatttagagttataaaaaaatatataattacgttaaaacacatatgaatatttctttgtcatgtatattattttttaagttaatttgaagtacttaaaacaaaagcttaataaaaacgagttagagctcatatgtttcttatcaacaacagttacaaaaaaagggtacttacggtgtttccaaacactattaaaattaaaaaaaaagggggagaacaagaaaaaaaaaactctctttacagaaaaaaaatctcaaacacgtgtctaccactcttgatttattctatagttatagtggaaagctttgggattaagaacaaaaagcagatgagccaagtctctcaacgaccttcgttcaaatgagagaggatgttcctgagtttattagaattacgatcgtctctccatttttcaacggcgacaagcttaccctgccaactcgaaacatcaccctgaagtagggtaactaaagagcataaatattccactgtttctttagatgaggaaagctcctcggttaaccttaagagctcagcacgaagctcctccatattttccgtgcccgtatcatgaaaacacgaacgttgctttttggtaggaataggaatgataattgtgtccttcaaagtacatttgccagatgtggaggacaacatatttggaagagaaataagcagataatagaacacagagtatgataaatgaaccaagcagttagtcttatttatagaaaaaaaaaacaggaaggtgttaa

SEQ ID NO: 33741 - DNA, 1633 bp, Cannabis sativa
  modified_base (93)..(96): a, c, t, g, unknown or other
  modified_base (1389)..(1395): a, c, t, g, unknown or other
aaacacaacttacctattataatgttgaatgattcttgagtgtgggggtgtggtccggttttccaccaccactgagagagagagagagagagnnnnagagagagagagagagagaagcacgtgacagagatagagagttaggagtaaaaatttaattcctatttttctctacttatttcagttgcttactttctgttaactggttttttacgctcttactatatatcctatatataatgttataaataaacccttctaattttttatttaaaataaaaatagctaatttgatttaaattagaatttaaattcaaatataaatatctaataaccaaataataaatatcagttagatcttttattttaattattatctttttaattaaataattatccaataatttattaaaaaataattagttaatttaatttaaattattttaactaataaaatatttaaaccaaattaatcacgggcctttatatgtcaccctacacgtgtggattgggccttcaagcgtgggccatactttaaggtccaaaattgatttatcaatttcactataaataagatttattatttattttaccaataaataataattagttaattcttactaatctcttttttttacaaggactaaaataaatataattttttctatgataatatattttcctctttaatattatttaataataatattatatttagctaatttatatagctttatctaataaaactaaaaagttaaatactattaattatccaattcataattgtcataattaatcaaaataataattttaccaatttctattttgccctcaagaatttatttcccataaaaattaattctcactcaaaaatcatccatcaaataaaaacttcccctgtacagtgttgtatagaggcgactcagggaccatggatctatatttcaaaactccaataaacacttgattattatcgatctcagcaatagaataattcatttattaattctattattactccattaaatatgaaattgcgctatatagaattatatttatagaattcttacttgtaatctattaatataatcaatataagaagttcgcccttcaattattagttcataattagagttggtggaaatactattttacccttctagttatctcttgattccttatgtaccattaatttaatgtgaacagttaacctataacttattatagatttggatccaactgttagcactctcagaatttacactataaggaaactaatatacgatttgttaggttagcttggattccactattgaataacatgtttcaagccactcatgttattaagctcccaaaatagaagttgcaagaatcatcttctctgagaaactnnnnnnngtgaatcaaagaacttaatgaacataaattaagttcatgtatactcaggattcagactgatctactaatgatcatcagtgtgagatgaataactctttcatcgtaaatgacacattaatgaaatatgtttattacatatcggtccagtcatgcataattgaattatacataacacatttactacatgtctatccatatataagatctgaataaaattcaagtacactaagggcccgtt

SEQ ID NO: 33742 - DNA, 1282 bp, Cannabis sativa
  modified_base (510)..(512): a, c, t, g, unknown or other
  modified_base (723)..(732): a, c, t, g, unknown or other
cgactacgatcttcaatctctacatggtgagcccttaatgcctccatctctttatctctccatttagcgaacatacacctatgttcgtcgaacgcgatatttactacaacaggcagttcgtcctgatcatgatgtagagtgttgttatgaccctacatgagtcagagcgcgtcacagagattttgtagttcggtggcatctccaatggtcgtctgggcgttgattttaggcgaaacagtcatatcatgaatgccctggttgggtgcggaactgttcttcccagtctcttgcacacgaggcacaattctagtaataggaactgtttcaccattccctacgcttcccgtctgtccgggagtaacagcagggggaacccttgaactccctgggtcttgtgatgtacgatccagcgtctgtgaatttgctgggtcagactgacctctacgagtttgcaccatcgtgttggcggttagatgtcgaacaaagagcgatttgtgatccttctctcannnaaagcaccaaaatgttgacttcactttttaacaacgacaataagtctattttataagcgataaacgatatgtagtaacagatatatgataaagcaataataagacacaagaattttatataggttccaccccgagcagttcggtaatagcctaatcttcgttatttgtattgacttaagatcaaggaacaagattccttttcttatagctnnnnnnnnnntatctctgaatatataattcttaaataatagtatagtcttagcttagatgattttcgaccaatcccctgcctagtgaatatacatcactatttatagggctaggaagtttgaggaggaagagtttcctctctcgttacaatgtattgatgtcgcccaattagttatactgcggtcgcggtagtaaacgagctatatgtcgtatccacagggaggtaaattacaactaaagattagtataaatagaaaatgatagaaatgtgaatgaattaaaaataatgaaatggtgagtgaaaggtgatgatcagataaagagcttagtaaggtagagatttagttatgcaaattatattctaataccgatattaattcagaacacatttgcaattctacaccattaattacaaccagaagatatatatgttatgagcccaaattaaataatcttaaataaattcaatctcacctctaacttaccagtatatcatattatatattataaatagacaaaataccactgttggtagaatgcagtaaacgacatacaatata

SEQ ID NO: 33743 - DNA, 1725 bp, Cannabis sativa
atatatatatactatactacatgctaaatcattcatttccttatactctctctctctatatatatataattaatgttatatatatttgtattattttgcagggttgtgatgcatccattttactgaatgattcggattctattgaaagtgagcaaaacgctcttcaaaataaggattctgtaagaggttttaatgtgattgaagatgccaagtcagcggtggagaagatttgcccaggagttgtttcttgtgctgatatacttgccattgcggcaagagacgcaactgttgcggtaagcggtccatcatgggatgtgaagcttggaagaagagactcaaccacagcaagcaaatctcgagctgaaaaagatcttcctctattcacagccactcttgataatctcatcagcttatttgaaaaaaaaggccttaatgcgagagacatggttgctctatcaggctcccatacaattggacaagctcagtgtggcctgtttcgttcaagaatatacgacactaagagcgatattgatgctaactttgctagaacccgccaacgccggtgtccagctgttagctcacctaaagcggacgccatgttggctgcacttgatttggtgactcccaactcgtttgatgccaattacttcaagaatttgattcaaaagaaaggccttcttgagtctgaccaagtactcttcagtggtggatccactgatgccattgtaactgagtacagcaaaagccctaagacttttagggctgattttgcatctgccatgatcaaaatgggtgatattcaacctctcactggttcagctggacaaataagaaggatttgctctatagtcaactaaacacaatttataatttaccctaaatttctttcattcatttcaaatgtacctactcttttttttttttgtctttccttccaataaatattacatgtataggtgtatatactgtttcaactttcaagcatggcttgatctcaatttacttaatatataatatatacaaaatttcacaatttccctagaacacaaatttataatcatatttgtgacagagcagatatatatatattgatttaataatatattactcttgcataagtttaatatattgttgtgatcatggaggcatttaacaccatcgagcagcttagtgaagccaatgctcgctgtgagatgagatgagagttgagagagagactgtgagttgagatgagagtgctgtgagatgagagtgtgagtgctgagattgctgcgagatgtgagtgagagagagagactgtgagttaagatgagagtgctctgaaatgagagtgaagtgtgagagtgtctgttcatggtgataaactgagtcactcgtcaacgagtcaccgagttgatgaaagtttctattgagaatagagataattgttttttacaggctttgaaagatccaggaatatatttgttttaaagggccaaaactcagaagcagtaaccgaaaattgaaagaccgttgatctcgggttgctttttgatctggcttctggagttaaacgttggtttcaatttaagtttgaagagattggcattttctgctatttctgtgtttgtcttggtcatcaaaggaaggggggtgagaccagggactggttcgggcgtgttgcggttgacgggaaactctcctagccctaggccgtcgacggtagctacgctgggcggtactggg

SEQ ID NO: 33744 - DNA, 2114 bp, Cannabis sativa
ccaaactctcttcttgccagattgctgaaagcaagtatttttggaatcatgatctattgacatcttcttctggtggtgtgtcttctttaaactggtgaggcatatgttggggtcgtgacttacttgttaaaggtttgcgaatgcaagtaggtaatggtgctcaaatcaggtgtggatcaaacccttggataccagcaaacaatatttttacaccgacagtctattttggtttttgtagcaatctggtttcttattatatcacaccatattatgaatggaatgtagaccaattaagaagtgacttttctacaattgatgttgatcatattctcaaaattcctctctcttaaagtgctacacatgactgttgggtattgcattttgatgcctcgagtgaatattctgtgaagatatgatatcatttggcttgttcattggaaacgcaagacctctcttccagctcactatcatcagcaacatgatgaaaatctttttggaatttaaaattaccatctaaagtaaaaatctttgcttggagggtcattcacaactcaatacaagtagctgcctctttgtttcagaggaaaataatcaattcaagtaccttcagtttatgttctaatgcattggaatcggttggacatgctttgtttagttgtaagcatgctaaatcagtatggcattcttcagactttacttttgattttgcagcagtaagtaggataattgaaggtgattttctaattcaactgtcaacaacacatacaaaatcttatttggaaaagattatatgcaccatgtggtccttttggtttgacatgaccaatataattcatcacaaatcacaccagaaaccagttgaaatttatgcgaaatctatggcatatatctgtaatttttagcaggtttctacttcaaactcagttctttgtttgaatcatactttagctgatcatataccatggacatctcctcctcaagggcaataaatctgaatgttgatgatgcaatacactcatcacaaaacagaatgggcttgggtcaaatcaggggactccaacactaagtttttccatcaaaaggctaataccatacgcaatggaaacaagatcaactctctcatggattccaatggcattactcgcacttcacactctgatatttgcaacattattgaagattactttcaaaatatttacacatcgaatgggattgataatgtcgcattagatcaagtcttgcctactgttccatactctatcactactgatatcaaccattctctggtgcaaccatatacttctaaagatgttttcagcgccttctcttccatgaaagatgatagcagcccgggtttggatggcatgtcagttatgtttttcactaactactggcacattgtaggtcatttagtcacaacagcagttttagaggttttaaatgaaggtgcagacccttcggctttcaaccagaccttgattacattgatccccaaagttaaaaagcctacttctatggcccagttgagacctattagcctctgtaatgtgttatacaacctggtttcaaaggctattgtgttacgattgaagccttttctgtctatggtcatctcggaatcgcaaagtgccttccttcaatctcgccccatcaccaataatgtgtcagttgctttcaaacttcttcactccctaaagcatttgaagagaggaagagaaggatatgcagccatcacgcttgatatgagtaaggcatttgatagggttgaatggcactttattgaaaaaatgatgactgctatggggtttcattatgcagtggtgaaccttatgatttgatgtatcagtactgtttctttctctttctcagtgaatggttctactcatggtcatatcattccctcacgtggtatccgtcagggcgaccccttatccccctatctctttataatttgtgcagaaggtctatcacggttactgcaacatgaagaacatactggaaatctccaaggaattcaaatttctcgtggtgctcctgctatctcttacctattttttgcagacaacagtcttgtactttctcgtgcaaatagaagatctgctttggctataagg

SEQ ID NO: 33745 - DNA, 1904 bp, Cannabis sativa
gacttatgaaaccaaattaattaattggataaataaacaaattataaggaataagctcacagatttagtaaataatgttatttttctctatcactatttcctaagtatagcttagctttagtgatgggcaatcttagctttaatcagttcgaacggcattgtgtatatatatatatctagggtttgatgctcattttttactaaggtaaaaagatggacgatatcggacgacattgtaaaaaaaaacggtgcatttatttttaatattcttcatgcatacataagcctatgtcatttattagacaaaacacacccatatatatttctcagaaaattatacctatgtatatttactctcttagaataattgcattaatcaacctaaacactattattatttttcaagaaagtaggaactttatttttttttaagcaagagcaagaccatgttaaatcaagtcaatagtaaacttggggaagacgttagtggtaatgcgaaagaaaagtcaaactcatggacgataacgtggcaccacttgtcatccgacgtggatttaatgacggggacactcccattctcagccttcaacgatttcaccactcgctactttcacgataaaacgcgtgaccaaatgggttccatgaccaattacgtcattttattttatatatatatatggacaagtttaattttttgacaacgcttaatttcgtataaataaaataattaaacgaagtatgtttggaaccatacacacaccgccgtgtttataacgattaacgagattcatgggccttgtaagaatccttcatttgtatatttgaaaaaataatttaattattaattaataaagtcaattaaatataaatatgtaatatcgtaagtaattagcttttgaaatttttagcttataaattagaattgattggagtattggagggaataataatatatttttcctagtctccttgatgataatttaatataaaattgagaagaagtgtttatttatttatcatatgcacaacgagtcagatttcgccaattaattataccatcattattagtgtattatctttcaaagtggttgaagaaatactcatccctctctttataatttttttgcagcttttttttttttctaaataaaaagttaaactaatattaagaatattttattaacaacgtcgttgttgaaagaaacgtcgacattcaaactatgcgtattgcgtacacacatgtatatataaaatatttatatattatatcatcattattaatagaatctttaaacgtctacagcaacaatacatatgttggttagtatttattattgttgttttaattgttatttaatgtgcttattaattaagttacaaaaaacattgttcatagtataattctgacccgtacagatataataatctaataatataattgcgttatagggggatatatatatatcacctgttatttaatcttccattctcattttctttttatttgatggatttctaatgttcatttatatatagaccaacaatttatcccttcccaaatcccaataggccagatttaatttgtatcataaatgtgtattagttttagctagacttaaaatttattggatatcaatctaagtcctaagaataaataaaaattgtcttgaatataagtattttacttacttcattaatataagacttgatgtagcttttagttgatttttatttcaaaataaaatagtcatttcactaaaatattgaaaaaatcattctatatattaaaataatatatagaatgcaaattgttttatttccatcatgcatttttcgagttctccaattcaaagacatatatataattgtaaataaaaaaaaaattaatgtgtacgtatttcagc

SEQ ID NO: 33746 - DNA, 1349 bp, Cannabis sativa
tgtgtaaaagagtatggcaaacaagaaaaattggaaatctttatgttataattactttccattgtttttctaaaaggataatacactttttctttttaaaaaataataataaaaatatatatttttttgtaattaattgcaataagtaatggcgtcacaatatagtgattctttaaaaaacataaacacttattctattttattattgaatagaaacatatttttgtttagatggattgaataaaaaaaagataatagaattttttgtttaaatatgtaatttaaatttaaattgcaatgtcatgttaaaaatatgtatagtgatatataaataggtctatgaaagttcatccacaggatatattttttatgggaaatctatatcctcctctaagcaaattatataaggttttgacttttgatcatataaataattttataattataaattttataaataatttatctcactgtatattaggactttcaatcccaatgaacaattccgtttcaaaaaaaaaaaaaatcccaatgaacaattcattaggactaagcgagaaatctgggaataggattcaaataattgttgaatcggttatatatattttaggatgcaattttttgacctcaacaattggtttgatagatttctcataaagaaaaagtccaccaattaatatgcgcaattatataatttaaatatgtaatttattaatttttttttataaaaaaatgaatctatgcctatatttgttccttacaagcacttgccatattcaataaatatggttttaatgaagtgggaataatccaaattggggaaaacagtgatccatgcagtcacgtcatgtttcgctgtggtgttttcttggtttacttctaggataaccttggcattctcaattggtatattattttattaaatgaagatgtcataaataatgaaagtgacataaattgatcaataccttttcttaaggtttctagtcaatatgtaattattggattattaatttgattatgagctgtaatgatttatagtagttgcatatgttgtatgataatgataactattttttttttgtatgatcaagtgagtgaatgggagatttgagcctttgaggccattttgcagttactaaccaaagctggaaaaagttgctggtggctaagctgaacgtacgactacacttcttgctcactgtgtagcattttttttttgaacattaagtaattttccaagtaactcccacattttaaccctttaattaatttcatataaaacacacaacttaagtttttgtcaaaacaagaaggttggtggaactggaatttgaaaattaaatgat

SEQ ID NO: 33747 - DNA, 1144 bp, Cannabis sativa
ttatattatatattgtatatattatatatagttatatactattagttgcttatatatagttatattatatatattatacattataaatttgtaatgtagaaatgcaaaaaattttacagtaatattacaataagagttgggttatgttaaagtttaaaatgctcaaatttttataagaaattttgaataaattattttcttttaaatcgatcaaagaataatatatattaaaaaatattatatatatttttttttgtaaatgatttttttagacaatattgtatataaattaacattgtaaaattctttattaatacaaaattacaaaagagaaagatttgaagatatccattttggactaaaagagcaaaagtgactaaaatttaagacaaaaaagagtcaagacattatggtaaacctatactgtcattttttatttttaaattaagattaaacatattacaattgatggcttttggctaatacattatttaatattttgttaatttgtataaatctattgattttgtttggaaataaattttctattaagtgatatcacaattttgtctttgtattaggtactaaatgatgataatgctgttaatgaggcacaatctcctcttgatgaaaatcctatagataatggtacggataagggtaagggtaagggtgctaaaaaaaggggtagacctcctactgtgcctattcctaatcctaagaagaagggaaagtctcatgtttgacttcatttcactaaggaagacattccttcccgagctacagaggatgatgatgaagaacctcaacaacctcgtgttcctaagtctatatgcaactattgtgggagtgattttcattgtgacactaaaaaatatgggactagtgatctatggagtcatttgagaaaagtgtgtgagcttagtccactcaaaaatgaagatgaaaaatagaagattttaagtttcgagcctcttaagggtggcaaggagggggatggccagttagtagttgtggcctataagaaagaagcttataggaccgccctcacacaacacattgtgttagatgagttactatttctattggaatttattttacgaggatcttagatctactcacaagtagatcggaagagcggttc

SEQ ID NO: 33748 - DNA, 1560 bp, Cannabis sativa
cagatggaggacaaacctttcctcaaaggccaaacggtgaaaactgccagatcctagtaaccagcagcatggggggccagccaggaatcttaggctcaacaagagccccctctatccatcctgtggctgacaaaccaccacgaggagcccccatggctcactagactcctccagaagtccccatggctggccaaactcctgtagaagtctctatggtcggccagagaagagcactccctcccaaggggagcgagtcacccgaaggtcaattttcaattgacgagggccaggaccgagtggaaactcccaaaataataatttgagaagtgaagttcatcacttcagatagttagattcaccaaactccagcaattagtgtgatctaccctatgtcaaggcataagctccaccagtccggaagagaagtgtgggcggcgaggccctgcctagcttagggctggtcgaccatgtataagaataagactcaaggctatccggccttgagtatacctctccgaaggtatggctagccaggctttatccaatccaaggctacaactcaaccaaagaaggcgaatcaaccaagcccctacagtagtagatccttctatgcaagcatagttggatcaaatacgagacatgctcaagggcctagctggtccaaagcccttagaacttgagctagactgggcaaggggatcaccattctcggcatacatcaatgccttactcttgcccaaatttaagatgctgacttggaagatgtacacgggaaaagaagaccctcttctacacctgaagtactttgagatccaaacagatctcctacaagtacatggagatgtgcaatgttgaatctttctggcaactctagctgaaatcgctcaacaatggtatttcaagttggccctaggaagatttaattcttgggaagagctctcctgagagttctatattcagttctccgctttaagacaagtacctgcacaactggaggatcttgtcgaaataaagaaaagacaagatgaacccttgaaggactacattcaacgattcatggctaggccaccaaggtcacatgcctgacagaagaaggtcggtatacgaccatactcggaggtatccttctgttgagtgtcttttgtaaagatatcacgaggaccttaatgagcaatatgaaggagttccttgagcgagctaatggctttataaagctggaagaagctgtttggcaagcccagaaaagagagaaggacaatgacgaacaaacaaaaggcctcataacaccccaaacactgtctaacatgccgaccaagatagatgatctctatcgattctcaaacaatgagaatggtggaggcaagcacaataacaatggctctaaccaacataatggcaaaaaaggtaaatttaacgatccctttatgccatgaagcctatggaagaaggagtagaagtggtatgcttcactcttctatcaaaactcccaaagcaaggcatgcccaaacatcctagcatggcaagtcggtaacagatagacagaaggatggcctccatcca

SEQ ID NO: 33749 - DNA, 3828 bp, Cannabis sativa
gtgctgaattatcaccctcctagttgaaaagttgcaaaattgcaatgagcaaacagatatagctgagcacaaaaattgtaagaaactcagaaatcatgaagggaatcggggcttacaagaacagagtaagcccttgcaagagagacaactgttgggtacaaatccacaacagccatggcaacctcttctgtcacctgaggaacctgcattcaccaaatgttcgcttcattttcccggtatatgttattcaaagactacacactaattctaataaatacactgaaaacattagtaaattctaaggataaaaccgaatcaacatctcattttttaccaaaaaaaacagaggaaataatattaacttgaccagtttaatgatgtcttaaaccatttatagaaaagtacctgcataagctgaatggcaaatacgtcatttacagtcattttatccaggtcttcgcacttagcaatgaattgattatacggtgggcagatgttcttgtgtttatggagctcctcagaaacttgtgatttgtagtattgagttattgattgggttatatggccatatttctttagtgtgtcactcaagccaaaggtcctctgcacatcaaaaccctccaagatctctgtcgtataacagctgcataaaaacgaaaaatagataaagagtaaataaaaagagtgatgttttgcaacattaacacatttactacttgtttgtgattgtttgtgagcaaaatggtgtgaagacatgtatatttgggttatactgtagtggtgagaatgttataacaaacaactacttacgcagttttaatactctccgctgcttcagaagagtttgggtccccttccacgagatatatcagcttcttaagtccgcatctcttccaatatgcgaaaaaaaagaccaaataatgtgatacttccataacataatatgtgaaatataagaacacactttagaaaaaacaagccacttcaagaaaaaaaaaatgtatatattttaagtcactaagatagtgaataccaaaagcctcaacttctgatccctgtagcgattatctctgattgaagagcgtaaatcatcaactttcttcctctcgacaatgaaatcaagtacatactcaatgtcatgatctttatggcgagctatccaaatcccatctccaactggtagacgtctaacctatttacaatttcaatgcgtaaatctctcttaaccaaaggtaagaagataagatatgaatcagcaagtataaaacaaaacaacagttcaaatgtcttttgaaaaagagtggagaaacaagagcatatagaaagggcatttgaagattcacctgtatttggatgttgaattgttttttgatgctatcaatgattctgctagaccgagaactaaaccaaaggatcaacggcaaggacaacaaagaaaagtgaggagtgaacatgccacagtaaaacataatataactagtgagcagaccacacaagaacagaaaagctcaggcaatcataatattggggtggcagcaaacaataggcctaattgaattccaacatataaaatgttaaattaccatataatccacaaacaactaaagatatcatatcccaaatattcaaaaaatatgtctcctttctcaagagtaaccaaaatcataaagaaccttaatcaacaaaggtgggtgggtgaagttcaatcagaagttactgaccccttatttgcaaattgctctcgatcgtccagtatcaagattacttcatacacatcttcaaatctttccccaaacatcagtggtggcacagataagatattaaaacctgcttccatgttatttgaactcgactgtcgtgcatgatgatcctgtagaattcaacaaaaaaaattagcaagaactggcactactccaactttacattcttttcaaaataatagccaatggtgagaactgatgcataaggttaagaagggttctaagctataagttctataaacatattggacaattaagctatcaaacataaagggaattgaagattttatgtattcaaaaaagtgacaaccaccctctggaaatttcatttaaagaggattgtgcagcatcaaaaggtagttaattgtatcccactgaaagcctaaaagaaccgactcccaagtaaaaggttaaattattgtattcatctaaatgggaacataccgatgacgagcaaggtctcataacaaaagagctcggcaaggaatcagcaaaactaatctttggcgtatgtccactctgacgggatgaacctgacgctcgacctacacaatgacaaggtaatctagttcacaagtgattcagattattcctttaggaatgtatggaatgtaaaagcatcatatagcaaaaagtttaagttttttacaatttgtatcaataggggttgacgttctacgaacatgttcctctctggcagtacgagattccgaatgtccataaacttctgtttcacgaagatgacataagataggtagccagagagaatttgactcctcactattggaagtttttaagacctcattaaaagccctgaggattcgttccttggaatagcccatttttgtaagctacaaaataaggtaggcaaagaaagattagcattagaataacaacagcaattcgattaattaatgaaacataataatcaggagacataatcttccatctggaataaacaacatatgaataagcaaaatgctcaatataagacaaaacttaacgagaaacttgaaatgtgcgaatagaattctgttatgtacccgatctatatattcgactggtatatctattgatttctgccttctcaaatcagcagaagatgctgctatttctacttctttggttgaatctagctgcgaaagctcaacatcagacatgttttcgatgtccacatcataatgcatttcagaggatctgttatctttggaggattctggcacaccagatctcgtgatacattcacgtgctgcttctttaccttcttgagtgagcatatacctgcaaattattttcaagcattacatcccaactgatacttttgtgcttttctagaaagaaaacaaagacagagagatagtcttactttgcagggcaacttgatttaataacaagccccttggttactaaagtcttcatactcgtccatccactataccagtcccttggtgagcctccaaacggaccaagctttccttttcccctttcaggcctatggaccaaaaaatatccaagttcaacaacatcaacaaaccaaaagtcaggtgatcgaaatataagatcaatccacatacgctatgggcacacgagaaaggccactagcttcagccgcatcaataagctcctgttttcgcataaattcgttctcattcatcgttcccctgaagagtactcaaataaatttcagataagaagtctgataatgtgaacacatacatgagtgtttgcttaataaaaatgattgtgtacctgtagagggtaatcaacaatgcatatgctacagagttcttctgaggcaaatagcgcctagctcctttagacttcttgcctatattatatgttaataacaatatgtaaaactacaaaagcaatccaaaatttccatgtatctatactaaaagaaataaagaaagggtacccttttcggtcacattttctggctcacaactgttttgatcagtcttgaaaaacccttgcataagcttcagaatccacttccccacacccctatatcaaaattattcccaaaacatacaagaaacaaataaataacaatgacaaaaaccat

SEQ ID NO: 33750 - DNA, 1158 bp, Cannabis sativa
ccgtcagatcaaataactccctcatttgatggctgccgtacatcacggattacaatccgtgaaagtacaacaacgggacaaaatcatatcacatatatgctgacttatctcaattattgtttttttagaaatactattttggatcctttattttgtaaaagttattgattggacctactattttgttaaatgtcaaaatagattatgtattttccaaaatagtaaaaataagatcctgagcttaatttttaacaactttttttttaatataactaacttaaagacaagtcctaatacgaacagatacaaaaaatataaacgattttgtcataacaccttttaatcggattatagttaaattttattttgataaaaaattaattcaagatcttatttataacatttaagaaaatacagagtctattttgtcatttaacaaagtagatggtcaaattaataacttttgcaaaatatatggtccaaaatggtatttacctttttttttttattattattattctctcttttgaaaaagacaattattgtgattattaatttgcattcacattatctttcatgtgtatatgtttaaaactttgctactatctctatatatgtaaaaatctttatatctttcatatgaatatgcatgatgtatataatattattctaaactttatatctttgacttaaatcctacctaatacgtatcaacaacctttataatatattatatataaaaacaaaatataaatatgattggtgtttttactaacttattccaacttttgaataaataaaataataataaaaaaaaaaagaagggaaaactagagaggtggtaggtgtctgtatatattctaagtattgtattagagttattatttaattattaatttaaataataataaaagatttaatttaattttaaactatttaaaaaaaaagtatatttaacttataattttattaaacaataaaataattaattaataagtttagatattttaaacaatatgactaataaattcattgtaaagtataattaattaaaatcaaattcgaatttaatttaatatttatataaaaaaaaaaagataaataccattttggaccctgtattttgtaaaagttacagattggaccctatgttttgtt

SEQ ID NO: 33751 - DNA, 2371 bp, Cannabis sativa
  modified_base (130)..(156): a, c, t, g, unknown or other
atatttttatataatactatgttaaactttaatttatactataatattatatatttaggtgtccataaaagttattaccacgtatagttttacatgaaaatattacataaaatacaattcaatataatannnnnnnnnnnnnnnnnnnnnnnnnnngcgttccaaacgagcccttagtaagaaatattacacaattgactccatgaaaaatatacttgatgtcaaagtctcacaataataattaaaaaaaaatatgtaattattgttcatttaaagtggttgttcaaactaaagaacataatgacatttaaaaaaatgaaaaagttgtatactaccctatttgcttacctttgtctattatagcatagccaatatgttttgaattggtaaggttcatcttaaaaattcaagttaattgaaactcaaaagaacttttagaaaattatttcactgattatatttgatagttttttttaagtctttgagatctttatttcattcacccttattattatatttatatttatatatttatatatgtcactgtgagagccttgtgttgtgcattaaaaatgcagtgacgtcaaaagtttatctatatttccctatacatatacaagttagttatattcaatttaggattttttagttacatgttttacaagaataattgtgttgtagaatttaattgcatgttcaaaaagaaagtgtctttctttttttgtattgctcatatggtaatgtaaatagattacttgaaaattgaagtgaataaagatatgttgacctcaaaagtgtccaacaaccaacgcagacgtataaatctgatgctttccacgtgttatactacaagaataataaaataaataagacaaggatatttatagaggtttggtcccctttggttagcgggtaatgacgtactccctttttagttgtattgatacatagagataatactattcagatcaatataggtgagatctgatataactttctataaggttataaagcatggtcaagcaggcagatcactaatgagagagacatatagccttagaggcatgtgagagagaggaggaaagagccccttagccatgtataagagagagagagtgagaagagagattagggttttatacttaaagtgatttggaggctagaattagacttagtttttctaggttagagttaaggacttcatatagaaaagcctaaaccctaatttaccactaaaatattagatatttacatattaaattaatttaatagaaaatactaaattgcctcttgaaagtagatatttctatcatgtttgttaggctgctaagggcgcaattcgcaggtagcttgtagctcacatatcaagctggatagggtgtcctgccaagcaaaacttggccggacatatactatagaatatggttcggccagccatgcaagttctgcaggttgaggtctggccaaccatgctcctgtcagaacctggtaggtcatgtgcctgccaggatcctacaggtcatgttctgtcagctttaataagaggagaccagcctttggatgtggaggccagcctttggaaagtgaaggacaactttctaaatttttcccttgtagaggtcaggttcccttggtcgaatggaacctcccttggtgtgaaagttacttcttggctggccagcttgtgcctagatcttggccgaccatacaagctcagtgttgcttaataagttttccatatcttgtatggagaccctgtcttgctactagcaaggttgcattctgcatgtactctgtcttggcttacatgtacatgccatgacaggtggacataatttgggagaacatttgccccaagtccctgttcaaacatctgctcgaatagggaccttgtagcttcatcttgtttatagtagtctctttcgagcagcctcgtctagccaagtgttggcatttcgcatgttatacttttagatctttgatctcctctctatttacgtgttgtttctcttttttgatgcctcttctttatacctgccattaattagttttacgctttttaagcttttggaaactttttagttatcatttagtttgcagtctctttgctatattgatccttatgatagttttggaatgtacaatgtgactttttgatggaattttggccttcttgtgattcttgactctttaagtcataaaaaatatgaggcacatattggagttttgaaagaaaaacacacattgggatgcaaagcttactttggacagcctaggaggtcttgcttgagacctggtcgaccctagggcttaatcatgggagttggcatggttcagagttttaccctataaggctagctttttcatttct

SEQ ID NO: 33752 - DNA, 1461 bp, Cannabis sativa
ttttcaaaaatttaatatatataataaaaattataaacttggtagaatacaatcctcatgtagttgtccctagattgtggagatttttttttattatttttgttttacgagattttaccacattcccaggtttaataatttatttggacatgtaaattaattaaaagtaatttatggtatcaatatttaaatttaatcggttgtaaataaaaatttaaatttaaatttcgatgtaataatatttaattatatttttagaaattacataaatattaaatgtctaattattattcacgtgttatttttttttgatatatttagattaatttttaaataaaaaaataaaaattaaatgaattgaactaatgagagactactatgtggctattgacttgacatttaagagtcagatacttacatacaaaaattcaaaaaatataattaagtattattgccgtaaaaaattaaacttaaatatttatctgtagctgaaaaataaatttatttatgccataaattatttaattaaaacatatatttttttttattttgtgtttttaccgtactagttaaaaaggtagagaagtgtgatggtgagttgtgaagttcaatggagaatatatactagaattgtacatgtgacttgttttcctttttccataactagttactacactaccttttcttttcttctctgcacctctatatttgcttccttgtgactcttttaattatatatttttttttttattctatcaaaaaaaatttatatatatatatatatgtatatttagaactcctttttggataataacaagaggctatttagaatttttaatgttgatggtaagttttatctcatgtgactaagtgttgatgtttatagaactttagttgaaattttataaaattattgtatgagaagggaggtgtgtgtgagtctattgggtcttatatgtgataggaatactttattaaaattgtatataatgtgtaattttggcacatgggttagtgtcttaaagggtacccaattttgtgtgcattgataaggacttatgtactgaaccaccacacgcgtgcactattgtccgagcatgtgtagtgaggtatcactttatttttttcgaaaaaaattatttattatttttatttaatgaattaaaataatttttaaacgtatataattaattagtaaagagaaattgttgatgtggttgttcaactcaaaagttttattctgtaatatcgttcttcttttattttcagcagtaatctattcaacaaaatgtatttgttgtgtcgttgccaaataagtgtcatatgtataatttaatgtaaaatttaaaaaattcttttttcgtttgaacaattaataagataatttaaaaataatttatttttattttattgatagttaataataagataaagaatttaaattgcacatgtatattgtta

SEQ ID NO: 33753 - DNA, 2788 bp, Cannabis sativa
aagtaatttgaacaatgtgggaaaccaatctcttctgtgggattctcttcacaagtctaatgactctagaccactctatgaccctgcaaagggaaagggacctataatcatacatagggaaagaacctggacctctaccacaaaagtgaagagtatgagattcggagggtgaagatcaatgaactactcctcacaccaaagtacttctaagatgaacaaggtgcttggttcaggtacttcacccgaggtcctaacgactaacagtacaaatacttcccacaagtgcatgggggcatgttaaaacttgagcattcggggtaactccctccacatatcagtctaaggaagactattttgaaagacatggtcgggatggtactgcgagccactcctcacgaagaaaatgcccaagagatgactctatcgtcatacgggataaatcccgagagttaccatcaaggccacacgactaggaatcaaccataaggtcttggtctatcaatgcctttaatcaacttggaagacaaaagagcttgcataacaacatcaataagaagcggccaactgatacacacatcgccacagtgtgtagggctgaattcaacacccttgccactctagttaaggttatcactactctaaagccaatagattatagattagatcaagagtagtgttctcctctcttagataaaatcaaggctttggagatcccttcaaagtttagaaatccagtgtggcatccatacactggcaaagaagactctatctctcacatagacaactacaaagtatagactggcgtgcaaggcattaaagacaattctgattgtcaaatatttctagccacgctacaaaaagtagcacagtaaaggtctcaagttttctttgagatctatgaattcttgggaaaagctcaagcaagcattttataaccaattatccccaacaaggcacagactaatcgagcccaacgatttggtctgcatcaaaaaataagaagatgaacctctaaaggattacctaatggttcttatgttaggatttatgctctaaaagcaagtaattaatagataatatgttggttttatggtactaaatcacgtacgcatcggacgggttttgtattatctgattatcattgtaccatatcccaatgaatctccctatgtgtgtacattaaatcaaaataataaattaaatgtttagaataaatacctcttaaagactatcagggtattctcgaaacttctcgtatataatatcctataatctagataatgcaatttgaattcacactagtgtcttccaaatcgttccaccacacataaggaacaatgtgggctattacgataaagtgtataatatattcttattgatttctcaacccatgagcaagaacactttcagagagaaaactgatttatttttctctcttatttttgaaaattacaatgtaaaagtgatgttcttatttctcaaattaggcttctatttatagtagttaaatttctttaataaaataatatttaattatttaaacaaataaatatttataaccgaatttggttattgatatttataaaggaatctctcaactacttgagagattatctcaacaaccttaaaatatctataatcactttttaaattagatatttacctaactagatcaattaaataattaaataactgaaaaagacaattttcattatacaaaaataaataattactattttgcctatttaaaatatatttttttgagtatcattatactactatttatccctacgtgcccttgacagtgtttcacagtggcgattcggggaccatggacctataattctaagccccaataaactagcttatttattaattatcatcaaccaaataatcttcatttattaattctatgattattccactaaaaatatagaattgaactcttattaattttagaattatatttactgagttttactgtagtgtccattgatataattaatattttagtaattagccctccatgtattggtttgttatttattttggttaaattaccattttacccttctaattacttctttatcctttagtactattaagtcactagtggaagtataatttagatcccatctaaattttgtgcacaatattctagttctagaatttacacttaaagagaactagcattcgatccattaggaaagtcaagattccataattgtaaatcatgttcccaagcatctactttattagattcccaaaatagtagttgtaagaatcatcttatttgagaaactttaatgagtgaatcaaagaaactaataacataaataagagttcatgataactcaggatttcagctgatctactattgattatcgttatgatatgaattggttctttatgataaatggcatgttcataaagggagttgtattcatatcggttcttatcatatataatatctattataaatagcaccttcactttgatatcatactacattcgtaatccgaaccgagattacttgaaccgaagaacaggcatcagtgagctgtactagcaaccatcgattaaagattagataactttaatatgttgctgactgttttattcatagctaagtggtcctaattctctttacaactacaagcaacaacctcatatatgaataaggaaatttttaatatttaatacaaataattcaataataataatattaataatttaacattcatacatatatcaaatttttaaatctttatttaataatcagaaatat

SEQ ID NO: 33754 - DNA, 1992 bp, Cannabis sativa
  modified_base (183)..(200): a, c, t, g, unknown or other
  modified_base (604)..(604): a, c, t, g, unknown or other
  modified_base (853)..(854): a, c, t, g, unknown or other
aaagttaaagttgctgaagtcctacttgcggtttaccatgttacaagaaaggtttaatggattagcatcgatagcgattgaaaatgaagttttggagacgataaaatatgaatagttggttgatgaaattgcttaaaaaaaacgttcgaatgatggccctttttaaatagaatgttgatattnnnnnnnnnnnnnnnnnnaattaataataattttaataaaattgtttgagtttttaagtgcttaaatatgtaaaatatactttcgtaatatgataatatttaaaaatattatttacaaattatattttttttttgtgttaggggcctattttttaaaattagaacaggacctccaaaatatttgagacggtcctgaccatccacattattaaattctcaaaacagaagtcataagaatcaacttctctaagaaactttaacgagtgaatcaaaaaaactaataacatgaacatttaatgattacttaggatttaggctgatctactattgatcattgttatgatatgaattaggtctttatagtaaacgacatgttaataaagacaactttattcatatcggtccttgtcatatataatctntattatatacaacaccttcacttcaatgtctcactacatcagtattctgaactaagattacttgcaccgtagaacgagcatcagtgaaccgtactagcaactattgattaaagattccataattttaatgttactgactattttattcataggtaagtggtcttagttctctgtacatctataagccacaacctcatatatgaatagagaattttttgatattgaatataaattattcaataataaatnntaataatttaacattcaagcatatatcaaaatgttcactttttattaataattataaatatctttataggcttttcaaggcataaaccttaacaatctctcactttccctaaaagtaaactgggcatctctcttagtttatatgacccatacaagattttgttggtagcagctttgtgaatggatctgccaagttatatggtacttcatctttatatgcttgcctctcttgtggctccttggttccttggagttggccacctcttcactgttgtcacagtagagcgccattagtttttctacttctggaactacttccatatcaatgtagaatttcttcaaccaaactgctcccttagctgcttcgcaagctgctatatattcagcttccatggttgaatctgtactactgatttgcttaatgcttctctagactacaactcctccaccaagagtaaatattgaccaagatgttgactttcgactacctttgtctgattgaaaatcagaatcaatatatccagtaggatttaactctctactggaatatacaagcatgagatctcttgttctctgaaaatacttgaaaatgtgctttacagctatctagtgtttcaaacctggattagattgataacgactaacaatccctataatgtagcatatgtaagtccttgtacataacattgcatacattaagctcctaaccgttgatgcataagggtactttctgatgtcctcttcttcctgaggagtctttggaaattgatcctcgcatagactaattccatgtttagacggcaactgtcttttcttcgaattctctattgagaatctttcgagcaccttatcaatataagtttctcgagaaagtgttaacattctttgctttctatctctatagatttttatcccgagaacatagcttgctactcctaaatccttcatttagaatttatcgaataaccacttctttacgtctgataacctttctatattatttccaataagtagaatgttatcaacacacactactaaaaaaatgggttttactgatacacattgagtgactttaaaattatttagtgacacttcaccgcgcgtcactaatgtgggtgactggaaagacaatttttagt

SEQ ID NO: 33755 - DNA, 1125 bp, Cannabis sativa
aggtgtcttacaaatatttagagatatttcataatcatttgaaagggttattttgttagactcacaatctggttcggtatccaaaagagttttttaatttatttgttattcatgatcgtgtacgttgtatattttaggagcacctgtaaatttttagaaaatttcgagtagtttataatgtcaaaaataaaatttaaatattttattgcatgcacaactgttcgttcttacacacatattaagtaactttttgaactttattttccgcattgtaaaatattcagaattttttgaaatttataagtaatcatatatagctataacatacacgatcatgaaaaaaaaaattgaactaaaaatcttttttggatgccaaccaaaacagatatagggtcttctacctactagaacacccttttaggggtgtactacataagatttcagtagaattcagcataaaaaattaatgttgaaaatgaaaaatattttggaaataattgtaccaccttaaagggttatttcgatagacctccttttctgttttaaattattatttttcttgatcgtgtacattgtagttacttagaatcacctgtaaattttcataaaattttaaatagtttacaataccgtaaataaaattcaaacaattgattaccacgtctataagaaaaaacagtcgttcgtgcaataaaatatttgaaccttattttgaacattgtaaattatttaaaattttttgaaaatttacaaatagtccactgataagattaaaaatatttttggatactcaaacaaggagtctactgagaaggcgtgcactaacttttatcagatcaacttatctcttttttttttttaaactatcatgaaattatttttatttaaaagaaaaaagaaagtctcaactaactatttgaaataaaaataaatttactaattattttttaattaaaaagaaaaaagaaaaaaaaataaattatgaaaaaaattgaattaagtaaaaaaaaaaattaaagaaaagaataagtattaaaatattattaaaatttgaagaaatatgtaaccatgtagtaaagtttatattcactatcatactccttactaggggtgttcacaaagtat

SEQ ID NO: 33756 - DNA, 1108 bp, Cannabis sativa
  modified_base (344)..(348): a, c, t, g, unknown or other
acttagtgcgatgcacccgatcaacagattgttgcaaccacatttgaagtacacgatggagattaacgctcttgctcgaaacatgttgattagcgcagggggtcttattgaaagtatttttgcacctggaaaatattgtctcgagcttagttctgttatttatgataaacaatggcgattcgatctacaaggcttgcctgctgacctagtccacaggtatcactacaaaaatcttatttttaatcataacaaacttgtgactaaaagtaaaaaagtaatgagtaatcataaactatcattcttatgttgtgactaaaaggttgtgactaaaagtattagtcacnnnnnttacaatttgttgtgactaaaattgaattggtgaaaatttgtatataaatactatgttttagtcacaagtaaatttttaacatttattattttatttccaaaaatttgaagtttattaggaatacgtttaccaaatgaattcaaaaaattcaaattttgtaaagatttgtgactaaatgtcacgtttcagtcacaaaaaatctatattgcgactaaaagattgttactaaagttatttttttatatatatatatgtgcaattatatggttgagatttattacacattaatcgtagtgtttaactaatattaatgataattacaaaatgtgtagaggtatggcggttgaggatgaaacatgtgagcatggtctaagactgacaattgaagactacccttacgccaatgatggtctcctaatatgggacgccattaaagaatgggtcagtgagtatattaatcattactatgccaactcaagcgagattgagagtgatgaggagctacaagaatggtggaaggagattcgaacagtcggtcatgctgataagaaggagggttggcctgacctaaagacacgcgaagacctcatagacattgtgacgaacatagcatggatcgcgtctggtcaccatgctgctgttaactttggacaatatgcttttgcagcctatttcccaaaccgacccccggtcacaagaaccaacatgccttcagaagaaaaagagtcaaaacctgaggtttggaaagcctttaaggcg

SEQ ID NO: 33757 - DNA, 1004 bp, Cannabis sativa
  modified_base (48)..(75): a, c, t, g, unknown or other
aaccatgcaacataaaatgttatgtctgatctttattaataagtaaannnnnnnnnnnnnnnnnnnnnnnnnnnnagggcataaaacccaacagggtcctcatggaattagtggtccgagtgcttgggccaccctcaggttgggtcctcctggagcgagtggtccatttaggttgtgagttggaaggcctcctggagcccattggctcttttccagaacgctgaggggtttcttcatgtggtatgtcaacattctccccgttgccagccatgaagaaaattattttttgtatgtaaggagggtttttctgagcttttctcacgaaggctctcaatgaaaacaccaaactgttaacgcaaatttttcgttaactatatttgaacctgagtaatgataaacttgaacaaaaattaaaaatggcaaagaaaagatcataacacaaaggtttttatgtggttttgcggttaaaattctgcataatccacaagtcattcttattagatttttgatacagttctcaggttttttctctaatgatttttttgttcctttttcagtgtaacttgcctctatttataatgacatagtaaggcaattaattacatagtggaatgatatcttacaacaattatcccctgaaattgtggggtttgattacataccacgtaaaataaatgttgttaatatttgaaaatcacacagctgtgataggtccgcttttattgggtcaaggtaaacgtgtattaaatatgttgtaaaccgtaacgttttgggatatctcgctgggaacacggtaacaatagccttcgtagcgagctggaacttttctcatgtcttttcgaggttatgatgtaagcctcgtcgttcttgtgcttggagacataatgctcaatctgaaaattgcagttcttcgcgagaaggtggacctcagtagccagcataatttgaatgtcagcttctatctaagagagctgattcgacggagctgtgaaccccattgaaag

SEQ ID NO: 33758 - DNA, 1742 bp, Cannabis sativa
  modified_base (1431)..(1433): a, c, t, g, unknown or other
acataaacacgatcacagtattaaaattaattaaggaatgaactccttataattctatataccccataaaaatattaattagaattaaactaataatagtaaattaataaatgaaaaaaaaattgaaatggaggacgtggttgagccgaattgaaccactctcagacgactgttcttgaacccttcacacatttatatgcatattttaagtatatataattttttttcgaactaagtatatctatatatactagattgaagttacgtgcaatgcacgtatacttagttacatttttaggtttttttattattataacttttaattattataatatacaatattatttaaaaaaaaatgtaggaaaatattagaaatagttgtcatatcagtaaagtcactcaaggaatgtattttcaaccataacccaaaagacaataatgagtaaaaaaaaatagcaaggaagagagcaatgataaagctcttagtggacagcaaattagtacaataaaagtctaatttttttgaaatgttattattgccctttataataaagaatattataagatggaaaagagaaaaaaaaaattgattcaacaacaaagtattatagataaaaataatagaatttgtaaagtacatgccatttctatatggttattatgttgaaactaaaaaatggacgcgtacattttcaagtaattgcatgattatttggcggaatatatttgtcattgttagttcatgaactatatggttttgaggaacattacgaaaggcgcacttagcctgcaacaatagttaaaatgagttagtcagaagaataaaagaagatatttgatatacatatacctaagtatctagcattgaaaattcattacttagctagcaatgaaaaagaaaacaaaagattaaaaggtcttgtaggcagcataactgatctgcgtacaatttcaaaaaaaaattatgcttgaagtaaaaggagaattagttttgatcaaaaatgttttaccctcaatctcaaagtacaagtatgtcattgtttgttatttaaataaatagtttatcgatagtttagtagtggaaagataacatgagttaactagcaagcattagttttgttttattatcactcaactcatttacgcattaattggcttcaagctatgtgagaaaaaattcatgttacaacaaaaaaagaggaaaaattcaatacctttagtatgaagtcattaacaaatatttgcttcccacctaaagaacagtattaagcagaagagatttaatcacaaaataaattttgaagattaaagctaatgtggattaacttgcttactccataagtttaacaacacatgaatctccacagaagctatgacattgttacataatatgtataaaatggatcaatgacttgtataagaacataaaannnatgacattgttacataatttaaaaggttttagcatgtgtttagtaattgaggtttaccccaacatagtttacatatattccattatagtcttgctgtccgtaaacttgagaagttgtacaagagcaaaaggaattagctcaaatatataaaataataaaattcataaaatatcatacagaagcaataatgaaccttctagtcctaacagagcctccaatgagtgcaactattaaactgggtgctacaacaaccagatcgaggggtcaaaaaagaaaggtctattctttttaagaaaaacatgttatcaa

SEQ ID NO: 33759 - DNA, 1874 bp, Cannabis sativa
gtgtataagatccattcattccgtgggtgtaaggacccaatggaggcttgaagcggggacgttacatatctatttgcttatcagatgaatttggagaaagctgctgcaagttataacagttgactttaataccaacttaaaggagacccaccagcaactatatatagggattcctttattgtcaaagacaagtctgagttgagagttctaatctctaatctccaaagctcatactttagattcagtttagagagagagagagtccaagatcataatgagtgtgtgtggagggatgtaaaagggagtatcactcttgaagtgattttcctcaatgtgagacatttctttgtaattacttactgtgttgagttgtaattttggactcattccattgtgtactattggctattcctattcaataaagattcattattcattcattattgaattaagttttctttgtcttattttcaattaagttcaagttttagttttgtgattgattttagttttgaattgtgtttttttggacattattactgctgtaacaacttgttttgaaggcgaggatccaccacaaacttattaactaattttttgtttaaaaaaaaagttattggagggatatggtatttatgttttaaattaattatatgattgaaggaaggtattaatccagcttaatatgactcatattgtatacaataaaaccctaatcaacttcaatttctagtaaattagagaaagtgattagtttcatcaaattaaaaggtatgagtacaaaagtgattagctaaggaaaaagctttcctcacaattgaactggccatttggagtcattcaagattaatcgaaatgctataataattattgatcaatcttgtgactttgtgactcaaaataggctaaaaagtgtacgaaattttatacaaaatgtataattttaaaaaaatgttgtacaacacaaaaattttgtagtaccatcttgaattgtactattaagatatttggattgaaattttttgtataaaagctaaaagtttaggagtacgatttgatagatattaaatttcggaggtacaattttgtatatggacaatcgacatattaataaatttgaacagaattggatagaagtctttaaatttaacaatcttaatatttgaaggaaatttttaaagaaatgagaagtttgaggacatgatatggtatattgtggacaatgtcccacatggaataaatggtagagaattgagccaaagatgagctactccactcattgccaattggttatgagatggaaccctgtgattctcaacatggtacatgtcaaagttcgaaatttttttttaacgacctaaaaaatttggtaacataatttaatacatattaaaattcgatagataaaatcctaactaacccaagatagttaaatatcaaatcatatacattttaattgaatgattattataaaacttcactaaccatttccaaaatttcaccttgtaatgatattgagaatcactaataatacctaaataatttagcaaatctaaagattttaatgtcaaaaataaaactttagtattttctatagttttctaaaaggtaacaagtaaattaacaattaagtttcaactttcacgtgccaaaaagtcacaaagccaaaatgttcaatcaaatcaataaaaaacatatctttttcataaaaaatgaataaaaattacatctttacaaaaaaagagaaaaagttcaatctttgaaagtgtcaaacaagtttagacaagaagtcagagacaataatctctgccatttttaagtgtaataaagaaaagcttcaagcttcaaagctaaggtgggttatggctgattcc

SEQ ID NO: 33760 - DNA, 1345 bp, Cannabis sativa
gttacacctgaactcacccgaaacccggatatatgtaattttttttatacattttttgaaaacatgaacttaaaacaaaaaaaaaaaaaaatctaaataataatatatcattttttattttctttttcttcttttattttttgtcttagcattttttttggttttttttatgaaaaaatatataaaaataaaaaatttcaaaaaaaaaaaaaaaaagaaagaaaaaaggttagcccaatccaaacccggtcaaaatctacctggactcggttcaaccagaacccgacccacctgcacctaaaacccaaaaacccagtcacacaaatgggttgtcaaattatgaattgttaaagtaagcgagctgtccaaaaatttagacaataaacatataatgtccttaaacaacacatcaaaagagctagagcttcaatttgtaacattgaaaaactacacaacaactcattaacatatcaagaatggtccacagacatcaacaaaacaaaataaaacaaagaaaagagaattaatcccctagtaatgatattaaaaactaataaaaaaaaactcaatagttagaagataacaactttcaaacaaattatatttaaataaatttatcagcaaagtgtctgtaacagtaagtcctccacaaaattgaccaacaaaataacaataaataaaactctattactaaatattttaatgaaaaaataaacaatgtgaataaagatggtaaaacaatctatattataatatcaagacttaaacttatttgtaaaagccatgagtacaaaataaaacactactcttatccattgatcaaaccacaaatctaccttaaatatttaaggagcaagctacacaaaataacacaaaaaccataaaaaaacatcaaaactatatataaaaaaaaaatagtgcaaaaaactagcataatcttactatcatatatacttaaaactataaatagaggaacaaattaataagaaaaatatgacaagtaaatttgtaagacaaaactcagatgtgcagtacaatatttgagtgtgttacaaattacaatcattactctaaataataatgggagtgtttttaacaaaactttgtggtgtgaatataatttccatttgaaaataggctaaagtgcaaattacacaataataaaagaaaaagggtattttgcaaagaagtcctcaaaaaaacagttattaatattattttcatttatttatttgatttttgataataataagattggtcgcccacttagttggcttcccatttgagtgagtttcggcattctatctatgttctcttctctgctctctcttctcttctcttctct

SEQ ID NO: 33761 - DNA, 3005 bp, Cannabis sativa
  modified_base (907)..(909): a, c, t, g, unknown or other
tgaattttatgttttattatttggttttacgcttgattgtgttttttatattagttttagtttgttgaagaagagaatcacattttcttgatgaaaacatagtgtttctcggggtttttggtatttaaatgatcgattttgcaaaaaggaaccttgtggctaaatttctcaacttggcgcaatctggaagatgtaaaagttcaaatttccaagttttagcttcaaaagtcgcaacccttgaattaaggtcacgactctccatttcttacagggagcaatttttgaaaactatccaagagtcgcaaccttcccctggaagttgtggtgcttgagaaattaaaaaaataggcgtatctattaaaaaaaaacaaagtcccataactctcgaagtaatgtcgtggtgcttggctatttttggcagtcaactattttcttccttaaaagtattggaggctaggtttttgaaatttattcaaagttggggatcgattctaaacaaggagggacgactgagagtggagaacaccattggaggattccattttgtattttcttcatctatctttacttttttcatgtttgtaattgaatcattgtgctttagaatgattagtatgaactaaattatcttttagggttgttatgtgaatctcttgaacctcttttgtggattaatgcggtacttattttcttctctatctcttattcaattccttacaatctattttatctttaaaattatttactgaccatttataattgttattgttaacgtcgatttttgttaaccaaaatttgagcatgaatgataaacttgcacaaaaaaataaagatagtaaagaaaaaaaaagtatgaacacaaaggattttttacgtggttttacagttaaaattctgcatagtccannngtcaatcttattagatttctaatggtttttcaggacctttttttcttatgcttttttcatcctcttttcattataacttccctctatttataatttcatagtcaggcgattaattacagagttgactgtaatctttacaacaattatcccctgaaatcatggggtttgattacatatcacgtagtataaatacagttattatttgaatatcacacagctgtgattaatccgcttttactagatcaaaatgatttgattaaacacattttaaatcataacattctgggatatctcgacaggaactctgtaccaatgaccttgatagcgagctggagtttttcccttatctttttgaggttgatgatgtacgcttcgtagcttcttcgcttaaaggcataacactttatttttacaatcgcaattcttgctaacaaagagtacttcagcagtcatcataatttgaatgtaagcttctgactcgtcaagactataagtctcactgaaagatgtctgaagttgattggtgaaagtaacaggagcgcaccttcctatagcgagataggtgcctcgcttattaggtcttgagtccacccggctgttatacttagtttgtatattatacgctaagtgttttcccagtcattatgcatcgcttacgtcttcccatgcataatgaaattgatgtctcgacttgtgtatccaatgacgtatggtttctcgttaatgcatgaggtaacagtttgtatatctttatctcgaataggaccttatagtccacaagttgcaaatatactctgtcacttccgcattcaatgagttattccattaaatgtaattaccgttacacgcatcaatccatattctccttaacttgacacatgtcctccattaaagtggtagccaaatttcaggtataacagttattcatgaatcaaattgaaatctaaaaagtaaaatttgatatgctttgattgtttgaatgcaaattcaattttgaacgaaattatgtaagttatttgcttaatttttggagttgttatgtttaatgcattcttaatgatttaattttgccatagaaatatagggagttattatttagattaagtatgtaaatcttaactggattatgaactgttttacaacttggattgaataagaagaagcagatttgagttcatgcattgggaagtaaaagagtagatagtaaataatcataattatcttattttttttctcattgttattttatttaaaattccatttcaattactttgtttaaaaattgtggatattgtttaatcaaatataaatgaaatattaattaattggaatttataatttagtctttgaggatgatatttggttttactaattttattacaaattgcagctctatgcactagcatagaaataaattttgcagcaccaactatatactcatcaaaactattgtgattacaccaagaatcttcctcttcgatataaatatgtgcaccaaatgatgtatgatcataaggatgtggttggtgagacttgtacaaagcctttcatttttttttggaagtctcactcttgtaaaaagcataatattagaaagcttcctccccatcactaaattttagtttgataaaattactagtaccttcagtagcactataatttacattgtataatgaaataaaatataaaggatacaaatattcaaattgacgatgatcatcttcattcatattttttagttagtgtaaagttcaactatgtaataatttaagggtatacacatgagatattcccaagacgattgaaacaattgtcaaggtaccacttcctctcacactttactagaactctccgaggtcactaaaaaagtgtagatgatagtctatcataaacctttaaaattaatatttcctaaacaaaataactcaacttttataactttcacaattacacaattatttttgatactattaaaattttatgatttttcttaaggtaaaagccaaactaatttaaaagatgagagtctagttccagaagcaaaagtatactaaagaaaaaaaaaaactaaagttctacaaaaaaaaaaaaaaaaa

SEQ ID NO: 33762 - DNA, 4201 bp, Cannabis sativa
attggaaaattaatactaaggatagaaaataaattttaatttttcagatctttcaagagtataattttataaatattaaattaaaatttataattagagtcatctaaattagtaatattaaataaataaatatatgttaaaataaatagattaaaataagtatcaaatgaaaatacaactcttttaaaataatgagctttagttataagaatattcgatctccactgttggtcctacatggttaattattttcaatataacattgagacactagacttcgtctcccttatggatggttatttgttgtagcatttaacaccgtaatgatctcttatgataagtattttgtaagttttcgtctctattatcggcataaatttaccctcctcgcgagaatgacttgtctatagagagcttgccgtattgaaggtggctcgcaatattatagtactcgcagtaccgaaagaaaggatctcgcaatattaactgaaagagacctcgctatattgagaaaggcacacctcgcatatttaataaagtcgcaatatcaacaggaaaaggtgcgaacacgcaccaatcaacagaagtcaacagtcaagcattcaaggatcattcatgacaaacgttacacatattttataaccgttgtaattaattcgattaataagcttattattattatcattattattattttgtaacggtcttattatgaccattatgtgtaactgatgcctactacctataagtaggggcttccccctccattcaaagggggctgatctgaataaagaaacagagcgagagtactcttttcaacaatggattaggcaggctgagctcgaagctcctgctgaaccactatatttttctgtgtctattttatactatttataatactcgcatacattatacactatattctttgagtactcgctattctaagggagtacttgcatatctattttttggtattcaagcaacccttgaatactcgcacaaaattggtgttgtctaaattcctccgacaacattttgcgctgtctgtgggaatgattttttataatatttctatgatttttcggcgaacaatcatgatacaatgaaccgagtatacatagaatcagcctctgtttaatcagacaaaatgtgagcaatctcatccccgacactcaaagatcaaccaaaatcaaaagatcatcaacaactctgttcagagcaacacaaaaaaaaatcccagaagaaaattcaaatcagcaaagtcaaatgaacatctccgtttgagattatccataaatctacgcgaagagataaacaaacccaacctgagaaaagccccatattggcaaacagagagaatcaaagacatagaatatattctgcaatgaaggaatgacttttaccactatctcggacttcggagccgcccagatcttgaggatgctcagatcctggggctgctcaagtccaaaagcttgtcgagtgctattcctcctctcttggagccacctaaaatctgagggcgctcggatcatgtgaaagaagcacaacgacgttggactcaaaaattccttataagaccatagctgataatgaagaggctattctcaacaaaggatcgcaaccttggagaatctcaaaaatcaaagtgaagaagtctgcattcctccgacaatcttttagagaaacacagtcatccattttgttgtttttctcatagtcggaggagaagataatcagagaatccaaagcgatactctatgtctcaaataaaaacggttcactaaacatgatgcagagaaccctaaatggtacctctagtgaaacgacagtaatagagatgccaatcgcttagctttcaaaaacaaatcaatttcatattaagggcagcaggagaagaaatccaaagcgctgttgtcgctttcgtttctttcctatgaggaaaacaattatggtgatttattaatcgtatatgtaattgtcagcgcttgaagataacacccatttgataagataaaccccatacaatttaattaggtctgaatataacaacaagcccaattctatttgttggaagcccattagttatatcgtgtatttggtcattcaagcataattaatggagaacagaccaacttttttccattcaaattagagatccaattctcggagtctagatgttcggcgtggccaaaagcaagtaatgaaatgatgtttggaattcaactcccaaatgcttgcaggtttattttttctttattcatcaaattaagttagaaatattcttgaatatatttttacatatgaacttaattggtgatacaacaatataatatattaacaaataatggcgatcctaaagtgtgctcattctcgcataattgcttaacaaattattattgcgcgtatacataatcgcaaatggacaagtctaatatagtgctcatttttacattataatttagaaaacccactatggtacttctatttgcaaattggcgagccctacaagtgcttattttttgcaaaattatttgacaatctcataattatgcttatgttctctcaaaagagacaagttcaaacacttatttttgtatactaaaatgccaagtatatggcaagctcgcgatagtgctaaattatttttactcattagcacatcgcagatatggccaatgcctcgattaggcaccacttcgattcaatcagatagcacaaacctaaaaggtttgctggcgtaacatctctaaaatatgaaagaattgaaccttactgaaaaggtttgggccatgaattaattaccgaaggtaaaagacttatttgtctcattttagggcccgatggcccacttggtaaataccaccctcttatatatcggatatataaaagtaaagaggcacaacacattagaggaacgagaaggaatcaatctatacttggacgctatatgtgtgaatagcccaacgcctacagattaccaggtgcactttttcttttattttaatcaagtccaacactttggtcaaataatcattttatatttcatacattattatccgttaactcctgaagggaatagaaatgcatctggatgcatgataaacctatatttttacatgttctcattttatttgcaaaatagagtgaaacatgacacttatttcttgcattattatttatgagcgtattacaatacccatgttttcataatcgcaaattggcgagcccaatgtgtgctcatttttgcatgatacttagagctaactataaggctcattttcgcatatgctcacaaataattgggaagctgaaaatagtgctcatttttgcatgattaacaaaacccacgattatgcttatctaatcacaaattaacgagcactgtctgtgctcatttttgtatgcatatttagaagccaaatatgctctttatacatttattcatgtattggcgagcccaatgtgtgctcattctggcataactattttgaaagtctattgcaataattattttaataatcataaataggcaagtccaaagactcatttttgcatgataaaataacaagtttattgcacacccctgatggttctcggtactttcaacacttgcacatcgtatatatggccaaatctatgccttatttggacgattcataatcaaaatgcatctccgtcctaacgggcagtacagaccccaaagagttttgctgacagggcatcttgaaaatataaatgatgatcgatagtaattttaaaaacctcgataaggtgaaaccaaagatcacctgcaatgtgatagatcaaatgtccctcgagtaaagttcaacgattagacagtgacatgtcatcacaagaactaggggcatgataagggaacgattcccaaaacattttctcgcatgatcaaaacttgcgagaaggtgcgaccgagacagggtctagtcgcacactatgcatcacatagtaaaaagaataaaagcagaatgtagagagaagttagcacagtcgcaacatatatctagtatatgcgatgacccgctgtttctcccccgcgcctatgtaaagactgcatctttacaagcgttaggtccgaatgataaatgtgcgcgacaaatcaaccagaactcacgagttcaatattgtccgtacatgaatgcccaatacgcgacccatttagtcgcaagcattccatgaa

SEQ ID NO: 33763 - DNA, 2221 bp, Cannabis sativa
ccctttgcaggtctggctagccattaaagagtaatgggtagccagaccctgcccaatgcaggtgtggccggccaaggacaacagacatgtgtaggcctggctggctaaagccaacacctgtacttgggaatggctggccagggtctgcaattcaacacgagtctggccaaccttaaccatactcaatctcagagtatggccgaccatccctatctctttaaaatctgcaacccctccaaggagggccagttagacaagtcccacaacaacagatccttttgtgtaagaacaattggatcaactcaaggacatgattcaaggcataggtggtctgaagccttcagaccttgaactctatcggtcaacgtgataactattcttgacatacataaatgccttgcccttgcccaagtttaagatgttggtatggaagatgtatactaggcaagaggacccgttggcacacatcaaatacttcaagatgcaactcgatctgtagaaggttactggtgatgtgcgatgtcgcatattctcatccactttatttgaaatagctaaacaatggttcatcaaactcaccccaagaagattcaactttcggttgagttctcttgtgaattttacacacaattctcatcttttaggcttgtaccatcgtacctagaagaccttgttgaagtcaaacaatgacaaggagaacctttgaaggattacatccagatgttcatagtcgaggctaccaaagtcaaaggccttatttatgaaggccgatatacggccatactggggggcatactcccattgactgacctttggacaaacatctagaggatctctaccaacaacataaaggatttccttaatagagcttatggctttatcaaactcaaagaagtcataagacaggcctagttggggcatgtcaacaacaggcagtcgcgagacatcttgcagtctcatgacctacgaggcgcacttccagacaccaacaactctacccagagctctagtggcaaaaacattagaaataagtgtaacaccaataactctaggagtaacagtagcaaaaacggaagtataacacttctcccatgccactaaagaataaggaagagaagtacgtctgctttatctctttgacgaacaaacctattaggccatcttaatggccactcaagcaaaagtcccctacggaaaaccttttcctatcaaaagggagatgagcaagaaggacatgtttaagttctggagatatcacaacgactttggtgatgacacaaatgagtataagaatctaaagagggagattgaatacctcataaggtgaaacaatccccacctgtatcattatgtgcagaacgaccaaactcagaaacatggtgccaagaacagggatctaatgccaccaccagtggcagaacacctaggggtcatcattggtggaacccacattattggcgagaccagcaaagctagggagcgctatgctcggacactcggtcacaagcctaaaagcgatatcctcgctattgaagataggggctctaagcaaccaaagcttatagagcccacgatctccttcacaaaagaagacgctgctaaggtctgtttaaattcagtttcctacacaatgaccccatggtcattactgcacaaatcggcaacattaccatagcaagatgcatggtggatgatggagcctcctccaacattcttttcaagttaacatatgaaaagatggggctccaactcaccgacctagcgccctgcaaccaagtgatgtatgacttctttagccaaggcattgtacttgtcaagtatataaggttaccactcacagttggagaaactacaaccaccacaactctaatggcacattttgtcatgatcaacgttccctcgaccttcaacgccatgataggccgaccaagcctcaatgaccggaaggcggtcacatccatctaccatttatgcccaaatttccaagaaacgcatatggtggcatgtgtgattggagaccaacagtcttcctatcactattacaacttggccctatccaaagccaagaaagaaaagatgcctacaaagggccctgaaaacgagcccagtaaagggcaatgaagtctagcccgaagcgaggacacaacatagatcctcacttaggggacactataagaagctttaggcttgtagaagagttggaagaagtggaggttgatcc

SEQ ID NO: 33764 - DNA, 2216 bp, Cannabis sativa
aaaccgtaaagtttaagtggtttagccgtcaatatcctttaattatattagtttttagtttttttattctttttttgtcagccccactttttacattctctcttgttttagttcttatttttatttttctttcttttgtttatttgtgtcagcaacttaagttttttctttttttttaatctttaccatacttttaaaaaaaattgtagctgcatcataataatttaaattaagaatagtatcattataattatttttaatgtgatccattttaatgtgcgggaaacatatgatttttaaccattatcagataagatatttgagatgaaaagcaacactataatttatattatattttgttaacaaaagaaataaattaaaatttagtagatgttattaaaaaaaacaacactaagatactagttggttttgttttaataaactttattttgatataatattaatttatatattattattattattattatctacttcggttagttaatttttcattttctaagttataattttctattttcaattttttttaggatgtcaatcaagatacatttatgttactttattttctagttatataatattgttgatcaaaatacatgtacgtaactttataatttttattttacagtaatttttacgttacctttaaatatacagagctacaataaattacaaaaaattaccaaatatctcattagcaaaatatgtataaatttttgtaatgcatattgatagattttcatgatatttaagatatcatttaatttctttataatttttttttccaaaaaaaaaaaaaacttattgaaataaacctataaaatgagcttatataaaatacatgccatatggttgctcaaaaaaaaaaaaaatacatgccatatggtaaattttagatatgaaataataaatatttttagtaacctataaaaataattgacataataaattttattggttacttcttttttagttaataaaatataaaatagacaataaagtaacttttgattccgaacatttattcgataatagtgaaaaaatctctctttctatatatcaaaaggattatctcaaaatatagatgatactagtactagtcttgagctcaaacgagtaacggtatagttaaaattattttttaattgcttccttataagttattttagaatacaatttaattatttttatttattgaataacaaataatttttagtaaaccataaaatgtggttggtgtatttattttttagtaaagtttgttttttattttttatttttaatgtaactcatagatactatttggttttctcacaagttattttatgaactattaaattttttatatacaataagattatttagaatatatattgtaaaatctcatgatagataagaaaagacttttcaataacttataaggtttttttttttgaaaagcaaaactataaagttgattgatatattaaattttatttaagtttaaaaattaattacttgtttaactaaatataattagaaaataatcacacaaatcatcgcattaatttaaattataccaatacgtccactaataccaatatacaaaaactaatacatactcatccttctttactttacatttactcacatatcacattttatttattttttttttccttctttctttgttttctaagccattcattatattatttttagcttttttattctattaaaaaaaattataatacacgtctattaggtttatttttgtcagccccacttttgactttctctcttttttcaatttttagttttatttttctttcttttgtttatttgtgtcaagaacttaagttttttcttttttaatctttaccatacttttgaaaaaaaattgtagctgcatcataattatttggaattaagaatcgtatcattataatttactttttaatgtgatccattttaatgtgcgggaacatataatttttaaccgttatcagataggatatttgaaatgaaaagcaacactatagtttatattatgttttgttaacaaaagaaatatattaaaatttagtagatgttattaaaaaaaaataacactaagatactagttggttttaatttaataaatttcattttgagataatattaatatatattattattattatctattccgtttagttttttttttttttttt

SEQ ID NO: 33765 - DNA, 4218 bp, Cannabis sativa
  modified_base (4154)..(4187): a, c, t, g, unknown or other
agaaaaataagaaaagaaaaagttgatcagcttcctgcctgctatggtatcttgttcaaacttgaaacaaaaatttctagtgtcgaaggaatctaaacctccagtaacggaagttgtctagggtatccctactgcttgtgttgcttcaaaaaagaaagtcaaaaagaggagtataattaatgatgctgctcctcctgcccaagactcaagcagggagaagtttaatactattggtgcagatgagagatctccaattgatatttctgtgaattaggctgagactggtgttctgaacttggggtcagatttaatggagcaactgcgtgcgcagagctcctagctcattacacatggtgatgccatgattggtccaaggttgagcatatcttgttgcaaaagttggttagcaccaaacctctgcatgttattgctcaaagatgcttcattgacatcttcgaggaaactgtttgttcttgtgtccttctatcttaactctcttttttaaaaaaaaaatatcatctgacattgttttcttgttttcgagattatgttggttatgcttacaccatggataatgaacacaagaaagtagctgagctttctgagaagctcgaggatctagatgatcatgttgatgatgtaaaagaccaggtgactgctttgaaggagaggattgattctctagagagtgatttgactaatttttgagaagtggctagtggttataaagctcgagagagtagcttgaagaagagcttgggaattgctaggaagaagactatggatgttaaagagtcttctcgtcttacactccaggaatagacattagttgttgatgatcttagagatcaagtcaaggtcttgaaagagcaagtgagtacccttaaagatcaagcagttcttgatgtcaccttctatgatggcttatgctttgatgccatctacaatgcttggtttgctaatggagcagtaaagtcattcaattggtcggccttccttgatacacaagtgttgaagtttgtaaagcattgtgagcaacattttagtgaagaatatctcctgaaaatagactttactctgaatggtggtgagtcagtggtcgaagaatctgtcaaagctgaaggctacaaccctgagcatcctcactttccccttttgatgttgatgtaccagttttagagagtgaggataaggatgagtttaccatggatgtaataaacttccaggacattgtttgagtccattcttcttatttttatttttagcatttagctttagtgtgttagttggtaatttttgggtgacctttcgatgtggataagccttagtaaaatattatcagaatttgttttagttaaattagaaattatttccaacttaataaaacttttattctgatgttagctttctttattttactttatccgctaccgcttgaccatttaacacttgcacagtacaccatgtcttaagaaactcgatcgctgagagtaatgtcactgcttcttaaagttatatttaccatgagagtactacatagatgtgcaaaaaattttgaatgcttgtgtaacattcgactcttgtataccataacataacctatgtgccccccaagtaatcaaggaagtgtcttcattggtcacttgccatactaaatccccctaggccttgatcattgctcttgggtggtgttacacatgtgagcactctccacttatccaaggattcgtgggtgatagtgttgaactcactaaagaaacaactaaagttatctcaagaccaaccctataagctatactcattgcttgagagtgttgttaggtttgtgagctgtaattgattaattttaatgaagtaccaaaaaaaaaagttttttcaacgcgttttctcatcaaattaaatacaactacattattgtaatctaagttggaagaaaaaagtacatttgaagtagtagttgtaggtttcctttttaatccaagcttagctgaagtgatcctcactatactaatgtcatgttcaactttttagtataggagccataccttagcaatggaccttttaacttagagacaactttgtcacatctcgtcagtttaagaggcgatcgattcacttgcataaggtaaagtgaatcttatcgtgaatcgagatgttttgaggatagtttcttttattggtagtactatcgtaaatgcaccccattccaataccttggtactagtattggattcaagttgtagtcatagtgtgaaaacttgtaagttttaggttcaagtgctttagtgacgacgtatggtcctttccaattcgaccaaagtactcctgcttatgcatctttcgtgtttaggaatactcgtcgtaacaccatgtctctaggcttaaatttcctatctttaactcagagttgtagtgttttatgactctttgctaatacgctgcctttttaagctcagacctttctatgatctcttcaattccatctaatgactcggccagcagttgatgattggtttactggtctaatgttagtcctcgatgtgatggaggtatgagctctacgggtatcgtggcttctttcccgtaggttagagcgaagggagtgtgacttgttgttgtttcttctgttgtacaattagcccatagtacttcgggtagttcttcaggccaattcccttttgcttactccaagcatttctttagcgaattcttaagattttggttaaccgcttccacttgtccattttcttgtggatagacaactattgaaaaactcttaatgattccaagtctgatgtagaaatcagtaaagagattgctgtcaaactgtgtttcgttgtgtgacactatcttttatgggagtccaaagcggcaaatgatattcttgaccacaaaatcaagaacttcctttgatgtgattgtggctaaaggctctgcctcaacatgtttggtgaagtaatctactgccactactgtatattggactttgccttttccccttgcgtagtgaacttatgaggttaattccctagatagtaaatggccagggtgtttgcatactcttgactttgtttggggtagctctgggtataatggagaatctttggcacttgtcgcactttcttatacaatccttcaaatcttctatcattgtttgccaaaagtatccttgtcttaagatcttctttgaaaggctttgcccctagcatggttgccacaaaaggcctcatgtacctcgaccatgaggagtttggcttcttcttttgtgacacaccttagaagtgacattgaaagcttcttctgtacattactctatccatgatgaagaagcgggctacttttcacatcaatctcttagctttgttcgggtcagttggaagaataccttgttctaagcattgtgcaatcgaggtcatcaatgatggacttttgtcaatcatcagtataggcttcgagtcttcattaatgctccatttggcaaggtatttgataggttctacactgagagagttaaaatctagccattttagctagggagtcaacattttggttctgttcacatggcacttgttagatggagtagtgcttgagttaggctaatacatctttagttttccttaagtatgcgatcatgtttgaccctcgggcttgacactcactaagaatttgattaataactagttgagaatcactatagatctcgagtgactcgactttgattgctagtgctaatcacattcatgctaggagtgcctcatactctgcttcattgtttgttacggtgaactcaaaccgcaatgcactgtgagttcaaaatccctctggagtaactaagatgagtccagcaccagaactgtgctcattggaggatccatctacatatagtttccaggaaggtccagggtcattctgagttggagtctcaggcatgtggacctggtcttcacaaatcatgggattggcttcttcaaggccagtgcattcagcattgaagtttgctaatgcttgccttttgattgttgtgtaaggctggtaggtgatctcaaactgacctagtttaactgcccactggagtaggcgccctgatgcttctagcttaatcagaactttcttaagtggttggtcagctagtacctgttgggttttgtgccctnnnnnnnnnnnnnnnnnnnnnnnnnnnnnnnnnnaattaataaagatcataaatcattttatgtt

SEQ ID NO: 33766 - DNA, 2533 bp, Cannabis sativa
atacgacttttacaaacaaatattataattatgtataaactcacatagttttattttttttgttattatcatatatgtaaattatttttacaatactaattaatcaaaatactacaaattttaaacataacttattaatgccactaatatctctttctttagtgttattattgtcaagtatatttatacaaaataatatatgtacttttaaaattaaaccctattttacatcgttacttctcaaataatttctttttgaaagctagccttggacactcaccttccatgacttggccaagtattcattaaggacgagaactactccttgaagggttgcgttttaaaattggaaatagtttcaatgtgttggcaggtgtggataaatagattccaggacataataacttcaaagcaattacctatatcggtccttctacactcattgtggcacactttattacgaaaaaaaaagagaacggaatctgacactccttaaccaatttttcagccaattgatgttgagagaattgtcaccatactactgagcttttttccatcccaagattgtgtgatttggcaccacacaacaactgggatgtgtacgctaaattctaggtttcacttggcaggaaatattgatgaaagaaatgaatcttcagtctccaatgctcaaacaggttggtggaaatacttttggcaactaaacttgtcgtcaaaaataaaaatctttgcttggaaagtgatgcaaagtgctcttccagtggcagtagcttttagaaaaagaaagtcattacttcagcatcttgttccatgtgtacaaatgcttgagaatcaattggatatgctttattcacttgccatagagcgaagtcgatttggaagcgaacaaagttcaccattgactatcgcagtgctcacaacatgtataatggtgactacttgatccacttatccactctacattccaatcagattttgaattgataatatacattatgtgggcgatttagaatagaagaaacaaggttctacatgggggagtttgaaaagaggatattatactttttgccagtacatacatggacaaatttccgagagctacaaatggtaacaaacaatctctgttccaaccccactcgtgccaatctagaaaccaagctactttgaatgtctccccttctttacagcagccacatggaacaaattggagaccaccacattctttagggctgaaattaaacattgatgtggcagtcaatgcacaggatgaaatattgggggtaggagcgattattcggaatcaccaaggacatgtagttgctgctttatcaaaaccggttatcaaaatcggtgcaaggatgttttcgataagataaaatggaggctaaagcactttttcatagtattaactgggctctacaattatagcttcctattactcataccgaaaccgatgctctgagagtttctataggtctaaattctacatctatggatttatctagttttagtgatttaataatagacgttcgttgtcttttatctttttttctctaggattgttgtttctcatgttaagaaaaatgcaaaccatgttgcgcatggtttagcaaaatatactttgaaggtggatgaaaatgtttgttggatgggtgatatttccaatctcattttctctgttgttgtaagcggttataatttataataacagtgaaaatttcaaaaaaaaaataaaaatagaccctatttcttatttatttttttaaatggaattataacctaattgaatttatttaattaagctaatctaaaaaatgattttttattcaacttaattcctataccttttatatttcaataatttaataaaatataataaagttatatattgcacgtgtgttaaaaactagtttaaaaataaatatacaagtcatatatattttgctaaaatatacaagtcaaaaatatataagtaaccgattttgtgcctattttgtaaaatcatagattttattttgttgtactgtatagtgggtcctacgtactttattattttttaaatttttttgtgattttttatttatttgataacatgttgttgtaagtttcttcactatttatcaattttcttttttaatttaaaattaaaaaagtacaaaaagtacaaaaaatgtttaatcaaatgacagttggtggtagttaatagtacaatactccagaaggtgggtctatgttgtcggactaaggttatatttatcttttcaatcctttatatttttttatgtatttgtgtggtggtagtggagtacgttatatcacgtaccaagtacatttatagtttttgcataatgtttagtaaataaaagagcacaaaatatcaggtacctagtacgtgcctttatattttgtagtacattggatagaaaaatttattataactcatgacattatgtattgttatatattgagttttacattggtgtatttattttattgaaattaggttttagattaaaaattatcatagaaatat

SEQ ID NO: 33767 - DNA, 1581 bp, Cannabis sativa
attttctcgacatgacacttaacagatggaaacataatttgctatcgacatttcatgatattttagtgacatttatcgttatgaagcttaacaaatagaaacatgtttcgttatcgatatttcacgacattttagcaacattttatcgacatgacacttaacagatagaaacaataaaaacatgatttgttagcgacattttcgcgatgctatcgattacaattcacgattacttgtcatatacaactatgtacaattgtaattaaagagttcaaaatacaaaaaaaaaaaacaaacctctataattgtaattatttacaaagtcaagttttggtaaaataagtctacagaccaccgatctctgaacatcctcatgttattatcaataatcttctccaatgaccgatttatcatgaggtgttcgatgtactcaatgacatataccccgcaatcaccactgaaaaatataaaacaatacgtttagagactaatggcaagggaaatattaatatactatattaataaaaattaccttgctttactttggggaaccacctcacttggcatgcgtttagcatgcattgatctgagttgaatactctccccttacactacattgagaatgtaattattgacatcgcaatagccagttgacctcagcagatgtggaaacaactcagttgaagctagcataatggcttcaaattcttcgttgctggtacacgacatatcgttatcgtacacccgaatctgccaattatcaatatctacctcaacaaccacctaatatttttgtctttcgaagtgcaggatgaagtataagtagccttgatccttccaacatggcatgtaacgaccctccatacccaaatagtactggatcacttcttctggccattcaaaggtactttttgccacccttgtgacacccccaaatgccactgaggaattgtagaagtgttgtgtccaaaatcatacctggcttagggtacgattctcaaaaatgaaagtgtctcctccttatcaagtatgatatagcatctatgtgctgtatgaaaatcaaagaaaaattaattaaagtcgcaaattaagtcgcataatgtcacgaacaaagtcgcataatgtcgccaacttgtcgcaaaaatattaataaacaacacttgctttgtgttactgacagtgtcgcgagaatgtcgtgacatgtcgataataacaacagagacaaatattaataaacatgatttgttatgtgttagcgacagtgtcgcgacaatgtcgcgacatgtcgataataacatcaaagacaaataaaatatcaaaatagtataaaacaataattaaatacttacatcatcgtccaaccaatcccccattagcaacaattttgtgaagaacttcacatcagcgacgctagtgtgaacattcttaggtctggtattgggagggaatgtgtctcctccaaccaatcaatcaaccacccacctacctctttcttgaacgaacgtacgtagcaatctactgtctgctggtcttttcggatctacgttatttgaaagaagtcgcatcttcttcttttcgtca

SEQ ID NO: 33768 - DNA, 1215 bp, Cannabis sativa
tttttttttttttgagagagtgatatgaatcacactatgacaatcgtagatgcagaaaatttccagtcaacaagctaattgtctagccaaagatatacaaagtcaaaatatgaatcactataaacaaagcgacttatataagaccaagctatcttggaaatttagacaaaacaacttgagaccaccttcaagaggcatttgatgtaaacaacccaatgggccaaaaatacctacaaaataaataagtataaaaagtggattagcatactatacaataataatgctatgaatttataaattaaggataaaacgcaaatattatgttaacaagaaaacttatctttgaagcatgacgtcaccagtgaaactaatatgttatgtccaaatattaaaactaagtcttctaaagtagaaataaactagccaccataacatgcaccatgcataatatttgaaaattaatcaaacttaataactcaaatcccaattaaaattaactattttttaacagagttaacaaaactcaattagctaacaaataagtaataagaaaataataatataaaataatagaaataaaattttaccaaaattattaaaatataaataaaagtaagattaaaacttatctgtgactctttgatgtcgcctccatgcgcaaacgcgtcaacaacatactagccaaaatatggaacaaaatagccaagcaaattggcccaaactaaccaaaattggcacaaactagctaaagaaagacacaaactagccaaatataaaaattaaatatttatatatatatatatataacataaataagttataaaaatgtaagaatacaattcgaagtaaaattacttatttgcaagctttaatggttaaataatttgattttagaaatacgactagttgattctatttcctctcctatactaatttaataatagtgttgttttcttttcaaagaataatgatattagtagagcttccaaacatacagaaatataaagtatctcactattagagacttggttaagaaaggagacattgtaatagaatattacaagactaagttgatgttagcagatattttaaccaatgattaagtgcaatgttatttaataaacatattgttgatatgagcattttataatcttttgttcatttgggttagtgggagtttcttgttctattgtttgagattacatttatatgtaa

SEQ ID NO: 33769 - DNA, 1208 bp, Cannabis sativa
  modified_base (437)..(440): a, c, t, g, unknown or other
tttatctctttatttttgtcactattattagtttattctctcacttttgatatggtattattttacccccatataataaagttaatattattttacctcctacctataatcttttattaatttgaataatatttttaaattaataaataaatttaaataccattaatattttcatttattattaaaaatattacgatatatatttagtctgtgagatcgattttttatttttaattgagttatatatatgttattagcaataacacatatatatatgcattatacataaattttatacagatagcgtatataaatgacatagcgaacaaaataaataacataaacatattagaatatttattttaattaataaaaaatacaataaaatttagtatttactaattaataaatatattttttaataaataattattttnnnnttatgtataattaacattaaacaaatataatactttaattaacgcaaatataattacatattaccctacacaactaaacacagcttacacgtttcctacaattatattatccttcacaaccatatttttgtgaaggggatcatcatgccctatttctcatttttttttatatctaaagtattttaacaactaatattagcaattgtaagaaaattcttttgagttgtcgatgctagtgatttttgtttaggtaaatactattttggaccttgtgttttgtaaaagttactaattggaccatttgttttgttaaatgataaaatgaaccctgtattttccaaaatggtaaaaataggaccctgaacttaatttttgataatttttttttttaatataatcaacttgaagacaattcctaacatacagaaaatgtaaatagttttgtcataacacctttagatcagattattattaaatttcattttgacaaaaaatcaattcaaaattctatttgtaccattttaaaaaatacaagatctatcttgtcatttaacaatatagatgatccaattgggaacttttgcaaaatacagggtccaaaataatatttactctttttttcgatagaagcgtagaagtgtcgtgattattgtgggctctttgaataattacttgtcgacactagtaaatcagtaaaaaaaaaaattatgaagaaacagttaggtattgaaaaacacaagttacaaatagaaaatgaactaaaacctt

SEQ ID NO: 33770 - DNA, 1923 bp, Cannabis sativa
  modified_base (644)..(644): a, c, t, g, unknown or other
agacataccaaattagaatggtcccccacatccttagattttcttttctttgacgcactagcgtcatcagtaacaacttttcttttttttttttttgcttgaatccagatagtattagtttttatattttgcattcaggaagtttggggttttttatacttaagaatcccatttttttgtatcccttttttttttttttaatttggagttatatatatatatattgcttctgttgcatttatactgtgttataatattgttattatgctaaattttgtataattacaatcaattattaaagtcaaatttaaaattaaaattatactatttttattaatttaattaatatatatttaaaatttcagaatatttatatttattgattatttaatatttatatatatttaaaaaaaattagaataaaaattttaagtcatagttggactagacattttttagtttggactagacatttttttagtctaaaaatgttaggactaaaaatatttttctagtctaaatatgtttgactagaaaaatactcattttatgtcccagactattatgtccaaacacaaaatagactggaaaagtttatctagtccaactaggaatggcaaattggggtttttttgcggatcggntcggggccccgacccgatggggcagttccgccccggtacaatcggatcgatattcgggcttttgccccgccccgccccgccccgccccggttaggtttttttcgggtcggggatgacccgatctgctaatgcattaactttaaaaaaaaatcaaatttctaaccctaaatccctaaattaaaaattcgaagactccagttctcccgtccaccagacaccaccattgattatctctgtgcgcctctcaccttcactcgctctttctcccatcctcttctcagttctcagttctctactcttccctcgccagttgtcacacccatctccaagcctccggcctcactctctatttttgtcgacgactgcagaggtatgaatctccactcttccctcgccagttatttttttgatttggttttcatttcaacatctgggtattattggttctgtacgtcactataacttttatttttcattttgatttattcaattcgaacttatctctatgtatttatttaattatatatgtatatgttgtgttttcatttaagagtcctattatattcctctctttcatacacaaggttggaacttggaatatatgttatatttatatattcacttgctttgtttagtacccataattcggtttgttgattcatttgcaaaatctttgtttttatgagtaaaatctaatcctatatgccttcatctctttagttaataacgtttgtatacaacttacaagggtcattatttactgttatgattttttttcaggttatgacttccaaaaaaaaacatttattatgttgctgtttacaacctgaaagctttgattgtctttctaagaatttctatttatagttacaactaatccaaaataaataaataaaatagaaaaagcaaaattaattaacagtaaggtatttgtgttttgtttggtctgatcttttttcttttgtgcttattctctttaagtggttggtccacaattttaaatgattgtcttacatgtgacatgtgttgtttgttttaattataacatcaaacatagattaattaaatgataattaattggaagtaagaagccaaattggatatttgttcaatttctaaagtataattaccggaattaaagattatagagagtccaaaatcaattgccttaagttgagaagtttcattgctatctttaaacaagaaattctctggtttcaagtccctatgtatcactccatgttgatggaaaatttgtttcctcatccaagtaaaattg

SEQ ID NO: 33771 - DNA, 1822 bp, Cannabis sativa
tctagtcgtactgatgtggtagtaaataactcatactatctgatagcctagcatatatctattggcatctcggtgcaactctatgtacacctcaccgatgccctgatatactactcgatggctatagatttgcctattctaacggcaactaacatgtatgctaaacatgtatacatataggcaaccattacactaatcttatcttattttcgaattcaggtgggtcggccaacctgaggggaatagcttctcgacgaattataggcccctaaatcgcattatttgcaaaactaatgagtgacgtgctaaatcacttttcggcgacttaaacttgaaactaaaagttttctgatcgatgaataacatggaaataccataaatatcacaaaaggggaaaaacttgggttcccaaaattgccccgtaaaccggttccccaatcaaaattctggttctgtggggttttctagggaccaatcagaattctggttcccacaggccccctgaaccagttgaccgatttaatgcaggaaaacttcaaaaattcactatactctcaaatcaaacccaaaccttaccaaaccttcctgacatgttatttagaccacaatgatcatattctaagcaataaaacaactctaccaactcagaatcaaaatctaccattaaagagaaaatcttgagttcttaaacttaaagcttgctcaaacatcacaacatccttcaaatccacttcaattcaacatattaaaccttaattcaacttcaaaaaacacacacaaataccaacccacaacacagaacgctaatactcaatttcatgcaaagaaacgtaacttagaatacttaagaaatcataaaatgagaggcctaagagctttaccttggattggatcactaaaaccttgtctaaatcactaatttgtagcaaggaaagtccccaaaagctgctggtccttgagggttcgaaatagagagaaagaaaaatatgatttttctcaaattttccttttctttctatttcctttaattttctaaaaatcaatactaatcttaggttaacaaatagtggccagctgccattctaaaaatcaaccaccacaccttagggtaaaataacaaaaatacccctccccacaagcataactaacaaaatggtctaggggtaaaatggtcatttcaaaccctcgagtaaaacccaatattcccaatgtctaactatacttcctcactatactaaaaatactaaaatataattctaatggccaaacgccgcgttccaatattgtggggtacaaaatatgcaaaaacataaaatttcatatatgacatatataatgcaatctgaattcaactaaatctccataaaatgataaattatgaatattaattaaaccctaattatctcctaatttccaaattaaagctgtcttttcaatgatcccccgctaaaagtatttcgtcctcgaaatctaaccagaacaactctagatactgagccctcatgtcggactctaactcccaggtgccttcctccaccttactatttctccagagcaccttgaccaaagccatggtcttattctgaagaactttatcttttttatctaagacctgaactggttgctcttcgtatgataagtctggttgcaactcaagattttcataacttagtacatgaaaatgatctgaaacgtacttttgtaacatggaaacatgtaatacattgtgaactgctgaaaaagctggaggcaaagctagaagatacgccactagtccaactttctcaagaatctcgaaaggtcctgtaaacctagggcataa

SEQ ID NO: 33772 - DNA, 3526 bp, Cannabis sativa
attctttgataagatagtaacaacatgctgtttaaaataaaaaaatcacacgtgtaatagattgtttaaactaggggtatccaatcaaattgaagggaactgaactaatccaatctaatctaatttaatccaattcatttacaaaaaattggatattcaataataattggattggatattaaaagttagattctaattatttatgtttatttatgtataattaaaaatacatattttaatatatatatatatatatactagatttttttgtgtgttgaatttgtaatattcgcctattttgcatatttattttcacgatgttttgttccattttattacttagtaatgttgttgttttagtcatttaaaacttttagttgcattacacttaataatgatatttttatgtagtgttaaagttaaataaagagtgatatttagtttttacgtatttttttttttatatatttttaagataatattaaaatttagatgaattgatatctaattaaaaaactgattcaatctaattagtaattgtattagattagattaggttttaagttctaattagatcaaatcggatgataattttttaaattcaattactaattgaattagatcggatgagaaaaaaaaatgtaacgttgtattagatgtctaactctaatttcagcttgttaaatttctccaaatgtcttaaaattttataaaacattttaaataactacaatgtacttgattataaaaaaattcgactaataaattttttgaatactgaaaatatataaagatataccgataatacatctcttttaaaaaaattacataaaataaataataaaatcatctttaaggatgtacttgagtgtagatatatatttttttatacatttaataaataaataaattgaaagaagaactcgagataagttttttcttagtaaaaaagaaaaaaaaaaaagataaatatttgtttaaaaaaaagaaaaaaaaaaaagtgagaagagagtgtagagagggggggaccatgaattacgtcgctgttatttcagccactcgcgggacaatgacctatcgacacgagtcagctcctcggcgtctggaccacacgaaacaggggaccagttcaaagcacgcgcgtagatagtcttatcctcaccgtccacgtggaggagccggaaaggtagggaccactgggaatttttgacttctctgacagccgccggcttaatcaatgcgaactgttgcctctgtgtgagtggtcccctaatttttaggcccaagtagggcccaataaggaaggagggagaagatgggtttagaatagaggggcccaccaaagggtgtaagagaagaaagagaaggctgtactgtttggtgtttatggcaaactgtccacccatgagggcaattggcaaagcggaaaaatggtccccccatcctaattgcaccacctcccccctctctctctctctatatatatatattattgtataaattgatttaataataaatgtaatataaataaataaaatttccactagagacctaccgtcagccaaacggcagagattgtaagatattttgataaacacatcaaataaaaaataattgtggcctaaattatatctatttttttttaagtatggtaagcaaattacttattttttattttaatttttttattattctttaatttatatttagttttataagttatattctcattatgtactttagaaattctaattttaataagttatgtgagattatatttgatatattaattataaaagagagtatttattaattaaaatttggagaattatttcatatactatttttttaaatttacggtttaggttacttcagtggttgctccaattgtttctatgtgggttgctatgtgtattttagttgtgatttaaattgttccgttagttgttatgtggatttctgtaaaaatgcaaaaaaagaaaaaaaatattttaaaatgtaaaaataaaaaaacttcttaaaattattttgctattatatttggttaacgtgtaataaaaaaagtatagttctcaacttatcccaatagtatatagtacaccatcttcaaaaagtattttgtgttttcatagatttttatctgtttcgatatttaagagaatcttgtttcataagtgtgtatattatagttatttaagataatctgtaaatatttttgaaaattatgaatagtttacaatatcgataagatttaaatattttattttatgcataatttttttccttataaataattgtttgaattttatttttagtattgtaaactatttagaattttttgacaaatttataagtagtcttaaatagttacaatgtatgcgattataaaaaaaatgaattaaaaaactttttagatgtcgaaacagatagagggcctaccaaacactatttcttagacatataaaagggtattttagtatattttttagtttaatttttttcttaatagtttacattgtaattatttaaaattatttataaattttttaaaattctaaataatttatagtactgaaaaaaaaaaagttcaaacacatgtattattgctaagaaaaaataatcatgattgtcacaatatattttaaccttattttttacactataaattattcgaattttttaaataatttacaaatgatttaaaataattacaatgtacaatatcataacaaaaataaaataaaaaaaatatttaaacataaaaactctccgaaaatacaaaaaataaaaaatataataaaataaaagtgtattagaacacccattttaagggtactatagatttttccataatcatttgtttttattgattaagactttataaagctagccacacaacttttaatttttcacgtaattgtggtccatatatattatattcgttctcatttgacatcttgaagaatcttatatttgattacattgattcttttttacatttgatttgtcttaatcttggattgcattgcaataatgaacaaattataatagcaaatgtgatccttatatataataatgtattttaatatataattaatatattttgtagttagttatgttatgtgtactatatgttattatatacaacttaaatgacaaagcttagaataaatcgattaatctagctcttggagatacaacttacaaccactggtttgtagaatatatatttataaaattgagatataacactacacgcaattaacttaattaatccattcaaaaacttaattagttatatataatattattgcggtaatatacaacatcatggatcatctcagctatttcaaattccacctcttttgtcctttcatttgtttatttaatttgctcaaattataaattatctcaattgttcgctttaatttttttttgttttttctgaggttgtttgctttacaatttaataatgtaaatatgcacacttaaaatataacaatagggggtattttttttttttttt

SEQ ID NO: 33773 - DNA, 1490 bp, Cannabis sativa
ttattttttattttaaaataattaattttttattttaattttaaatatttattacgtggactaattaaactgtgccacgtgtacactgtgtacacgtaggcattccaacctgacatttaacaccaaaaaatggatggaaagggctaagtgctaatataggattatttctattggatcatttcaaaaaatttacagtaccttttatatccttagattacataatttggaattcaatgccaagattcccaacacacgcagtcccccgtatcccatgaccatttgagtaatacggtgtcgttgcttacatataaaaatatgagttaatttttattgaaaaatataacatcaccttttactagagatgcacatttcttctatatgtggggccgcggacatttgcttctaatggagcaagaatcccccgtgtaaatagagaacggagtgggaataaagattattttttgttcccaaatgttaaatggggcgtaacggtaatcacactccctgctctgatagagacccgtttagtattttattttatatttctaataatattttataatttttaatttatgtttgtctttgtgtagtatattactatcatttttatgaattttaagttgtgttttggtaataattagtttattaaataataataattgtgtaatattttaaattttatttagtttagaataattaaaatttttaccccttgaactttcgacactacctgattttgctccttaaaatatacggcttgttaaaatttctccctaaagtattacaattatataattatgccttttctgttagatttcgtttcttttaccgttaaaaattagtatttttaccccttgaactttgaccaataaaaaattttgcaccattttattaaaaaaattaattttaaaaattataatattctatcttttttaaagcaattataatattctattaattcaaaaaaagaataataaatattattaaaaaattagataaaaatattaaattaattaaaaaatatattaattttacttaaaaaatattttcagattttattttattcataaacaggtatcttaaaaatcaaacaaaaattgttgagaatataataaataatttaaatgaactaagattatttgaaaaaaaaaaatcaaacttatttatatttataaacacataccttaacaaataaaaaaaataattaaaaattcaataaaaatattaaattattttgaaaaaaaagttataaattaaactaataaaatgttatgtttacttaaacaaatctatattttttgataaaaacaaaatatattcaagtttgttcctgtaaaatttaatttttaatatatttttacaaattaaaattttaatatattttttaatacctaaatttatatcgtgtaattaattttaaaattttaatttattttttaatttcttaatcattcaaaataattttttcttaagatctaaattaatttttt

SEQ ID NO: 33774 - DNA, 1789 bp, Cannabis sativa
  modified_base (1455)..(1466): a, c, t, g, unknown or other
  modified_base (1676)..(1678): a, c, t, g, unknown or other
tacatttttatatctcaatttttaacactctttctctctcttacaaaaaaattaagagcactcctcctattgttttctatcttttatatgattaataaaaatagtgtatttaatttagatattttgtactttattcagagttaatttatgaatgatgttttaacaaaattgatttcttgttatttttctgttaatttatagttatttgttaagttattttgtagttattttgtagttgtttttattttgttgtttaggtgttctataattatttttcaattgtttttatgtatttttttttgtacagttgttgttcactttatgtgtattttttcgtgtatattttctgtttattccaaacaatattttattgtatatatgtgcatttgttttattatttttattttattttttagttattttttagtttatagttgtttttaactatcactaactcaaaaagaaatgaaaaaatgaaagttgaaagaataaagttgtaacaacaaattccataaaaaaaaaataatgtaatagtaaaaaaaagataaatcaagttgtgaaaactaaacataaaatgcataatattatatttcacctaaattttataattatgctccaatgtactaggagtaagatcaaatttattttaataaaaaggtgtaaaaaaattaacaaaaacattatttttttttttaaagtatataaagactatatttaatatataaataaaatataaaaatatttaattacattaacgagcggaaaaaatttaataaaaagggatgtttattgtagtataaaatttgacctatgttatatttcgttttaaatttaacacagcttttggcatctataacaaaaactgtcatcagcagcgacttttttcgttccagaagattttttggcgcgactaatcactcctgatgttttatttctaataactcgtgcctgaaaatcaatatcaggaacaaaatatagtgacatgcctaatgctagattatttggaacaaaaatgagttgttcctaaaaagtaaaagtcgttccaaaaaattaaattggtagcttagttttcacacattatcaggaacaactttttgttattggaaacgaaattgtcgttcctaaattcattttttagaataattacatttatttaaattaaattaaatatttttttaatatcacactttttttattaaataatttctttaaaaactaattatttttatatttaatactaaaagagttcttacattgttttcatatttaattaggggtgttcgcggtgcgggtggtgcggtttttgactaacttttcaaaccaaaccgcacatgcaatttttctaattttccaaaccgcacccgcatcgcgaaactaaaaacctgcaaaaaccgcaccgcaaaaaatagtgcagtgcagtgcaatttttgtggtttatgcggtttggactatcannnnnnnnnnnnactatcacaaatacaacaaactttgagcaaaacttgtccaaatactataaggcttgaaaataaatatatatatataaaaaaaattaagtgtcaacaatacaataattagtggactttgagttgaacattcacatattggacctaagtaaatataaaaattggtatttttataatgtgcggtgcggtgcgatttgaaccgcatattaacannncaaaaccgcaaaccgcaccgcacaacaatgtttaaaaaaacacaaatgagcctagaggcgtttttttttttttttttgtaaggcgaagcgtaagcctcaaaaattaataga

SEQ ID NO: 33775 - DNA, 1598 bp, Cannabis sativa
ggagagcttgatgcaatttttgttaacctgttctcaaactatatggcagtcaatattaacatgtttagtacgctcgtgaaagaccgcattctcagagatatgtattgcagcttgactatcacaatgaatggttgttggttaagatgaggagatgccaaagtcagtcaaaatgttatggagccaaagtatctcacaagttgtgttggcaagagagcggtattcagcttcggcagatgacttggagacaatagattgcttctttaatttccgggagataagagactggcctaaaaagatggaagagccagtgatggaacgtcgtgtatcagggcaggtgccccaatctgcattagagaaagcttgaagttggaggagtcggtctgcaggaagctgtgagaggttgtttgaatgaaacatgagtccttcgccaggagttcctttgagatattagacaattcgataagcagccttgaggtgtggttgtcgaggaccactaatgtattggctgagtctattaacaacatatgcgatatcaggtcgtgtgattgtaagaaataagagcttgtcaatgaggctgcgataagaggtggcatcactgacaggaggcccaacatctttactgagtgaaaaattggcatccataggggtggagacagcctttgaaccaaggagacctgtttcatttaaaagttgtattgtaaaggtctctgagaaacagagatccctactttggatcttgcaattttgagaccaagaaaaaacctcaaatggccaaggtctttgagcttgaattttgagttcagaaaagctttaaaagttattgcctcagaatcatttgtgcttgcaattactatgtcatccacatagactaataaggcaagaaaacttgtggaagattttttttgatgaatagtgagtgatcataggcagattggtgaaaaccatgctcaatcaaagtagagcttaattttgcaaaccattggcgagaagcttgcttgaggccataaaggcttttgtgtaatagacagacagggttgggaggcagctccccctcatgaacatatcctttagggagtgtcatgtaaacttttccattaaggtccccatgtaaaaatgcattatcaatgtccatctagtgaaggatttagttgttaatggcacccaaagccataaacaatttaagggtattgaattttgcaacaggggcaaatatttcaatgtaatcaatgccatgttgttgagaataccctttagcaacaaggcgtaccttgtatctatcaacttcaccttgttcattgtatttaattttattaatccatttgtttacaatgggttgacagcctggtggtaaagagacaacataccaagttttgtttttcttgagtgcaaaaaattcattatccatggctttcaaccattaggagaatttagatgcctgtctaaaagtagttggttcgagttcaatgtaggcatgaaatatggcatttctaaaagcaacacttaacctttcatagataaggtattttaccagaggatgattagttgaagattgacaaatgtagtcttttagatgggcaggaggaagagtttgtcaacct

SEQ ID NO: 33776 - DNA, 2907 bp, Cannabis sativa
ttttttatatatatatttatattgtatttttattattttgttatttgtatattattttttttatatatattttttttgttatttttacctagttttttgtgttattataaaataccataaaaatgtaaaaaaaaaaaaaactttaaacataaaaaatattaaaattttataaaaatgcaatattgtattttataaaaattaccaatttgatatggtgtacgtattttagctgcttcctagtacaactgcgtacaaagtgactagaggtgaataatgtatgttttgtctttagggaagaacatgaggaaacaatcctccattgtttagttacttgtggtgtgatccaagctcgttggaataggtcggtataggcacaactacattgtttggggattcatttttgaattgatgtactgttgcctttcaaagagtgaacacagatctgaagtgtacaatgacagtagtttgttgcgccatttaggggcacagaacgatctagtttagaaaaaaatgtaaagcttgttgacaggattttatttgtaaaaaactaccttgatcattggaggaatgctaaaaaattcaacatgaatcatcatgatctgtttttcagatgggtgatgaaagtgagcattggacactaccacaagttaataatatcaagatcaatgtagatacaactttagttgatggaagtcaaagttgggacctaggctttgtggcacgagacacaaacgacatgcttattgaatgacatgatatcttttctcatggttcggttgaaccggttctagctgaagctataataatttgagaaaatctcagttagataaaagaaatgaaatgacaccggataatttgtctttgttcagtgcaagctttacggagttctataattatgatttttttatttgatttaatcattcaagattgtaagaatttgtttgttgcttaaaaaatatttctttctttttattaaactaatgggcatatttaattttttttcaaggtgaataatcattcattaaataggcaaaaggttgaaaaagataacaaagagaacaatacaatatcatcatgcccataagcaggaaggaagttcagaccaccaaacttgagaattatgtagcgagccaaggaataagcaatggcattattttttctcttagaaagaaagtcaaatattagaaatatctattgtccttactattactactactcggcactttttggacaactcggagatagagaataagcatatttatttatattttgtaatatagacgtggtttttaaaattgttcttttgtttaaaaataaatttttaattagcaattcatacataaactatccaagaggcttattattataattttttttttaatataataacattaacataaatggaaacattgtacaagaaaaacgatacattgtgtggtggtggtagtaacataaactacaatttttttttttattgataaaatttattataattattgtgattgttaagatatttttattaacgtttcgtcaaaaagtaacaaaatattttaatttatcctctatttagtataaagatagaaaacagattttgacaaggtacacgaacacaaacagaatatgaattttacaggttaggatcagaaaaattaggtacagttaaaaaaaataggcgcaagttgaaaatgactcaccatgatatggcacaaaataaaaataggtcaaacaaattggtgatgagtataattcaatacttttacatttaatctatgtaggacaatattctccaatatccgccctcaagatggtggctaattttgctcactaatcttgaatcaccttatcacaagccatgtcatttgctcgtttatttttgtttgaatctcaagcgtctttacactatctggatcttgtacggctggctaacaacctggagaagtgtggatcgaaagcctgttatgaatatggctctgataccatgacaagaatcataaagtttcatctcaaaactaattggtgatgagtgaagtagcccatgttcttatatatgactcaatacttttacatttaattcatgtgtgataatgttctccaatagactttaaattatcttatgttgcatcaagaggcccaatcccatggccttaatagtgctctggcatgtgtcttcagggatggtgttgcttgtagaaatccaattggggcaattcaatctgttcgtggatactggtgctcgaacggaagcaggaacagtgggactcggggctatactgtttgatgtcgctgagtccgttttgttctcggcagctgttgcattaatttgccattttgaacttctcttgttgctgaagcgactgctttactctatgatttctgactttgtcttcaaatgggttatcgtcatgtaaagataatctcgaactgtcttcattttgtgcaaagtgtgggtagtaaaagaacatgttttttttttttagtttaatattgtgtttcatgacattttttgtgtttagtcttgtgcaaagtgtgagattctttttgagtttagtattcttttttgagtttagtgaattaataatgctaatgctcatttacttgcacaactagctttctcacttgagtcgctacgtgtttggtagctgtgtttgtttagctatttagagtgatgtgcgtcttttgtttaaataattgtttgacaatttaccttataatattaactaactttctttcaaaaaataataaaaaagagaaattaaaatttttaatttttattataaatatgaaaggaactttatatacattgatgtgcataaattttctaatagaattctaaattaatctttttgtctacaagtttaactttatggcacgtttagtatacaacattcaaaatcggaataaatcaat

SEQ ID NO: 33777 - DNA, 1111 bp, Cannabis sativa
catgattcgcttggaatcaaaagtgtgtagttaacaaatcgcttaatcttcatacaagattaaagcatgaatttttgggatgggacctaaactctcttagtgtttttctcattgatagtaaactatcttaacactagtaaaaatataatcttaagttcaataagtaataacaagtcaatagagtgaatttgggactcaaattgtcccatccatatatgagtacatattaaaattgaaagttaaaatcgaatttttttttaatagagtttaagcttaagaagtgtataaagaatagtgagatactaaaattctacctatatagactagaggcggtgcctcctcttttaaaaattgaaagtattctctagagagttcatgaattagaattttgcacatggacattaacggtgcaagagcgagacatggggtctcaagtgagcattagcaagggtgtgggttatcaccaatttgtactaaaagaatattgattcaatgctacgacaactaaaaatttattaaattttgtggtaactacactaaggtaaaattaaagtggaaagatattttagctaatgcacttaagcaacacttctataatagtgtatatttagtcaatcaaagtggaaaaatattaaattttaatgtaatatttttaattgattaaatttatgttacaaaagttacaaatttaatattaaagagataatatttaatttagtgggaattgttatattatttacgaataatataatatataaattaaatatatgtaataaataaattatatgtaacatgtgataatatatattagttgccattattttgtagcatgtggggtgttacttattgctattagtaacctccacacaggaccgaccttgaaatatgatgggtcatagaaaaaaaaaattgagaccttatttagaaatgaaatgtggtatttttcaaaattagtaaaaaatatgtatatctataacctaaataaaagccacaatgttttgggctttttttgattaatttacacatatacccttttcaatctataaatataacaatacaaacaaaatacaaaattttgattattttggaggtattatttagtataattcaa

SEQ ID NO: 33778 - DNA, 1603 bp, Cannabis sativa
  modified_base (51)..(61): a, c, t, g, unknown or other
  modified_base (217)..(230): a, c, t, g, unknown or other
tttagaaagttcttatttaggatgtcaataaacatacttgtgagtagatcnnnnnnnnnnntaaaataatttccaacaccatggtccccacatgttctttccaggaaattagcaaagtatgctagtattagatgtatagagtatacatcggactgaccgatattgaaagtggaaaagatatcataaacttacccttatatctttctaagtcaatatnnnnnnnnnnnnnntaggtcaatagatcttaatcctgagataaggttatagcttaactatatcattcgtgttctttgacttgttcgttaaagctaaccaaatgaatcaaccaataattacatcttgggaacatgatagtgcaattgtgtgggagcgctaatcatagatacggaatctatagcttctataattatatagaagtgaaatgacaatttcctttgagcttggcttaacagacataaatagaagagctctcatttcagtaattatattagtttactgaaatatcatttatagggagctaagtgttttaaggataaaacacattgagggatagaacagtaaatttgtccttactcgatgtaaattatctatagtggatctttattatttggattgaaacaatagataattcatagtgtatatatagagtgttctatgtaattaggtgtgcaattctgaatttatagtggagtcaggaagaattaataagttaggaaatttactgaaatttactcagtaatgaataaatttcaggtgtacttattgggagcttggttacataggcccatggtccccacattgtttgagataatattatcttgtagactcaattaattagaattctaaataagactatgtgttgtttatgaattttcactaagcaagggcttatttaaaaagaagagaggatttagggtttatttatttattaagacactttgtaaggtctaattaataaataaattaaatggtaattttttttataattaattataattattaaatagatatatttgacatttatagagttataattaaaatatgacttttatgaaagaaaagataagttctgaaataaaatagaaaaattgaaacctgtagggcccactatagggttcggccacttgaggtttatttaagtcattattttatcttttttaattctatataattctaatcctaaccctagatgaaatcctataaatagaaagagatgactcttatttttaacctaataacttaacctagttttcactttgtaagccaacttagaaaataaagagagagcctatcagatttcaaaaccctcttcttcctcttctgaaatttttgaacccttagtgagttgagaaattgtccacacaattcaagccaatactcaggcctttgtggaagattatgaagaattcaaacaataaaaggagatgcatgtttagatattgagcatactctgtaacagaaaggatcaagggttagagatctaaatggaaggacacattatagtttgctgccaccaatgtaagattttttgtaatgttatgtgtttatttcattattttaggaaattcatatttagggtgttagattatagttctataatcaa

SEQ ID NO: 33779 - DNA, 2418 bp, Cannabis sativa
tatttgggcctgaagtagtccgggatgttaaagaatttctcaacgtatttcctgaggagttgcctggattaccgccacaatgagaaatagattttgtgattgatttgcacttggagtagaacctgtttcaaaagcaccatatagaacggctccagcagaactcaaggaggtaaaaataaaacttcaggggatgcttgatttagggcttatccgacccagtgtatcgccttggggagctccgattatatttgttaaaaagaaggacggttctcttagaatctgtattgatgatcaagaattgaataagctgacgatcaagaacaagtaccaattgcccagaattgatgatttgtttgatcaactttacgggaagattgtgttttcaaagattgacctacgatcaggttatcatcagcttagaatttttgaagaggatatattaaagacttcatttcgaaccagatatgggcactatgagttcttggtaatgtcattcagattgacaaatgatccagggacctttatggatcttacgaacaaagtatgtaaggatttccttgataactctgttatagtgtttatcgatgacatctttgtgtactctcaattagaagaggaccatgagcaacatctccgagtggtattacaacgactcagggattataagttgtatgcaaaattcaaatagtgtgagttcttgttgttagaggtgtcttctgcggggcacattgttcgaaaagacaaaatcattgttgacccgggaaagattgaatcagtgaaaaattggccgaggccaaaattggtgacggaagtgtgaagttttctcagattagcggggtattattgacgttttgtcgaaggattctctaagatttctgtgcgactaatcgagctaactaagaataatcaacggtacatatggttagacaagtgtggggccagttttctgatgcaaggtgagagagttatagcctatgcctcccatcaactaaaggaatacaagcagcgctatccaaaacatgatttagagcttgctgctgtagtatttgctctaaaaatatggcgacactacctttatggagaaaatgcaaaatttacacagatcattagagccttaagtacttcttcacccagaaagatttaaatatgaggtagagacggtggctggaattggttaaagattatgactgcgagattttatatcaccctgggaaagccaatgttgtggcagatgctttaagtaaaagaggtcacaggcatattttcaccactatgatgatagctcctcaactagcctcagaaatggctaaggctaaaatcgagttcgtagttggaaagttacatacctgacacttcaatcaaatttgttagaaaaaataaaaagggcgcagttggacggtaggcctaaggactttttaatgtcaaataacaaaatgttactatataaagcttgagtttgtgttcctgaaaattgtgaacataagaaggaaatccttgatgaagctcacacgacaccttattcattgcatcctggaaccaccaaaatgtatcaggatctaaaaccctattttttgtggtatggaatgaaaagagatgtggtggagtatgtatcaaagtatttaacctgccagcaagtcaaagctgaacaccagaggccggtagggttattgcaaccattagccctcctaaatagaagtgggaggatattgcaatggacttcattgttaatttgcctagaaccacgggaatgtatgattcagtatgggtcatagcggaccgtttcataaagtcagctcattttctacaagtaaaggttacctatacaatggatcagtatgctgagctgtatgtgaaggagatcgtttgtctccatggaccggctaaatccattgtttctgatagatataaagtttatacatcaaaattttgggtaagtcttcagagagccatgggcacaaagctgaagtttagtacagcttttcaccctcaaactgatgggcaatcagaaagaacatttcagatattaaaagatttactacgagcctatgccatgaactttgaaggttcttggagtaagtacttgcctttgattgaattctcctacaacaacagctaccaaagtacaatagggatggcttcttatgagatgatgtatggtaggaaatgtcgctccccaatccactaggatgtaactggagaaaggaagtacttgggtccacaataagttcaaaagaccaatcaagctataaacaagatcaaggctcggatgcttgcttcacaaagtaggcagaaaagttaggctgattcgaagcgcagagatgatacattttagttaggggaacaggttttcctgtaggtttctgcagtgaaaagtattagacgctttgtaaagaggggcaagttaagccataggttcat

SEQ ID NO: 33780 - DNA, 2235 bp, Cannabis sativa
aaactttcatttatctgcacctcctttgcattttggttttcttctatctcaagtcttgacaaatgatcagcaactaagttcttagtccccttcttgtcctttatttcaatgtcgaattcttgaagtagaagcacttaccgaatcaaccttggtatttcatccttctttgtcataaggtattttattgctgagtagttcgtataatcaatcaccttattcccaatcagacagggccgaaacttatcgcatgcaaacacaattgccagcatttctttcttcgtggtgacatagttcagctaagcatcattcagggttctactagcatagtagatggtatgaaataccctctcaactctttgtcccaagactgctctgattgcgtaatcacttgcatcacacatcaattcgaatggtaactcctaatttggtgaattgactacaggtgccgatatcaatttttccttaagaacttggaaggctttcaagcattcctcttcgaactcaaaaggtaccccgttaaaaagcaaatttgagagcagttttgagatctttgagaagtccttgataaatctccggtaaaatccagcatggcctagaaaactccttagtcctttgacagaaactggagggggtaaattttctattgttgacaccttggctttatccaccttgatgcccgcctttgagatcttatgccccaagactattccctctgttacgatgaagtggcacttttcccagttaagtaccaagttggattcctcacagatcatcactttttccaaattctctaaacaatgatcaaatgaagaaccgaaaacctagaaatcatccataaagatctctatacatgtttcaatcaagtctgaaaagattgccatcatacacctctgaaatgttgctggagcattaaatagtccaaagggtattctcctgaaagcgaaagtgccatatggacatgtaaatgtcgtcttctcttggtcctccggtgctatggctatttgatggtacccagaataacaatctaagaaacaataatacttttgccaagccaaccggtctaacatctgatcaataaagggcaaaggaaaatggtccttccttgttgccttgttgagcttcctgtagtcaatgcaaattctccaaccagtaaccatttttgtagggattaattcgtttttctcattctttatcactgtcatccctcctttctttggtactacttgcactgagctaacccacttgctatcttaaattgggtaagccactttagcatctaaccacttgaccacctcctttctgacaatctctttcatttgtggattgaatcttcattgtgcatcaatagtcggtttagcaccctcctccattaaaattcgatgcataactgttgagggactgattcccttaatgtaatccaatgtccacccaatggctttattgtgcgcgcggagtattcttagcaagttgttagtctccacatcagaaagtgaagctgacactatcacgggaagcttcttgtcttctcccaaaaactcataccgtagatgattaggaagcaccttcagttctaattctggtggttttttagtagatggcacaggcttctttggcacaacacccaactcttcataatacttcctattcaatggcctataggagtcaagccatttgccatatcccattacctccattccttcttgctcattcaactcatcctcggttaagctcaattctaaaggatcttttatcaactttttcttctccactatagtgtctataagatcaacaaagaaacagttgtcacttgcctttggaaaagtcatcgcttttagaacattgagaaacattgagctcgcttcagatgattttactatgattcaactttattagggtggtaacatcgttgctgctctcatacgaatcagagatgagatctaatgccataggccaaggacgattcaaattactccttctctttgagtaaggttcgaaatttgatttagattcggatgatgttgagagggaatggtggtggtggtggtcattgaagagagaggtaatggtggtggtgctcgtctaggtggtttgtgcgagcatcaccgaagagaatggtagtgatttatattttagaaggtttggaacttaaatgacatttgaagatgaatgaaaaaattggggtttttaatatatgtttggaatttcctacggtttagaaccgtaggctaaagtata

SEQ ID NO: 33781 - DNA, 1008 bp, Cannabis sativa
ataaggatgaataactatgaattctaaccataaaagagtgattttttttttttatgtaattttaccaattccatggattcccaataattcgatataaagttatatatttttaggaaaatttacaaaaatactgaaatttaggttaatttttacaataatatatcacacgatttttttttcaaaaatactgtgtttttataaaacaacagtggagcacaaaagagaacaactaaaaataacagtagaacaactaaaaaataactgtataacaacaatgaaaacttaacacagtagacagtataaaacttgcacaatattttttaaaaaaattccgtgccacggtaaaaaaaataaaaatatgtggtgtaaataatcatatttttttttatataattatatattcaaaaatttccgaaaatatgtcaagtgaaatctaaatagataacaacatgtatagaagaaatgctcactctttttttttcaagaaaaaaaaaacaccataaaggtattggtacaaattagaaggccccgtttgagactttgggctgggcctttgacagtccaaattgaacggctcagatttcgggccttcacttgagcccactaagtccacatattctaaaatttggatcaaaatgatatctttctcgttttctttttttataatttgtaatataaatatttaaatttaataaagacataattttataataatatttcaatataataaatatattttatttattaaaagttcataaataaatttaaaaataaaacacttatattttttttaataaatacttatgtttataagttattcagtatctaaaaaattaaacaaaattgtaattaaatgtgacatttatgtataagtattatatttatactagcatgaatacattgaaattttatattagagaaaacgaatcaaactcaaagctaccaatatttgtatttgacttgaaagagagtttaagaacctcgttgatttttcttgactctccactt

SEQ ID NO: 33782 - DNA, 2170 bp, Cannabis sativa
aaatccttgaataccctattcatgagatccataatggctgccggagtatttgtcaatccgaatgacataacctcactcataatggccatacatagtgcaaaaagctgtcttcaaaatattctctttccggattctcaattgatgataaccagatctaaaatcaatcttagagaataccatcttgccatgaagttgatcgaacatatcgtcaattctaggcaaagggtatttgttttattaaaagttaacttttttagctcccggtagtcaatacacattcgaagagttccatctttcttctttacaaacagaaccggagctccccaaggcgacacacaaggtcgggtaaaccctagatccaacatcccttggagttgtatctttagttctttcaattctgcaggtgccatacgataaggtgcttttgaaataggttctgcccccaggtaccagatcaatattaaagtctatctctcggtgaggggtggtagtcctcctggtggtaataattcctcctctctggaaacacatccaggaattccttaaccactttgacctcctcacgttcgagtaacacaggcttaccagagtcaattacaactgctaggaatcctacacatccacttgtagtaaatccctatctttcagtgctcagattcttgggacacgagaaccttgaactgaaaccaaaaaaacaaatggttcctcattctccagttggaaaattaccattttctgcttgtaatcaatattggtagattatttagacaaaaagtccattccgagtataatatcaaacttagccaatggtaactccacaagatcgacacttagttctctaccctcaattttgattaacaccgatctgatccactttctcgaaataatcaattacccattaggtaatagtgttctgaatcccatctcaaaaacatcactagacctaccaagctaactaagaacttttgttgcaacatatgagcgcgtggctctagaatcaaataatacagtataagtagtgccattaataagaagttgagttgtgactactgaacggctggcggcagcatctgcctgagtgatagcaaacatatgtgttggtgcaggtttaacttctagcttgagttcctttttcttcaactgaggacaatctttcttgagatgcccaattgatccacactgaaaataagccctcctgttacaagtcccagggtgatgtttcttgcagcgcaggcatttaggataggagtaggtctgacgtccccctttactctggtttccacgaaacttcttgttttgccctgaactcccaataggtgggaaatttctcttcttccgctcaatagtggaatcaccactctccttgccagaactagaaatagggatagtagtggttccaccagcactaagagcctctcgggtttcttgtaaaaactttacttctcctttagctcgaagagccttgtcaaccattttagcataggttgtggtgtcattggtggtgataaccagatcatgcttaatttttgcattcaatcccgccaaatatttttcctttctactgaagtctgttggcacaatcccagaagcttgcttggccaagcgatcaaactttgtcgtatactcggttattatcatattctcgccctgtaccaactcaacaaactctttccgctttgcactgtgaactgcctcattgtaatatttagcattaaataagtgccgaaattcttccaggtcattctcgtgacatcctttgaaagggacaccatttcccaccacaccagagcatcttccttgaattgaaacgtggcacatgccaccctatcattttcggtaactcccatcaaatttaatattctctcaatcacagttaaccatttctctgctttaagaacatcaggatgtcccaagaacactggggtgcttacttcctgaatctctcatataagggctccatacggttgctaacaacaggctcttttgctggcaccacaagaactacagtagtaggtggttgcaatggaggctgaacaggagcatcccactgtctcagtctcctatctctttttcttgttgagcagcaaacctttgctcccaatcaagtggagcttggggtggattctcttggccatctctagcagcatgaccgcggcctctaccgcgtcca

SEQ ID NO: 33783 - DNA, 1840 bp, Cannabis sativa
  modified_base (1812)..(1814): a, c, t, g, unknown or other
atactaattcgccattcccaactttgagcttcaactaccctggatttaagtaatcccaagtttcaagcagctgcaatgaagagcaaacatggttagtggattccaaaataattaatccaaatggatttttcattctctaaaacacatgattaaaaaataaaagcgttaccttcgttcttatggtttagaagtctaggacatcttgctttaaaatgtcccttctcttcgcagtgagaacatagaagaatacgtctgctttgtttttctttaattgtctctatttctggttcaattttaattctagcgtttaaaattgaactcgaagaagcaaaattgttggaggtatcatccacaatctcttcagcttttcttttgcccttatctgtaactctgggcaagccctccttgcaagtgacaattctgctcataagcatgcatttcagcttctagcttatccatgttggacgagttaaggttattgatcatgtaagatacaataaatttgttatactcaggtgaaaggctattgagaataaacttaacccattgctcttttgataaaacaattcccagcaagtttccattctggaactttaagttcatcaaaagtaagtttgaagtgacactctgactaggagacatctttgcactatggagttcaattgcaaaggcatataatagatgaggattggggtgagggttgttgatttttgaaactacaaatatcaataaacagaaataaattacttggttcaaataaattcatacacaaattcagaaaataacaagtaaagaaaatatgtttgcaaaaatactaaaaattaaaacatattcaattattttccatggtttccaacaaagtgatacaatgttccgtttaggcgagagtcaaagatatcattcattgaatagagtattcaactcatctaaaatagacaccattctagcaaccttttattcgatcaaaaaaggaatctgacattgtcccgtttaggcgagagtcaaggtcattcctttttcattagcttctaccattgtttcatactttgtaagccctactcttaacagccactattggggtggtcattactaagaataaaagacttaccatagtacttacctttcaagattctacggccttaaattgctaatgaacaaaaatctattaggaatgaatctcactaaaacaagaactatgtagaaccaacaatggagattgaatgtccttttggttaaagctcattatttaaaaaaaaatgtatttttagttaatcatttattttaatctataatttaataatgaaaattacttaatttaagttgatctaaaattaatagaaaaattaattttcaactttaatttaattttcaatttaatttaatttcgaaaaattatatagataacatataatttttaaattttataaaatatatataaaaaaatacctaaaaatatctaatttaagttattctaaaataactaaatttttaacttaaataattttcaaaatttaattaaataaaaaattaagtatcttgaactaatcaccttaatttgaaaaatatcccaatttaagttgatctaaaattaacaaattttcaacttaaatatatttttaaagactatttgaataactaatttcttagaaaaatttacttaattaataatttcaaaaaaaaaaatattctaatttaagttgatctaaaatcaatttgaaaaattcattttcaacctaaatatactttctatgaaaatttgaataattaagtttctagaaaaatttaactagttattgttgggttttatgcccnnnataaaactctttacaatctgattagt

SEQ ID NO: 33784 - DNA, 946 bp, Cannabis sativa
tcttggttcaatttggaaagttttatttcttgtcctgatctgttgctgcaaaacccgattctgatgctacaaatcaggaatttttttaaaaaaaatttgtatagctagaaaatcgtttttgtgctgtctcaagggttgttatgttctataaataggacctagagagcagccaaacatttttttttatcaagaaggaaaatacttcattaatcaagaacaaacaaatacaaacaatcaagcaagggccaaacaacccttagccgagacaaacaaacagctaattacaattgaataatctgtaaaaacctgctctcaactctattcaatcttctattttttacattttgaactctatatcttactatacttttaatatcagcaacaatgcgagtgtccttatgcgaatacccctcaaaaacacatctatttcgattaatccagaggtagtagcaggttgcggtagcagctgctatgttgatttttgccacccaattgtccatgttcaatgacagccagcctatccaactttgaaaatctgatggccacatgcgagtaccaagccattcaaacaccaactcaatcactttttgggaaagatagcaagagaagaataagtgttcatgagtttcaatgcaatcctcacaaactgggcacttgttcgactccaaaggaatgtgtaatcttgccatattatcctttgttaataaatgggagttaaccacttgccaaagaataaatttgtgctttggtaagttaagagaactccaaatagttttatggcactgaaattgattttgatcaagcaagctgttatataacagactagttctgaatttacctgttttcccaacagcctttatgtcaccttctgtgaatctcttcctcaagtggcaaagcttacgccaataccaacttgtgtcaagtttgagctcatacaaccagtaag

SEQ ID NO: 33785 - DNA, 1337 bp, Cannabis sativa
  modified_base (678)..(679): a, c, t, g, unknown or other
tccaatctgatcacaattggatattcaatgtttggcggtcggttgtaattagatcggtcggttgtcattggattggataatttatgcacacccctagccaggctaaatagtttagcttgatttggagtaaataaagtgtccaattggaaaaaaaaaaaaaaaaggcaattttcatttatatacaagtaaatgtacaatgttacaaaaaatgtacaaataaacataattacataatgctatataattttatgaatatttacaaataaacatatatgtttacaattttaacttgttgattactttcaattgattttctaaaaaaaacgaataaagctaaatatgtaaatataaaagttaatatttatattttgatatattactaaaataataccctgctaacccgagaaaacttcgcacttttgtcacagttcttggcctcggccaatttttcactgactcgattttccctgggtcaaccgtgattctgtctttttcgacaatgtgccctaacaaggacacctctgacaaccaaaattcacactttttgaattttgcatacaacttgtgatccttgagtcgttgtaataccattcggagatgttggtcatgctccttttcagtctgagagtacacaagaatgtcatcgataaacactataacacagttatcgaggaaatnnttgaatactctattcatgagatcttaaaggccaccagagcatttgtcaatccgaatgacattaccagaaactcatagtgcccgtatctggttcaaaacgcaatctttggtatatcttcttctcaaatcctcagctgttgataaccagatcgtaggtcaatctttgaaaatacagttttccctcccttgaagctgatcaaataaatcatcaatcttgggcaacaaatacttattcttaattgttagtttgtttaattccggataatcaatacacattctgagggaaccatccttcttttttacaaataaaaccagagctccccagggcgatacactaggtcgggtaaaccctaaatcaagcatcccctaaagttatatttttagctccttgagttccgctggagacattttttatggcgctttcgaaacaggctttgctccaggcagggccagccctgggcctaggcagactaggcccgtgcctagggcccaaaaccagccagccatttaaccctttaaaaaaaattagacccacaacacccatttcctccagccggcccagcccaacccaattacccacttcctcagcctgtccaaattccaaccacatacctattaatgtgaaaaaaaaaactaaaaagtctctctctctctctctc

SEQ ID NO: 33786 - DNA, 1759 bp, Cannabis sativa
agaaatcacccaaccaaggcactgcagtaaacatgaattgagaaaacaaattgttcggggaatttgccaaaactggtgaaccggttttacaagtcctggcaaaccggttaaccggtttccaccaggtctccccgaacaattctaaacttgctcaaaacttgtccaaatgccatcaaaattttcagaacacctataataacctttcacaatatattccaagcaatagaaaccagaaaaacactctgaatcaaaatatgccattgatgattgaaactcaaacttggtcatccaccacaacaatcatctaatacagcatcaagaatttaaaatcaactcaatttaagcttagaatttgaattaaaacacaacctaaccctaacaacccttatatctcaaaatcacataatcaaaccaaactcaaaacttcaaaaaaaacacaagattataggttctagggttaccttagcttgaatcctacttgactcccttgctaaaatgacaataataagcagctggaccgaaaaagcctctaacctctgtagctaattttggtgttggccaatcctaaacaacttctattttggccggatcaaccatgatcccatccttgttcactatgtgccctaagaaagagacacgtgacaaccagaactcacacttcttgaacttagcatagagtttatgatcccatagtcattgaagtactaattttagatgtaactcatgttactcttttgattctgaatatactagaatatcatctataaaaactattacatgcttatccaaaatatccttgaatactcggttcattagatccgtgaatgtagctggggcattggtgagtccaaaagacatcactagaaactcgtaatgtccatacctagtacagaatgtattcttcaagatatcgtcttctccaattctcaattgaaatgagaaattcaacagaaattcatcttggttcttgctgggttcgaagagagagagaagggaaagacagaatgttctttgattttgttggcttttctttatttttctttattttccaaatgagtaaataaatcaattaacattattaggctgagaattaaactaaatggccagctgccatttccttaagcagccacctaatcacctagacaaaatgactaaaatgcccttggtgctttaaataaagccaattcaagcctaggggtaaaatagtcaaaaaccctaacctcgctcaaactcggtattctatttttctccaacatatatcccactaagaaaaaggttctagacttacccatgtgattaaaatagacatccatcgcattttccgttgtcgccaaacaaaaattataaaaaataacataattcaaatataatacaaataatacatgtagatcttaataaaatctccaaaattgagagattataactgtagtgcccacttttaataatgggacccacaattaaataaattcacaaataactataaaaatatcaataattagtgctaattgtctttactaatccatattacaaatgcggtcattacatttactaacatgtatgtttcattacaccttaaatatgaattctataagacgatgaaattaatcacataagagtttaaaaaactttatattgatggcagcgaaataatatgactccttccgctcaaatctctaatccttgtttccttctgtcgcagattaataacaagatctgagcctgaatctctttctctccttcgggtttggttaccaccgtc

SEQ ID NO: 33787 - DNA, 1966 bp, Cannabis sativa
tttatcggttttttcggttcggtttgggcgggttattcggtttaggcggtttataaatttttttgtacagccctaatacatattaataattctatcaaagaaaagagggtccatacctgaaccataaacaacagacttcccaacatttactttaagcctagaagtgttcaaattaaaataactggaagcctctaagaatgagcaaggcagatttgaagttacccttgcaaaaaataagtagtcatctgcaaaatacaaatgattaagtctcaagctcttacatctcgggtggaaggcaaaatcataagtcttggcaattctagccatgattctagacaagtattctatgcttatatcacaaatagaataggtgacattaggtccccttgtcgaagacccctcttatactggagataaccatgtaaagacacattcaccataaaagagaagagagggaagaagcacaactcataattagctccacaaacttactcgggaagttgagagtgttaaacatctttttaagaaactctcagtctacagtgtcataaggcttctacaaatcgattttgaaaagacaagctgattttttttgctttcctttcaaagcctctgaccattcttggcagactattatgttgtgcactatctgcccgccttttataaagccattttaatttccaaagtaatttctggaagtaattctgatcgtttttgtcaccactttataaaccacattataacaagaaattggtctataataactgacatctaggcacactgtctttggaatgaggataatagtggtagcattgatttctttaagcatctttctaatgtttagaaaagaaagcatgcacattatgtgtcttttttgaatagttattgtttagtttatgtacattttttatggtatataattttaatttattccacacaatttttttttattgtatatacgtgtatttattttgttatttttaagtaatttttagaatatttttttgttcaacagttatttttactaaaatatgattattttactttcatatttttcatattttttttaactctctctctcttacaaaaaaaaaatattaaaagtactctttctgtatctttatctctattacttgattaataaatgtagtatttttttttaaatgttttgtagtttattcggagttgatttatgaatgatttgcatattttaacaagattgatgtcttgttatttttctattgatttatagccgtctttttgttattttataattttttatagttagatgtttatgtgttttatagtttgttttttctgttatttttatgtatttcttttgtacattattgtttagtttatgtacattttttatggtgtatatttttaatttattccacacaattcttttgttgtatatatgtgtatttattttattattttttgcttttgcagttatttttttattgttttatagttattttcatgttgtttgcaaggctgtctcaagccagtgagaagcttgggaagaaatctaaaacgagaccttttatataattaattttaatataatattggtttgatatttaataaactaaaagtattttcaataaatattaagttcataatgtataactatatattttttaacacaagttttttaagaaataatttttcaattatacattaaaaagtgtaaaatatatacaaatattattttttttataggaaataaaaaatcttgtaacatatcttttagtttacacaagaaaaataaataacttcttattgtaagtttcctacaaaaaaaaaaaaaggaaaatgcctttatttggtgtcaaactcttcacctcttgaagaaaggttaagagatttgccaattatgctatttcaggttttgaatatttataggattacatttttatatatcttatttacttctacatattatatataccgattttat

SEQ ID NO: 33788 - DNA, 1373 bp, Cannabis sativa
tgagttatagggattgagctggtgactcacgatgcgcttggttgaattcgctaagtgttgctcgttttgcacggttctttgagtattccattatggacatgccagcgaggcatcctgctcgtcatgttgatccgaccaggtgctctaagtagatgccacgtgtcaccattctcgtgatgccacgtgagagtgccaattttggataacactataaataggggcagaatgtactgaaaaaagaacggaaaatccttgagagaaaagaaccctagtttgtatcagaataatctgaataagattgactcgtggcctatgcagaattttaactacaaaaccacgtaaaaagctttgtgttacattttctttttttttttttactttctattatttttgtgcaaaatttatcacgaaataggcttattatcgttaacaaaaatctgcgatgacagtttggtgctttcattgagagcctacgtgaaaaaagctcagaagaaccctcctaaccaaaagaaaaatctttctccaatagctgataacggagaaaatgttgatactcatcctgaagagactactcaccgtcctggaaaagagccaatggcctcacggaggcctcccaattcacggacaacacggtccacgcgttcaagaaagactcagcatgaaggtggccaaacccagaatctacacggcccacacgttcaagaaggacccaacgtgaaagtggccaaaacccaaaaatagggaataaggtacccaacacaggtgttggtggtgctcaactcatggatgatgatgcctatgatcccacgagatacatattgattgtcgagttggaaaatcatcatctcaggcgccgtttggaggaggcaaatcgacgaaatgctgagttggaacgggaggcagttgcagccagggcggcacaggaaaaaagcacacaaaactaacctaatcctgtagtgaggagaccataaggcagacctcacagctcacaaaccaggaggtaggagacggctcaggtggaccctcaaaacgctcaggaagaacaacgtggggaaactgaggatccttctgaaaatgaacaaccaaataatcaaccagagacttctcacataaatgagaatagaaggcgacccgagactagggaacaggaaatccctcatgagaacaagggaaatcctaggactcaacctaggacaggtgggttgccaccgagacatcgtcaacgtccttctcgaaccaaaaaagaaggggcacatacaaaccccagtagggggcatgcaataacccatactcaagggagaaggctggtacgtgacgaggtaagtgtcagctcgggacgcacaagagcccgtactcgatcaacgtgaggaggg

SEQ ID NO: 33789 - DNA, 2098 bp, Cannabis sativa
  modified_base (1802)..(1804): a, c, t, g, unknown or other
ggttgaatatgataatcccagtagctgtttcaagatactcttcttgctgtatcttagttgttccttcaggccattcaatgtgttcttcacggaccctcaacagcttctattgtgccagagatcttattttcctcctccatattctgtagtcacctaatccatcaaacatatcaacatcaactttaaaactactcatattgtatttgttaaaaatcaaattagataaaggtttagaatgtcctccaaatctccaatatctaattccgcctcttgatttccatccttgtgttcttgaagatcaaattcttcttgttcttgattttcaatatctttcaaacttgcttcttgaatgattaggttttctagggttctaaagattttcaagcttcttcctttttatcctttaatggcagctaggtttttactattatttcttttgcaacttcttctacccatatctaaacccagaaaaaactactcactcacggctccaacctctcaaaaccgaacccagaaaaacccctttaacttcggccaaaaactttaacacaacccgaaaaatagtaagaacacaaacacacacaaagacaaatataaacaatataaagattaaggtgagaaatgcaaacagaaatggtaaatatggagacaccatatttgatctcggagttcgcccaaaacaaccgactacttctccgtcaagccctcaacttgattccactaatcatcaaataacaggttacacttttgatttacaactatttgtatttctctctgtttttctctctttggatactaacaaaactctcttttcgtttacatgaacatatctaggaggagctcataaggagatgacaactctcagccaaaaaggctctcttttctctgttgttatttctgatgttgttctctgttgttgttctgtatttttactccttgttgtatctcttattttgtatctgagaaaaaatacttccttttatagactgatctgtgattctgatctagggcagagccctagagatatttgtaattgtttttgtaactgtttcagttgtaactgtctttatgttctttagtcttgatctttgttgtatttgatgtaagggtatatttttcaaaccctgtgagtggtgttatacaacttaaggataaataagtgaatctgaaacaacaggaagattgtggcttggctcttgtttgggttggaggtaactctttttactggtttttatttagagttcttgctgagtgtttattggaagagcatgtaaatggttgagttgttcttgagattgcatgtatgaagaattgtgttgatcttgaaagatttaggtgtgttaattctatgatattgttgtgagtttattgttgattattggatgagatttttgaggtattttctaggttgagttcatgtgtttttaagtgttggctgctggaaattgattagggatgagatgggtttttgctcaagctcttgaacttggaatttgttgtgtaaagcataatcttgtgtttatttgtggaatctaaatttcgagagtttgttgttgatgtgtttaatgcatgaaatggtgtattagactctctgtttaattattttaaacctatttgacggttctaagttttggtttgggtttggatgtattttgggcataattttcgtagcccaaaactgagttttctggatttttaaaccagtggtcgcgactatcataggtctagtcgctaccatgataatgtcagtttattaatttttttgagtttttgtttttgccataacttttgactcgggactnnntttgggacgttctttatatcgttcaaaagctcttttcgagatctatgtgattatctgtgatttgaatgccaattttatatttttgtggaagtggatttagggattaaccctatttgtgtaaatcccaatattgtgactacgattactggcacctggtcaggagcacccgggaatttggaatctttattattatgggacatcaggtaagaagtagtcagcacgtagagttatgcacgatggcacttatattggaaatggtatatgtgagtaatcagtaaccgggattagggttat

SEQ ID NO: 33790 - DNA, 4379 bp, Cannabis sativa
gttagttagggtgttacacattgaatctagaatggtctaaaaaagtgtaggagacctcgtcctaaagtttaagactcttggaagtattaaaatgaaaccttgggagctcgaaaatgaagtacccaatgcccaggttgataattgggctaaggcgctgggctctgcttatccgattctgattttgtttcgactgtccgtctagcttttcataatagataagatccatgaatttaaagaggtcaaattcacaacttcgcatttctcatttccaacatgggaaactcactcaaaaatgaagagttttgagtctctcatttctgtagaacatcaacatctccgagaactggtgaccggctttgccagaacacaaagatagactaagtaatgtcaaaatatctcttagacatcgtaaagtacatcccttggacattttttcaattacccagcatccaagctgatgtcatatgtaaacatgggcgttgggatgccaacttgggcgttgggtcatgaactacgttcagtaaaatgaccataactcactcaatattaatttgattgacacaattcaacttgatttcgaagatctttcaatgttatatcaagtcatgtctcacacttcaatcgtaattctgaagctattggcacaaaatttcacccccaagggagttacaaatataagctttgggttacccgcaccgccaagctccgaaaaatgactatcaactcaagaagttaattttcaccattatatcatcatctatggtcaaaaatatccaacttgtatttttctcctatttttgtgggcctccttcacctatgaaagcagagctcccttagcttatttttcacatacaaaaaactacccacaaggtcagagcttctctctctagtttctctctcttgaaattggagctttgacacttagcttttttctataataccatctcgtgataaataaaacttgaagtagacgtagctccattactatcacgatacaggaagtgaagtagtataagtttattttgtctctcttataattacttaacaactatttcattctcatcaatctagcaagcgggtgtgacttagaagtcttagtctagatttctgagttaacactcataatcagccaagatataaaatttgacaaaaatggtgcatacaattgggagacataagaagttgaaagaaagacaatcaacatttctctgctgccaagacaagaatatgatcaaaatgaaattccaattcaacctaccacagagaattaaccgacacaagtcatagaatccctgccaaactcaccaataaggaaaataagaccactataagaaatctatgaggcatgtaacttagtgcttaaggagccaaaaagctttgaataagcttaacaacaagaagtatggagaaatgttatgaatgatgagataaaattgattaaaaagacaaagatactatatgagtctagtgagtctctacaagacaaatctatagatcgaccacaagacaaagatacttgggagcttgtagatcaactataagacaaagataatataagagtgaagtgagtatacaagataaagctaaatgcagatcgctctatccaaaagtacaaagcaatattagctgcaaaaggatactctcaacaatacaaagtcgactacgatgaaccattttctccagttgctctcgatacaatcagagctttgatagctctagctgcacagaagaaagggaagttttcaactcaatgttaagttgacatttctcaatggctatttggatgaagaaatctatgtggaacaaccttaagggttcgtggtgcaaggcaagaagattaagttttcagattgaaaaaggctttatatctcccaaagcaagctcaactagcctagtataactgaattagcagccacttcattgaacaaggattcaggaggagcaagagtgagccaacactatacatctagacacaaggtacagatgatacactaataattctctttatatgtggatgatctcatctacacaggcaatagtgagaagacgataaagaagtttaaagaagacgtgataaaaaaatttgagatgaccaacttgggcttagtgcactacttccttagaatcgaagtatcttaaaaggaagaatatggaatcttaatctcacaaaaacactcttggaaaagtttaaattagaattatctagaatatctagaaaaattattgtacaactaagaaaattaaaagttttagaatgtattagaaagttaaaattgtaaaacagagaagaaaaatttaaaaacttgtagcaccaccaaccttaactccctataaatactaagttttaagtagaagtgtaaccaagaaccaaatcaataaagcttatttacccttttctacaaaccataagtctctcattttggtacaaaaatcaataactccttttacttatcccaaaccatgaaccataattatcattctatataatcattatcttatatcaccatacaaccatcacttaaaaaaatcacaactattatatactactattccaatttaataacacgatcatctcttcccttagaccatctgttattaattttataaattttctattaattttaacttaaaaaaaaaacaaaaaaaagtaaactaatagtatgtttagtcaaatttattataattatactccgatatataaaagtgttgactaactaaaatatcaacaaaatcattaaaatatgttttttttttttttttttggaaaataatgcatctttattttgttatgcctttattagtgattggtaaaatatactaaataaataaaaaaaaaatgaaatttattattgaccaacgatttctcctcccttttgtgagaggtggggcgattggcacttttatgataaaagagtcgaagacaccatcacctaaccacgtaggaaatttcttttttaaattctagtctttagatattttcttcactcattttcgtgttttcttataacaccacaggaaagatgtgatattaatttagaaaggagcaatggatgtcactagagcatttgcaattattattattgatttatttttttttttcttttcctttatttatttatttattgttttttttttttatgaatataatgagtaggaacaattttgaaattatttggtgataattaatggatgattcaaatataatgagttgctactgtcgtgtggtttcatgtgggcaacacatgaaaagaaagttgaatgcctttttgggtcgcaccggctcgtctctaatggcaaacagataaataatagactacgagtaagaggtcctatacattaatgcctctatcgttctgcctctctccatatatactggttgtattgtatttatttgaagtgcttaattaaattcattgtagttatttatatattttgtaccaaaattctcaatagaataccatgtccaaaatagattttaaaatgaaattttttttaagcacatatatgatagacttcaaaattaaacaaactgcattatattttttgcactgcactcaaaatttctttaattatatgtgggagattctataaaagtattttgttttataacaaaaaaaggatcacgtggtgcagattcctttcctactccttcagtcatattctgtaatcccgggtccccgtgttaacaataggggttttatactcagtcttctttaattgggtcatgggtagtcactttaagagttccctttcaagaggggttagggtaggtttcgaacccttacccaaaaaaaaagaggatgccaataaaagcaatccctaccagtctaccactacaccatgttgtggttaggagattctattaagtaaccactttttttttgtaattgtataaaaaagaatgatattgtgttaggatacggcgttattgataataattagtagatggtcgatgtggaagagaaaaagtgcaaaaaagtaacttgggtgttcacttttgagtagggatgagggctgagctgtcacaaaaagatattgaaaaagagaaaaccaaaagcgctgtcaaagaaaaagttgtaatatatgtggggtctcatgttgtaggtcttgcaagttgaggcaaacagtaaaaaatgcatggtcgccaaacccaaaggccgtatggtcgactgtacgtacgtactggattccttttctaaaatatctctctctccaatctacacctaactatctttattcgtatttattatctcacacgattaatggagtacatgaaatacaaacacccatgttcatacatctctattcttccattaattatattggcgacttttctatgtacattaggatcgatcttgtactatagctatatatatata

SEQ ID NO: 33791 - DNA, 2191 bp, Cannabis sativa
  modified_base (800)..(800): a, c, t, g, unknown or other
ggggacccgcccctaatggggcggggattccccatctaaatggagaatgggacggggacgaggacggggatcacactccccaccccaacggggacccgtttagtaatttatcttatatttctagtaatattttacaatttattatttatgtttgtatttttttagtatattagtatctgttttatgaattttaagttgtattttggatgataattagtttattgaataataattaatgtgtaacattttaatttttatatagtttaatatttttgtatattaaaaattttattataaactttatttttttattaggggattccccgccccgtccccgcccccgttaggggattccccgctccatccccaatggggaataagcgaagatggagattaaaatccttaacggggatggggacggagcactccccgccaattccttgtcctgtgtgcatccctacgcgtaacttgagcactcaattattctgcaaggtaagtaactgaacaattgaaaccccttcagtcgtaaagaacttgttattttcaaccactaacagtgatttgatggtaagccatcgaatatcaaagaagaacaaacaaggaaataaaataaaattatgtcacgaatacaagattaaaacactcaaaactacatcctcatagagacaactgaaacactcaaagtatatattacaaagacaagattaatcgcagtagtaaaactcgaattgcaatagcacactacaaaagactgctacttttagtgataatttttcgtcacaacataaattttttgtgantaaatgtgacttttagtcacaacgaaaagttactttgtgactaaaatatagtatttagttacaagttgccactactttagttttagtcacaacaaatattgtgactaaaaacatatttagtcacaacaaattataatttttgtaactaatactttaagtcatgtactttttagtcacacacaataatgataatttataattagccacaactttttttatctttagttacatattttgttatgattaaaagtaagattttttatagtggcaaaatacaacttcaaccaagctgaacatgctaaaggaaggttgatgaatctgactaaagaaaaagaaataatttcatgtagctataaatttaagaaggaagaacttaattttttatataaattaattcaaccaaactatatacatatatatacaaaatgatgactcattttaatctgctagtccaattgttgctatttgtcgatcttttacttttcttagcctacttcacaaataagatttgcagttaataatctaacttatgtaattaagaacttagtatacgtatacttggattatatatatatgtattaattatttacacaaagtataatcttatatgcgtgccatactgccatcttgaaacgtttcttaattaaactaccaatgatctatttattaattttcattaaaaacaaaatctacttgttaatttcatgactcatgagaggggtgagggtatacgtgatgagtgcagtcatgttaaagttgagtgcaggtactaactctcctaattttcataataaaaattaaaaaaaaaaaacaatattaatatatattacaaaaacaatattcatccttaatttaagatttaggttcacttataaaaaacaatattacgtacttctctgaaaaaaacaatattacaaaagtgattacccacacttatgttttttcgaagctgaaattctaaaatggccatttatataatattagaaaatatattaatcaatttttgttggtcgatttgtttgggtataagcattctttttaagtagcataatcatgtaattaacgatataattaactagacacatcttatattattttacatttaatacttttttttattgtactatgacatggtattaataattataatatatttatataaattaagaatgacgcaagaaagatacccaacagggccaacacaacttcgaactaaaaattaaatacaatccactgttatgttttccattaggtataaagtaaattataagtaatttaccatatatgttatttcaaaataaagttaaacaataaagtgtttaattagatgtactaccaaacatagtattgtgaaacaaattggtaaaagtatataaatatatttataggta

SEQ ID NO: 33792 - DNA, 1060 bp, Cannabis sativa
tacacccgtttggagaggctgagttatagtgttatagtaaggaagtaaggacttaaggactcttaaatacgcttctccaaattatccaagactttttatgtccgtaaggatagtttgggcttgttgtatacctatagtgtgatttattattcatttgattgtttctttgttaaagatttcggtacgtcatctccttgcacgttcttgtaagtttgcagatttgttgatagtttgcttacttatgagaactgtggggaggtgctgccgaaattttgagaaaaaaagtaatcttaagagaatagattgcattatatgtatattacaaatctgaattggataggtacgttctttacccttttagtaatggagtgagaaggtggactaggacacttgcacattttcaacattaatttgaacttcctctttttatatcgtgtagaaatatggtgagcgacagaagctagatgactttaaagatacgatctgtaaagttttgtatgggtgtggatgagtttgttggagttgcttgaatgtaaataaattctgtcagagttacactatgcctttgcatgagatgtctaaatgtgaacttcgagactcccgaaaatattagggtgcatctatttgtgcatagcatccaacgatcgtacacgacctggtattttcatggggagttgttcgcacaaccgactgttgaaatagtagacatcgttgaagaagaaatgacagatgtgatggctgattttttaagagaagatcctagttttgacgatacaagttctaccattgcttccttcagtgagccccctctgaatggtggtggtaagtacgatgatttgttcaaggatatgaaaactaaattgtacctgagttgcaaaaaatcagcactcaatgctttggtgaagctgatgcactgcaaagttctcaacaagtggagtaaccattcttttgatatgttacttgccatattgattgagttgttttcggagggtacaaaattacccaagtcccattacaagtcaaagatgaagttgcgtaacctgttggaaatattttacca

SEQ ID NO: 33793 - DNA, 3058 bp, Cannabis sativa
  modified_base (2040)..(2041): a, c, t, g, unknown or other
  modified_base (2847)..(2859): a, c, t, g, unknown or other
cccattcagtaatacctattaagagtgcatccatttaaaaaagtctcccatggtttaaaatttattttgggtgatattttaggttatatgtagattattattgtttcattgtagtattatttattttttatgtggttgattaataaatattgcccaataaattataatttttttttgaagtgaaaacaaaatacattaatatattttttttaatttttgtcgtgtatttcatataaaaagtattttcttaatttattttatttcttatttaaatttatttaaaattattaatatatatatagtcatgaaacataaatctatctatatatttatacataattgtcaaatataaacttatttatttatctatatatctataatctataaatttatataattgtgaaacatagagagatgatgaacggtctctataagcttcttctataattatctttttttttttttgtatttttttaaaatttttttaagaatcttgatgatatgactctttaacaactctttgtgaaaagtcttacatagcttagaaacgtttgtggtattatagtgtaagatataaataaataaattagtttactactcgtatttgtattaaattgagttacttattaagtattacacattgcctaaataattttatttaaaaaaaaaatatttgtgaatatattttagggtaaaatacagcataagtacttaaaattttgagtttgtaagcggtataaactcaatgaattattttagcagcataagtatccaatataaaattataatttttctccagttttgaatttattaaaataatatttagaagcaactgacactacatgtttctgtcctgatccaaagatatggaatctgggccttatatttgccatgtttaagacaatcacagagtatgtactgacgaaactcgagaaaaattacaattttataaatactaggtacttaagctgctaaaaaaattatagaatttacgccgcttacaaatttaaaactttaagttatgccatagtataaaaacaaggtatacaaaccatccatacacaacaattcatcactttaaataaaataccacagttgagtagaaacttagctcattaaaccttaattcctctaactcaaatttaacagccctatttctaatcaatttaagcttaaacaaaccttaaatcaaatctaaaaacatgtctaaactcaatttgtatctcagccccgaaatcatacaagcttaacccaaaacctaacttaaaactttgaagaaattaaaagaaagaggtgaagaacttaccttagagctagaacaaatcctagaccttgttaattctactacaaattgaaggattggcttaagaagatcaacttgcagcagcgggctccttagggctcgaaggggaggaagagaagagaataagttgaatgacttgtctcacatttgttttggcttttactcctatttattctaatcaatcatctaaaaataataaacttaatattaagatcctatttcagcttaaatcaaaccatataagacaaaaaatcaatcttaacaaaagactaatttgccccttcaattaaacacttaattaaaataaagcttaagggtgttttggtcactttctaactatcccgataaaaccaataactccactttccaaactagcctggtatattccaatatatctcaagttttattgttgtgacattcctaaccactccgtcaaatctccacggctgtcgaacccaaaaatattttatttttgaaaatggtatctacaatacctcctcttaacgcgaattttcgttaaccaaatttgagcctcacaatgataattcgacacagaaaatataaaagctatagaaaaataaaatatgaacactagattttttacgtggttttgtagttaaaattttgcatagtccacgagtcaattttattcagatttcagagtatttttttcagggcctcttgcataagaggtttttcatcccccttttttatcttgtctgccactatttataatnncatagtggcagttaattacaaagttgaccaaaatacatttacaaccattatccctaaaattgtgggatctgattacaagtcaagctaaataaatgaggtttttacacaactgtgaatatcccgcctttattgagccgagatgaacgcgtaattaaagatatacagtaacccatgtctcatagggatgcctcgccgaggagggagtcaagatcactttaattaaaaatatctttttaatgattacaaagggtatttttgtcatgttcctctatttttgaaaagacgcattccctctgattttggcggttgtgaagtttcaaggtatattagaattaaatgatcatcttttctacttccgcttcgaatcacgtccattggatcaaatcttttttgaaatcattatcatgggtataaaataaggaaaaggaaccacctttgcaccatttcacaaagtttgagaaaaacccttaaacttcttcaccaatgatcaccattaaatccgttcaaagacttgcatgccatccttgtccctgacctttttcctgtgagtttcctccgacttcattttctcaaagcaatccttgcttcgttcgaaggtttgtagacgaaattcccaggcattgccccaagccctaacttcaagtggtaagttactttctcctttctcatgtttattacatagtgtagatcagttacttgattcgtttgtatcgttatcatctcatctggttttggtagtcttttagggttaaaaccattcatactagggttcaggcaatacgtaggttgttttaagatctccaacnnnnnnnnnnnnngtttgataaaattctctccatggattgggactgctttttgctggtagcaatgtcccactctggttcagaaatttatcgtccagaagctttaaagtttgagtttcctatagaatgggccatcccatataaacctaatccctcaaaacccacctccaaattagagctaaatgatgctagggctagggaacacacagtgaga

SEQ ID NO: 33794 - DNA, 1646 bp, Cannabis sativa
aaaatagctttattattaattttaaaattcttatattaaatattaaaatttcattcactaaaatttataatacccaaatagaaacttaattagaagcaatttcatcttaaatacaacctaaaaaaggcattcctataatataaagttttaaaaaattaatatatacagataaaatactaataagttacattttcataaaaagattcactttaaaataaaaatgatttataaacattttggtcacctctttccattagttactttaaaattatgtatttattttaaattatattatgttattttattatttaaaaaaaagaattattttccttttttttagcaatatttttgttacacctttaaacttatttaagaaactattacattaaaataaagtaaaataactcacataagttattagtggaatttttaattacataattacataaaatactactttttgtaaaaaatttatatttttacgtttaaagttttttttttctacatttttagggtactttataaaattacaagaaaacaaaaaaaaaactacataaaagtaacaagaaaataacatcaaaataccaactaaacacattaattaatataacataaaaataatatacaaataacaaaaaaatgaacaacaaaataacaaaaatataatataaagatacaccaaaagactatatatattttatgtaaataaaatcgtaaaaatcgtaaaaatattgaaaactccatacagactgtatttttataattttttgttgttattttgttgtgtttattgttattttaaaagttatactattatttcttaatattatatgataaatttttagtaacagtaatttattgtaaaaataattcagctgtcatataatatattaattttaaaaataaatttattaacttaaataatacatataggtactaattagtatatagttggtactatagttcaatagtttttttttaaacagtaaaaaaatatatgtgtcatatatcttgaaatgattatatgaaaaagtaaattataatggtatttttttaagctcaatcaaataataatgtgactggaaatgatttttgaagcttgagaggagagagaaaaatatgttgaacaagatatgagaaaaagaagataagttaaaaaatactttttaaaaatacttttttttttattccttttttttattccttttttttattccttaatcaaaaataatcaaaaatacttttacttttatattatattttattaaaatatacctacttttttgaatatgttgtctaatatactctcattttctacataagtctagcatataatttacattaacttatggggtctaatggggatatcatctataaaactggacatattttaaaggatataaaaaatattttaaaggatataaaaatattaaaggatataaaaataaaagtaaaaggatataaaaataaaagtaaaaattaaaataaataaaataaaataggtatacaatttaatttcctaaaaaatatatggaggactaaccaaagaagaaaaaaaaaattaggtgctattattagatttttttttttttcggttggcttatttcagtggctcaaatccacttaaacattattaaaatagtaaa

SEQ ID NO: 33795 - DNA, 1776 bp, Cannabis sativa
agaaaaatcatcaacaatagttaagaaatatcggtaaccttcaatactagtaacatgaacaggaccccatatatcaaaatgtattaaatcaaaagcagaagaggcaaaattatcgttagatgtaaatggaagtcgcttttgtttggcaaaatgacatatagaacacataaaattgaaaggtttttcacaaaattgtaaacgattatttaagatagtagaaatgttcatagaaggatgacccaggcgaaaatgccagggttccttcaaattacatgtattgtttgcaaaaacagaaatatccatagtgagaaaacgatgattttgtttaaagaaaaatagttgtccaactttgttagttgtcccaatcgtagaagtcagggagggatcctgaatcaaacattgatcaaaagtgaaagtgagtttattaacacaatgttcaagataagcattgacaaaaaataaattgaatttgaattcaggaatatacaagacattcgttaagacaagttggtaagaatttgtaacagttccaaatttgttgatatgaatttgatgaccattacgtaatgtaaccaagttaacaacattatttttatttaaagatgtaaagcaatgaagagagtgatatgtgatgtgtagcgccactatctacaatccacaagaaaagagaaaaaagatcgtcattaccgaagatgttagaaaccatagggagattagttgttgactgagctgaagttgggaagagccagccgcggaggggtctggagtgggagtcaccgaggcgtgatttgcccgagcagtggtggtggtcttttccttgtctccatatctaggaggaaaaccgtggaggaagtagcatttatcgacaaggtgacccggtttaaggcaattagaacaagttggtcgaggtttcttgctccgagatggttggttcagatttggtttggccgaagtagcagtaacaacgtcagtattgccaagacagtgttggcgctcttgttgaacaaccatggagaacaccttcaacagcgaggggaatggatcatagagtaatatatgagcccgaataccctagtaagactcattgagaccaaacaagaactgaatgatctggtctcttgtgtaataatcttgaactttttgcatcgcaccgcaagtacagccgcaggtgcaggggatattgggttggtactcgttgagctcatcccaaaaagcttgcaattgggtgaaataagtggtgaccgagttatcaccctatttaacattgccaacgaaagttttgagttgtaagattcggagaccattgctttgattagatcgatcatggatgtttgtccacatctcacaagcagtggttttgagcataatactagcagcgatctcgcgagatacatactgaagaatccatgacataaccatgttgttgcaaatgtcccatgtggagcaagaaggatcatttggaggtggacgaggtatggtgccttcaatgaagggagttttgttttttggcagcgatgttaatagaggttgcatgcttccatgattggaaattttcttgaccagtcaagagaaatgaagcgatgaggttatttgggtgatctccagttcatgggaaggttgaccaagaacgacacgagaaaagccgtgattagcaataaacaatgagttatgagtaaaaggcatttggccttgatgtccaagataaggaaggttaccaccaagaaatgaaaagtttgttgggttttgtgccctaaataaaaccaatttcaatataat

SEQ ID NO: 33796 - DNA, 939 bp, Cannabis sativa
tcctgtaaaaaacttgacaaaacacttgttaaagcaatgttttgattttcatcacactattttcagaatcattatcactcttaagtgatatcaaagccctttttattctttttcaaggtattagcacattcagattgaatatgatcataccatttgcatttgctgcgttgaatacccttttgaatattgggaacaaaagatttagatgcatcgttaccttttagagtttttgagaaattctttttatttccaatattttcatgtacttttgaaaaatttatgttaacaaagtcatttcatcatcactctcattgtctgcatcatatttttcaaaaactttaaaggcaataccttttcttttctcaacggaagagtttggcttaacctttttattgatttgttgatttaactcaaatatccttaattaacccatgagctcttcaagctttattttgccaaaatctttcgcctcttctgttactagcaattttgtgtcaaactgtagggaagcacacagataatttttcgaaccaaaacagattcatctaagttttttccaatggcaaaaaactcattagaaatgtcacacaatatttcataaaattaagataaagttaatgtttctaacattctttattcctcaaatcttgtttgcaacatggtaaaacatgatctctatacttcagccgtaccttcaaaccgagtttgaaggatttcccacacatcctttacagattcacaagatgatattaatttaataaagcctttaccaacataattaaaaatagcatgtaaagctttattgttataactagacaatttttcatcttcagtattcaaactatattcaggttttaccatagcattggatgcatctgataatcactgttgtagattatcatattagtaaaaccctgtgtctaataaatctaggaaact

SEQ ID NO: 33797 - DNA, 1373 bp, Cannabis sativa
  modified_base (239)..(256): a, c, t, g, unknown or other
  modified_base (1072)..(1075): a, c, t, g, unknown or other
tttactatttaggaagtttttcaattctataccttatttaacttttaataacaaaaatacttttaacaaatttatttataaaaatatcagtgccacctcaataaaaatagagaattttaaaataattcttataggtaagaaaataaatggaaactcccttcttgaaagttttcaatgttcatgggttttagaaaaaacaaccttttcggttgagttacatataataataataataatannnnnnnnnnnnnnnnnnataataataataataataaataggttattttcaataatatggaaaaaattattaaggttatgataaatatggtataaaaagtaaatgtcactaaatatggcattatctaaccaatcaaactaaaaatatggttaaaacaaactttataaaacattaataaaaaaatttgaatttaacattcataaaaaataaaaatttaattgaattattataaaaaaatattaaaatttcttttatatttatttaaaaaataaaataaaacaaatgaaactacagtgatcgtcggagttgtcactcgtgccggaaaagtcaccggagtttgctgccggcattggaaaagtcatcggagtagctgtcggtgccgaaaaagtcatcagagttatcgctggcactagaaaaatcgtcagaattagtattgtcactgaagaaatcacatgaaaaattaccaagaaattggtttgttgatgaagaaatcagtttcttgatgatttttttggtgattttaccgacgatcataccaattccgacgactattctagagtttgtttttggtatcggagtagctggcggtgtcgaaaaatttgtcgtagttactgccggcgtaaaaaaagttgttagaattggcattgtcgctagcaaaattaccgaaaaaataccaagaaagtggtttcttcatcaagaaaccggtttcttcaccaaaaaagtggtttcttcatcaaggaattagtttcgtcacacaacaataataaagattatgaaaaattataaaataaatcaccaagaaactggttccttgatgaagaaaccaatttcttnnnnatttttccggtaattttttcggcgacaatgccaattttgacgaatttctcggagtttgctgtcggtactgaaaaagtcatcgaagtagctgtcgttgtctgaaaagtcgtcagagttgctgccaatgccagaaaagtcatcagaaaaatcataaaaaaatcaccaagaaaccagttttttggtaatttttctgatgactatgctaatttcgatgacttttctgaagtttgctgttggtgccggaaaagtcgtcgaagtagctgccagtgttagaaaagtcatcagaattgtcattgtc

SEQ ID NO: 33798 - DNA, 2836 bp, Cannabis sativa
  modified_base (1102)..(1111): a, c, t, g, unknown or other
ctcctggttcttgagccccaaggtctaccttatggccttctcactccaggattaagttggttttgtgtgttgttttcttgagtttccctagctccagctgcctccctttccaactcagcatttcgttgatttgcctcaattaaacgttgccaaagttggtgattctccaacactactagcagtacatatctagtgggatcataggcgccttcacttataggtatctgtccaccaacattagtgttggcttcctcattcccagtttctaggttcagatcattatcatgttggcttcttctgaacatgttgattgtgttgaacgcgtagttcttgaagtgggtggcctccgtgagcccgttggctcttttacaggacgttggttagtctattgagggcgactgttgtcattttcctcgtgatcgtccatggagaaaaacttttttttcttcggttaggagggatttttttgagcttttatcatgtaggctctcaatgacagcaccaaactgttaacgcagatttttattaacgattatgagcctatttttgtagtaaacttaacacagaaactatatgaaattttagaagaataaaaataattaccccaggtttttacgtggttttacagctaactctacatagtccacgggtctatcttattcagatatttctggatacagaattagggtttacaattcgtatcttctttttctccaagattttccgtccctttttctgtataatctgcctttatttatagtaatatgggtaggcagttaattacatttaaatttggatttcatcacaatttttctcaaaattgtgggctttaattacgctccatttaaatacacgtaaattacatttaaaaatcacacagctgtgatttaaactgtctttaagacagttaacggtgatcagaataggaactccattccaaaggtatctcgctggaggcatctcgctagaggcatctcgctttgtacatagatgaatgacttgatttactcatattccagcaatggcatgagcactagtgtactgagcaaacttaagaactactctttgaccataaggccttgtagactggacaatcatgtcnnnnnnnnnnttacacttagttattataatgtatattatacgctaagtgttttaataaccgattcgccttgtcaatgccttcttatacgtagcgagatggatgtctcgcctcgtcaacacttctttacatgcagtgaggttgatgcctcgctatgcgttgtctatggctcccgcaagattatgcctctcgagataagatagtttctcgtcaatacagaaattgatagtttgtacatccttgtctcgcttaagactatacagccaccgagttacaaacatactctatttattttatatttaatgagttattcttctttgcatttaatgatataaatatcattatattacttgattcatattccctgagactgccacgtgtcactttctgaagtaaaactaaatttcaggtataacaattaccccttaaaaagtccttatttataaaaagttctttttaaatgattactgtgtgtatttccgtcataatctaatttgaaaatatgcatgcatttgattttggcaattttatggtttcaaggcacatcattagcactaatgagccatcttttccactcctctacctttttcatctgttggattttcttttccttaatctaacagatatcgaactcaaagtataaaatcaaaaaaggaaccacccttccaccattttttccatttaaaaaaaaacttcaagcttttccttgtgaaaacaccattctgatttctcaaagtcttgcatgccctctttttcattgacgtatttcctgtgaatttcctttgatttaaccttcaatctcagtcgtccccaaaacttacacaatcgttcgtctcgaatctaaatacagaattccccactacacaggtacacttctttaatcagtaagtattcatccccttacttacctagtgttattatttttattcttctaaaatttcatatagtttctgtgttaagtttattacggaaataggctcataatcgttaaaaaaaaatctgtgttaataggataaaatcgtccaagaaaccgagcttgtttttgacaaatatggcgagttgcatagccctgctctacgttgcataattatcctggccagttaggggttgggacactaaaatattccctagataattcccatgatgaagataataagggtcagaaggatcttcgagagggtttcttcaacgtcgtacttgcaaactttgatcacttagattgatcgaactttgactgttgtctacagctaccagagaactaaagacactatctcccattctcgtagctttatctttagttgacattcttgactaaaatctgaatcaggggcaagaaacacaaagactcaaaataggggaaaattgaattgttgatgaagatctaaagtcttcactacagacacgaatatcgccggagaagacacaacgatggtggaagagagaagacagtttaggttcgaggagcattactttcccattctgataccatattgcaaaaataaatgaaaagagattgtagagtgtcaattgaataaatgagctgaaaatacaagaactactccatatatatggaaaggaagagtttaacctactaaagaaaataacttgagtcagtaactagctgacttaactaactcttaatgtcagggtcggaggcccccatttttttaaggcctattttttttttttgaaagaaaaagtctattttttttttcttattatatatacataaataaa

SEQ ID NO: 33799 - DNA, 1110 bp, Cannabis sativa
actattttttcaaatgtgaattatttgtaccaatttatttagatgaactaattttcaataaattttctttaatctactttcaataacactaaataacaacctaattatgaaaaaaaaaatatttaaagtattggtacattggattttttttgttagattcttctgagttgtttttgggtgtatgctttgaatcctcttctagttgtgttgttatcaaattctatgcataatagaatacaaattattgtttttagattgtttttgtgtaattttaaattaatggaggttgtaatcttagttttttaaatctggttttaccttttgattttgaatttgtcaagattagatcgttttgttgttgagatctacattgcacccttctcattacacaacttatatgatttttttggacctgaaaccgtgccttggttaagaacgaaaatagaggagatatgaaactctagtgcagctggaaacaatagagaaagaagaagatggtgactgttttgtttagtttgtatttttggaaaaaaaaaaattcaatttctccttttgtttattttttcttgccaagattttaaagtcaaatttatataggcctacaattcgtatttaggaaaaaatcccttaagaatattttttattttgaatatttttaagctgtgagattttatatttttatttcacttacttttacagtaatatcatttcataatttattatactagaaactttattagatgaaaaatataagttgaaactttatttacaaaaatactttcataaagtgtggacaatatttatatcttttatgtgcatttaagtaccaaaatatcgcttacactatcacttacacaatcagacaatggttgctgggtagttgcccgaaggttgcattagacgaagggtttcaatcagatgaaggttgctaggtggttggccaaagattgcatcagaaggttgctgggtggttggccgaaagttgcattagatgaaagtttcaaccaaacaaaataactattcgcaaaatatttatgcaactgatatgaaacattaaaaatcagaacactgtttccatgtacataactctatctacatgtctcttcatga

SEQ ID NO: 33800 - DNA, 1445 bp, Cannabis sativa
ttataaacattgggtacttatgccactaaaaaaaatcattaggtttatgccacttacaaacctaaaactttgggtacttatgccactatttaccacaccctaaaaatataataaaaaaaaaacaaaaaagtttcttttaatattagtcgtcattttttggagacaaaaaaatatatgtttctagcatattaaaatgattattttattatttatatgcgtaaaattttgaaataaattttttagtaaaaaaataaccaattgatatcttattcacatcaaaagcaactaaatggttacttttttttccaaactcccaaaaagcaaaaattcctggaaacgataatttttttctatttttggtaattattttgattttcggtatgtatgctgatgtggcacaacggtatttgtgtaaattattttcttaaaggtatttttctaaataaaatcaattttaactataatattgaaaacactccttttatttaatattttatatattattttattatctatgttggattattaggttttaaattatgtttttatatttttttttttctttttaatgaaatcagcctaaatagtggctaaaatggatttgattcatccattagatggatggatccaatccaatccaataaaaaactagttaaagcatctaatggatggaaccgatccaatccaatacatcaattggatcgaattggatcggatgactcaattcaattggattggatcggatggaaaaatccaatatctaataaataattggattggaacggatgagttcaaatccattaaatatgatccaatgaacactcctgagattagtgttaaaacccaattttattattattattattatatgcttgaatttagatattaattgaaatattacattaggatcactcatataattcgtgtgacccattttaaagaatatcaggacataatcgtagccggccgaacaccctttgactagttgtttccacttctcaatttgctatttataaatataaatttgctatttatatttcaaagcaagttgttggctgattaattaattattttgctgatatacttgaatgcttggtcctatactaaattagcgacttgaccctttattaagttttcaaactgaaattacacatatattccatttcccacttgtgcatgtaagctttggtactataattcggttaatgtgttcattgtttaaatattatacgttgctaaaaaatatatataaaaatttcaattacaaaaattctgttatgtattttggtaaaattgtttttcatgcttaatttgaaattgaaacaaattgagaatgacttctatgaagcagtcttggatttcttccactcaggacgtatgcacaaaggtgtcaatgctaccaatattgtccttattcctaaggttcagaaccctaagagaccgag

SEQ ID NO: 33801 - DNA, 1371 bp, Cannabis sativa
tagaaacaaaggaggagacttcaagaggggcttgtggcggcctggatcaattgcttcaaatagttcttttctgttctcttaatttttctatgctattttctgtgtcaatttgaattattgatttgattatggatgttaagaacttcactcctatttggggagatgatgaatgttgattgacattatctttagttaatgatgattgctatttctcatttcttgattgtgaaatttatccatatttgtgtttcattatatttttaagattgatcaccttttttatgccttatgatcccaattcaaaatctaaaaagtgagaattgggaatgctaaaatttgataaactaggttttgatgtggaacgaaagtatttgcatagcctttgtgacatttagattattgcttaatgatgattacatgttagtctaatttggagatgattagataacatgtggtttagggcctataagatctaaaaaaagttaggttaatttttataatcttcacattaagtaagagagtagtaattagcattaacaattgggtaattaaatcaacaagattcttttccctaatttgccatctttgattgaatctttttattgctgaattttattttcttgttaatctttatttttattttaatcataaaattattggtttgccaaatagaaacataagtctaatctagttgtttcggttcaattccttgtggttcgatctcactcgtgtgagtttattacttgaacaacgatacgtgcacttgcgtattatacatatttttcgtaacaagtttttggcgctgttgccggggactgttttaattaatatcaatatagttgaattcaattctaatttggtttttttttaattttactaatgttttacttatgtgtttgacctgcaaggtaaatccaaatggtatgccttgttaattttgctcaacgacacaatgactcattctattctgctttggggagatttaaggaggtcagagagagatgttatgccaatttctcaagtgggtgttttattctattcttttacaatggacttgatgatgaaacaaaaagttgggtggattatggagcagacgtaactggagagcctttgttaaggagaagtcatgaagcaaaaatctgttgaatgatatggcagattttgattacaatttgcattcattgggattgggatccgggatccatcacttcagggttggagtcacgaatagcctccttattgttcaaactcacgcccacttattgaagaagaggagaatatactattacttccagaagagattaatcgcttggcggacacggtaaaagctctatgtgataatttaatggcgcatgattcagagagttttaa

SEQ ID NO: 33802 - DNA, 1880 bp, Cannabis sativa
ttccacagcttggaagctagaagagaagaaaaaccgatgacaaaactcttttacattcttttggaaattaaaaggaatcagaccctcattagcaggatgggcccggagtgtgaaaaaaccgtctttacgcctatcccccttcttggggacagttataaattcataaaagtataaaatctcggccgggcttggtgaagcccagcctctggctatgtagaaaatgtacaagcctgtaagcatgcggtatgcttcaggaataagttgataaggtgcaaggccaataaaaactagaaaatttataaaatagtcgtgaagtggaagcatggctccggacataaagtaggtctggctccaagctccaaaaccaccatagttaaggttgggcgtctcatcatcactgggcaagcggtggaagaccccagaggcagaaggcttgatcacagccacaatcacaatcttctccagttgatgggcgtaagtcaaagttgagtgaagctcgtccgcctcccaacagttagatcgacacgtgtacttctcttggacaacgcgtcccttcatcacttcttcaagggtggccagggtaaccgctccttggctagaggatttagctccggatgtagagacagacatttctcgaagagtattaagattctaaaaaaagggaaaaatctaccccaaaccaaaccctaatgtgaaaagagggaatgggggtcccctaactgctggaaagaggccccctctggatgcttgcccaaaatggaaattctaaggattctcctaggcaaacatcgggtgaaaatatctcaaaagcagcgaaagcgaaggaagaggaaaagaaaaacaaaagaaacagaatgcgggcgtgaaaactatctcatattctgagcaatctctcagcagaaaggttgattgcaaattgaaagaaaaaagaaaggagcagaacacaaacaaaagagggttcatacatcacacgaaaatctttgccaaagtaatttcccataaatcaagcatttaaccaaaaagaaaaaaattctaccctggcatgcaaatgaacaacaaacatataaaatactcataaaacttacataaaagttgtgaattgggggccggtgttgatcgagggtagaatgtagattggcaatgacggaggaatctatggttgcttgagttttttctcaaaggtattcttggggagaaatggcgaagtggtgaaagtaacctagtgaagaaaaaaggctggcttttatagaccagaaaaggtgcaaggtagctgtgatcagacgccatcgtacggtgggaatcgtaatcgattcaaattctacaaatctgacagtagagacaaatggacaccaggcggttgaaaacgttcgaatactatactgacagattaaatgcgtcggtttctcaatggacgggaagtgaatcgttgcctgtaaaaggaaataaatattaatgatgaccatcataaatgcagcccacgcgcttgaagcacgtgccattaaaccaagaagccgaccggaggcaccaaacaagcctcattcattctttcaactaaacgaggcttgaaggtaaatattgcccttattttctcccaaaatacgtggacctggataaggctgacacgtggatctgtgaggatcaacacataaaaaatcaactaagtcctaggcgaaagggaagtatctcagggaggtgtctcccagaggagagcacaagaagtatttctactctccgggaggccagaggtatgataaggtagttccgggaggtgcagcgatctcttgaatagtaacctcgcatttaatgctgcatggggggaagacgtattaaaatctcaataaccaacatgatagatggcgtaagcccctttcttcagccat

SEQ ID NO: 33803 - DNA, 2479 bp, Cannabis sativa
  modified_base (2279)..(2303): a, c, t, g, unknown or other
aatattcggaaacaaaaagtgatccccgtccccgtcccgttccccatttagacggggaattcccaccccattaggagcgggtccccgcggaccatgtaacaagtcaattttaaacattaaattcaccattcatgtatagcatttttcatattgtgccaataataattactgaaaaatcaattaccatttccaaaactaatacgtttaatgcattcattattatttcttagtttacgtctgcctacgcgcgacaacataatttagaaggataatattgtaacaatcaaaatctgcagtttttttttttccacaagataaactaaggctaatcctataaccatatatgaatctataattcacaaatttaatttaatttttagcaataataataagtaagttatatttttagaattttataagtacttgattattaaatgttaagtaaattatcacgtggcaatctctgattggtcaaggttataaatttttattttttttaaaaaaaaaattaattatttaaatatactaataaaacaatgacacgtgataaaaacttaacatataattcaggtacctacacagttccagaaatatattttaatgggccggccctagatataggcggcctagacccgcgcttagaacccacttattttaagggcccaaattaaaaaagtatcttttaaaaaatatacataatttttttaaaaaaattaaaaatataattcaaaggcccaaatttttttttttttgtctataacccatgagctagccctggatattattactactaaaaattaaatttgaatatttatttgcaagttaaatttaaatatttatgccataaattacatatgtttatggctcatttggaaattcatgtagtttgaataacatgcatatacacctatatatatttatatgataaatacaaatgtcatttacgtaagtattcttcagtctccaattggataaactattacgtatcaaatgagaatacatacatacctgccaattatgtgaaaattcaggtatttttgcaaagtttgaaaataattatgtatgtatgggcacatttaactgctaactacttattactagtgtatatatagtttatctatcacgctaagctaacccaatattgggtaaaaagtgacgacaagcgatgttaagccgtctatgtgtgtgtataatatggcccaagtatataaatacagctagcctatctatagctatatatagatacatatatataaaagctagctcaaccaattctaacctacccatatatatcaacccctttaagcactccattaattgacattttcgttttgagttcaaattcatttttgtcagcatatacattaaaatgaaataaaaacttattgattcaattagagctatatagctagctagctagctaactgataaatgaaaagttagttgttcagcaatctatcacactagctagtttattggtgtctctacatgcaaattattgagcccgttctctctcaactatatttttatctatataagtttcaagcatttatatcttttgaattatattaacaatattataagtaaaatataattaagacaattttcgaccttaatattatatatagatcttttaattaaacacatctcaaaaaaaaagatctactatctatttaggtgtacatggaattaagttgtcaacataattattaatttttttttatatattaataagtagaagctatatatatatatatgcatgattataaataatattagtagtagaagagtatatattgaattttggaacatggatttctgcagtatatatataacacatacacatatattatcatggatatatagctagcttttgcagatagaaatttatagttttgaaatcgtttaatcatgtgatcactcaattaatatgtatatatagagtacggattttttatttaaaaaaagggacatttatatccatcttaaatatatatttatatacaatactatattattaaaattatagcggtaagctacgcttaattttcataattttactatttgaattatatttttttttataataaacttataagttttttaaaaaaatattatatacataaatatgaatatatacatggaaaatattcgggaaaattctacttacgtttagtaatatttttgttttaaaattttttaatcataaaaataaaagtaaaatttttgtttctgaagttttatttttcaattttaaaaaataaaaaaaataaaataannnnnnnnnnnnnnnnnnnnnnnnnttttcatttgttgattttatttaactcgagccgagggtctaggttcggatctaagttaggatctggattgagtccaagttctaaggtctagattagggtgagagtctaaaatattgattaaaaatactattttaaaaaaaaaaattaaaagagatgactttttttttcaaaaattt

SEQ ID NO: 33804 - DNA, 1636 bp, Cannabis sativa
gccttgtgaagacttcgtatgccaccaatatctacccataaaccgatccacatctttgcaaatctccactggaatcaagaaaacactcatagcataagttggtaaagattgaataaccaatttcaaaagcacttccttacccgctctaggcaagagtttactatcccacttgttgattctcttcctcaccttctcttttagaaagccgaaagtgacattcttgtttcttcccaccatactcggccgcccaagataaaaactatgatcatctgctgccatcatatgaagagtatacaaaatagactttcaagtcccggcatcggtattagaactgaagaaaatagaagacttactaaggttcaccttctggcccgacgccctctcaaaagtattgagcaactctaggacccgttgagcctcttctctaattaccttacaatagagaaaactgtcatcaacaaacaacatataggaaacacaaggagccccctagccacccgaaaaccatgaagtcacttcctctcttcatacaaccgaataagagcagacaaaccttccgcacagatgataaaaagatacggcaacagcgaatctccctgacggattccccgagatgggataataggacccaaactttctccaccatgaacaatattatacgaaatcgttcgaagacattccatgatcatgttaacccaagcctccggaaagcccatccgtaataaaatagcttgtaagaaagaccattccatcctatcatatgccttactcatatcaagttttagctccatacaaacattcttcccctgttgcttatgtctaagataatgtaatatctcaaacgagacaagaacattgtcagtaatgagccttccaggaataaacgcactctgaaactatgagatgaccttcgataatcagcttttgagccgattagccatgactttcgaaatgattttatatgatacattacaaagagcaataggcctcagatcgcccataatagaaggagacttctttttccgaatgagaacaagattagtagcatttagacctcgaggcatgaatttagatcggaagaagtcctaaaccatcttaacaacatccttacccacaatatgccaacacttctgataaaaagcaagcgtcaatccatcaggcccaggtgacttgtctggggtatttggaagccaggatgctatgattttttttaatgtaacattatcctcatatgttatggatggttgtataacatgaagaacctcaacacaattcgaccccatagaatgaaaaatatcagtgtaatactctaccataacctgagacagacccgacctccaatgaacccaagaaccgatctcatcctttaattcatgaatgaaattattttttcttcttgagctagcagcagcgtagaaatacctcgtattttggtcaccctccttaagctgcaattgcttcgatctttgccgccaaaagatttttctttgatgataaatttcaccaagttgttttctcgcctccttatattcagaacgagactcaacatccaatcggcctttaaggagaccaattctggttttacaactttgaattctttccttaaaattgccaattaagctccttccccacacac

SEQ ID NO: 33805 - DNA, 1889 bp, Cannabis sativa
gaatcctttctcgctctcctatggatgcgaggccatggtaccagtcgagattgtggaaggttccttacgccgagacgttttcaacatttcacaaaacgaaaaaaaacagtcgctctacctcgacctcctggaagaaaagcgcgatcagctcacctgaaaaacgcgacttaccagcgacgaaccgcaagatatttcaattccaaggttaaggcaagagtcctgcgagtaggagacttggtccttcgaagagtaatgccaaataccaagaacccaggacatggggtcttcagggataattgggagggaccatatatcatcgcagaaaagattggtgacgctacgtaccgactcgtagaactcgatggtactgcgattcaaagggcttggaatggcgagagcctaaaaatctattatcaatagtactcgcattttctagtttgtactcaccttgtgtttatacttagtgattttttataaaaaaatcctaagtgtagggggtatataccatgatgtactagtgattatataaaggaaactttttcaaggttgtaattaaagtcgcaattttctacttattacaccaagttgtaattaatgtcgcgatcagaatataataaacgcgagtacccatgtactgcgaaaatactgtaaatagatatccccgagaggatataaagtcattcaaaattaaacataaaggtaaatttgtctaagtacaaggcgcgagtacccttgtaccgcataaaaaaaagagagataaagtttaacacaagcaaatattaggaaaagtcaagcattgggagcagtaggggcagatccatccgcgactttgctgacggcttcgttctcgacttcctcgacatccgcagcctcagcctcctcgggaaacagattccctccgccgcctttagtctgtgtgggcaacatggcgcgaaaagcctcagccatttcaccggcttctgctgcgaggattgaaaagtcgaagtctggaattttggagaaagtggtgtatatgtagtccgagagcgcctggtcatactgctttttcccattctccttctcggcctccacatcgcgagacatctcctcgatttttgtctgcgcgttcttagcctcgagctcaactttctccttggccttgcgaagttcctcgagctctttatccttagaagtcgcatcttccttcagcttcttaatgtcttcttgaagctgaacgttctgtctcttcgcaatttcgacctccttggatccagtaacaaaagcctttgagaacatggcgatgaacttcgaagctaactccgcagagtgaggcaacaactcctcagcaggagtcttgtcaatctttgactggaattcgtcgctcacaaacttctcttggagagtcagtatattgcgggctcgaactgctgggtcaatcgcgaccttcttccctttctcttgtatgcccttagctggccttttggaagaatccgtgacaggggtaaccaccacattgctcttcctcttctgaggaacgataggggaagtttttgctgttccagattttggtttgtgattaagactgggtgcggacttcaagaaagtcatgtctgcgacaataacaacaaaggataacgattagtgctaataagaataagagtctaacccactaatttatgcatatgctacctcatgatggtcgagaagtttgcttagagagacgtttatctattcgctcttgttgcttctcagaaggtttcttgtacaccggctctctttgaagactggagttctctggaatcagcttatattcccgtagtttggcagtcgtacacagtaatcgccagtcgcgatcttgtacaggaaggttcccgagaacttcagctgtctctctgcgagtcgcgtcgagt

SEQ ID NO: 33806 - DNA, 1424 bp, Cannabis sativa
cattcccatctccgccatggattgaacgatgttagaccacgagtgatcctcatgatagatttgtcttgtattctgtcccttcccgagataatcattagttaactgcttttcgttatcattctgtctccacagttctttgatgtcaccaataatatcttcttgctcttcactatcctcggcctcagagtctactccttccccctccgaacactcactctctgaacttatccccaacatttcttcttcaaatgactctacatcagcctcctccccctcaaaataaaattcttcttctgctaacactgctgattcaactctggtgtgtcccattgactttctttttctgatatagaccttcccaaactgtacaaaccccttttcttcatcttgttctacctctgccgttttttccagaatagaaggcttaactgatttttttattacttcaaaatctgcccaaaacattatagttgcaactctaaactcctttcgagactttggtttaattgactttaatttcccttcaaagaaatccttaataatctgctctgtattcttttttaaacaaatagccatgtcttcttttcctttgttgacccacggatccaaggtctgaatcttgaggttttttaactcaggcctaatttcttttcttttatgggccaaaacaatactaaaaggcccattatggaaatacatcaaaggacttatctccctcctatccccatccgatcccctgttacaattaaaagccctattttcaatcaacccctttcggcccacagaatttctagggcccacatccaattgggctgtaattccccccattgtccacgtgtccttaatgaaaagaaagggacaggtacgaggaataattaaagggggtcggctcaaatcattcaaaatacgagaaaataccctctgaatattaatcgactccctatcttcctttctgccgactttgggactcgcacttccctgcctttcgactctcaacagtcgactccctgcctcggttcctgtgctttcattaatcgcctcagccctcctctgttctggcttttccacttccgactgcccttcttctccgtcgtcgacagccaccatctcaccttccaccttgtcggcctcaactgaatcatcatcacctcctacctctccggctgaatactccctattttctttctcaccgatcattatcacacaattgtccagtatttcctcattctctttctcctcttctattcggtcttcatctccaccttttcctttctctctttcaattacatccccctcaccaaataccttttcatggtcaaaatcttgataccagcatgtattgaaccatccatggaatctgtagcttaaatcattgagcttgaaaagctttaattcgtaagccctattatcgtgattgagagata

SEQ ID NO: 33807 - DNA, 2525 bp, Cannabis sativa
cacaaaagccctcatgtacctcggcgatgaggagtttggcattttcttttgtgacacacatcagaagtggcattcaatagcctcttcagcacattaggccatttatgatgatgaagcaagctacttttctcatcaatctcttagcttcgttctggtcagttggaagaataccttattctaagtattctccaattggtgttatctgtgatggactgttgtcaatcatgaggataggctccgagtcttagttaatgctttgtttggctaggtattcgatttgaactacactgagagtatcgaaatctattgtactagctagcttagctagtgcatctttatttgtattatgttcatgcagtacatgttggttggagcagtacttaagttaggctaatagatctttagctttgcttaagtatgctatcatgtttgacccagaggcttgatactagatgagcatctaattaacaactatgtacaaatcactatagatctctagtgattttgctttgattacatgtgctaatcgtagtcctactatgagcgcctcatactttgcttcattgtttgttgcgatgaactcaaacttgaatgtagtgtgattttcaaatccctctagagtaactatgatgagtctagcactagaatcatgctcattgaaggatccatctagatagagtttgtagggaggtcccatgtccccgtgagttgcagtctcaagtatgtggacctcgtcttcacaaatcatgggatcatcttcttcaaggccagtgcgttcagcaatgaagtctactaatgcctatgctttgattaatgttcgaggctagtaagtgatcttaagctgagcaggtgccctaattcttttggtttcatcaaaacttccttaagtggttggtcagtcaataccttgactatgtgagcttggaaatatggccttaacttttttgaggctaagaataagcaataggctagcttctcaatggagggataccttgctaatgtagtaaactaagtgttttacctttccttccttatgtattagagtagcactggcttgcatgctcagtgatagccaaatagatgaataattcttcattgactattagtttagataggataggaggcctcgctaggtgatgtttgagagcttggaaggcttgctcgcattcattactccattcaaacctcttattgcttcctctaagtaaattaaagaagggtacacacttctcggttcactttgagataaacctactaagtgctcaattcatcctattagggcatgaatgtgaggagttcatggtcggtgttggatccactagttgatcaatttgtgattgagggatacaatctttagggcatgctttgtttagatgagtgaagtcgatgcaagttctccacttaccatttggcttaggcattagaatagggttggatacccaaataaagtagaaagcatccctaatgaagttgtgctcccgtattcttccaaattcttccttgagagctttggaatgctctttgtcaaggagcttgtgtttctattgtataggttcgatgattactttgtctatgttgagggcatgatagattacctgggggttgatcccaatcatgtcctcatgtaaccaaggaaaaatgtcttcatttctcttcagaaaagccatgagcatctcgcttaagacctccattaagtttgttccaatcttcacaaccttggttggatccaagaagttgaggggaagttctttgagttccttggtcagaccactaccgagtcgatttccccaaaatgtgggtcaatgtcatccccatcttaggcatgcctttaagtagatttaggtgatgtctctgtcttttccatagtttgaactcttggggtcatggttgtttttctggcttttgcagtagagatcatgctccactccctggtgccatagacacaagaggtcttcttggcgagtgataacaaagtgttatagcactcgcaagcggttccttgatttctatggagaaaatcgataccagtcgtcattgggaaattgacagacaagttgtatattaacgagatagctagaaggtcgtatagggctagccttctgagcatcacgttgtacggagacttcacatccacaactatgaacgtggccatgatggtggtcttcttaaggcagtgtcaacagtgagtggcagtctaatcttgccacatggagcaatgccaacttcgctgaaacgatacataagctactcgcatggttccaagtttttgagtgctaaacccatcttgattagcgtttgcttgaataggatgttcgaggaagatccttcgttaatcataacccttgccaccatcatattttttattttcacttcaacaaccaagggattgttgtcagggtagttgatatgataggagttcgattctccaaacgtgatggatcacacctgtagtgttgagattttggaggacattttgtcacctccagtattttggctcctggttcatgttgcaaggatcttgcata

SEQ ID NO: 33808 - DNA, 1468 bp, Cannabis sativa
cgctaaaaataaatattgagattatgccatttataaacttaaaactttaagtatacttatgccgctatttacccttaaattaatatacaagttttctcaataagcatcttctttattgataatcatatgtcctgtgattttattttatttttcatatttcaatcaccaactccaaaaatccaaataattatcatcccaatgtattagagttagtctcacattgttaatgtgtggaaataaattgtcatatataagatgaatggactacttctctcattgtcaattggttttaagataaattctaacatggtatatatcagagtcaaactaaactctgatgagtatttgatttccaaaagagtctcttgtgatccgctgtgagcacaaagtgtcgccggtccaaaaagatgagccttaatccctccatttaggacttttcggtcaatgtgtgtcagtttctagtgttggggtcaacactttctaggtccaaacatgaggagagtatattagagttagtcttatattgctaatatgtgaaaataaattatcatatataagataaatgagctatttctctcattataccaattaattttaaaataaaacctcattcttttaatctcaaattctaatacaatgcatcaaaaaataaaataaaaaatatctagactctagagggctcaatgaggtgaggcaataaaattatcatcgcatattactatttttgcatgatcactaggcactagtactattgccattttctttatttaaaaactaaaagatgcatgagaataaaagctccacatggctatatttccatattgagataggtaattatggtttgtaggataaaatgcataggaaaattaattacactttagcaaattgaaattttctaacagtacattttaagatagtagctattttttttctcactatctttaaatcacaagtagctttttttttactttaattctactttttggaaatttaattgctctactttttgtttcgattgatttttttttatcgaatagttgttaaatttttttttttgttctcatgtcatgttaagaatgtaagatgcatggatgagattctcaatacgagactctctaatatattatcagtatgagactctctaataaatctttagaattttatccaaagatttctaagtttaaattaattaaaaataaacatgtattcatctaagttatagactgcttaattaatatattctcatttacaatttttcttaatttttacatttttattaggttaattatatatatatatatatatataatactaagattgagaagagaaatgattaggcgattttaaattatttacatataagcaaaaagtaatgttattcatgactagcttgttagacttttatttgggcttacattaaattttattggttttattaaaacttgggttgattggatagttctttgct

SEQ ID NO: 33809 - DNA, 1864 bp, Cannabis sativa
  modified_base (1114)..(1116): a, c, t, g, unknown or other
  modified_base (1412)..(1415): a, c, t, g, unknown or other
atatggataatttcacaaacaagacaaaaggaatagcaattatcattaactaagcaaaacgtcaatcaacattcatcgtcttcccccatcgggagattacttcataaaatccatattaacatccataatcaaatctacaatagaaattaatataaaaaatcaagagttatgaaagaactagttggtgattgcgctccggatcgtcacaatagcttcctctcctctttcattcactttttggggctaatctctaatgattttcatcataaaacgcgagtccttcaaatagaaattagggttgctacctctgaatgacgaaaattcaaaactggccaaaaatctcgtgtttcgcccatggtcgcgactacataaagcctagtcgcaaccgtaggcatagtgaaaaatccatgctctctgcctggcctcctagtcgcgacccaggtcgcaaccatagaaaagggtcacgaccgtgggtaagtctggtcgtgactaatgaagctaatttgacagcttcagcagatttttctccacaatgccccatcttttcaacaattgatacaatttgtactctaacgcctcggggacctgaaacaaggaatctcaagcataaaaccattccaaaaggaaacattaactgagaaaacacttgtgaaatcggcccagaacttaggctaaaaatagcttaacaaaattctcccaaactagattcttactcgcccccgagtaagactaagactaaactaactatgttgtcagatgattataatgctgctggctcatgttccatttccttccattaattaaactatattttgaattccaaaaactctaacatttaattgggatgctcatcttatcacaacaggtgcagatacaacctaacttcacaattgaaactatgttataatggtttcactccattgtataattccgcaaaccaatagccaatatgcttgcatgcttacctctctccactaatgttgacaacattctttttggaatgaaaaggactttttaggcaagaatttatggcttagatattcagaaaataaaagatatttttggctaaagatataagcacatttaaaacccacaagcttctcataattttaannnttcccgaagtgttcccataactaaccatgattgagattttctgtatttttcaatcaccagacatcactgaaaatatatttatttttcttttcttttatttttgattttttttctacttttctagtgatgtcgagctacaattttttctctttttttgtcacatgttactcaatcacacaagattttttttttcttttcttcaacacttccacacactctatttttcacttccccaaacttgttgtaaggcttatgataccattcaaaatgtgatgaggacaaaaacaacagtgtgnnnncatcttttagttcaatgggtgaagaaacgaaacaggtctaggctcaataggattcactaaggatattcattttatggtaggcttgaaaggctcaaactatccaaagaaactgcctaaatcatgttcctattaaatgatgtcaaggattttggctcgagagaataagacatgcaagttctaagctattcaatcaatcttacgacaaaccatggtaaaataattataacatatttcacagatcgtcggattgcatccatacacaggctttacaagcatccaaactaatccaaagagttaaaagaattaagcacacaatttcaaaattttaggacatttcacaatcaagaacatcatacaactatcttcaacttatttccaaatcataaaaagaacctaaactaaagcaaaaaaaaaaaaaattaaaaattttaagtcgcccccccccccaa

SEQ ID NO: 33810 - DNA, 2320 bp, Cannabis sativa
cgtttatggagatttgcctcaatcttgaccttctcttgtcaacttttcatggagatctctattgctggtcgtgttgccatggctgattggaaaaagcttcttgccggagtttatggtgatcggtaaaagctttctcgtcggcattcatggtgatcggcaaaagctttctagtcgacattcatggtgatcgacaaaagcttctacattgttggtggtgttgtttggagaagctacattaattctggagtagatcttggattgtttgggtgaactcatgataattttagatctaaaatatttgaaaaagttattttgggaaggtcattgtagagactgtatttttgaaaaaaaaaaaaaaaaactttgaattttccttttttgtttaatttcctatatgagagtaaaaaagtaaagtttttccaaaataaaactatatgagaaaaaatcccttaattaaattaaagccatcatcactttatatattattacacttttgattataatttttgttttttcctagcctctaatactagtttaattcatgtttgaaccatatatactaataatgtgtggaaggtagattctgagaggagcaacgaattagactggaaaaacaggcttcaacattggatcagcagagggtttagagtacctccacaatggttgtcaaatgaggataattcatagagacattaaagctagcaacattttattagattcgaaatagaaaccgaaaattgtaaatttcgacctagcaagattttcttcatcagctgccagttatgttcctagtgttacaattgcaggaacattgtatgtagtaaaaaaactacttttaagtttgtttggattttaattgaatatgttatcttttgaacatacatatatataacactcaattacatgtcctaattttcttaattgtttgttacttagctcctgaatacttagcataaggaagattaaccgaaaaggttgatgtttataactttggagtgcttgtgttggagatagttagtggtgtgaggaacaacaaattgagatcccatgacacttttgaaactctagtgactcatgtatgtaaatatatgtcatttattcccctctatcttattggttaatcaataaatatgcacaatttatattttgtattttatgtgtataggtatggaaatactaccaatcaaatacagtgtcagagatcatagaaaaaagcttagcagaagaagactctgaagaagttgaaagatttgttcaagtgggactatcaaaaatttgattttatgtcataaaaaaagaataacaagactagataataatttgaaggtgggttcagtgtgtgtaacattcagatcattgactataaaatctcactgaaatctactaagataatttatgctatcaccataagccaacttttaataaaagaaaattcaaattaataaacaccctaatcttaaaaattaaatgatcacaagacaataaaatttgagggacgaagaaaattaataaaatatgctcagacagccaagggtttgtaatcagattttaagtaattccgagatcagaaactctagtccacaaaattgtatcatcaccacactcttctatgaaataaaataattcttgcacatgttatgaaacgatcgactaaaatcaaaacaaattatagaaaaaaagaatacgaaaatagaaaagggcagaaattacacctcccgaatgtaggcaatcaatgactaggcgctcgagggactcgaagatgacggagctgctacagtgttgacagaaattgcacccgcaactgagattatcttgaaaaataatgggtgctacaacatccaacgactgcatcttgacaaaggaaataaaatagggcaccagattggaacactgacggcttgtgatctgttgtggcttagtagcagattgacggcgcaagaaaaatcgaaatgaagagaatcccagctgattagtttgtgggttctatttgttattcttaaggaataataaattgacccgcagagtgaatgagtgcatgctttgttgagtgagtgagtgagtgagtgagtgagtgagtgagatggagagagagatggaaggagtgagtgagatggagagagagatggagggagtgagtgagatcggagaaagtggcattgcaaaggtttgagagagtgtctgacgagttggtgtgagtgagggagatgaagggagtgagtgaggcgagaggtgcgagttgaacttttttagccgttaaaaaattcccctgaactattgtgatggttagatttaaggatttctatcaaatttcattcaattt

SEQ ID NO: 33811 - DNA, 1273 bp, Cannabis sativa
ttaatttattttttgtatcaaattcaaataatttcattattttttttaattttaatactttaataaaaaataattatattaatatatatatatttttttttattttttaagtattcatataatatatataattataatatttaatttttttaagaaaatattaaaaatatactttattcatatatattattaataagaaaaaaaatcaatgctaatggactcatataaaggctagagagaattctagccccctcacatttttatattttagtatttttaatacattgtattattgatttatgatatatgtagtattataattttaataattttttaattgtatatatatttattaattatttaaattttacattataagaactaatattttttgtagtgacaaattaggtccagttgcgtctcgagtttatactattgtcaaagtccacgtgaacatagattttttgggtgcttatttgttttgccggtaacagttatccatttcgggattcattatttagctgtgtataaatacaactttttgttattatgttgattaaccttttttaatcaaagattagtgattagttttttttttctttcttattttcatttgtgcgtttcattgcaggtactagcaagaaactccattattgtgggttgaaatttcagagtaagttctgaagtcaagtagtgagagctgaaaggatttcaactaagatttggcgttacagatctaaaggtgttcagatctagagctttgttgaacggatttcaacaaataagaagcaaagggatcttgtattcataaccaagggattcggttatttagggtaaaaattcactactataaatattggtttgttattcatgtgtaatttggattagttactatacaaacattctttgatatagtgaaggttattatcctagttcagggaacccaagcactagttggttagaatgaaattccagtgcagatgaagcttgtaattttgtgtgtaacaaagcttggtactttaaaaatgagaagtttctttcgataaaacttggcaataatccaagttatatttcgaaaagtcttgttgcggtaaaggatttgattcgtaagggggagcggaagggaattggtaatagaaaggagactcttttatttgatgctctgtggcttccgaatgggtcaattctgagtaaaggtattctagattctagtttggctaatgaaaaggttagtaatctttttgtggtgggtgagaaagcttgggatgttgat

SEQ ID NO: 33812 - DNA, 1721 bp, Cannabis sativa
attgaattaaatctagcttggaagtatcgatcgagcaaggattgtttgttatacaattttgtgttcattcaaccatctttttaatcttattttaattgctttttttaaacttagtatttgtcatttatgaagcattgcgaacataagatgccatacaaatgtatttgtaagaaacataagatgtcatacaaatgtaattttatagatcatatcatgtataaatgtcttttgctagaatgctccgtacgtccttccatcacggaaaaatgcaatgtttttatcgaatgaggcctcaaaagagaaggcctagcaaaggtaatgtcgaagaaattaattataaagatgctgatatggagggaaaaaggacactgctgacatggaatgcaatagatgcaatctcaaggaagaccttattgttgtatgattttccaataaatctgttacatgaaattctgtaatattcccttctatgtacacatgttatattttaaatggcctttggctatttctgtaatacctttgctatataatgaaaaggccttagctcacaatctttgagttgatccaatcaatattgtctagcccttataattaagaagagtaacatcaacattgtcatgccaaagtagcatcaaacaaccgttgagaccaattcgaggtgattcaaggccattattgaattttaaagattgtcgaaaacgggaaattgagttcataggaagttttattttcataaaaaataaaatatggggcgattgttatttaacaagcaattgaagatgtctgaatgcactcggatttcccgaacctcgtgcattccaacttaaaatttttataatgaatcgtgggattgcaaaacaatctccgcagagttatcaataaagccatctgaatccatatcatcatagaaatcattttgacttggaccttctcctagtgataagggagaggcatcaacaattgaattttggttgcgacaacgtttaaggaattccctcattgttagtgattcgcattgtcgttttggttagggttgagcatcggtcggtttggtcggctattttctatataaaaaatctagaatttggttttcggtctcgattggtgcaatctaaaaactgaccgaccaatccaactgactgttttgaacctcagttggtcagtttaaactgcccaaattgaacttcttttttttttctttaaaatatgatccagtttattctataaacacattattttatattttacaactacaaacatacaaattaattgttcaaaaattaattatcttattttttaacttttatattaataaaataataatatattattagtaactacaatacacgaagtaaaaaaatttaataaattaatatatatatatatatgtataacgatcattttggtttttttggtcgtttactattacctaaaaaacctgaccattcaatggcaattttaaccgttagtacttttttcaagtttcggttccatcggtttcggttccaacagtgtttggtaggtcagtttgaacgattttttaggttttctgaattttatgctcaaccctagttttggtaagttttcaagtgggacattttctttgtatattgttgaagtatgaatttgagtagttgtaatcagaggtctgttcgttagtaatggattaaacaaaggaggggttgtgttaatggaagtgttggttgatatacatgctacta

SEQ ID NO: 33813 - DNA, 4363 bp, Cannabis sativa
cattgaggaagactcaaatatttacagataaagggtttatctccaagattgaaagtattgaaaaaaagagtgtgaatatctggctgagtgttgggagagaaaagaatagaggactttgagaagttaataacctgacccgaggccctagagtaaatattaaagacttcctaaagagcagaataggaatttcgattggtagcacaaaagataagactgtcatccacaaaaaataaatgggaaatagaaggagcaaacctagaaacaacaattccattaagcaaacctacatcctgtttgaccctgagaagagaggacaatccttccgcacaaaggataaaaagatagggagatagaggatccccttgcctaagacccctagaagatttaagagaaccactaacagagccatttatcaaaaatgagagtgtagtaatagtaatgcacttcattacaagagtaacaaatttagggggaaaattgaaatggaacataacactctctaaataatgccaatcgacatgatcaaaagttttggccatgtcaagtttgagagcagcccaaccagtcttaccacttttcctagaattgatggcatgcacaatttcttggataatgagaatattgtcaaagatgactctaccagatactaaggcactttgaaaaggagaaataattttatcgaaaataagttttaaacgattagccaagactttagaaatgaccttatagaaagttgtacaaaggcttatgggcttaaagtccttgaaggtgtgagcatgctgcttcttaggaatcagaaaaatgagtgtggtattaacagcagaaaaatcagtaccctgattaagacaagtaaggacagtatttttttgagtgtagcgtaatgatatttttacaattatatattagcttaatagcttaaaggtcctgagttcgaacttatgacctctctttttttccatctctctttcaccactaagctagccttagtggcttaagtaaggacagcattagcaaagagagaaaagctttttccttgagactcatgacaattttctatgagttttgcaccttgttattgttattatagggaaattatgttatttgttgaaaataaacggtcttaaacccttattacgagtttcttctcctatttctcatgaagtgagggaagagcaagaaaatgaacagaaaaatgtctcaaaatcaccaagctctactttttatccagaaaatggttaagagtccgccattaaaagctctttcactcttcaacgaaactccccaaggattccaacatacacctcattccatatccttcattcttcatcatcttctttcttccaatttaatggttcaagcccaatctatcattctaagactactctctggtcaaatctcatcacagctcttcactccttcctctcttctccaccaactatcccagcccaactcctttcctaactcttcccgtcgatatcttttcgaagcaatcatcaatgcccatgttcaatctcgattaccagaagatgccctttgctatttagctcgtatggtggagcaaggcctcgttcccgaatccaaagttttcaacaatgtgttgggttctcttgttaagtccaataacttcgaaagagcttggtgggtttttaatgaatttaagaataggattgaatttgatgagtatagttttgggatcatgataaaaggttgttgtgaggctggtgatttgaatagaggatttcagattttgggtcagttggaggaattgggttggtctccaaacgttgttatatacactactttgattgatgggtgctgtaagaatggcgatatcgatcgggcaaagaggttgttttctaaaatgagtgagcttggtttggctcctaatcagtatacttatactgttatgattaatgaatttttcaagaaaggtcttaagaaagatgggtttgagctttatgtgaagatgaagctcaatggagtcattcccagtacgcatacatacaattctctaatcaatgagtattgcaacgatggtgaaataagtagtgcatttgctctgtttgatgaaatgcgtgaacaaggggttgcttgtaatgttgtcacgtacagcatcttaattggtgggttatgtttgaagaagcgggttgaggaagctgagaagttaatggatcaaatgaaaagagctggtattagtccaagtttaattttgttcaataggttgattgatgggttctgtgatactggaaaattggataaggcattgaacttatttaatcaattgaagtcactcggccactctccatctctagtcacttacaatgttctaattgctggttatggcaaagctaaaaacttgacaggaattgctggtataattagtgaaatgcatgagagaggcatttctccttctacagtgacttatacaatattaatcgatgcctttattaggtcaggtgagatggaaaaagcttctcagatacattctatcatggagaaagatggtatagttgccgatgtttacacctatggggtgttaatacatgggctatgcatgagaggcaacatgaaagaagcatcaaaactgttcatatcaatgagtgagaagcatgtggagccaagtgatattatatataacatgattatcagtggttactgtaaggaggataactcttacaaggccttgaagttgcttaaagaaatgagtaataagggaatggttccaaacagggctagctacatttccaccatcaatgttctttgcaaagatggaaaaaggcgcgaagctgaacttgtactgaaagagatgatcatgtcaggtttaacaccaccatctaagacttgccaacttatctttcaagtggatgtttcttaagtcattctagccttgtttagagctcctttgtctactcttgggttcatgggaagaggctggatgcaaatgcgtatttctttgctaatcttgttcatttataagattttgaaaagcaagtgtatgaaagaggtgctttacatacgtaatggcagaaagtcatcagcttcgccactgaagatggacactttttcaaaacctttcatctgcatatcaagagggcagggttgttaggaggtaagctcagtgtctcaaaatttatcttatctatacctgatcaatgaattggtttcacaactttattgtgtttaagatgtccttaactgtataagttcgaatcacagctgcatgaaagacattgtcgtttcttcctccatatgaacattgtggagtcgtatcaaggaaatgaagagcaaccttgtaaaaagcctctaaccacagccaagatcagtggagattcccaacgttgttgacgaaacatgccaattatcagtctccgtcaactagtaaaattgccaccttgtagtgaccatctttgacaatcctgagagcaggctcctgtctactgcaagattttgaattcctttcacatttattttgtacagaaagcaaataggttgaatacagaacatcttctcggatagttacttggccaaggtatatatttgataatactttaaggagtttctcagaggatggtgctcaaatcctgtcctgtcacaggagcaaaatgatgggttcaaataatttgcatgatgatggtacacaaatctatgctgtcttccgggggcgcctggcgattgggtgcccttgttatctaaggttcaaatcttttgcatactgattagctcaaatggtcaaacatatgatttgctttcttgttttcttgtctgagtctggaattttttctgggactcacatagcaatgatataggtttctggttgacttatattgtaggattaggaggatagtctagttcaaaaatatataaagtagccagatatcaagtgttaatatagataatataatttggaaggtatgaatccggctgaccttcataatttttcagtgacaagtaaaattatagaatatatatataaatatattttgttgagaatcgtctttaagttactttttaatttgcatatagtgtatgtgttaaacaataatcacatggcctgttacctgtcatgatatgaaataatcaaatagtgtttgataaataaaacttagtctactactactgtatcaaaccaaattatgtacccgtaaaatgaaataattacatgctttcttgcttattttgaccatctgattccaagttgatcatttgctctcccatgttttcatataaaaacaatctaaagaatggtttcgtaaaaacaagtaaatagtaatgatatgtgcacccaatttatactcttttttttttccaaatggatttgtgagttgtgaccattttgacaatttcatggtaaactgaaaaaaat

SEQ ID NO: 33814 - DNA, 1704 bp, Cannabis sativa
gagagagagagagagattgattgagtttaagttttgtatgaaaaatcttctgtagatgaagaagatatttaggtaagagtatgaaaaataaacactttgtgagaatttaacagagaatcaatctcgactatattgcactatgttcttgctcaatcaataaagatctgatggtattttagaactgtagtagagtcgtaaatcacatcgatttatagaacttgaactagtatatatcttagtattaatttcattcttttattgtttctaaatttagtactctgtttatccctattttaatttttaattattgtgtgtaatttgttaattttattattatttgtttattgattaagttttaattaatttgattttccacattaattataattttcacacaaaaggaaaaaaaggaaagtactaaaatgatcattagaaatatgataggcaaaggtatagtataatatagaattttattttattttattaaaaaaagtaccttaatatttatatttgaatgatattataggagtggcagccacccatgttgtgtctgttatattgagacagataagtaataaagcaaaaatgtcccttcctcacctcacagacttgccttacaaattactgatctttaccattttttatttgtttatttattatataatgtgttttttaagtattaccattaagtaattaaatcatattttatatttgtataattttaaatattgttgttgattagctggcctgtgtgggtttcaactttcagctttgaaatccaaattaagtaagaaaattgtctatttggactagaaaaatattgttgttgattgtatattagctggcctaaatcttaatgagaaaaatactgtttaacaaccatatactgatatagtagcaaataaatatcaaatcccatattaatattaatatcataggtgtaaaatagatatgaatctcacatatttaaatttaaattaaaaaatatataagatctatcactaaattatactaataacaattttacatgactataagaaatgttaaagagcacttgttcaacacactacacccaattcagaggcggacacacataaaaacgaaatgtggccgtcgtcccctaaaaacctaaataaaaaaatgtatatacatgcattttagctaattacaaattacaacatatatttttaaataaaaacaatttttatatacataatacaagttttggtatattggtaaatctatttcatgcacatagtggagtttatgagttttaatctcaataaaaatatgtttatttagtatttgaattatattttttgaatctccaccaataaaatttatattcagcgtcttaattattgaatttaatatttttataattattatttttttactttgtactatatttaatactaaaatataaatttgtattaatttttaacatgttatataatattaaaaataaagacacctctcttcacttacaaaaaaatgtgtcgtcccccttaatttaaatctaggtctaccactgcccatattgatacaataaatatggaatctcccatattttaatacaaattaaagtatataagattcggtactcaattactaataaaaatatgtgatatattacaataatatcaaacctagggcgggttcggactaaagcgtcccaaacttgtgtttaaggtccacccacca

SEQ ID NO: 33815 - DNA, 1362 bp, Cannabis sativa
  modified_base (250)..(256): a, c, t, g, unknown or other
tcaattcataacaatactaattgtatcacatacaatgtactatgcaattcagtatgctttccttacctttaatccagttggagttcattcatttcgaccaacccaagtgcagaactatccccgataatctcggccctatgtcacaataacagtaaaccaataagtatttatcccaaaacactacttaatattcacataagaccatctaggattttttacaaaaccccacggtataaatacactaaaatannnnnnntattttggctctaaaatatacaccatattgtagagattgttgcaagcttcaaaacggtatatagaacgtccaaaactcgagtcaaaagttatgacaaaaatacgatttctgatctcctagaaatttctaaaaactatgaaactcaaaaatctcaatttttacactcaccgaaacactattaaaacttatccaaatcactccaaacttcacagggtgcatatataccataaatattactatccttgcgtaacataaattaaaatcgagctcttaaataaaaaatgccattaacgttcggaataagctttaaaaagttcaaaactcaatttctaactcaaaatcacctcaaattcaacaagtaaacatcgatgctagtcccataggtaccaaagaacaattctacgaagtcagaatctcgataactattctaattcacgaaacccttatattaaaccaatcgtttttagcttagaacgtaattaaaccataccttaagttttctctcttcaaggatttgctatcccgctactaccagagcttagatcgttaagtttcatattgaaaatcaaagaaaatggatatagaaagaaaacaaattaatcgaagggaggagaacgagggttcgttcgttctttctttcactgttatatatatgttaaacataatatatataatatataattatattcagtttaatattatataataataatttaatattaataataataaataataatataatataatattaataaaaaatttattattaataattatcttattatttcttagtcattaagaaatatctacttttagggtatttggtcaacttcgagtaccctaaaatacctcggtatgtctaaaatcaacttatcttaataatcccatcaaaatttctaactaaaaccgttgtaaaaaatttgacctccaatcgggtctccagggtcggtgaacctgaaaatatttttatttcacaaataactcatattatgtccacgtatttcgattaaatttccataattaacaaattatgtttatatatccacttatcgagtcttcatggtcgccaaacttgaaaatatttgtattccacatatagctca

SEQ ID NO: 33816 - DNA, 2738 bp, Cannabis sativa
  modified_base (2551)..(2557): a, c, t, g, unknown or other
tcttttggcctcaattgccttcaatctcgggaaatggccaaagcctcttagatgtcgagatctctccccgagtacttacatcataacagggaagtctcggggatactgtgtgggatctccaacagtctcatcaggctcattctcagtgggcgctaattgagctacagctaattcaaacatttgctcctaaaataaacaaataaattaaatagttaatttaaatacaaaataaattgaaagaaataaatagaaattaatataaaggtaaatttacgtaagcttgttgcgcgtattcgttgcaccaattgttgcctttatggtgaaacttgtgaaaagtttccaccgcagttgggagttctcctatatcgcctatatttaagaaaaaaaatattattattgtatttttacaaaaaaaaaaaaatattaaatcaatgataatgtattatataaacttaccccagcaacaacatgtgaaataataggctttgatccccagcctccttaacattttatcttaccccgactttcttattttttgctgctcttgcctggaattaatattttttctaacaattaattatttattattgactatataacataaagcattactaaaataaaaaattttattaagtaccttttgtttgtgtgtgctccagtaagcaacgcaatcactccacacctcttgagttactccgtcatgaggtaacatgtttgccctctcctgtccaagctcctctatattttctatccatttcttcttataatcagatcaccagtcacgtaaaccctttgacatctcgtactcaccatagtctacgaacgtagggttatctcgtaggaggacaaactttgtctggaaaaaagttacacattcacattagtacattaattagaaatttaagaagaatatagtaaattataaatttaaaaataaattatgaaatacctcaagtctatcccacaatgcattaatttcagctctagaaacatattcccagttaaatgtattcatggggattgacatgcgaaccatccatttacacatattgttgaacttttttctattttgccaacctgtccgtctcttcatgcaattcaatgtgtagtttggcagctggtattttagaaagcgcttcttcaacatttttaccattgtatttatatttaccacttaccccttttttttgaagtgctgtcacctagtgtatacaataaatattttttttatttaaaataaagaaccatattcaaaacgtattaaataagaacttcctattaaaatattgttacaattacaattcattatcatcatcagttgcatatacaatattatcatcactatcactctctaaatctaagcaattatcatcttggtcatttagactctcaggatcatcatcgacaatgaaatcatctaactattgaggctctgaatttgcacgatgaatgtttgcaacttcagttgggtccacatcatggggaacatattcaacatcatccaactgtgaaagttgaacaactaactcagtttcagctgaattgttttcctacataaagggcgtatccccatcagtgtcagggaagtcccagacatttcgcgggatgtactcgttcacaattagccagtctttaccattcttaagatcaggaatgtaatatatcaattttgcttgagatgcaaggatgaacgattcatttttgtaccactctcagttgacacaaatgctagtaagaacaccatcactgtccattttactcccattagtgtcaaactacttacacataaataagagaacaatgcagtcctttaaataagtgaacaccataattttttcaagtgtgccatataaattttgtccatcttcaacgggcaccataacaccgctattttatgttttgcagttatcatcccttttcttgaccaaaattttgtattgttcactatgcacccaagataaaaataaattgttggaatcgctgggttagcaatagcatacaactcatctgacactgcaccatggttgctcaaccgtagttcattaatttacaattcaggaaaaatatttgttattaagaaaagttcaagagttagtgtgaacattataagtattgagaggcaacaatgcttacttgagttttaaaccattcagataactcaatctcttgcacattaaatttgaaaaactatactttaaaaaccctaatattttattcttaaaccaatacatttcaaaataaaacatatatgacacttttataaaaaacccaagaataaccctcaaacccctcaccacatcgtacgagctgacccagccccctcacccccactctgaccacgagatgaccccctcctccgaccgagacgactccgacagagacccacagccctgatccgaccgagacgactcccacggacacccactaaccgaacaaacttcaatctcaaacttcaacccacaacaccatcggacccaacccacataacccatcggaccatcggaccccccacataacccatcggaccccaacccacataacccatcggacnnnnnnnacataaccccacgagacgaccatcagaccccaacccacataagccatcggaccccatcagaccctaccccatgtaacccatcagaccatcagacgacatcgggccaataggaggtccgatgtcttcaacctcagatctgaaaaacccaaaaccgacagaggaaaaactaaccttcgacata

SEQ ID NO: 33817 - DNA, 2310 bp, Cannabis sativa
  modified_base (244)..(265): a, c, t, g, unknown or other
ctcatgtactgtagtagtcattattgttatcgtgtaaaattcgaacgccatgaacttgttctcagcgtttgagaacgtcatgtagttgttcaatgtgatgtttttaggctcagagctttctaccaaacccctatatgggccaaagacgaattgaattttgggaccctaaaaatatatataaaaaaaatatcaaaagcaaagtgttatgagatttttggggccttactataaagataaatggtannnnnnnnnnnnnnnnnnnnnntatgtatattttttaaaaggtaattttttttatttgggcccttaaaagcagtgggccctaggcacgggcgtagccctcctgtgatttaggtcgaccgtatttacttgtggggcctaaaatcgagtcatttgggagatgttgaaactcttctactccactaaaaatctatactgacaaggattaaagttatgaatatcggtatggttacccacgctggtggtttctagtgaaaagtgccttagatgcatgggaacaggagtgtagcaacagccgaagcccaagcaagtggtttcggatgacatgttgaaattttcactgcagtacgagaggcaatcactggcgatgctatgctcatgtactgtagtagtcattatggttatcgtgtcacatccgaaagccatgaacttgttctcagtgtttcagaacgtcattttgttgttaaatgtgatgtttttaggcttagagctttctaccaaacacctatatcggcctaagacaaattaaaaaaatatataaaaaaaatatcaaaagaagagtgttatgaaatttttaggctcttactataaagataaatgatatttttaaaaattattaaaaaaatgaggtaattttttttagttgggccttaggcgtgggcctagcccgcctatgtttaaggccgaccctgtttacatgtggggcctaaaatcgagtcatttgggagatgttgaaactcttctactccatcaagaatctatattcgtaaggattaaagttatgaatatcggtatggttacccacactggtggtttctagtgaaaagtgctttagatgcatgggaacaggagtgtaggagcatcctaagccagggcaagtggtttcggatgacatgtttaaattttctctacagtacgagaggcaatcactggcgatgctatgctcatgtagtgtagtagtcattatcgttatcgtgtcacatccgaaagccatgaacttgttctcagtgtttgagaatgtcatgtagttgttcaatgtgatgtttttaggctcagagcattctaccaaacccctatatgggcctaagatgaattaaattttgggaccctaaaaaatatattgaaaaatatcaaaagaagagtgttatgagatttttatgcccttactataaagataaatggtatttttaaaaattatttaaaaaaatatgtatatttcttaaaaggtaatttttttatttgggcctataaaatgagtgggccctaggtgggggcctagcccgcctatgcttaaggccgaccctgtttacttggtggggcctaaaattgagtctcatttgggagatgttgaaactcttctgttccacctagaatccatactggcaatgattaaagttatgaatatcggtatggttacctacgctggtggtttctagtgaaaagtgcttcagatgcatgggaacaggagtgtagcaacagtctatgcccgagcaagtggtttcagatgacatgttgaaattttcactgcagtacgagaggcaatcactggcaatgctatgctcatgtagtgcagtagtcattatcgttatcgtgtcacagccaaacgacattaacttgttctcagtgtttgagaacgtcatgtagttgttcaatatgatgtttttaggctcagagctttctaccaaacccttatgggcctaagacgaattaaattttgggaccctaaaaaatatttaaaaaaaatatcaaaagaaaagttttatgggatttgaacctatgaccttaaatattgtaccatccacctcaatcaattaagctatggatatttattgtttactatatacttaaattttacttaaataaaaacctaataaatttttttattttttttattttggacctctagaaagtgtgggccttaggcacgggcctagtccgcttaatgtttatagatgttcaaatcatcattaatgtttgattgtattttcttttattacatattaatttattttcccattcctttagttaatactttgtatatatgtgggttcaccccattggaataaacaa

SEQ ID NO: 33818 - DNA, 5219 bp, Cannabis sativa
  modified_base (5167)..(5179): a, c, t, g, unknown or other
gtttttaaaaaattggcatattttttatagtataaaatatattggtttaaaaaacaaatttttaaatttaataagtatagaaaatcaaatttccctattaatattacatatgagctgatataagacatcataatacatattggaacatattatttctaaattattttaataatgacataaacactccatattataataattttatattatggagtacatccaaagcttgtaaataattttataaatattaggagatctataatgggatgggatctataagcaacgcagcaacactgtccttaaccaattttccaacatgtgtatagccatcaccttctttgtagataatgtcaagcacttttgtgaaattaagaattctaactaagatagatgaaggcatagaagttggcctaagaaactcttggtttatttctttccatagattaaccacttgtttattgagctcatcacatgcctcttgttccgatacaccatattgcttcatgtagcaatctactgtagatggtacgtgattcctctcttgctcgaactgtaatcaaaaacacgaaactcgattttattaggtcatgtttgtaattttgttgttaaattagtaaataattcatttcatatgagactaaatatacttttttttttctgtattagtcgatttgatttaatatctcactttgaaggattaatatcattttagaacttgtgttttacaaaaattattaattaaattatttgttttgttaaataaaaaattggaccttttattttttaaaagagaaaattacactctataccttttttatattgtcctcttttatttttaccatcttttttaaagtttatcatttttacctctttttttaaatattgtactaattttgcccctgtcactttaagatactctccatgtaactctcttatgtcagggtattttaggtacaatacatataaaaagaggtatacttcaattaaatataaaattagatgtaaatttgattaattgattaataaaaatagtatttttcaactttggtagaaaataaatatccagaactcaatttttgattatttccttttataatataaccaacttgaagacaatttgtagcacgaacaaatataaaaatataactaatcttatcataacacatttatattaggctattattatttaaaatgatagaaaataaatatccagaactcaatttttgataatttttttataatataaccaacttgaagacaatttgttgcacgaacaaatataaaaaatgtaaccaatcttatcataacacctttatattaggctattattattatttttataaaaaatcagctcaatgtactattctgaatcctgttaaaaaacgtatgatctaatttgttatttaacaaaataaaatgtcatttgtaaattttataaaattacagggtctaaaataagattttttgagaaatattagtatagagaaatgttaaaaggcactagctcatggtgtctaacactcttgtgatgtgtaataatgatgttggtgcaatttaatatcgagtctcacttattttatagagaactgctaactaattataagacgtcatctcatagtgatacttgacaccctattgccccataacaatactcataaatttgttcaaattttttattttatttttttatttttatatacttattaattaccttacgagaaactaggtcatccatgaatctagaaatgatagtgcaagctctaaaaatctttggttgtgtagagagccattcaaatacttgatttgttttaacatcttgcattccaacaaaagaggtctcaatcaacattgggtaaccagaagacacaaaagaaactttcaaatgctcatcaaagcttgggaaatgtccttggttcaaccattgtgcttcatggaaataagcttgtattaattttttcatctgcaaattaatattaaagtacataaaattaatgagacattggtaggagtaaataattcaaattttattattggatgttgtgcagttatagcagacattctataatttctactaatttttataaaatattttaagaaacaaatttaataagttgtcccttactataaattttttctatatttatataccaaaacataatttaaataaagaaaactactataacaaaaatgaaattttagattcacataccgattcttttgcatagtgaagtttgtatctctcttcctttttaagatctttttcacattcttcataagaattcaaaaataccttataatatgtcttcaaataatctggactaagtttatctataaaacttatgtcccacctgaaaaataccattacttataataagttttcaatttactataaaaaaatttaatcacaacataattttatgatataacaaaattttatttatcataaagtatcgatcattaatatataattacgttaattactataaattaggatctaaaatagtaataatatttaagtattaggatcttatattgatcaagtatgagatcggttagtagtatataactatttgaacaccttcctctattatatattttgggaaagagttttactcgaatagttgtatcaatatcgttatgtccaaacctgagaattgcttcggtgaggagctcaagttcttcaaatgtaccatatgcatcataaatatcatctgcaactgaggccattgaaatggctttaattaagatttttcttgcaagagagaattgaggttcatgaaagactcctagtatccaaaggtatagctccacaatcctatttcttgcaaatggtagtttgtttgccaagtctaattctttccaccacctatttataatataaatattgaatattgcaagagaaaaggaaatgagataacatgctttattaataaataatattaacttataggtcaatttagtttggataatgaaaatagattagattggattgaataatttttaagataattttttttatctcatataataagaaaatattgaaaagaaaaaaaaaattaagccaacaacccaattaatcccattggttagggttaatttattaattaatataaaaaaaatcaaaattatattttatactcctatttattcaatccctatcttcatatattttcatgatatagagtaattaagtaatagaaagaaaatgatacaaaaatagaattgatttatacatcatatttaaatcgttacaaaatattatttttattagtagttaagctcaggcctgggcatagaagggttaggcatgtgcctaaagcccacataaactagaggcttaaaaaaattatcctcttttaaaaatgtattcttttttatttattttgaaataaaactaaatttttttctaaataaagatcaaaaaaatatattttttttgacccattaaattttagagcaaccctgttagtagcaaacatgacacgaaatcacgcaactgatgcaaactactaattttgtatgaggttttaattgaattgcaaattcttttaccataatatttccctaacttttatatactaattaaataaaaattgatttatatgattaatgactatgaaaattattactaattagtacaatttatatatgttgatatatatatatatacctggaaatttcactaagctccttcttatgcaaagattgtagtagattgaagtccaactttgcaaattgtagcaatactttgttatgagaaggttgtttctcatagattgaaatgtaatgcctagcataaagcctcactagggtttttctcaaaggcctatataaggctaaggatatttcatgtgataatggatgttcttttttgttggccactaacttaagattggtggtagtgaaagcaagagcctcatctagtatattttcttcaacatagctcaagtatgaagcttcatacaagctaagcataccttcaatgtcacttttcaagctttccttaaacttaccactctcatctttgaatttctcaaatatatctgtttcatcgagttaaaattaattaattaattaatcttgtaaaaaaaaattgtaactaaaaatgtattattattcttatcttagtacatgcaatatgcatagataatattatatatttgaccccactacacaatatagtactttgtccccttaatatgcaatcttattcctaatccagatgtatgttattgaaaattaaatatatagggttaatattattttaaatttattatttttgtaaaagttatagattggactctgtattttttaaaatagtataaaataaactttgaacttaatttttcgttgttttttaatataaccaatctgaaatcaatttctagcacaaatagatgtaaaaaaatgcaactattcttgtcataatacttccaagtcaagttgttattaagttttaatttgacaaaaattaaacttaaagtctattttgcacgattttaaaaaatacaggatctgaattgttatttaacaaaataaaaactctaataaatataacttttacaaaacacatggtctaaaataatattgctcatatatataaatatatagtcaaaaaaattaatatatcttgttcaattttttgaaaatttagaataatttacgatgatgcaattaatattaaaataattacttatatgtgtgtttgttttattttatacgcatataattatcttttgaattttatctttcacaccataaaatttttcaatttttttttaaaaaatcaggttgctagatgcctactttatatatataatatatatgtagagtggtggagccagccagtattttagtgagggtaaaaagaatttcatttagtgaaagattatttataaaaatataaattttataggaacaaaattataaaatacataggataaaactaagaaaatataaattttatgagtacaaaaatttaaatgtataaaaatataaataaaattgattaattttgtggggcataaaatatagtattcaaaaatttatacacaaaaaattaatttggaaaaaattgagggggcaaagactccgccctccctttccttccgccattgcgtatgtatataaaattatgatataattttgggtaaatatcattttggannnnnnnnnnnnnaaaagttacagattggaccctgtgttttgttaaatgacaa

SEQ ID NO: 33819 - DNA, 3109 bp, Cannabis sativa
  modified_base (1209)..(1213): a, c, t, g, unknown or other
  modified_base (1430)..(1441): a, c, t, g, unknown or other
aatagtgtaaaaatacataaataaaattgatgatgcatggaacactttgtaatttgtatattagaataaataagatttgtcttctctaaattaagactctttagatttttattgctgattttttttttcttctacaaaaactacccttaatctataaaaataattgcaaaatatatctccatgcagtttgttcatttcttcaaataattagttgatcttatattaaagtcacataaatctaactcaattcgaaatttagaaaaaattaaatacattagcaaccatctaatgatgaattaatatatatgcttatatgcctatatgcattcttatagtgataatatatatatatatgtttaatgttatagtaaattaaattttaattaagtagtttaaaattgttaaatatactctatatttgtaaattatagtcacatgattatattattttaaaaaatagtaaatataacttaagggtgtacttactcatggcctttgttaaaccaagcataccatccttgtggaacaatgatattagaagcaaatttagtggcatgaaatatgactcttgaaaaagcaccataagctctaccaagatacacttgcccactccctacaacagaccctccttcaaatacaaacccaccaggatcattctctgttgctctcccttgtgctgttatgtaccctatgtacttaacattttccatcatcttcccaactgtcacatttatcagtgtattctgcaaataattaattaaatttaattaaaataatctaaaataaaagaatagattttatgtatatttttacttatttatttacctgataataagattgagcataaccaaagataaaatctacggctccttcgatgtaacaattactgaaataatgtcgaccagttacgtcccataaggtgtcttgaactcctcggaagccacagtcgaaaaatgccgatttgtcaccatatattcttgctgccaatgctggtgttacctcacttttacttcccattaagttgtatgagttctgcattaattaattattatacgtcaaaatttataatagtaagattatgtttgaattaactataattacagtaatttttctcaaaaaaaaaaaattaattacaatattaaaattataaatatatgctaattaggaatttttctcccgaacttggacatgtaccaaatcatgcccctnnnnntttaaggtcgttaaaaatgtccctctgaactattaagattgttgaatttaaggacttttatccaattaatcttagtaaaataattctaacatggataaaagttcagaggatatgatttagtatatgccaaagtttgaggggcatgatttgatagatattaaagtctggggagcatggtttagtacataaacaattactgaaacaataaaattgaatnnnnnnnnnnnnaagtctttaaatctaataatctcaatagttcaataaaaaaatttaactaccttaaaagtacgggaggaaaaatcctaattagtcttatatatatacctcgaatgaaatgcccttggcaacaatgttgtccgggaaggaggagaatgtagcactttcatctgttttttcatggtcgttaaatgtgataactgtctcatcacgaccgttaattccttcaagataaatatatggtttctcacgaggaatatttaccttttctctgtaaattattaattaactaattacttaatttagattatacatatataactaattagtatactatacatataggaattaagtaccaatattggcaccaatatcttaaaacataacattcaaatattaaatcattgagtttgaacaaaacaaaaacatgtgtatatgtatagtatcaattattttaaaaaaatatttaataaagtcaaaaacatgttatatagtgtaatagtaagtaatggtatatagtagtagagtagtaggtaggtacgtgtatgtggctggagaaatttggatctttatccattgagtgtttccagaaggaatggaatcaatggctgcttgaatagtgttgaaattcccagaacccttcttgttaacagtgatgatcttcgatattgttactacttttgaagaataatctcttaataaacttcgatgttcatgactcaaactactcacaacatcaatattcactactactacaagtaataatactaaaccaaaattattaattatatataatattagagctgggagataaagctgcattttcatttgaaccaattaataaatctaataataataataatcactatatatatagatacttagagagagagagtagtactatatatatatggtaaccaattttttttattttttctgatgaacgtatctaattttgttatacaaaaggtaccaaaatctagcttaggtttgtttgatgatctgtatttatagagaaaaaatatgaaaagaatcatgattgatactcatatatatgatatgtgttatgtatttatattttcctttttgatttcatgtagagcagatctcaaatattttgttaaatcgtaccaaaatccagtttatgtttttcttcttcttgatttgctaatgattttaagtaatatataaggtaaaagaaaaatatttttatgaaaggatattattggtaatttatctatggatcaagtaataataattaagtaattaaacttggattttcacttgtttgagtgcactagttaatttggtaactaagcttttagaggctgtgttttcaacccactttataaaaaggaagttaaaaagtgtaaaaatacccgtttagtttgaaattaatatttaaaggcgattttttggtataactccggccaccaattttagcggagaaaacgttgaatctcaatgtccattaagatataaatatgatttatatttattttattaatgtacattgctatatttttatttatgtaaattttttctggaatttttctattttattaatattatgttgtgtgtgtgctataagtggtcggatttttaccgtaatttatcgtcggattgcgtttataaggtaaatatatttaacttgatatataatatatatgcatatatttt

SEQ ID NO: 33820 - DNA, 5238 bp, Cannabis sativa
  modified_base (4202)..(4202): a, c, t, g, unknown or other
atctttatagtaagggtctaaaaatttttttttttgcctataatccatttcaactcagagacgaccctgagtgtatgtcaaagtttcgaggataaacattctaattagcagcatatgaatgaaagttttaactttctttccttcctctttttcttttgtaccaaacataagcttaaaagaacaagtaatttcattaagctgtattgtaaataaagtttctaaaagaaaaaaagtgtacatttttcttatttgcttagcatatataagaaagaaagatcatgttgcagaaataatcttgaattgtattgtaaagccttaatttgaatggaataatggaatgaagatgtcaaaggtgaaattgaatgattactagttgacaaaacagataggtggaagatcaagtgaggtccaaagtgacatgagttcaccatcatcactaaaatcagagccaataataacatttgaggcctctagttcttcacgatcatgatcttctttcttctccatcattacttgtacatgttcttcttcatccttgctcataataatctcttctttgtttttgttacaagcatttttaaggctccttagttgatcagaatcagacattgctccaatctttaactttaaacactctggtattccattaaaggcatagagagaagcagagaatttcctctcatatttcattctcttcatggcctctctaagcattgaaggctcatccgaaaaagtctctgcagcttcttgatccattggctcctctatcacctcagcaatctcaaaaggagaatagttacaagctttatcattcataaattggaaatccaaggcactaagttcatggtaacaagttccatgttcctctccatcttcttcttcttcttcttcttcttcgccactcgaagtctgtcctgtctcatcatgctctctttcactgcaatcttccctttggtgatcagttaaacatgactcaaaacttgatgtcatgtagtcaatggtggctgagctaatgttattgttattattggttgtgatgtaataatcttcagtgtcattgagaaaatcagtgaattgggtatctgagaaatccattggttcctcatgatgatcatcaatttgctgctgattttgttgttgatagttgttgttgattataggcacaaaacaagaagaagagactaaagtgttattgttgctattgttgctgctgttgttattgttgttagtgttgttgttggtgatgttgtttcttgctttgagtctttggagaagaaggtttgtgatcttagaaggaagagctggagatgaagaagatgaggaagaacaaggccagaagtttgttcgagtattggccccgcgaagcaagcaagcagcctcatcataggctcttgcagcttcctcagcagtatcaaatgtgcctaaccatacccttatcttttgaatggtgtccttaatctcagccacccatctccccgaaggtctttgtcggacaccaacaaagcgctttcgagctcttctagcagctcctcctcctagtgcagcagcttccttcaccatctcatcccaagccatagtttcctcactagagcttttgtcttccactccttcacttgtagttgcttttctcttccttcccatatctcttttcttttagtgtttttgtttgtttatttatttgtaactttaatttatgtttgaagatgttgttggagatttaggtgttgtggttgtgttggttgtgtttgagtgtatatttatatgaagatccctttaaatgaaagtgaacctttgaaatggtcttagtacttgttcttatttctttgttgtttttaatttgagcttcatgtcaaccaaagccatatggagtttagcaattaaattaagttttctttgacttggccaaagatgccttaccatctctcttagtgcaatcatttacataataatattttaatatagggacatttgagtagtaagtcttttaacttctcttctcatttatattttgtcaagtttatatgattcttcttatgcaaacaagtaaatttttgtcaaatttcttgttttattaacaagagcatgaaaactattgaaagtatttatctacacacaccatattgtatactaccaagagagttaatattagggttgtatataattttttttaaagcgtctaatctgaataacttggtcaaattaaatcgaaaaattcgacaaaaatataactcacccaatttttatatcgagtgaattgaaaataataccaacccaaactaacctaattaacctaattaagagattatatatacatttgtttttctttatacgtaatataatttatatacataataaatatacttaaagtttaaattactatgtttctttcataatagtagatttaaaattttgaattctatcatatatatttatctcattatcacaattaattaaaatttaatataattgaatgtaaaaaaaaaaagatattagtgtcggtttgagcgagttaacccaactaaacagactaattcattgggtgggttactattttttttaattgggtggattgcactttaatttttgcaacccgatctttatattagatgaataaaatgtaatataaaccgaccaatatatatattcctaattaatatacttatatttatatatatatatatgataaaaagtaattttttggattcctaaaactaaaactaaatatgagagataagtggcttaagtacttttttatagtattccatgtggggttttcatgtcataccaacctccttaattattattagcaacacaagttacacaacaaacaatcacataattagtttatgtgaaattttggggtaaaaaatgaataatgtattatcaaattatagcctttgtttcttttagtgaaaagcatgaaaaaacggcctttttttttttccttcttaacattgttaatgtaaacaaaccaaaaaccctacaagtacctttcaccccaaccatttaagaaaggttaaagaaaatgttcaaatgaaaaaatgctttgcatacttaaccaaaaagagtctatttatcattatgtagttgtattcaatatgaccaaataagcaattacaccgatttctccaaagcacccatccaaatgagaagtctattccagctatatatgtgatgctctatataactattttaatatataatctttcatcatttgtttacttccaaaaccataaataacatattctattaatccatttgttactaaaatatttatttcatttaagtttatttgttgttataatcttccttttggtttattatatttggtgagtattatgtcaccctaaaaaggttagacaatagacaatgacatccttggactttaactatgattgcttttctcttgttaatgtttctaattattactttcaataatggctatatatcaactctctagctagctagatagctttgataatttccaacttattttcttcaaattgtcctaagtagtaacaaagggttatgattttgatttttatttactatacacatgttttgatataatctctatcgttttcgcatatagtataattttttaattaatttattttttataattatatactctgtaaataattaggataggtataatttttttaaaattttaaataatttataaaagtaaaaataaagtttaaataacttcttacaacttttataagagaagacaagcatgtaataaattattttctacattttttaaactattcggaataatctaaatatttatatgtggttttaaataattacaacgtgtattgttattaaaaaaattaatttttttttttaatgttgaaatagataaaaaaaaaaatatactgaaacattcatttaaagtggtgtcttacaaatttaccatttctttttatttaattatgtgtgaaaagaaattctcctctctttcgagaataataagacatggaagaagtcataatacaatatttgtggttattattatattaaaacagtcttttcgggaatgcatttttataatagattaaatgtaactattatacatatatattataatattaggttggttgatgttataattggttttatttttaattaggtttactagatgatattaattgtaatgctttaatttttcttttttaattaagtaatgtattttntttttaaaaaaaaaaattaaactagaatttgaaattttaatctttgaagattttttttaactattgcgactataatagtgtgccctttagatcagggttggcgtgagctaaggcagttttcaaaaatatcacatgttttttttaataaaaggcccaataattgtctttttctaaggcccacccaatctgtcttgctttggatgcgattatatataaacatattttacatgtacaataaaactcaagtgggatattgtagtgaatcgttgtgtgcccaattgagcgaaattatctcgtattttttttttttgaataaaagttgataactttatttaaaacaattcttgcgcaattacatcactaatgttattcggaacagtgtccaccgaataactacgctcagcatataaccatgagactcgggcaagaccataagctacacggttagcagaacgtttaacaaaacgtaaacaaacatgattcaaatctgaaattaatctcaagatcaatgtggatgcggcaacatttgcggatcgaaataaatttgggtacggttgggttctccgtgattctgggggccaagtcttgcaggcaagaacggggtcttgggatggttgtgttaatccggctcttgctgaggctcttggccaacaaccatggtgtgaaagaggtactaagctggataaaggagtcaaagctttctcatgtcacagtggaatcagatagcctcataacagttcaaactttccggagctcggtgaatactaaattatctcgtattttaattcaaagttaaactaacaaacttaaaaatgtagttaaaaatatttataatattttaaatattttaaatttaaattaaaattttcttatataaaatatttacataatttttatttttaaatatatataataatattataacattaataaaaatactttgttaactaatagtatatacatagaaaattaaaaaagcacaattaaattaagaattccatcacataactatattttatatagatatataagtttg

SEQ ID NO: 33821 - DNA, 1463 bp, Cannabis sativa
ggctcggagtgcgcctagagtctcacacatgctatttgctgatgatagctatgtgtattgcaaagctaatgagggtgaagcttcacatgtgatgcaccttcttcaagtttatgaacaagcatcgggccaacaagtgaattactccaagtcctcgatctttttcagcaagaattgctcggatgatacacgtactaggctgtgtggtcttatgggaatgatggaggctggggacaacagcttttaccttggcttaccttgcatcttgggtcgtaataagaaagctatcctgggttttttacaagagaagatgaaaaagaaaatttttaattgggagagtcgcttcttgtcaaaagcgggaaaggaggttctattgaagtccgttgcccaagcattgccttgttatgccatgagcgttttccttttaactaaggaaatttgttctagtcttgaaggtatgatggctaagttctggtggaagtcccaatctcgttcgggttcaaagggtgtgaattggataagttggaagcggttgagtagacataagactgatggcggaatgggattcagggatcttcgagattataatctctcgtttcttgggaaacaagggtggcggctattaacaaatgaagactccttggtaagcaagatttataaggctcgatattatccttcgggtaattttcttaatgctactttgggtcaaaacccaagctttatttggaagagtattatggaagcacaagggctagtcaaggcgggttctagaaagtctattggcagtggcgataatgtaagtattttgttggatccatggcttcccgacccttctaatccttttgttcaatctgatcatccggccttagtgaatcaaaatgtttctagcttgttctcgatgcattctaagagctgggactttgatgttatcaatgatctttttgatgaaagggataagaatcttgtattggctattcaattgagtggctctgctacagatgataaatggtgttggaatgatgaacccaatggcttttacacggtcaaaagcgcataccgaaggcttcagcaagttgttggtgtgcatgttgctgatcaagaccaaagaatgttcaaggctatttggaagttggaagttcctccgaaagtgcagcacttcttgtggcgtgtgttagtcgggtgcctgcctacaaaggttcagctcagtacaaaaaaaggtaaatgtcgatttgtattgccctttttgtaacctggccgtggaaactatcatccacatcctgctggattgtcgatttgcacggagctgctggtgtgtttctaatgctccgactggtgtgattaatggagatttcaacagatggttcaatgctcttcttgagaattactcggatgctgtagttcaggaagcagcttgtattagttggaagatttgggctgttcgtaatgagcttttatggaataaaaaa

SEQ ID NO: 33822 - DNA, 858 bp, Cannabis sativa
gaatgaagaggttgctcctttgctggtttcggaagcaactggtgcctcaggctctgggactgggattgaagaagcatcacctgatttgttgaaaaatacgccttccaacattgctcgattggaagatgtaattgaacagtgtaaaggtcgtcggaagtatcataagcagactcgaagtccttctgatggtgaagatgtaaggtggtacttttgtaaggttcctttggtcgatgatggtaagccttacatttctatttttggctaaagtattcatttttttttgaattgaaatcattactgattgttacttagtttatatgttggtacaagttaatgatggcattgatgtttgtgggtttcatgaacagagttagctgcttctttccctccaactgagataattgggaaaggtgactattttcggtttggtatgagggattctcttgcaattgaggcatcttttttgcaggtcatttatttgaatcatgttcttttttttatattcatttaaagattttattatgctctaggacccttattctgaaattttgattagtatgtatgtgcattttagcttgatggaggtgaatcttgttaattactaggtgtgctgacggattggctacttgtttgttgatcatacgttcacagagggaggaagagttgctgtcttattggtggaaagagtatgctgagtgtagtgtaggtccaaatggacatcccagttctagcaagaagttggatacacaaccaaatgcatcttctccaaagggtcctgaattagctgaatcatgtaaagaagaagaagagagagttggggttcctgtaaagggagggctttatgaggtgttctttctt

SEQ ID NO: 33823 - DNA, 2088 bp, Cannabis sativa
taaatttcttcatattgtcaccgttcacattatcaaatggaagttccagcattttatgctcgatgtgctctattatatacatcccgcaatcaccactgtatgagacaataaaaaattattaaataaaagtatgcaaattaaatttaagttaattaataaaaaaatcaattgtaattaagttaccgtgatttcgtctgtcgtacaatcctcccatcgatgacttttgaactaaaatttcttacatggctctctaagacggtcaattgaggcatgacgatcatttcatgattctcgaataggtcggacagcaacaaagttgggaataactcttcccacaatgtccagtgattcttcaattcattcggggaaatcgatccaaggctcgagtcaaatatgctcaacatccaacaatcaaggtctgcctctaaagtcacccaatgctttgcattgtcgaagaagaaggccatatatattctctccttattcttccaactgtccaagtattgggcatcatcccctcgaatcaaatccaatatgtcatcatcccactaaaagttagagtggtcattatccgcagcttgccaccgaccaataactcctgatgggaaaatgtgaggcatgaggacacatctatttgggtacactttcggatataagtgttttcgcttcctcatcaaatgaaatgttgcatctaaatgctaaaacatgaaaataaaatatgtaagagattaaataaaaaaaaggttagataaagtctttaaaaaccaaagacgtaaaaagtcttaaaaacttacatcgtctccaagccatgtcttcagagtatgtagttggaggaaccaagctgaatcgtgtctaacgaagtaacactccctcgggtacttgttcccaatctggccaagaacccaactgtgaaaagtcgagagcagctttcaatcaacgactctaagtggatccacattcacatgtgtcttcgatgccctagacttcttcttcattttagtgtactcatcgaaccacctaggttgctttctctatctccggtgctccactagttcgggagctgtctctaacacctgtatctcaaaattttgagtatcctcgatgctggcgatctttgtgttgtcaggtgtacaaaacatatcatcatcatcatcatctggtctataatcatttgggagaatgatttcattttccgatgactgaagctcttcttgtggttgtggttgtgaatctggtgtcggccttccaagatctttcaggagtctcattatggtcttcaaatgacccataatctcattctgtcatttcaaaagagcagtctgaccttgcttcaaagctagttgttccctgtccaaaatcgccaaccttgccttatggcaaaggatactgattctggaggctctgaagtgctgggaatagatgcagatggggcaaccagactcatctggtagtgaagacggtgcaagaggtgtagagtctctaaatattcaggctgcatccgctcgttcttccaatgtcgaggcaagcttttgggcctggctttgcaaaacatcctgtgttggttgcccatcgtcacccaacataagttcctctaagtcaataaataaaggtgcctcaccgccagtgatgcaactcacaaactcagtctcattcgctcggggacataacatagagtacactgtcaactgaaaaataaaacaaatatattaatagatggaaattaacatgaaatacatgtaaagcgtaaaaaacttacatttctagtaaataatcgtatcacttcgtccttcccgagtatcgtttttggcttactttcccagttcaccattctcgaacagcgatgcgacttcttcactgcatactcgttgcccagctacaagatggcctcgtatgcccaatactgcaacgttgtagtattgccataagatgagtatttagccttcttctgactaactcccttttcaatcttcttaagcatcatattcttcacatctgtgtagtctttattgcaagtttccatcaacttgttgtacgaaatctttccccacgggtatgttggaattaatttactaggatcttagatctact

SEQ ID NO: 33824 - DNA, 1400 bp, Cannabis sativa
  modified_base (840)..(849): a, c, t, g, unknown or other
agagttatgaatttttgaactttctttcactgaatcaatcgactggttcaggggtacctgtaggaaccggtcgatcgattggtccccaagaaaccccacagaaccaaaattccagttggggaaccagtctaccagttggggcagttttgggaagcctagtttttcctgttttggcgatatttagagtattgccatgttattcatcgatagggaaacatttagcttcaagtttatgtcccaggaaagttatttagcatgtcactcaacacttttacgaataacgtgatttaggcgcctgtaattcatcgagcagctgttccactcaggttggccgatacacctaaattcagaaacaaggcaagattagtacaatgatattcatatgtatttacatgtttaggatgcatgttagttaagccagttagattaccttagaaatgtatgttgacttaagtcttgttcgataatatcacatcggtacgcctagagtatgactcgtagtgagtataggctgatattattgtcgatagtactgaactacttgatagtgtgacatcggtacgactagagtacgaatagtgtatcgagtataagctgatattatggtcaatagtactgtcatacgaacgttcgagactcagcaccgtgctggacacaggaattaggttatgattgggggtatgggcgcctgattataactcgagttattgctatgttattgtttatgcttttgttactgaggttgtcttctcacagttattgtttgtatgtgtaggtaagggcaaggctaaggttgagcagccgtgagggcgagcagatggagattgtacatgttggggnnnnnnnnnntggagcgtacggtctttgggacatcagggcttatattgtatagtccctaagcgacaaacttttgtatatgcatagtgaaacttttgtaaatacatttgtaaataggatcccggttttatataactacgttattttaatgtgtaaaattaattaaattttttttaataatcacgatttttaataaactcgttggttagtaacgaactgcatagttagttaaaaatcacgttaacatgcctaaactagtaaggtgttacaatttggtatcagagctgccaggttgtcttttcaagatcaccacgatatgtacaatcatcttcaaggattagctcgtttcacggttcagtaagcctttattgctttagtagtctattttaatagtatgatttaagagaagcctgataggaagcatgttagtagcctaatagctgaataggtgtatgttttaaatttccaaaataagcaataatcagtaagttcttcttgatcgcgatctgaccagactagctcttggttacaaaagttagtctagtagtatggacgctaggcga

SEQ ID NO: 33825 - DNA, 1822 bp, Cannabis sativa
cgatataatcatttatattttcgaaaacttataaatttaatctttttatatgatgatgtatgtagtaattatttaagatattatattataaattttaaaaaaatcaaaataattaataatacaataagtaggattcaaaaatttattttattttttacaagttaaattatctttaatttttttaaaaaatttagagaatatcttaaattattttattatcatataaaataaattaagattaaaaccattttttattaaaataataataataaaaaaaaagtatgtgtcattacattcatttttatagatgcattataatgtcattccatatcatatgttttgattcaataattaatattaaaaaaaacactaacactcaaattacaccaaatttttattcaactttaactaaataatcgttaatttttgattgtataatcaaaatttaattaatacattggagtcttcactttaaatttgtaataattagttgttttgtgtatttattttcataatattttgttctattttattagttggtagcgttattttagttatttcaaattttttgttgcattaaacttgtgaagatgatatatttatgtagtattaaacttaaatgaagctttatatatagtttttaggttttttttttatgtttttttaattaatgttaaaaattgagtgtgtaattagatatttaattaaaaaaattgatccaatccaattagtaattggattgaattttgagctttaaatggattagatcggatgataattttctaaatctaattactacttggattagttcgatcggattaaaaaaaaaaaatttgaattggatcgaatgtccaaccctacttgacaccttaaggtttattagcttctataccctattcttctcagctggtggccgagagatccttattaaggcaattctgcaagctgcaagcagttccaaattacctgatgagcatgttttagttgcctgtggcaacgtgcgataagcttcgatctattattttacagttctggtggggtaccaaatgtgataagaggaaaattgcatgggtgagatgggacaatgtttgccaaccaaggtcaaaggggtgttgggctttaaagacctgatgcttttcaatcaagttatggtagctaagcatgtttggcggttactccagtcgccgaactccttgcctgctcgtgtcttgaagcataagtattttctgcagacttcaattttggaggctaaagatcatcatggctcgtctcctctgtggtctagtctcatatggggcctcgagttgttgcaaacggggataaggaaggttgtgggggatgggtgaagtattcatgcatttcgtgatccttggataccccggcctagaacgtttcgaccaattacggttgcgccgagtggtaatgtgctggttcaagaattgattaatggggatgaggcttgggatcttaatgccttatcccaatattttttacgattggatatcgatgtcatcctcagcatcccgttgtgtagggggggatgtgaagatcagtggtgttggcattacaattccaatgggtgctatacggtgaagagtgggtatgcagttgcgcttgatttggcgaatgaaaggaatggcgggtcttcggtgaatcaatcttcttggtggaaggggctgtgaaatttaaagataccacataaagtcaaaatctttctctggggaatgtatcatcgggctctcccgaccaattcccaacttatcaaacgtaagattccagttcaaccaatttgccacaaatgtggtgaggccacggagactcc

SEQ ID NO: 33826 - DNA, 2137 bp, Cannabis sativa
  modified_base (619)..(621): a, c, t, g, unknown or other
  modified_base (1177)..(1181): a, c, t, g, unknown or other
ttttactttctgaaaatggtagcttacataacactgtttgaagaacctgaatattcctgggaggagtgaacaattttcctgaataaaacctgtatgaaaccatcacactagaagcattagcaataaaaataatgactataattcttataaggttgagattttcttctagaacaaagacaaagacaagacattatgaaccctaagtcaacacaaaaatcaaggatcatgaagaaaacaaacatttaactactagcaagcaagtagcagatatttttactaaagctcttgactcggtccgttttatctctctaaggaagagctcttatttcagtaattatattagtttaagaaatatcatttataagaaactaagtgttttaagggtaaaatacattgaagagtaaaacagtaattttagtccatacttaatgtaaatcatctataaaggatcattgattatttagattgaaataatagataacttatagtgtatctattcttggttaatagagcgttctaatcaagagtaaaattttgaatctatagtgaagtcgagaggaattaataagatagggaatttactcgataaattctagaactacttattgggagcttgatnnnataggcccatggtccccacactatttgagataatattttttttgtagactcaattaattcgtttaattaatcaattagaattctaagtaagactatgtctcaattatgagttccactaagcaaggacaaatttgaaaaaaaaaaacattcagggtttatttgttaattaagagattttagaaagtgtaattaataaataagttaaatattaattttatttgataatttatcataattattaaatagataaaattgacatttagaagcttaatattagaaaatagtatgactttgaaaagataaatcttgacataaattggtaattttgaaacccatggacatctaatgaattctagtatggtgtttataaaaagctattttttatctttcttgatccattttaagagtctaaacctaactgttaacgtagattttcgtcaactatatttgagcctaaattgtgatagacttgcacagaaattaaaagtagtaaataaaaaaataagaacaccaaggtttttacgtggttttgcatttaaaattctgcatagtccannnnncaatcttattagatttttgatatagctctcaggccttttttcttatgaactttttgtccctttttagtataacctgctcttatttgtaattacataggagtgcaattaattacatagttgactgacattttccaacaattatcccctaaaattgtgggattggattacataacaagtaaaataaatgtggttaatatttgaaaatcacacaaatgtgataggtctacttttaccgggtcaatgtaaacgtgtattaaatacgttgtaaattgcgttgttctgggacgtctcgctgggaatcatagcaacaataaccttggtagagagctggagcttttcccatgtctttctaaggttgataatgtaagcctcgtcattcctgcgcttgaagacataatgccataatgctccatctaaaaatcgtagtaatcgtagttcttggtgacaaggtgaacctcagcagtcaacagcatttgtgtgtcagcttctatctgagagagctgactagacggagctatgaatcccattgaaaggtgcctggagctgattagtgaaggttctatgagcgcgccttcctatagcaagatgggtgcctcactattaacagtttggatttactcggctgttatacttagtttgtataatgtgtattatacactaagtgtcttagtagtcatcatgcctcgtgttcgtcttgtaatgcgtggcgaggttgatgcctcactttatacatcttgaagtcgtatggtttcttgtttatgcttgaatcaacattttgtatatctttatctcctgtaagaccttacagtcagcaagttgtaaatatactctgtcaatttcgtatttaatgagttattccatcttcaaatgtaattatcattacattcattgattcgtattcttcctaggaggacacatgtcctcctctaatttgctagccgaattttaggtataac

SEQ ID NO: 33827 - DNA, 1063 bp, Cannabis sativa
catatattatgttacaataataataaattaagttttcaaaaaaaaaaatatatatgcaaagaacactctataactgcttatttcttaccttcttcatttttttttatcaaattcttcaattctattaaaaaaaaaatagaaatgtgtacgaaaaaaaattattagatgattagtatacacatcttttatttggttagtttttttattcatgccaacatgctctagagaaaatctagaaaattattttatacatatacaatatctaaatttaaggaaatgataaaataaaggaagaagaagaagaaaataataattgcttttcttagaaacttggcaaaatgatcctattttgatttatgaataattgttttaacttataaaaaaaagggtaactgttttaaaatttaattaaaaataaaaataaaataattaattacatgtttcacaactcattttaattctatacactctcattttaaaccaattaaaactgaaataaaatgctcttatgagtagcaaaagtggtgttatcacttaaaaaaaatcctatatatatgttgattaatttgtggataaaacttaaaagatccatttttgtgttcacttaaaaaaaacacaacaataagaaatctacacactttcaagattacaaagaatgatctacattacatgttaacaataatttaaaaatataacaaataatttgaaaaaactaaaataaaaaatataaactagattaaacattaattatcaacaagtacatgatcaccagaaaatcgatcttcttctccagctctctagttataacataaatatatcttcataatactattttccattgttggaggaggagatcatcatcatctttttatgatgatcatcatcatctccagttaaatatattattagatgagtagttaatttcttctactgctctttcttataatagaaggagtgttggggaaagttgctgctgacatcctcaacaatctcatgaatctataacaacaataagaactactagcactatgggcttcatcataagctggtactggtggcttat

SEQ ID NO: 33828 - DNA, 1091 bp, Cannabis sativa
  modified_base (483)..(487): a, c, t, g, unknown or other
ttccaaacgcactcttagtaatttcataataaaattatatttaaaattaaaatgggttattttttaaattagtaattatttaaaaaatttaatggataaagtttaaaattaagtaatttaactaagaaaatatttttgtttttttattaaaaaaattattataaagatttagataattaataaataataaatagatagataattagattattatttaattaaataaaaataatttaaataatttaatatctatttatttataaacatataaaaaaattataatgaaattaatgtaaaaagtgattgatttaactaagataattttgtatatttttaataaaataataataaataattagataattaataaataaatataattaatttaataattaataaatcctttttaataattaataaataataagtagttagataattaatttaatattaaattaaataaaaataatttaaataatttannnnntatttatttataaacatataaaaatttcatgtaactaatttaaaaactagttaattaactaagataatattttgtatattttttacaaaataacataaaataattagataattaataaataaatataattagttgaaaataaataattaataatttaatatttaattaatttaataattaataaatccttacaataaaaagaattaatatataatatataataagtagttagataattaatttaatattcaattaaataaaaataatttaaataatttagtatctatttatttataaacatataaaaaatttatgtagctaatttaaaaattagttaattaactaagataatatttctgtatattttttagagaataataataaataattaaataattaataaataaatataattagttgaaaataaataattaataattaaatatttaattaatttaataattaataaatccttaccataaaaagaatttatgattaataaatatttagaattatcaaaataatattgaaaataaaagttaataatgtttcataaaatgacataaaattagacttagttcaacttttatataaattcataaaa

SEQ ID NO: 33829 - DNA, 1597 bp, Cannabis sativa
tgaatttcactatgcattctcactctgtaaattgttcaaattaaggtgatttgagtattagccctcacaatatgcaagttgaaactcaagtctttgtggaagactgtgatgaacacaatcgaaagatgagaagatccaagtctagttcttgatcatactctataacataaatgatcaagggttagagaactaagcggaaagagaaattatattctgctgcaaccaatgtgaggttttataaccattatgtttcatcgtttaaggtttattcatatttaggttgttagattatagaactataatcaacgtatatatatagtaaatattacatcctgataaaataagttccaacatggatacctcgagctagctagaaactaatcaacactaaataaattggattcttgcaaattaacctcacaacctacaacataaagaaatactacaaaattaaaaatttaattacttaactactcactatttatataatttataagtacctagttactaactagttatgttagtaattcattacaaactagtacacatgaatatgaatgaaaattagtaactagtaactaatagtaactaactattagttactagtttgtaaaaaaaaataaaaacacatggaatgaaaaaaataataaaagagttaatatttaacatatttaatataccaaataatatactttaaaaccaaaaatcccaaaaactaatatttacatctctctccatttcaccacactaaacacaacccaaatatggtgatccaaggaagaagagtagctcaccacaaccagagctgttttcatcaggatgaaaaaaattagatatggtagggttcgctttttcttaagttttctttgctgaaacttcttagaaaagcatacccatttatatgttcttatatgtatgcataaatatacatatccacactacctgattatacatatatacccgattaattgaaagtattttttttcatattataaagtaatatcgattatagtagttatacccatttatggtcttgaaaaaagttgataaattcacacaaatactaaaatagaatcaccacatatatatagttgagtgttattaacatttcaatctaatctaaaaaaaattaagctactactccaatctaaaaaaatctataacaatactttgaaagtttatgtttttaccttattatttaaatttggctaccaataccgactaaaagtcggccaccacgcacaactaaaagaacacaatcttaacaatctagaaaaatcctaaaaaaatttataaaattaaaaataaagcaatttacaccaataaaattattagaggttagattgataagttaattgacgttgaaatttaataatttcttcaacaaaattggcgatcgaagctacaaccactatctctagctcggtttacacttaaaaactaaaaaaatgatcaaacaccgagaatatatttttcggtttgaaactaaagattttaagaagaaaataactaaaaatgaagggtaaatgaggaaatggggctttagaggccactacaacattcaacactaatagcggcggacccctccgccgctatt

SEQ ID NO: 33830 - DNA, 3534 bp, Cannabis sativa
acacaagatttaaagtagttcccctgtgttgtgacggtaatggaactatgcttacttcgagtttttgttgctcatgagaattacacaaaaagttgagaaaggcaaaactagagagaaatgctttgaccttaagggctcttttctgaatgtgtaaaatgaactagtggtgctctccttttatatggaagcatatcctattaaaataataataaaatatgaaaaaaaaaacttttggattgatcttggctcttgatgatgatctaatagtaaaaaatgacttcggatgattattagaaattttcaaagctcaaatctcgtctgttggatcacttttcgggtaatttgtgaaaaaattgtacttgtattggggacgaattttggacttaaaatctttaaaattacgatatgggtgtgagacatgatttaaaatagatttgaaatagctataaaacaaaagttgagtcgcatcaatcagatcaatattaagggagttatggccattttactaaaagttattcaggatccaatgtccacgttgacaccgaacacccatgttgccatactaaagtcaacctagacgttgtgtgagtgaaaaaatgtcccaaacttgtatttttttgatgcctaagtgatatgttaacatcacttagtcaatttcatagttttggtgaagttgttcaccaatcctcagtgatgtcacttttttgtaaaatcaggttgactcaaaacttcctaattttgctgatatttgaccttgttgaaaaggtaaaatatcaaagtgtgaatttaacttatcacaagtcttagctctcgtttattataaaaaaatagttagattgttaagacagaatcagaatcaaataatcagaacccaactcaccaggctatacgttaacctggttgctgagtgctcctcaacggacttcttggggctcattttgatacttttatggaatttaagattgtgatgaggtctcttaccctatttttgaccaaaataaaaagaatccctagagtagaatttgtgtttaaggagaagaaacatgaatactaggttatacatcaacctatgcgcagggcgcagcacttatgtcaacttaggcactgacgctctattttggctccctaagaatctcctttgctccccaaggtcacttgtattttcagttttttaaaacggaaaagattcttggagcactttttttataaaacacttggaactggcccaggttgataaaatatcaacttgggtgctgggtcccagtttttcccactagatgctttcgagtgattcctagaaatacttgtatcacagttattggtgaaaagaagaatatgcctagaagacttctcaagaaaatgtttggaaatggcttaggttgacaatatgtcaacttgggcgttgggcccaacactaggtcaacgtgggtgttgggtcccagttatgactcccagaaggcttcgtttgtttctcaaaagcacccatatgttaattattgatgaaaacagtgaatattcttggaagactttgcttgaacttgttacttttatggtattaaatcaggtccgtagcgggataaaagtttctgattactatcgtaccatatcctcaggatcaccatatatattatatctaaaataaaatagacaaaaaaattaatttacctcttgaagcctatcgatgtattctcgagtctttttgtatgttgcaccctcagttgatctcgaaatactcacaccatagttttttgaatcttctaccacacacaaggactattttgggctagtatgataaagtgtatacaaagttcttattaaaatatatgagctagaactattctgtagtaatgatggagagaaaagattaatcagattaatcatttttaggtttacccaaaaataatatgtattagcttttggtttgtacaatatatttaaataaaatcaataaggattttatttaattaaatatttaaattaaaattagttattcaatcatatttcataattttactaaataatataagcgaattttattatagatatttattttctataaccaattaagggaatctctcaactgcttgaggaaatctcttaactaccttgagagaatatctcaaccatcaaaaaaatctataactactttttaaattcaaatttatatgaatatttatcttttgaattagttaatcaataaattaattaaccaaaaaaattcagtggggacaatcctatcttatacgtgtctatcactgtgttaggacaagtgatagtggcgccacctatgtcttgacgagatattggtggtgtattttgtccaaccaacttttatcttttccctaatttatttaatttataaatttgaaaaaaaaaataaaatatttattacaaaataaataattactattttgacaaatcaaaatagatttattcaaactttcatatttaagttttatctttatccttgacaatatttcaaggtgatcatctagggaccatagacctataattttaagctctaataaactagattatttattgaatcttatcaatcaaatagtcatctttattaattccctgattactccattataaatatagaactgatctcttagtaattatataattatatttactgagtttttactacattgtctattgatataatcaattagtgattagccctccttgtgttggttcataattagttttagttagtcaaattacttgttacttgtgtttctggacgtacgatacgtgatatttaaagaaggggattagcttaataattccttaattgaaatcccctaatacaaccttatcacggagaagcctcttggaatcgggaacaagacgagatggaaggaaacgcgaaagcgtacttaactttgccttggcttcccgaacgtagaaagagaatttcctctcctagaccttgatgggtctaaacatggaagtctgccagctaatacccgtacaggcactttaaaggcatgatgcggatgtcaaccaccttggagtgtcgtggatgtctaccttttatgcgcgccagaccaccaagtgatggttatgcttttttgacgaatatcaaatcttatctcctacatccaagcatggtagtgcacacactttcaccacctttttgccaggcaggtattacaaacccctactttaaaaggacaaagctttgggcgacacgtggcctatacttttaaaggttaaacctttggatgacattgttgactcaaactcaagtctctttattatgattaataaatatttgattattatttgtcacaattgttgattgtgtagcaccattaaagataaaataagatttttttagccaaaattaacttcaaggacaaaatggtaattttaccaaaattctcgaaagtgacccgaagtggattaaaagacttaaggaactcaagacaagacttcacaaaggtttatttatatttcctagtcttgtatagtaattttcaagtctatacttaaaagttttaagtacgaattttagtccactaa

SEQ ID NO: 33831 - DNA, 2868 bp, Cannabis sativa
tcttaagatatttgctcaaaaaatagcaccataacctctaacatggtgaacagcattaccatcatcaaaagaatagtatcttaagtctcctaaactacaacctcgatcttaaaaaggaaaacgagatcttggtagttattagatgcttgaacctctgttaatgacatagagcgatgataacacggcccaatgttgacttctttcccgaattcattaggagctctttgagagcctagagccctaaatatagatattctgtaaaaaaaaaataaatcaatcagtatgtcaaaaaaaaaaagaaatataaaaaaattcttaagcaagatacgtttacataaatgacatgcacttgcttaagggggcatctgttgaacgaaaatacaatataaatatttgaaataataagattttctcgctcaaatttgtcatccccttctcccatgaattttgtccctgtttataggaatataggttggcagttattctttttgggattgattcatttacaatggttaatgaaacgaggacattccccacgtttcatttattcacacatggaataatatctaataactactcaaccgttccttatttttatcctttagacagttatgctgactaggagagttacatctcgtcaatcgtgagttcttcttatccatcttaataggaaaaaattttaagtgttagaagcacctcatctcgctatatctcttttatttatattagtgatgcgagatgatttccacaatatgagtaacgcgaggcaattgaatgttgatactcttattctgctcatgcaggagaatatcctcttcttacatatttaactaagtttatccctaagtagacatttgtctcgtcaataccagtttaataattattattcttgtctttcataagactaagttgtcagcgaatttgaacatttctatcaaccttgtatttaattagaacaagttatttaaatttcatttaatgatacaatgtcataattatattatttgagttggtttaaaattctttttgttgggcacatgtcagcttccagtacatagccaaattttggataaaacaaaaacaaaaggagggatttgttataattaatcatttataaaaaaacaaataagtcagtattataaattaattactaaaattaaaatataatctcaataaattttttatataaataaattaaacttgtccagaacaatcaacatacagattgaagattttttgtattgatactaatgatctctctgaagctaaacatgagcaaactgtcatctacaaagaacaagtgactaattggtggagtatgcttagctattttgagacctaatatgtctctcttttcttttatatgtcgaagaagtgctaaaaatccttctgcacatataaaaaaaggtatggtgaaagtgaatctccttgtcttaagcctctagtcggtattacttctccataaatcttcccatttaattaaaaagagtaccgaattgagtagacacatttcatcaattttcccacccattgttgttcaaaacctcattttagcaacattctctctacaaaaattaactcaacccgatcataggctttgctcatattaaattttattacagtaaaatattgttttccccttgtatgccttcgtaaactatgaagaccctcataagcaattaaggcattgtctattattagctgacccaaaacaaaagcgctttgcgtgccacttattacctttggaagaaaaggctttaatctattgatcaaaacttttgaaatgattttataaagaacattgcataggcttatcgacataaaatcactgacagttattggtacttttattttgggaataagtgtaactattgtagaattaatcaatgataaatcttcatttccctcaagaaaattcatcacggtcctggttaccaatggtcctattatatcccaaaactcttggtaaaattttagattcatatcatcagatcttggacttttatttgcagacatggaaaacacaatatttcttatttcttctgctgcaaacagtcttcttagctttgagtttatttcttctgttactacaagtttaactgcttgaagtaactggtcactttttggtaaagatggggttcccgttggaacaactgtccgtaaaaatctgtgacaatcttggtcatctcttcaacatttgcaccactcgttattcctatttaaatgtcctaacaaaaacaaatattaaaatcttaaggaaatcaaaataagagcaagaactggcttaatgtagagattgagactgataatttgctttctatccaggccattcgaagtaatcaagccatgtcctctacttttagtttgcgtattcaggattgccaatcttgttatcttctctatataatgtgcatttacgttttattagataatcaacaaatcgagtaactcatgttattgctagacattctcaatttctcaccggttagcgtatttgagcacaatgtttggactaatttaaaagttattttattcagaatgctaatattataataaaattgttatttcataaaaaaaaaaaggtaccttttctaattaacaactgccaaaatgttatattcaatcagaaaaatcatatcctatcaaaaaaaaatcagaaaaatcataccaaaatataaaaatacttatttcttttcttttactttcgctaaagatttaattatgttactagttgaaaaaaaaaaatatcaatataatttatttatattgttattcattgattttttttattaccaaaataatctttaaattatttttaaacaattaaaattaaattcatgaaaatatttaatcttgtagcaatataat

SEQ ID NO: 33832 - DNA, 1014 bp, Cannabis sativa
agaaagagataggaagctaattgagaaaattccactgcaaccttcagttcatgaagacactttgacttgggcacttgaagcttccggtatatattcagtaaaaagtgcttacaaagtactccaacaagttagtggtagatgggacaacgatgatgatactgcttcccgcttttggactactatgtggcagcttaaaattccacccaaagtaaaaaaacattctgtggcgaccaggaaggaattgtctcccaacactttgtatgctacaaacaaaaagagtcaatgtgcactccctctgcccgatctgtagaatggaagaagaaactgtaatccatgctttggtcacatgctctcatgttaaacaagtatgggatcgtgttggaattggaacaactatccctcatgatcatacctctttcttagaatggtgctttggagttttttctggtgtagatgcaagcaagaaatgcttagtggcaatgctctgttgggcgatctggagcgctaggaatgagtttgtttggcaaaaaaaggtggtgaacactgaaggaattgtggtgttggcaaaatgttatcttgatcaatggacaaatgctcaaaatactcttattaagtcatcatggtctggttttcagacgggtgatggggttgagcaatggtccgctccaagtaaaaatagtatcaagattaatgttgacgctgctcttttcgaagggggaaccaactatggcttaggaatggtagctcatgaccaccaaggcttccttattgagggctgaatggatttctactcgggggctgctacaccagaagtttctgaagcaattggagtccgcgaggctctaagttggattaaaaggaaaaaatggcaacgcgtgactaatgaaacagattgtttaatggttatccaaacaatacaaagctcaacaaaaatgatatctttgtttggacaagtcattgatgaatgtaaacaactctcctttgagttaaaacatgtttctatttattttgtta

SEQ ID NO: 33833 - DNA, 2127 bp, Cannabis sativa
tttgagtcttaatattattggaagtaataaaagaaatgagagctcccaatgatatttatgtcataaatcaagaatttcttatttttcctttacactatggttcagcatataagtctgtaattagatcaacttcaagctattactaaaccccaataaatactaaaaatatgaatttagtcttgtcttttgacatggtaagatattctctctaaaaagtctttttttgtctgtttatgttcgagtaaactcttgagttttttcatggagtctggtaatcagtccgagcctaacattgaggagcagtatgcaaattttcgaatagaagatgaggaagaagatagtctggtttatgttggggaaaacgatgatttgacagagattgacgatagatggtgcttagtgggtcgattcttgactaatagaggagtggattttcaagcaatgcaaaacaagatggcgacgctatggcaaccaggtagaggtatgtatgttaaggaacttgctaataatctatttctatttcaattctaccatgaagtagatattgaacgagtaatcgaagggagcccatggacattcgatcgtgtccccctgatttttgaacgattgagacaaagcgagaatccaagaacagtcacgttgaataggttggatttctgggtgcaaatacataatttgtccactggctttatgttggaacgtgttgtacgcgacttgggcaattttgtggggactttcatcaaagccgatccgaataatttcattggagtgtggcgagattatcttcgagttcgtgtaaagattaatatcgattttccactaaaaccgaagaaaaaggttgagaagcaaggaggagtatattgctatgcgaattttaagtatgagagtctatccactttctgctttatttgtggcatccttgggcattcggagcgtttttgcgaacaactttttcatacgccatttgatcagattcagaagccttacactttggaattgaaagctgttccacgaaggaaaaactatgcaatcggagagaggtggttaaggcccgaagctgtatctaaagtcggtggaatggtattctcggagcaccccacatctggagagggatctacggccattaatgataatcagatcaacaataatcttgggaggcaatcatggcaaaaccgatatcctcctgctaatgtgggatcgtcatcacatcagccaattactgggagggataagagtcctaatttgatggctaatgctttgcctcaaatgatggaaagtgcggctgtagttgaccaagcaataatgagaaatctgaatagtaaagatacggttatagagccaaataatataaataaggaaacaagtattttggtgttggacactaagataagacggactgagcttattgatgctaatgggcctaagccagaaaatactttgaaaaataacacagaggaagaggtccaagagaggatcaatatggagaagtgtgatgaagtcaatactggtaattttgatgatattgggcctgtgcaaactcaaagagaggacatggatactgatattctgaaaataccacaaaaaacttgtttggggcgggttctgtttcacaggcccaccgaggattatgaatgttctgagctggaattgccgtgggcttgggaaccaacgggctattcagttccttaaagagattgtatctcaaaagaatcccaatttcatttttttatgtgaaacaaaatgcaataaaaagaaaatagaaagtatgggccggatgttaaagtttgatggtgcttttggggttgaggcccaagggagttcgggtgggttagctttattttggaaaaaccaagatgatgggcgggtgatgggttattcgaacaatcacatagagttcttggtggagtcgtctgagagaggtgtgtggaggctaaccggtttctatggtgaaccagagagagttaacaggcaccgttcgtggactttacttcgaactttggctactgattcttctcttccttggtgtgtaataggagacttgaacagcattgtgaggcatgaagataaacgggggggaagaccatatccccaaagtctgatcgacgggttccaacaagctttgagtga

SEQ ID NO: 33834 - DNA, 1051 bp, Cannabis sativa
gatgctctaatcgtcgatgttaatggtaaaattctcgatagaaaagccatgggagaagacttgttttgggcaataagaggtggtggtggaggaagctttggaatcattctttggtggaagattaaacttgtttccgtccccgaaaaagttactgtttttcgaatcactaagactttggagcaaggagcgaagaagatcatccaaaagtggcaacaaattgcggataagcttgatgaagatttattccttaaggtcactacgacagtggctaacggtacaaagattggtcaaagaactatagcaactacttatgaagctctgttcctgggaaacactaatggacttttacgaattatggatcatagctttcctgagttgggtttgatcaagaaagattgtgtggaaatgagttggattgagactgcggcgtttcttgaaggaagacagaatggaacaccagtggagtaccttcttcaatcgaaatctatattcaagacctttttcaaagcaaagtctgactttatcaagaaacccataccagatattggtctggaggggctgtgggaaaggttgttggagaaagatattcaagcggccataatatggactccatatggtggaaagatgagcatgattccggaatctgattcccctttccctcataggaaaggaatcattttcatgagtctgtactttaacacttggaatattggagagcaacaccctgaaaaacacattaattggaatagaaagttgtacgagtatatggctccttatgtttccatgtctccacgtgaagcttatgtgaattatagggatcttgatattgggaggaacaagaagatgaacaacactacaagctttaaacaatcaagagtttgggggcaaaagtatttcaaggctaacttcgatagattggtcagtgtgaaaagtgaagttgatccggataacttcttctggcatgaacagagtgttccacctctaaaatgatatacataatacatataaagtcaaataatgtgtgtgtgttgtttctctacaataatattta

SEQ ID NO: 33835 - DNA, 2248 bp, Cannabis sativa
  modified_base (99)..(132): a, c, t, g, unknown or other
  modified_base (394)..(397): a, c, t, g, unknown or other
  modified_base (2198)..(2204): a, c, t, g, unknown or other
aaaaatttaacttatatataatcagataagatttaaaatttaataataatagttgtaatataataataaaaataatagtaacattaataataataatannnnnnnnnnnnnnnnnnnnnnnnnnnnnnnnnnttattattattattttattatttcttagccattaattttttttttaattttagggtatttggttaaccccgagtatcctaaaatactccggtaattttataatcaacttatctcaataatcccatcaatcttactaactaaaattgttgtgatatttttggcctctaatcaagtctccaggattgtcgaatctgaaaatatttttatctcataaatagcttacatgatatccacatattccaaataaatctccgtaattaannnnttacgcttatttatccacttatggaaaatatttataatttatggtgaattaagttagcaagatcataatcatactcattactatctaattaatctcataatatataataaatcctaattatttacaattaggttttcgagatattacaaccatcaccatcccctccttataagaatttcgtcctcaaaatttacctgaacaactcgggatactactcccgcattcacaactctaactctcaagttgcttcttcttcaaccttgatgtttctctacaatactactttaactactagtggaattggcttattccaaagtattttctcttcccagtctaaaacctgctgttcttcacataataaatttgtgtgaagctcaaaattgttacaactcagaatatgagtcagatttgatacatactttctcaacatggagatatgaaacatattatacactccaaacaatgcaggagttaatgctagccgatagaccatctgacctacttactccagtaccaaaagttctaacgagtttcacctgataaattcatttatcccgagaatcctgactgccacccgatctatgtgacaaatctgtcacgttcatcatgagaatcccaactactcaatccatgtggcgaatgcgggttggtcgtcaggtctaatagctggattctatttcacctcatactactgttttccatgggaatattgcttcattttgctggttactttgttcatgattactatatatattttttcaaaaaaaattaataataataaacttcaaagtaataaatgatgcccttaaaaagtttaataaataaaaaataaatgaagttgttgttgataattttaaaagggtttaatgatgtggtttgagtacaatatgacttgtcattatgggagtacgaacactttacctaactttagctgacaacttagacatttacctctattcatgtacaacttttcatcattttggttctctaattttttttaaaataaaaaaactctaattagtaaccgttgattctaactagaaaagctcttcgttacaaaactatataataatcacttattaaatatggtcaaaactgtttcaaaaaatatatatatttatatggtcaaaactttgtgtaactaccaagatgtcctttgattcggtggtggaatattaattatagaaatgataaagtagttttataaatgaaaaatagtatttagcatctttagatatgttctattgcgattaattagcgatgctcttttaaaattatcatattaaattatataagatttgatattttgttgaaccaatagcgatattaacatataaaactatactaaataccactgatattatataacattttgtcaaaaaataatacaatattaaaataagtagtagtgaggaattaaacaataacaaatattttttattattaattaaaattattatttagttaagtctagcagcacggaggaactaaaaaagctgtcgtttgtattaaaataattaataatcttattttacaataaataatatttaagatagcaaaaaaaaaatattagagatacacttaaattatacacctttttttaataagaaaatgatgtagatttaattaaaaatatatataattttaattgtagggtgttcatccaatcaaattcgcactaagtgcggattttattttttggatccaatccaatccgcacaatagctcaaatccaatcctatccaatcgccgcaaaagtgcggattggatcagttattttggattggttactttttaatannnnnnnatttaatatttataaaaaatatttcacataactagtaacaaaat

SEQ ID NO: 33836 - DNA, 2158 bp, Cannabis sativa
atcatagtgagtaagacggtggtaaccaaactcgaaggggagaaagagatccaggcttagatctcatcgatcggaacatggaggtgtatgtggactacatgcttgtcatgtccaaaaaggttgggggcatgtggaggacctagacaagtgcgtcaaaatccttcacagctacagcatgaagctcaaccccctcaaatgctcttttggcgtaggcttgggaaaattccctggcttcatagtcaacataaggggaatagaagcaaatctagactagttccaagcccttttagacatgaagttacccacaactatcaaggaagtacaaagcctaactaaacgcattgctgcactaaataaatttgtgttcaaatctaagacaaatgcgtactcttcttcaatattcttaggggcaacaaaaaattcgagcgggtagaggaatgtgaagatgcattctaggagctgaagaagcaattggcccaaccactggtgttgtctaaacccataaacaatgaagagctagacatgtacctagcatacacagagcacactgtgagtgttgtcctcacaagagaagaaggtggtgtatagcttcccgtatactacatcagcaaatggctagtagacgcagaaagttgatacccactcatggagaagctgacctacaacttgctcttggcttccaaaaagctaaggccctacttccagcacaccccataaaggtgtacaccaatcaaccactgcggcaggttttgcagaaacctgaagcatcaggccgactactcaaatgagccattaaggttggccattttgagatcaaataccaaccaagaacaggcataaaaggtcaagaccttgcagactttgtggctgagtgcaccaactcaactcttgagatccgtcaagactcaggagaacggcaagagccagagaagaagtgagagcaagagcagcaacaaaatcctgaagatctaagatagaaactccatgttgatggaagttgcactaactaattgttcagtgcatgcatttcccttacaacacttaagggcaaaaaatgcatagagcaatcaaattcggcatcaaggcctcaaacagcgagggtaaatacgaagccctaataattggcctcaagttggcgcatgaagtgcgggttgaccacctgggcatattcagcgcttctcaactagttgtgaatcaagttctaggtgaatatatagctcaaggtgataaaatggtggcctacttgagtaaaattaaagattttctaagtcagctcaaaggctacacgatcaagcagatccttagagaacagaatgttatagtagatgcacttgcccgcctagcgagcagtaccttagttgacaaagcaaacccagtgcccatctagttcctagaagaacctagcattgttttcccagaagaggtcaacatgctggatgactcaccaacatggacctattgcaactcacctccaaactgaagccttgctagaagataaaaataaggctagcaaactaagaagaaaagtttctaggtacctaatcctagatgggaaaatttacaaatgaagtttttctatgcctctcctgaggtgcatcaccaaagccaaagctgaatgacttatgatatgaagccttctgcggcaatcataccaaggggcaaagcttgtccaaaaagatattccgacaagggtacttttggccaacaatgatcgaagactcaatggactatgtcaaaaaatgtgacaagtgccaaagatttttgaagataccaagagctccacccaatgagctcacgatgatgtagtctccttggcccagtgtgggggatagacataattggtcaacttctaaagggaaaaggacgggtatagtttgatgttgtcgatgtagactacttcaccaaatggacaaaagctaaactcttggcgacaatcacctctaagaaggtccttacgttcattttcaagaacatcatatgtcggttcaaccttccctaggagattgtgtcaaacaatagcaaatagtttgacagtgacatgttcactgatttttgcaatagacatggcatcatcaaaagcttctctgtcatgggccatcctcaagcaaatgggcaggtagaagttgtcaagaacaccctcaaggacaccctgaagtgc

SEQ ID NO: 33837 - DNA, 1190 bp, Cannabis sativa
ctacttaattaacccataatatataataaatcctaattattcataattaggttttcaggatattacaaccatccccttcttctggaaatttcgttctcgaaatttacctaaacatattcgggatattactcctgtattcacgattctaactttcaaattgtttcttccatcttggtgtttctctacagcattccttaactagtgaaattgtctcattccatattactttcttttttttctagttcttaatgtttaggagttaaaactggttataacttataagtgaaatgtctaaatttctaagtttcacaattatattaatttaaatgaaataatttaaatcttctttttttatttgatttacttttgtaatttaaaataataaaaaaatagtgatatattttataatttaataatataatttaattatttacccatttacggctttatctagtatttttttttagagaattatctattatagtattaaataataatatttataaattataattaatatatattatcctaacatacttatatttattaggtagcgtttggttgagaggaatgaaaatataaaaatggaaatgagaatgagaataaaattaaaatacagaaaaaaaaaattgatgaaaaaattattaattttttttcttatcatatattggaatggtctttccttccatttcaaaatggaattatcattccaccaaaatggtagaaaggtcattccattggaatgacattccaacactttaatatacaaccaaacaaaggaatagaatgaaaattgtttccattcatttcctttccattccatttcattacctctaaccaaatgccagtgtatattattatttacttttgaaattatgaggaattttaatgtatgttttttcttttacttgtattttttttaaaaaaatttatatcataattaaaattaaaaaaataaaaaaatcaaataatattaagcacattaacttatctagtatacacttaaggcagtgtaatgtgacaaaaaataataaattaaatatgagagcaaagtataactataactaaagttgtgtcttgttggcaaaaaataattaagctagactgctatatgttataaattatacaactgattgggatgttctacatagaactacatatatcttacacgcattaatttccaagttcat

SEQ ID NO: 33838 - DNA, 1347 bp, Cannabis sativa
aaaaggacgtaaacaaagggattaggaactggaaaaagaaagagctcacaaaagaaatttttactgttttcgaccaaaacagtttggcgccgtctgtgggaaactttttatttttctcagtaaaaagacctttatgtaagataatcgatcaaaaaacaagagagaaatggcaaatgaacaggaagatctcacccctcaagacaacccagataacatcctcggaacaccaacagacaccggcaacaccggcgaagacatattaaacccaatcccgccatggcgagagatcctcgaaaggctgaaacaacaagaagggagaatggcaactcagggtacagaaatcgcccttcaaaaggaacatattcaaaggcttgagagcgaaaaacggacagatgaaagttgtcctcgaagggtaccaacgacccccgcacacggaagaaaccggtgatcgccaggtggaaggagagaccgagaaagagaaccacgttaacaataacgaccactcaggcaaccatacccgatgcatgcatgaagaaactggagaaaaaggaaactttgcaattcaagaggctccagttcatcatcgagatcaacccataagggctagagacgaggtagaagagataactgaagcggaggtgctctgcacaacacctcgaaagcgaaccatggaaccaacagttgttggaagtccatcgatggcgagtaaagagacaaagaggttacaggaaatgatgtggaacaaattattagcattggaggcaaaaagccagatgggagtacacagcgaatgggctcgaatggagggatcaaccctttcaccctttgggaaccacatcctgcgcgtggaggcccctcagcgttatgtagcccctaagttaccgaagtataacgggacgggagacccctcagaatacgtatgccagtttgagaaaaaatgttaaccgtctcagtcccgctagaggatttggaagcaatcaaatgcaaaaccttcacgcaagggttaaggggacccgctttacgctagttccacaacttaccatccggtacagtgaattcgtattaggatctcatcctaagattccaaacaaactttgtaataagtgtgcggactgctaaagtggatacggagctaatgctaatacaccagcgcctaaacgaacctctggaaaaacttatcaaaacagatatttttagtgagaaggaatatacgtcagtatcccgaaatgcaccgattcggtagcaacgaaagcgttaatgcaaggattgatacatggttcagagttaaagaaggcgataatagtggaacctgtcctctccctcacaagggccctaaccatggcaaga

SEQ ID NO: 33839 - DNA, 1851 bp, Cannabis sativa
ttactttctgcttctgcaatcgctaacagttttatattttcttatatataactgacattttgcaaaaacacggtttttcaatttccttgtcgagctgaggtatattgggtgaaaacccttatgcaggccaataaacaataatttgggcacaattgggtgtgggtccccgcacgaaatggttgcttaatattgtcatgagttttctagaggtgttgtgggcctccaagtagaatgtcttaacttatttggtctttgtgtgtattggtcaaagtcgcaaggttgactttttaactcttcgaaaatcgggtgtaacaaaaataaataaataataatgtttctatattttgaataaaatattaaatgataatcaataataattatatttttttacatctttaaattagagcacaattacaagtaatgggctaacgtaaatttatttttgtgccatacttagcacgaattttgtatcttacattggagatggtctctaataacttttgtaaaatattggtctaaaataatatttagtaaaaagagagtgtgaagtcaaaaagtagttgtgaatagaaaatagtagcacctagtttgtggtagcaaaccatgtatatatatcttataataaatgtggctatctcatcaaaattattagtttaataatttattttctgtaaaatttaatggttaaaactaacacggttaaatcaattaattaattaattttttttgaaaaatgagttttaaatatttgaatctaatttatttattaaaacataacatagataattatttaaaagtatcaacaaaattagatatttttttttcataaatcttaatgtaaatttaaattaggagttggttcaattaattaattatacattataaaggggaatttccaggccaaacctcatcgatgtactgcaaaataacgagtgattcacacacgggctttccattgtgaatcaatacctgaatcttcttgtgaatagggttcatcttcagaagcaggggacttttgtccctcagatcctcgtccctgtacgcgtacttaacatccttttcagtcaaagctattctggctctcatgccgaacatgttgggccagaaatccaacagagtcacctcgtccgccattaccgattttttcacaaacgagtggtgagagagcaaataaatatgaaagaagtgagtgagaggatatacatccatgtatagccttatatagaaaactaatcatatatttgttttacttcctcaattttcaaacgatgagtgttgtcagcattacaaacgtcattgttcttgacaatccttcctcctttttgaaacctttccagttcgagatctcttacgagtgtttgactcctcttaaagacgcttccaattctgactggtgaaatagggatttagggtttgcgaattaattaatttgtctgctctcctaatgtgctctttaagaagaaataaaaaatctacatgtttaataataataatcattttgtcttgtcgttttgacatgtctggtatgtgatttttgctgttgagtggtgtgtgatctttacgagttatgagtttgttgagttggaattgtcgtgggcttggggacccctgggttgttcaattccttaaagaaatagtttttcaaaagacaccctatttaatttttttgtgtgagacaatttgcaagaaagacaaagtcgattgtgttagagctttatttggctatgatgtaagttttgttgttgaggcccgtggacatagtgggggtcatgtaatgttgtgaaaaaattaagatgatggaaaaattcttagctgtagtaataatcacattgatttggagttgaagcttga

SEQ ID NO: 33840 - DNA, 1606 bp, Cannabis sativa
tataatgtatattatatgctaagtgttcttatagccaattcgctcgtcaatacctctttacatacaacgaggcagatgcctcgctatgcgttgtttatgtctcctacgggatttgtccttccgaggcaagatggtttctcgtcaatacagaaatcgacagtttgtacatccttttcccgcttaagaccgtgaagtcagcgaattataaatatactctatttattctatatttaatgagttattccattttgcatttaataatataattactattaaatttgttgattcaaattccacgagaatgacacgtgtcaccttctaaaagtacagctgaatttcgggtataacagtagtaaatctatttcctagtaaaacaatccccaacaggtaatcattaagagaagtctgcatttttgtgttgcgaagcatagttttatactatccaatcttggctcgattaagagatgtgtggcattcacgaaggttgactcagatctgaactggaaagtcagatccaaccatccttgtgagtacttttttcagacattgacgggaggagcaaagatataagaatattatcttgttgttcccagtctttgaactcaggactaactctatttgcagctcgatcctcagttgggagaaactgaggtggagcacgatttggttcaagaaattgttgcagttgactacctttgattgctgccaggacttggtgtttacatggtagatagttgaactcatccagacgaacaaagagagagagtgagacaaagaaacaatattagttttaggtaaattgatttatcgagacaaatctggtggagtcgatgatctacaattgttgacagctgaagaatgctccatagaagaacgatcaatgctctgataccatgttaactctcaaagaaagataaaaatgaagcagagaaagcaagaaagagaaactgttttcattaattgattcaatggaaaagacaacttcttatatacagtacaataagtacacgtgcagaaaataatactaacagaaaattagttacaaccgaaataaccgagctaacagaaaataataaacactcaacgagagctgtagcttaagttgcttgacattaaatatctaaaagcaagacattgaaaaatgtcaaaatatgaggaaagcaatattaattggcttattgtgctgataggtatctataattaattaatttatatatatatatatattaagatataatactgtgaattgtataatcaatcacttaattaataatagctcaatcaagggcatgacccaaaagcacaatggctgatcatgactaggtgtcaggaccaattaaagaattattagcatcacccaaaacaaaaaaaaaaaacaaaacacacacaagtatacgtatataaaagtttgcactactggcaagaaccatatctatatgccatatcacccaaagttttttctttcattaataataataagagtatgaaatgaagagaaaaaaaacaagacaccatgaagatttagagcatgtttggtattgttttctgttttttgttttaaaaaattgtttttagaaatgaggacaaaaaatagtttttgaagttt

SEQ ID NO: 33841 - DNA, 7477 bp, Cannabis sativa
tatttgaaaacaacatgacacaccggtcccccttgcatttctaatttcttcttctttttcagcggctttccaatcgggatcttaacccgaattctcaagtaatccctccaaactcccaaaaagttgtttgggtccgatttgacgaacgtaccaatgtagttgcctacacccctaatcaccttctccgacataaatccaatagtcagattatgtagttgaacccaaagttccaagtgcgttagcggtattgatcgcggattaataccatgagagaccctttccattatcaatggtgcacgatcgaatgtccaagggctaccttcaatcacccgctcaatatccacttcatggtaaaattggaagagaaagaggttcggatcaagctctttcacatataagcctcttcccggttgccatagagtggctattttattttgcatcgcctggaagtcaattgagcggttcgttaagaaacgccccaccaacagccaccgatcatcaatttcagccagaccatcttctcccgcctcaaacactaagccctcctcatcgtcgtcctccactgtaaatctcgaatagttctctgttaagtcatgaatttggggctgtctaccacccatcgtcagcccagtcgaaataacacagacgaataaaaacaaacaaaaactttttgtatcaactcacaaccatgtcaaatatagaaagtttagaaagactaaaaacacgaaatttatttgtagtgtattaaattttttttgaattttttgaaatttacaataaattttaaataactttataattttatatatttttttaaactactatataattatattttacactctcataaatctataacctatataaaagtgagaatggctttttgaactttaattacacaattagccttcactatatattcaattataaaaaatttaaactaggcaattgaaacatgtatactactaacttcttttcttctaaactaagcttcccctaattaacattgtatcttttggaatatttgtgaaaatgatcattttgtctaataatttttttttttgattgctatcaataagtatattttcaaataaataatacttccttatttttttaagctaattttgctaataattattatttttatataaccatgcctatatattaataagtatacaatataataataaagaattatgagtatatataattaaattgtgatagcacataatatattaaatgagtattcttttttttttttttaaaaaaaaccctatattccctgttagtattagaaataacataaaatttaaaaaataatactattatatcattaattaaaaagtaagactaaaactaattttttaatatcaataactaataattattatttttgtaatatatcctttggaaaataaaaaattattttgtaatcttttatttaacattacattcaattaataattaataattcttttttctacaaagtaacttaaattgtgtaattttaaataattacttttaaaaaaaaattaaatttttttctagcagcaaataatcaaataatattttaatccctaaaaataatttatctataatttttttaaataacaaataaataaagaaaacttatttttaaaaaatatcgacttagaatagtcacaataaaaaaaaattctcatgtattgaggttgcaacttaagaaagtcacagtgcgatcttctatattttgtgataaaataagttgtaagttgtgacaacattctcagtatgattttcaaattttaaatataattataaagggaaattttaaaaaagatttagtgttattatttctaaaacaacttataatatattttctggagataaaagagttcataaaattttgtcaccatgatgtatattttagaggatacaatttgatagtattataaattttgtagataaaatattaattatttttttcaaatagttatgcttaaatatttttacgagccacacgtgctactagtatatataaaaagttaagattataaagtacattgatgcatcaatttagaatttttttcattttatagtttacttcaagtgtttttaaaagtaattttataattattaggttaataatttttttttcttaactaaaaaggaatcatgtggtgtaaattttttttagtcggagaccactgttagttttaagggttttatatttcattattctcccttaattagattattagtaatgaccacaaaagtttctatgaaacagataacactacttacaataaactagctttcacaagatcacactaggccagtaattatttatataagatgtggtaattagaattctcaatatttttaattggcaaaataattagtattttacaaaaaaaaaaaaaatatatatatatatttttagcagtaaatatttaaaatataatttttttaataattacatatctaattacatcattacctttccgaacgcacttaaatctttttttttataatacctggcaaataattatctaaattacccaaataataaaaaaaagttttttctaaatattttaagagtattatgttcaaaataaataaataaataaataatttaagagtaattaatggttgtgatgcaaggcccaacttgggatgagttgggccgttgcctaaagcccggtactagtctaaaaatttcttaatagtaatacaaaatttaatttattgtttttaataataccatatttcaaatattttacatggagaaataggtcagaattccatcactgaattaggattaatccttttccaaactaagaaaaaaattaattttattgacaataggttcaaaaattaatgaagaaacaatgaaccttggcaaggatttagccttaattatattatataattttagcaattgaataaatactatgtttgatataaggtcttttgaaggaaaaagattacttatttcatcaataacaatgcttatctttatataatttagggtgagattaaaataagttaattaaatagaaaaccaaggcaaataatataattatttagaaatttatagctgtgcttacttgtgcataaagtatttagttagaaaattattagttaaattatattatttagttgaatacaagaaagaattgataaattattttgaaaataataatttaaaattattaatatgttacagcactatgattggagataatattcggatactacattttttttaaaaggataaaagattacccttctatagagtaatcttttttttctactataatgggatttggaactttgttatgccacctaagttaaggtctttttgtagcgaatgttttattcagtcttaccagtagcaacgcgactgatctcctaaaaggtttaagtttcaactttgtgctcgagatgcgaagaagctggtgaaactctggaacatgcaattctattttgctctattctgcatcctatgtgggttcgcctggggtttgcctttactatgttgatgtggccagggttttttagaggatgttttgattttcatttttgaagagtaatccctggaatgctttgaattggtaatgatggtgatgtggtggtcgtcgtatgacagaaatttaccgttgtttggtggtgctcaatcaagaattgatgttgtgtcggagcttgccgaaaacctttatggaatttcatgaacacccacgctacagtctcttgatggattgttcctcttcaacaccaacggtctgtcgaactgtgcagtagtcaccgcggcctgttggatgtttctcgttgtccacggatgcatcggtaattcctagcaaggggtttgttgggctggggttgatccggggtgatgatggtgttgtttggttggcttgttttgaatttcgctgttgttggtggtggtttttataatatcattttgcaatctgcgaatgatgttgcccatatacctgctacttctgttactagtgtaagagaatgtatttagacagatgcttagtcaaaatttataagttttcctgtaacaattgatttattattatttttttaaagagcattcattactaaaataaaaaattagatctcatggtcattataaataatatttgctgggatatttggcacaacaattatatcagttaagttttgggtaaaaacttactaagctacattgtgagtcgcaaagttatcaagtttaaagataaatgcaaaattacaactcaacacctatttagagagtctgttacaattcaaaacataattatcaatgctccaaacgaaaactttcctttataaagccatcataactatctcgaagtcgctctctataatcacaaaattatacttccactttaagcgctagatggcaaggtgccgctttaccaataagggcttaggatcacttgggaactgtattgatttatgatctcacttctctctaaaaaaaaacataacaagatgaaagattacatatctcataaacatattattataagggaaatgctaaaagatatcagtggtgcttagtattctcttacatatcaatattactattggtacaattaagtattatgtcctatataatttaatataaaaactttaagaaaatatcgctaactaattacaaagtgacatgtctagaaggtgctaataacaattacacaataccaaacaatctcttacaataatgaaaactcaaaatacctactctagcctcccataaaaaaacaaaaaattatttcttggttggtgagatttcaattattcaagttacccaatctcaccatatggaatatcatgattcgatatgggaagatcaaacacaataatgaaatagaataattgtcatatcaatttttcttttttttttcttttggactattggtgcccaccacgtatctctctttataataattataatattttcaaaaaaatcctatctccttttcttatttcgagtgcacatttctaaattatatattcattttttattcctaaacaaaaattagtcttaactaccataccagtttactaacaaatatttgccacttacacaattttaaggtgttcaatattacaatgtcatcttatattttctcaattattaataattttgttatatttatttaattaaaaaaatataaatttcactattaaattaaattatattaacaatattatatattgtcggtgttggacaatctaaaattttgtcatactatccacatgttccaatagtattgaatctaaaatattttcatgtcaaaagaatttattaaaagcattaaataattatacaaggccaaatcaattgaagccaactaattcttaagcactacatgatctttgaggcaatctcctataattagttagtaactttttacaatacttattaatttaaatcaaaatatataaaatgtttgttaaaaaatatgatattaaattgtatcgataacattgtataactcataataatattagtactaagcattataaattgagagtggcaaaatagatcagatacgataataagacttggatccatacgaaataaataagtttgaattttctttaaacgagtttggatcatttccaaattaagcatgataataaccaatttaaatgtatacattattataaataaatgaatatattcattctaacaacaatttatatgtttatatataatatttttgtctatgaactttttacattattaagtggtgctcttataatacacgactcgttaataatacccctcgaaatataaatttatagtaatctttccatcatattctattcaattttatcataaaaataatgaataaatagcaattttaccttctgaactttcaacaataccaattttgcctctaagttatacggttttttaaaaattctccttgaacttttacatttatagaaatttagtcattctattaagtttcgtccaattattatgtttaaatgttgacgcgtgtttgtaagttagcaacttttccttctaaactttgataactatcaaatcatatcccgtcaaaataaaaatgaaaaaaattcaacatttttttagtaaatcttaaaaaattaatttagatcttaaaaaaatcattttcaataaagaaaattaaaattttaaaactaatgaaaagatttaaaaattatttatttttttattagatataaaatacatgataaaaatttaatttttgtaaaaataaaattttataggaacacatgtttgattatgttttttttttttttcaaatatctagatttgttaaaaaaaaattaatagaagaggataaaattttgtattggttaaagtttaagagtaaaaatgctaattttttacattacaagaaataaaatctaacagaaggggtaaagatggaaattgtgaggttaatgtatggggaacgcaattcccgcgcccatccctgctacctatttatgccccccatccccgccccatccccgtctaataactagcgaacttggggtaggaaaataattatcaattatggagaacctagtgagtatccattaaggtaaaatagaaaaaaaaaatacaataatttaaaataattaaacaaacttttaaatttaaatcaaaccaatattctcacaaatatttattatactatatatatacattaaaaataaaataaaactatatatattggggtcagatatagtgcggatagtattatctccgcccttgccccgtctctacttcgggtattgaaattatcccccactactgtcccattaacggcgaagttggggatggtgcggtccgcgattatccattctcacggtataaatttctatttcaaagaaggggcataattatgtaactattatattttagggaaaattttaacaagacatatattttaagagggaagttcaagtagtgcccaaagttgagaggataaaaatactaattattctatataaaaagaataattattatttttaccttctaaactttttacactattaaattgtatactattatagtataaactctctcataatacccaatccaaatataatttttacagtaacataatttttttatcatattctatttaattttatcataaaacgagtaatgaaataacttgtacgtaggtgatacatttcacatttttctacttcaataattaaaaaattaagaacaaactttcaattgcatataataatatctaagttatatttttataatttctgtaactacaagactattaagtatcaaattaatgataagtgtccctaattagtttacagcgataatgacttaaatatttatgccgaaaattattttaaaaatataaaattaaaagtataaattattataaagaaaaagttttaggaaaattctacaatgcacactcttaaaatggatatattgatgcacccctatttgttttagcatccgaaataa

SEQ ID NO: 33842 - DNA, 2780 bp, Cannabis sativa
  modified_base (943)..(944): a, c, t, g, unknown or other
ttgggaggttccctacttagtaatattttatcccttgtccgaactctggctagaggatacttccgttttagccttggttatggcaaggttataacattcccgagcagcctgctggtttcctcttagacacccaaccccattctttgttgggaacttaaggcatgaatggaatattggcgtaacagcctttcagtcatattaagctagtcggcctaacatgacattaaatgttgatggaacatccaataccaaaaattgtgccattatagttatgctcttcagagcttgcccaacattgaggggtaggtgaattttccctagaggtgtgacaccttggccagagaagccatacacaggctggagacaaggagtttaatctttgagctggagccccatcttttcatatgttgtcttgaataagatgttggaagaggctccatttctattatggttcaggccaccatcttgttggctatctggacttccacgaccaacaagtcgttgtgcgggaaattgatattgatagcatcttcatcactaaatgttatggtaggctcccttgcccgtggtattttcggtttcctttcttcgacggccagaactacttcttttggctcatgctgtacagttcaggcatacctttcccgggctttgcttgaatctccagctatgtgcggacctccaataatgacttgcaggtgtccatctattggtggtggtagtaaatcttggttattatcgcccctctaattttgatcggccttgacatacttctgtacatgtggattattttttgttatcagaaattcaatttcccacttcagattgttgcattcattggtttcatggtcgtaatccccatgaaaacggcaaaacttggtcatgtctctcttacttacatcttttttcatgggtgcaggcttcttgtacggggctaacgacnnagtagccatgtacacactttctatatcttctatcaggaaagaaaatgcagtaaacttggtaggattttccttgggagtttattcgtttttaccagcgaactttccctttttcccattttccttcctactgttatggtaggactgtttaccacccgagctcgaatttcttgggtattgggggagctgggcggatatccgagcagagggaacttttggctggctaggtttttgctccacctctgcccgctgaatggcttcttcaagcttaataaatccttctacgcaatcaaggaagtcactcatagaatatactggtctgttcttcctgatgtccttccaaagttcaccaagaaccacaatgcccccaatattgcagacaacttgctgtcttcggttacccgtgcaaccttagttgcctccgtcatgaatctgctgatgtaggctcgaagagattctcttggtctttgcttcactttgaccagatctcctaagtgaaacggaagttggcgagaagaggagaattgtgcatgttattctgaggagaaagccttccatgagttgaactttccagtcgccaacttgaaataccattgctgagcggcctctgagagggtggcaggaaaaactctgcaacatacatctcctcgtgctccttgcaggtccatttgcatttcaaaatacttgaggtgggataagggatcttccttcccagtgtacatcttccacgttggcatcttaaacttgtgaggcaatgctaagacattaatctctggggagaaaggggatccacgtgctcgatccaactcgaggtcattgtttctctgaccgatcaggccttggaacatattttttagttcatccaactgtgccggcacggctggactaacttgttcggcttcttggccgactagaattgcgttagcatctctttgagtaggattttgagcgcgagctccaagctgaacgactggtgcatcatgctggtcgtccactcctctccttctgttcagatgatctcggagatcatgaattgttcccaatcgattaaatatggaaacacctggctgtctctgtgacttgttggcttggccaatcggctggccgacaccattaacctgagtggaagaattatgtataacctctcctaatgaattgcaaggcaaggtctacccgcttaccgcttggcccacatgtgggacctgtgaccaggtattggacggctgaccatttatagtttgagaggtgttcattgatagatcttcgtctgtctcgcctagggggatgatggttgcaggctgttgtccggcagcctgataggctttttgtatcagcacggtggcctgccaagttcggtcatcaatggctgcttgctatgcccttaatgtttccatatctttgtccctccattcagcgaacatgcgcctctgctcttcaaatggaagatttaccacgatgaaaagttcctcctgatcatgatgcaaggtgttggtatgaccttgcatgactccaagaggagcacagacattttggatttcggtgtcatctccaatggttgtttgaacattggttacgggcagaatgacagttttgggaatgccttgattagctgctaaactgttattcccagtctcttgcacaccaagcgcgattccactcatacgagtcgtcacaccgtgacctacaatcgagggttgtttaagatttgtggttggtggaacccttgtgctccgtaggttctgcaaggtaggatccaccgcctgtggattttctggatcaaccacgcctctacgagtttgtactaccattgtatttgtgattagatttgagaacgatctt

SEQ ID NO: 33843 - DNA, 7989 bp, Cannabis sativa
  modified_base (600)..(611): a, c, t, g, unknown or other
  modified_base (777)..(784): a, c, t, g, unknown or other
ttttaacaataaataatagttaaaataattagtaattttgaccttaaattttaaaccatattaattttactctttaaaatatacagcttgttaaaaattttttctaaaattttatatttatagaaatttaatcattaggtttcatctcattattccgtttaaatgcttacgtgttttcttttaaattagtaattttgtccttgaaactttaacaattatcaaattataccccctcaaaataaaaataagaaagatttaatgtctttttagtaaatcttaaaaaattaatttagattttaagaaaaatcattttaaatgattaagaaaattaaacaacaaattaaaattttaaaattaattaagtgatttgataaattatatatcttttattaaaaaattcatttagatattaaaaaaatatattttaaaacttaatttttgtaaaaactaatttttacgggaataaacttgagtagtttttttttcttaaaaaatttagatttgtttaagtaaacataacattttttttaatttaattaataactttttttcaaaataattttatattttattgagtttttaattattttttttttattnnnnnnnnnnnnagtttataaatataaataagtttattttttaaaaaaaaaaaaatcttagtttatttaaattatttactagattctctataatttcggtttgattttctattttcaaaataattttatattttattgagtttttaattatttttctttatttgttaagatatgagtnnnnnnnnataaataagtttgatttttttcaaaaaaaaaatcttagtttatttaaattatttactagattctctataattttggtttgattttttatgatacgtgtttataaataaaataaagtttgaaaatatttttttggaataattttaatatttttattatattttttttttaataatttttattattttttcagaatttatagaatattatagatgcttaaaataggaatattataatttttaaaattaacttttataataaaattgggcaaattttgtattggtcaaagttcagggggtaaaaatactaatttttaacggtaaaagaaacaaaacctaagagagcataattatgtaactgttatattttaaaaaaaaagttttaacaaaccgtatactttaggggacgaaaccaaatagtaccgaaagttaaaaaatgctaattattctaatagttatagtagataatatactaattttacaaaattctaatgtccaaacataaaagtatatggatataattattatattatattaatgttacgtctaagagacgcatacttaatttaatattaggttatatatatatttttttaaaatattataataaataatgttatatataatttaattaaataaataattttttaataaagagagatgtttgacataaaagcctataaaatattaaaaagaaatataataataatttgagaaaaaaaataatttaattttacaaaaaataaaattaaatataatttgaaaaaaaatatatacattatttgaattaattaaaattaaataatgaatttattaaagagtaagataagaactccaaactatatctatttagttatgtataatgaaatcgaattaaaatattgattttatataattcatatacgtaaaaacaaattgaaaaaaacttaaataaaataatattgatatttatatatttataaaataaacagtactaataatatacgttaaatttaacaaaatatttttttttttatatttaaagtatattctattaaaccaataaaaatatttaaatagctattatataaagatatattcatggataagcaggtcatccacttttttttttacataaattatcaaaacatttattcttattattaataagaaagtattttgtccttttatttttattttttaataagttatttttttaaattgtcatataaaaaaagtattgtcacgaggtattaatattgctacactctaaaaatagttaatcatattttataaaaattattatattcaatcatgtgggacctcatatataattgtattaatagcgatataatatatatgtatttaaaaattttaggtttcatttattaagttagtactgtattgtataatatcatactaaactgatatataatatattgtattttcatatagtgaaaaaattacaatttcatagtcaaaatttaacaaaaaaaaatttatataaaaatatgatatatgatagaatttaataaaataatatacaataaaatataatttaatatagtatattaaataaaacacttaaaaattatataataaattattattattattattataaaaccacaatacaatttacaggtgcaaagcatgtgatttaactagtatatataaatatatttttaatatagtataaaaaaaaaaaaaagagagacttttttaattaagtagtaaaattaaacacaaaaagtctaatttttcttcattatcatttattaatattttaaataattatttagggtttataacagtaagaattaggtaaaatgtttatcaataatgataataatttatagcatttgatttaatctaatgactcaaattaattcttaaaaactatactataattaatatattcatttatttataattaattttgaatattattaattataaattcaacaaataaaactctaaacctaactctaaatttatatttttttttacttttttattttattttatgtttatttaaaatttaattttaattatttatatatttttaattttgaatttacatagaaaaatagttaaattaaatttatttttaaaataataattatacttatagaaaattacaacatattcaacttataataattttataataatcaatataagtactcttaaattaattaaaatgccatgagttcaattttttaaaagcaatatttttttctttatttatatttaatttaatattttaattaatttaataattttaaaaattatcatattatattaatttatttatttttcaagattatcatgttcaatatatttacaattttagatataaaattaattatttactttaattatattatttatataatcctggatgaactagtaagtaatacgcattcataatatgcttatttttcaacttaattcaaagtaaatatttaatatatttaaaagttttagatatcgaattaattatttattttaattacactatctatataaatcatgcacgaaagtacacatgtatagttgaaaagagtaaatgtacattattacattgtaaaacacatatgtctatatttatatttcacacacaacaaaatataaatcaataagaatcaatttacacaacaaagttattctagcatatttggtaagttatcctatctcttgttaaatgacatgagttcaatccttaacaccttcttttgataattttgtacaatttattttttgtttttattattttatttcattttttgaagaattattcctctttatcattctcaataggggtgtttatacaattaattttgcactattttgctcatagtgcatttgattcgtactaagtacgaatttcatactttagatccaatccaatctgaataataactccaatctaatcaaatctgcaaaagtgcggattggattggttagtttttaatattaaattacctaatattttttttcacatagctaataaaaaaacaaacaaattatcattattttatgtcgccatgacacaagagaagaaaacaaattgtatgtataaagaaacgtttagttttattttactataagcacttgcatagcaaacaaattgtcaatgtgtgcacttacatatcaaataaattttgctgcaataaattattatatttggatgatattgatgccttatcgcacctcttataattatttaaagttttcatagatttattaacatgattgggcccaggaataggcttgctttggctgctattgggctttagaaatgcacacgttatcaatctagagatgcgaataataattaaaaaatacatttgtatatatttatctttcacacacaataaaatataaatatatattcatttaatacagaaaaattattgtaacacatttgttaagtttctcttatctcttgcaaagtgacatgagttcaatccttgataccttcatttgacttcataccatttatttttttgccttttaataattttttatgagattacagtatatgttttattttatttggttatattttgtattatagaaatttaaaattatttaattagtcaaaatataaaattaagtataaatagaaaaagaaaaataattgcaccacacactaattagaatattttaccaactagcattattaaaagcaactatcttatttctccaagaacttagccaaaattacaaaaaagtatatgcaaaatatcttatttttacaaaacactcagaaccacttcaatgcctaaatcttgttcatcaacatcttaaggaaagtatgcaaaaattaaaaaataatgccaaatccaaaaagtaacaagattccagaaaggtaacaaaaggggaaacatacttgacgaagaactgggtgaatatgaagagcttgaagaaagctgaggatttggtttaggacaatcgcaaggaaactcatgtcaaagaaatctaatcaagacatcaaatcatggatcgaagaagacgagtttttctgatgagctcttcaaactccacttgaatattctgtgttcttgatggcgttgaagaatcgacagtaaaaatcgggggtggtactcttggattctctcgttcacaaatttgaagaaggagatgaatacaatacgatgtaatactctagggttctctcattcgtcatcgtctttcactctaaaaatttgaattctatttgaaatttggacaaaagtggtaaatgggcgactttcaccttatttatacacaaaggaggcaatatgcatgatcccagatcaatggctaagatcatgtccaagaaaacacaacacaaatctaacggtctggaaaaactctcaaatatgcatttaatgcgatgcttagaaataagatattcaaatgataatattttccttgagactcatgctaacgtaatcaattttcgtttcacaaaagccttgttcaacgcgccacattaatgaaagtaatcttcacaaaccaaagatataacaacacatgtctcttcatttaaaaaaaaaaataagaatctgccaaccacaaataattttggtttataattcaaaaaagtttcacctttagcatccacctatcctcgcttcatctgataggaagggtgcaagcttccataacccctagagtttcggaagcttgagggtaaatgttatttgtatttttagatgaggacacgtgtaattttcaaagccagttacagctcaatcacttcaggcctaatagcagacctaaccaagataatgggttatatccattagcgaagtcaactcttctggatggcagacaaataactcgtccaagtgaagtagtcctttagcatagtttgtatccagaagaatttagctaaagtgtcgtagaagtagtcaaatgacatccgaacatctagctccatgtcatactcattaattatcagatcccacgatatcaggatttagctcctaagatctcgtctgcaaatcgtatcttctaaatgtagaaaaatagtaattaagtatcaagcagttaatatatctttattagctatgattgtaggacacaaattggacaattattaacatgatatggcatccacatcagtttacaattagcgcctcattggctaggctccaccatatgggctcaaagttaatatatacttgtatttatctcattagtgggtaatatttaatgaagaagaatcctaaaacactatgataagaacacgaacccatgtagagagttgaaatctcattctttaattgctcaagcaaaatccaaggtttgaacatttatgtaaattctaaggcttttcaagtctcatcgtaataatattagttcgtgggctaaggttagttaacactccaaccgcataaaatttttgttgttatttctttatcttctaataatttctttagtttacatatatatttcattggttttcaaaaatctcagcaaataattattattgaagtgttattttattgttcactattataatttatataattaaatcgtcaatatatattaacaaagaaaaattgaagacgtcccaccataataattacaaactttaaattattatagtataagaattgttccacattaattaaaaacatatattaaagaaatttaaattatttgttagaacaaaaaaaatattaaattaatttaaaagtttaaattaaaattttaaaaaaaaaaaaatatatgtctttacaaagggttgaattcatgacattatagttgatgtaagagaactttaccacttacatcatgattatattattgattgtattgattattttaggattaaataacttaagtatttgtctataatttttgttgagtaaaaaataaaattaatatataaatttaaaattaaaaaatcaattaattgaaattataaaaatgttataagataaataagtaagaaaatttttaagtttggagttagctttggaaaattgttagctggatttaattattaatatttaaaattaattataaataaaaaattattaattgtattataattttctagagttaaaattaagttatttgtttaaatcaatacctataaatcattatatctattaatataaaaaatacaatatttattgtattaactccctaattatttaataaatatcattatctaaatcgaaaatattaagaatgcaccatttaaaattcttatgttattgaccaccagtattcagtactttctacatataggtgacactacacgattagttagtgatattttttaaaaattattttcttaaatgatatgagatccaatacttaattacatcaataacaatatgacatagaaaaaaaaaatactaagtatcactagtatcttttagcaattctttaattttgctatatgtatgtattaagtttgtgaatttgtgaatgtatagctatttccacacgtcatctcattcaaacctgcatatatggtttcgtttgaagccaataaaacaagtgaccaagctggcatgcccatgcatggatggaccagtttgatattggcaaattattagcaagttgatcgatctataccattttgtgacaatatttatcatgccttttgactttcaataatacaaaattgtcgttagttgagttcttattcctcgatgcaatcaatatatgtttatgatttcaacaatgttttctcacttttctacgccagaagactcagatttttcggattgaatcattgtataatacgtgatgattctttgattgtatataaatatatgttttgaccaaaaattcttaatccttgatcgttttacttttacaaatccagaatttaataatcttttgctttagaaaaaaaaaaaaaacatttttttaaggattatctcttttctttgttgataatgggctctttctttttctttctatttttgtcaattcgctttacctaatactacacaaaattttatatttaatcacagtaaaacttattattaaaagtaataaaattataactaatgataaaataatatttcaatgttgtcactaaaaaattcgtgactaaaaatattagtcacaaaaatcaaaattcgttgtggctaaattatttttaatcacaatacatattgtgactaaaatttaattagtgacaacttgtatctaaatattatgtttaatcacaagtaactttttattatgactaattttttttttttttt

SEQ ID NO: 33844 - DNA, 3331 bp, Cannabis sativa
  modified_base (2302)..(2308): a, c, t, g, unknown or other
ttttaatttccaaataagcggcaattagtaagttttacttgatcacaatctgaccagactagctcttggttacacaggttgttctaaatagtattgacgccaggcgaaacactaggagccagggtaattcggttggatccagtggtcgtcagggagttcagatcccctttaatatttgtggtcgaggtagaggtcctaggggcagggcacgtggctagggtgatgctaactcgccagaggatgcccaagctacccaagctgcccaagattgggaaaacaagtttgcagaaatgcaagcctggattaatgaacacgatgaagagatctaacatttgagacagcggggtactcctgcaatccctgctccagaaataccaatagctcctgcccctactgtgcaagcatgatctgtagctccagtgaaccgaatggaacccctatatgaaaggttccgcaagcaaacacctcagttttcctgggaggtcccaatgttatgaaagccgagcagtggctaacagtgattaccagaattctaaactttatgggtgtcaccgacaatgatagagtggcctgtgccacattccaattccaagaagacgctcttgtatggcgggacatggtgtccctaactcatgatgttactacaatgacctgggaaaagttccaagaactattcaatgcaaagtattacaacaaggcagtcagaaggtgaaaaacgaaaagaattcactctgaaggaaaatatgagtgttactgaatacacgactcaatttgatcgtttggcaagattagcctcgagaattgtgccaaccgattttagcaagaaagagaaatacctggacgggttgaatgcgaagataagacacgacttaatgatcactactgatgacaataccaccacctcacctatcctatgttgtgatatgatggtgggataaggcactacgagctgagggcgcagtggagtgcaccttagagtctcaagggactttggttgttggtggggcttctactcctcctacatcaggctttactaggggaggtagtggctcgaccactgatcagaaaagaaaggttagcagggggagtagtggttcaagtcagaacaagaggttccaaggaagccagggtcgtggcaatcgtcagggtagctccgaaaccagatacacttacccagaatgccccagttgtaagaagcatcacctatgagagtgtagagggcaagggtggttttagtgtggtatgtcagggcattataaaagggattttccctaactcaagactaaagcacagaagactacagcgaaatccgttccagcaagggtgttcgcgataacttaggctgatgcagaagccagcccttcagtgataacatgtcagctctcggtcaacaactcttacttctctgtgttatttgactctggggccactcactcttatgtggcaggtaaaatttttagtaaattgggtagaccgcatgatatttataaatcggggtttggaaccctactgcctggtgaagaattagtcatctccaaaaagtggattaggtctatgccaatcagagttgaggataggcagttgagtgttgacttaatagaaatggatttaatggattttgatattatactgggaatggatttcttgttcaaggactcaaccaatattgattgcaagaggaggatgataatcttccaaccagaaggcgaagaactgttttttttttttgggtcagttcagggatcgcggatcccaataatttcagtacgaacagccagggaattgttatgagagggatgtctagggtttctggccgtggtattggataccactcagactgagtctatttggccagaagacatcaaggtggttcgggaatttctagatgtttttcctgatgaacttctgggtttaccaccgcaaagggaaattaatattgttattgatttggcacttggagtggaaccgattttccttacagaatggctccagcagaaattaaagaactggaaattcaactccaggggttgcttgacatagggatttcacggcctagtgtgtcaccctggggagctccaataatgtttgttaagaagaaagataggtccttgcgaatgtgcataaactgacaatcaagaataagtatcctttacctaggatcgacgatctttttgatcaacttcaggggttctcaaagattgatctctgatcatgctatcatcaattgagaatctgagaggaggacattccaaagacgacctttggtactaggtatgggcattatgaatttctggttatgtcnnnnnnnctaaccaatgctcccgcagcttttatggacctgatgaatagggtattcaaggactttctcaaaatctgtgttattgtgtttatcgacaacatccttatgtactctcaatcagaagaggagaaggagcaacatctccggatggttctacaacgacttcgagaacataagttgtaagccaaattcaagaagtgcaaatttttgatatctcaagtgtccttccttgggcacattgttagcaaagacaagatcaaggtggattcgggaaagatagaatcagtcagggattggcccagaccaaaaatagttacagaagttagaagtttcttgggtctggctggttattatcgttggttcgtagaagggttctctaaaattttaacacccttaaccgagcttactaaaaagaatcagcgtcttgtgtggacggataagtgtgaatcaagtttctaggagttgaaacagagattaatcacagctccaatgttagtcgtaccttttgataaagagaagtttgtggtttattgtgatgcatccagacaaggtttggggtgtgtactaatgcaggtcgatcaggttattgcctatgcctctcgtcagttgaaagaatatgagcagcggtacccaactcatgatttagaacttaccgcagtagtatttgctctgaagatttggcggcattatctctacggagagagatgtgaaatttatactgaccataagagcctcaaaaatttctttactcagaaagacttgaacatgagacagagacgttggttagagttggtcaaggattacgattgtgagatcttttaccaccctgggaaggccaatgtagtggctgattccctgagcaggaagggtctcgagcaggtaactagtatgattcaaatttcacctcagttagttgaggacatggtcagatcaaacattgagtttgtgtcatgcaaacttcataacttgacgctacaatctgatttgttagatcgaattaaagctgcccagttaattgatccagagttagtg

SEQ ID NO: 33845 - DNA, 3143 bp, Cannabis sativa
  modified_base (1558)..(1563): a, c, t, g, unknown or other
ctaaacacaattacacaattatagacactaattactccacaatttagcttaaaattcaagcttaaagatatcaaaataactctaaatcctagagttatcagttatacaccacttaactacatggtaccaagtcagcgagctggagcctcatctttttatatattgatttgaaaagaatattgaaggaggctccattgtgcacaatgtatctttccatagtcaaattcccgatatgtgcaaaaacgaccagggagtcgttgcatgggaattgacttggggaatatctccttttgagaaagagatcgtgggccctccaagctttggttgcttagagtcttgttcattgtctgccatgaagtcacttttaggctcgtgacggagtgtctgagcatagtgctctgtagctttgctggtgtcgccttctatatggggtctgccaatgacgacccctatgtgtcctgccactggaggtttgggcagagttgttgacacctgcctgtgcccctgacaaaagatggaggccagccttgaattattgacttgccctactgggatgtcagggcatgatatgctttgggagtttggtaggagagagaagcatgcacccttcccctccgtctcccttaggcttcatggcattagggaatcattgaatttccctcttttgccattatgttggttagaaccgtcaatgttgtgctttcctccactattctcattgtttgagaatcgacagagattgtctgcactggtcggcatgttggaaagtgcttggggcactataaggctctacgtttgttcgttattgtgctgccctctcgtgtgggcttgctggatatcttcttctaactctatgaagccaccagctcgctcaaggaactcctccatattgtttgttgagatcctcctaatatctttccagaagtatagccgtgtatcagcctttttctgtcaggcctttgaccttggtgacctcagtcatgaaccgttgaatgtagtccttcaaaggttcatcttgtgtttgcattattctgacaagatcctccagttgggcaggtatttatcttgaagtagagaattgaatgcagaattcccaagagaattcttcccaatagttaagtcatcctggggccagcttaaaataccattgttgggctatttcagctagagttgttgggaagattcaacatcacacatctctggatatttgttggagatctatttggatctcaaagtattttaggtgtactaggggaccttctttccccgagtacatcttccaagtcggcatcttgaatttgggcaggtatttatcttgaagtagagaattgaatgcagaattcccaagagaattcttcccaatagttaagtcatcctggggccggcttaaaataccattgttgggctatttcagctagagttgttgggaagattcaacatcgcacatctctggatatttgttggagatctatttggatctcaaagtattttaggtgtactaagggaccttctttccccgagtacatcttccaagtcggcatcttgaatttgggcaagnnnnnngcattgatgtatgccgagaatggtgatccccttgacttgtctagctcaagttctgaaggttttggaccagtgaggcccttgatcatgtctcgtatttgatctaactgtgcttgcacagaaggatctgttgttgtaggagcctggttgattaaccttctttgattgagttgcagcctcacattggcaagagcctggctggcaataccatgggaaagggtgcactcaaggtcggccacaacctgagtctggtacttgtacatggccggccaaccctaagtttggcagggcctggccgcccacacttttttgcctggatggtggagtttgtgcgttgacatggggtagatcacaccaattcctgaagtttagtggatccaattgtttgaagtgattaatttcacttctcaaattgttgttttgggtgtttccacccgctcccctcagggagggagtgctcttctctggtcagccatgaggacttctaaagatatttggccagccaaggtgacttctctagggggctagtcggccacagggactcctactggtggttggtcggtcataggaaagatagcgggggctactgttgagcatgagatccctggcctacccctcatgccgttggttgtcgggatctggctattctcaccgttagacctttgaggtaaggtatgtcctccctcttgtaagggaagatctgtcctagtccttggtgggccagattggttagcttgttgatataccctctttgatctatcaactagtcttccttgaagtggatctctgatgagatcctggcctcttataccagttctctggttgaaccgcctatctgccttctctgttgcggtgatctaactttgcctggtgagatcaaaaaatatactcttggtcatccatccatctcaggaattcacgtctctactgagtgaatatatcgaaatcagtagcatgtggttcttcaaggaattcacatctctactgagcaaatatatcacaatcagcagtgtgtggttcttcaattaggttggcttggtagacggcctctctaagtcttcctaactcaagatcttctcccaagtccacgtggggctcaccaattcctagtcttgtctctcttgtatagtaccggggatgaaacctggatgttgttcctgggggggtgccccagggattcttccttcagatagatgcacctatggaaagtcctcccttaaaggtaggggcaaattcctcagatccagcgggaggcttatatcagttttgctagctgttgtggccagacttgtggcacatattgtggtgacaagattgaccacatctattgtgttcatgggaattccaattgtggctagaacatgaacattaggatctaccatctgtgggtcttgaggggaacctaaagatgcagatggtgcggctggggttcttctcgtgttaaccatggcattttatcaaatacgatgtccacactctcaatgaaagtaccaaactattgaccctgaaaagtgatcaaccaacagcagggtcgtattaatttgatgcttgcaatgtgttacacaacaagaataataaagtaa

SEQ ID NO: 33846 - DNA, 3455 bp, Cannabis sativa
  modified_base (1071)..(1071): a, c, t, g, unknown or other
  modified_base (1830)..(1834): a, c, t, g, unknown or other
tccatgttggaaaatcttttactattatcttaatttaatactcatgtatgttgaattatgactaatctaacaccttaatatggaaaacctaaaacaataatattaacacataaggattatagaaaaccttatgttggtgcagtagaatattatgtctcattctgtctatagctgagtattatcaagatttgaacctggatcttctcttccttcgattgcgttcatcacagtcttccacaaaagcctgagtatcaacttgaatagtgtgggttgatactcaaacacctttgaacaatatttgagatagtttttttagtgaatttcaaaaataaagagaagaagaagaagtgacattaactttttcaattctcttctctttctttatataggtgttcacttagggttagctttagataaaatgagcttgaataaagacttgggcttaatctaatcctctagtccaaaatcactaatgggcgttagagttagatttttgcctttttatttcattcaaaggaaacaatgtgtcttttcctattttcccacttatctcatctaattatttaaataccaattttatttttaataattataaataattatcaaataaaataaaacttaaatatatttattaattagattcataaattgtactaattaacaaataaaactatatttctcttttttctcataattgccctaacttggtaaaaaaatcctaaataagatatagtctattttcaaattctaactaacttattaaattgattaattgagtctacaagatgatattatcccaaaaaatgtggggaccatggggctatgtaagaaatctcttaataagtagatccaaaacttatcgagtaaatttcctatcttattaatttctctcgactccactatagatttggaattgtactcctaattacatggtacactctatataccaattatagatatgctatcaattatccattatttcaatcacaacaatcattgatcctctatagacggttcacattgagtagggataaaattaccgttttatcgttcaatgtattttatccttanaacacttagctacatgtaaatgatattataggaaactaatataattatcaaaatgagcactctatcatttatcacgttaagctaagctctaaggaaaccatcatttcacttctaataggcatataagctatacatgtccatatctatagttaacactcctactcaattactctaccgagttgccaagatgtaagtattatgcctacatataagctatcacaagcaattcaaagaactcgtgcaatatattaagctagagcttaaccatctcaggattgagatcaaatgatttatgatcaactaagtgatattgacttagaaaaaatataacggttagtttattgtatcttttccattgtgaatataggtccagtccggtgcatagtcgacacatccgatgctagtttactttactgatgccttggaaaagacattccacttatccaagtgtaagtaaaccccatcattgattatcatgtcagtgtaaatctagtgaattgataaatcgtggaactaaataatttgaaacatataatcatactttctactgtgatgatatcactataattttgaataacgatttgctcgggatttaataaaacttatatattaaacatataatcatgtataaaatatgtgaacaaagcatatgacaaggtcaagatatgatttctaatctttattgaaagtgaataagattataataaaattgggttttatttagggcataaaatctcaaaaaactcccacttgcactannnnnaaactaaaagtgcatttcaatttaatctcatatactttatgtcctaatcaaatacagtatttggcataaactatgtaatagtatctgataggttgtattcgatatcaaccttctccaccatcacatttttcttagttaataaattcatgattttgcgaattccccatctatatattttcctcctcttagggtataggattctttactatttggcaactgcacttgtgttatcatggagtcacactagcaatcattccatgtctagaattatgccaaagtctgtatcgaactttctcgagtctcaataattccctaatttcctttagggaagccttattattcagccttactggtagacttagtaattttgaattgatttttacacttctccaaaattcactgctctaccccgagggtaatcactatctcttaagtagatttttagcattgatgcaagtctagacacctgagtaggtatagcctatgggttttaaaacaccacatttatcaactaacatatattttctctttttgtatttcaggatatatttaattatttttcaattttcatttttcagttttgattgatatttactcacaactctcactcaacagtagatctctggcctagtgcatacaagattgtacataagacctcctactattgatgcatatggaatttttttattggcctttatcttttttggagtacctagaaacaatttctaagataaataaactctatgtttggaagtcaagtaacctccattagagttagccatttgaaaaactctctagcaccttactaatgtatgctgcttgagatagagtaagtaaattaccaaatataccacaagctataggcttttatgttctcatcaaacccttgatactaggaatgggaagtttgcttaagtccattgaatagactaagcatggttttccatcttatccttgtatactgaaaactctaggttgctccatgtgaatggataaaccatagttctctacgctttgagtcttagttccttattaggactatccatttcttgtttgagcaaacaatgaatctccatcactagtgtcacccaagtaataacaaggtgggttctactatgacaaggtataacaattatgtgtctaggaacttcagtggtatagacctcttcggttgtgttatctgcgtttctggcattggacacgtgaaatctaggttagcatccaaggtccattagtgggaccctcaagaaaggttaagtgggccaagccaatttggataagtccttctaggaacgtatctcagatccacaatcataaaaccttctacgctgcgagctgtacctgaaagcatattcaagaacttcattggtatcaatttctattactaaagtaacaagttaattggaacaattacatgatcaagaataagttctaatagtttgctaatgtgttcattatattacatccacgtctaatcaaaatatgtgtgtcatagagatactgtggtgtattgagtatagtttagagttcaaaattaaaaagaatctgaactacatatgtcaataacttcttccacccctaagtgttatagagattccgtggagttatgaatataatctag

SEQ ID NO: 33847 - DNA, 1759 bp, Cannabis sativa
atttgtttggtttgacatttataattggaaagcttattcttttggaatcgtaattcatgtggagataggattttgtctattcaaaataaaatggggtgaaaagtgattttttttaatattatttagattatgtcaaatgtactttttttcaattgttaagaaagttatactattagagttttacttattggagcttttatagatagacataaataattatataaagtatatgtgatgattaaattatataaatgtatataattatttgtgttatgttacctagtttcttacaattagctagtaattaactattatttgtgttatgcataacactttttctttaatatttatgcatttttagtaaaatttatcttaattctaccgaaattttgataacataacggataattgggcgttcctaaaaattgtacatgtgcttaaattagcaaacaaaacaaataaaacaatacaaaacaaacaaaataacattaacaatacaaaatttatttatctatccgactgttatacatgtattcgcagaatctacttcactatagttgaatatttaagatattcaaactgaactaacatgaatattattacacccatccgactgcagtacaatatatcacaaaacctatacttcactacgaatgaatatttaagatattcaaactccactaagcattgataattaattaataacaaaaagttagtgaatgtatatacatacaacaaagctaaaatctgatcaacaccaaaatattcgcaacttacaatataatgaaatacaataaaattataattttaagtaattaattagttactagttataaaaaaaaataactagttactagttagtaaattaactacatagatttttgaaaaatttacatatacatacatacataataaattatatttcacactaacaaaattttaagaactttatttctcaactaattaaatctctcctatctcattctcatttaatacatatatattacttagaatatatacaatataattacaatatttacataaataaaatacaatatatatatacacacaatacaaaatatatacacacatattcaataaaatacaacatatatacatatatataatatatatattaaattctaaattttttaccttataagtgcaattcgttgaccaatttcgctaaaagttggatcactatgcacatacacaacaacaatgttaataatataagaaaatcccaaaaaaatacaagaacgaaaaataaaacaatgtacattactaaaataaatagaaattaatcatatttataccttaatggacgttgagattcaacgttttctccactaaaatcggtggtcggagttataatcaccactttatttttatgggtttggtttacaatgaaataggagaaaaattgtaactttttgggtgtgagtttaggttcgaaaatagaagactttaaaaaaaaataggctcaaatagtacaaaaataggagagacatgtggattttaaatggtggttggcgagggtttctacggtggctgttgcctgctgtgtttgtttaatgttgaggaagaagaagacgaagtgaaggagaaagttgatcagggttaatttatataatcctatggcgtcgattatttaaaagtaatcgacgcactactacaaatatcggaattcgcgatggtcctaaaaatgattttttttggagaccgtcgctaaaaaaattaagtaactatttaaaaccat

SEQ ID NO: 33848 - DNA, 2032 bp, Cannabis sativa
  modified_base (817)..(817): a, c, t, g, unknown or other
aagtcgcaccacctaaggccgtggtgaagagtcagcaagagcctgtgtcagttgaccatctcgggagtaaggacgagtcttttcaaaagggctgtaaaaaacaaaaccttagtcaaaaaacttagaatgaaaagataaggattaatctaaccgagcctaatgaaaacaatcacttacaaattttgcggaaggtggttgtgctgattgaggagaggccagttgtccaaaagaagttatctttgaaagatattttgtttggcaagtctacaataattttaggctcactagagtgagtaccaagataatagaaaccccctgcgacattcttcctcgctggaatagccttaatagagtaaacatactcgatttccacagccgtagggcactcccactccaaaattttatacaagaccatcaaactggcatggattctgtaggagacgggatttagttggaatggtgcaagcccgaagtggtttatgtaatccttgaataagtcacagaggggaattatggcctctgcactaatgtgttcaagactctaagcacctatgccaatcgagctactggtactggtctcaccactggctccctcaagggtctcaactgtaatgcgcgtaggggggtaacaaccaaactcaccagctcgtactgacctaacttggcatacttgcccaagtttgattccacaggtcctcagtatatcacctgtgtagcctgagatagttcacaccttcgattctattaactctgcctcaaaagtgatgctaggatcctggggagtctttgatgtatgtggcttgggagacattatttnaaagtccaagtcacctggttcaaaagcaatcgtgactttgggtaaaaataaaggcttagccaaaggaataaaggacacactgggaggttctggacaagctgcatctcgtacgaaacaacatttgccttcgatgatttcttgcaagaagtgcttgtggtgactagcattatcgtcctaatagggtctcactaaatgttccctaaccctagcatcgtttaactctaatttagatgtgggttttcaagggttgggtttgtaagggaggagtgattctgtaggaaattcaagatctaaatcttctagaggataaatttccgaaccagattgtgacattgctgcaagaagaaagcaatcctaatccaaggaaagaattatataaaatctgaagtggtgagttgaagattctaaaaaaaacttacgtattgcatgaacgctaatgttgacccacatacagttcaaccttaaaaattactaaaaccaaatgagatggaaatgatacaaacaaatgatgcagtaattaaaccgagaaatgcaacgtaacaagcatgtaagatatcaagaaaaaaaaaagctacttaatgtttgaagttagggtttggggcgatagacagctcttcgacctgtgaatctttgaatacagtgagagtctctttgagattgtgaagtcggaggaaactagcagaaaaaatttcaaggacagagatggcatgcaaattctcaagcaaactcggtgttggtgtttcagcaatggagcttaaaagttttccaaaattcctaaaatggaagaaataatacaaaggtggtttctttttcttattgtatactctccaaatcagtttcgttggattagagagatgcttgatcctacaaacaggatttgaaatggaagtgcaaaagatggtcatttaatgttgatgtacctcaaaactacaacaccgctgaaatcagaggacatgcgttttttcaaaatgaattatgacaaatatactctttgtaatcattaaaaagcactttttatcaacaagaactttttaaggggcaattgtcatacccgagattttgctaacacatcagaggaatacacgtgtcaagctaacaagaaaatgaaccaaggcaggtaattataattacatttgaggtggaataactcgttaaaagcataattgacagagtatatttactgactggatagtcttatgcaagataaagatatac

SEQ ID NO: 33849 - DNA, 1518 bp, Cannabis sativa
  modified_base (190)..(203): a, c, t, g, unknown or other
  modified_base (257)..(264): a, c, t, g, unknown or other
  modified_base (306)..(313): a, c, t, g, unknown or other
ggtaccatgactttctgtctaggaacaatggcattgtcccatcgattgtgtcaatacaatagaggcaatgggaccatcttatatagaacaagatgatagaacattttggaatcaaaaatatctcctctactttgctaatttgttcttagaattagtcatattcttagaagtagtatttgttgaaacaaannnnnnnnnnnnnnaatgaccataggatggtccacccttaattactttagaatagctattaaacatgnnnnnnnnactttagaatagctattaaacatgaaaaccttagttaacagnnnnnnnntttcttaagttcatgatcaggacatccctgaatctagtaatgacgtacattaagttcaaagcttccactctttaatggtgacttttgattaattagcaattttttgaattaaacttataattatgtttagaacactttattggagattagaactcgaaatatttttgagttgtcgattcagggcagaaccggttgcccgtttggtagaatcgagtgaccagttgttttggcagtgcctagattttcgagcacccgattgtaaattcgattgcctagttggggattcccaggctacttttttttgtatttttttggataattagggtgtttttaccttatttatcgataggaaaactttagattattaattttagtcctagaaagtattttagcgaggcacttactagtttaccactaatgtgacttagggcctccgatcatcgagcagatttccactcaagttgaccatcacacctgattaggaattgaggtaagaatagtatttagatgcatataaatacatgtttagtatacatgtatgttatattgtcatgtagctagcatattagagttcgatagcgatattggtgtacattgaattgtattgggatactaatatctaatatattagtaccaataccagtacgactagagtactaagcttaggttagtattatgattaatcgtgctataggtatgaacgtttggatctcgtatatacacattggatgtggttacgagacttatggtaattgagtgtatgggcactcattacaggtcagatatatgtcgtattatgtttaggcttttcttactaagtttgtctcctcacaactattttttcatgtgtaggtaaagaaaaagccaaggttggacaacagtgagtaagcttggtgaagattgtacatatttagtcatctaagcgtggagggttttgatcttcgagacactactaaaaccttttgagttgtcgtagatgacacttttgattattgtatgtattatgtatattttataaatagattactagatctcggattgtaaatctttcataaaagtgtatttaagtttattaatattttaattattatggaggttttattaaacacacttttatgttacaaccatttaattagcaaaggttaacacaacacttaagaaaaatactgtaacgtgccttagctaggagggcattacagaaatat

SEQ ID NO: 33850 - DNA, 1865 bp, Cannabis sativa
gctttgttctctgcaggaggatctctttgagctggcggttgaccatgagggtgcggtggtttgaatcgaagcactatggacaaggtaatactacgttgtggcactgcttttgtatcataagagtactgtggtactccatgtgcctcacacaaagtggtaataatatcagcaagcccaagtccacctccacaagagccctcaaccatcatatcaaatgtcactctaactatgtcccccacattcaagttgtaccccttcataattccataaacaaacttaagcttgtcaatcataataatgcttgtttggtaccaaccttgcactaacaaagtataaccatgccttggctaccgggttgagttcacaccgaaacagctgatacggttctccatcaaattcatggaacctaaggcctgaataacctagggtttcagcgatatcctcataattcaagctccttgctcgaagttgctgtctcaatggttgctcttctacagtaaaggttggtaggtcataaacagcatgaatggcggctgtggaaacatgcactttaacccccctaacttttgccttgtcatcctctcttttctggccaatttgctaggaattctaaagctaaggtttggttgctgcgctcagtgacatccacaaacttagtccaccgccgatttaggatttgctctctgatgggcacaaatacagcaaggatgtttgtagtttggctcgggttaccaatatctatccccctatcttcaatgaagggtctatctttcaattgtaaaaatcgctcttgggcctccatattcacaaacctcgctctatcaacattggagcgacccataggtgtgttggatgatgaggctccccctctctcactcactctagctcttttaggacccatctcaccaaatattctaacactcaaaatttataaaaattttggcagcactttccattaaaaattcactttcccgggtgacaacccaatcacaaataaaccaattcctaatcacaaacaactctattgaacaatgtattgagcaaaaatcccacaaattcacactaaaatcccaaaattctccaataattcaaaattatgatccaaaaattgtatagagagtctaagaattgttacctcaatgagaatccacctttattcaacctccattgaaggaaaccttgaagttttgaggaagaagaagatgaatagtggtttttgaaatttgggtgaggttttagggatttggggttgattttgaaaggaaaagagtgttttatgagaggaataatgatttagaagtatttgggatgaaagattgtggttagatttgaagaaaaagagtttaggatgagattagatgaagagaggtggttatggggagtagttttcggtggtggtgggttagggttgagcaaagaggagtttttgaaattgtgtgaattgtggcttcttttaaacccgtcagcacatctcgccgcggcgagataggctcgaaaaatagcctctctgcctagaagatttggccgcggccagataccatcaaaaaaccttgctctctgtagttgacatatggccgcgaccacatgtatctcgccgcggccactgggccgaacccgaattttttttcttttctctctctttttttttttcatatacagtacaaaaatttaaagtaaaccaaaatttagtttaccagtttagtaagcataaactaaaaagagaaataaaaataacaactcaaacaaacgaaatttcaactaaaatatcaagaaaatttgggttgcctcccaattagcgctgtctttatcgtccctcagctagacgttgaccgagttcttcatagtggcgccagaatcatggcgga

SEQ ID NO: 33851 - DNA, 1811 bp, Cannabis sativa
taaaataatttccaacagatatgcgactggaactattctcaacaaaatgatagtctagctttcttcatcaaccttgtgatttatattagccaaacctataataatctcatcaaatctatcaatattctcatctaaagaaagggaaaaaatcattctaaaaccgtataagctttctagcaaataaatcttgcaagcaattgatagctttaagtataattctttcaatttattccaaactcgtttttccatcttctctgcgatgagtttccttcgaacactatttgatagatacatgatgatcgcgtagtacgccatctcctccatttctgctttttccctttaaattcttttcatccaatattttctcatctctaagaaccttggagactttttggtgcactaggattcctttcaaacattctcaccatagcgcaaattccctagttctatcaaacttctccaattcaaatctagccactgatgtcattcaaagtttcttcaagaattggaccagaaataatcttgattctgcattcttgatcgattaccaagctttgatttgtgggaaattacaactaacagtgcagaatcaaaacaactgaaatctaaacaaccaaacgactagcaatgacaagatttaccaacactaaacataaatcgatgaaaaatagaggcaaatagagtatgtaaaactagaatcttcttcatccatagaagattcttcttacaaaacccaaacacaatctctctcttttctctgcacctcaatctccacctctcaatcttttcattcccaaactctcaatgtcatttgaactaagtgcaaaatctcttattattaaaataacaagtcaaggtggtatatataggcttaggaataagatcctaaagtctatggctacaaaatgaggttgttaagttagatagcactgactaacttaactaactcctctttgagcgaagtcctacatgtcagtttaactatgagagcctacgggaacacatgtgagcttctagactcacgcactagggacactcattgatggcgtttttggataagattgagtctactggagtcgactatcaagaactaccattccaggagggacaactagaattccatcccggagtgaggctagctttcttgaagactagacccagagtggacatgatagtcatctaagaactcccttctagactcaactatcattccatgagactccttccggagttgacaagttagctgtctgggaacaatatctaggagacacctaacttttgaagaatgatattggggacctttttatttgaaggaactataccataatcatatatctataaattttaaaatataagggttttatgccctaatgaaaatgccaatttattgtaatagttttattattcatagagaaaataaaaaatatattttgacttgataaatcacatttctcacatgtttttagagagttaaggtatattatttctcttattcaatatgggcaaaaagcctcatatatatagaactaattctattaatcatgtacatcaagtagaattacataaataatataactaaattaggaaacaaataagttaagttagaaaacaatatcaatggtacaactcatcgagagaggtcaatgcctagagaatattatagagtaataatagagatatgccactaataacccccttgaagttggagcataaagattggaaatgcccaacttgcaaagtgttggaaatattttactaggatccagatttactaccatgtatgtttcgttaacatcctaatatgaattcta

SEQ ID NO: 33852 - DNA, 2059 bp, Cannabis sativa
cgcaacattgcacctaagttccctagtccccgggtattccagcataagatactcattggggctgtcgagtctgctctgcagactgcgccacttcatcctcaaccaccataggactaacaattggtggaatattttgttttactcttctattttctatcttaccatcagtaacattctttcttttcacaccactaggacaccgtatatcttgattttgttatgtagacatgccatcagctaatgaactactaacaccatatccatctagggagagtgtatgcctcttccaagttttcttcttttgggctttgaccaatgactcaaaagtgctttgaaacaactttcctaccaccatctcagagcagacaacaacttttcctttatcacaacttttaatttcatcattcccatgggattcaccaattcgatgtacctattcaggagggcaagggtgatgcacccctaacagtggtgatgtatcagcccataattcatcatcagattactgtaaaattgcagttgaacatctttcgatggagatactgtaaaaataataggtgtacattcctcctcagtattacgccgagcagatggcaccaaaggggcaccaggtctcatagtttggactgaagggatctccccagttacagtctcactgcccaaagtaatgcgtatctcctcctctcgttcacgtctttttaagacagatgttgtagcaaccttttcctccgtgtttcttcttggcatagaacttttaatagcctccactaatctgcccacttctctcatgttcataaaatgtgactcatccccaaacttagtttgtttacttccaccccagtgtctctgaattctaggcgaagagcttggagcacaccacgacccatagcgtccactctgaactagtcctgtttcattagcttgaaagtctttaagagggcaatccaaagctttatggccaatgataccacaatcataacaaaattttgagaggtgctcatattgaaagagtagagatacctcagtccccttctcatcagtggccactgttaagccacgtttaagaggtctagtaatattgattcgcacacgaactttcataactctattagccactcttacatcctcaacctcccctatcaagctctcccattcacgagcaaacacctcagacatacatgcaagcagaacattgttaattgagatccaaaaagatgcatggtcaaaagtcatcttagatacctgtcctaattccattggcttcacaaaacataatagttgcttctcaaacgtccaaggtccaccactaaaaacatactgtcaatcctctttgcttccaaaaaagaattgaaagacattcttcgcactcaattcctcaacctaaaataaatgattaaacttcaaaatactcttcatagcgttctcaagtctttctccactagccggcttaggaccaatgaccttccccaccaaacacacctccaatctccttctcctatcttcgagactatccttattccattcgaccataagaccatcagtttcatacaaatgtaatacttctatcaatttggtcacgaactccaaatccatacttggctacaatcccttatcacactcaccaaacacctaaccccgctcagccccaattggccaaaatttgcacaattgcaacacacccaagtcaaacccacacccttattcaccactgcctacaatcctacccacaccattaccataaattgccacatagcaaggaacccgtcaacacccataaccaacagccaaacagacccccaccaacctagagccaatcagctatcacaaccagatccaaacaaagacagccaaacaacctgtacctaaccaaacaccacttctccaatagaaacacaatcaaaacccaacaaaacactacccagagcaaggcaatcaaccccaaaatctagaaattaatgccacgcccctccaatcggacatccacttgcacctattaactccattcgtccctccaattagatctccaatcactcatccgaccgcaccaccgctcgcacca

SEQ ID NO: 33853 - DNA, 2983 bp, Cannabis sativa
tccccctaaatcataccaatttcccaataatccaacaactcctattttcccaatatttattctaacccaaacagcacaccgtgccacacaaaacttgtttctcctcacataggtacattttatcaaaggcattaagaagctcgaagttctctcaagaattctcaaatgatggaaggtgttgccagttgatgaggacttccagcaggcccttgcattgtaagggagatcttccactgattcaggttaaactttcaactctaaatctacctgaagcataatgggagaaggttgggtcggagtggtagtgcccacagcgcacttcaacaaagaagcatggaagacgggatgcatgggaacacttacaggcaatgacagcttgtaagcaacagctccaacgtgagattccacggaataaggaccaaaataccagggagagaacttattcttgtgctgggcaagagaacaatgacgaaaaggcttaagtttgacatacaccatgtccccaaactcaaactgaacagctttcgtttaaggtcaaccgcatacttcaccctttgctgtgcccgcaaaaggtggtacttgagggtggccaagatcgaatcgcgctcttggagttgctggtcaacattggacagcagtctagaactaacctcaaaacacagcaagggcgggggatcttgatgttacacagcgttgaatggagtggtctgaagggaagaatgacaagcaatgttataccaatattctgcccaagaatccaagcagcccattgcttcggcttgtcacacacaaagcagcgaagatagatgtcaattgtaatgaccgcattatttggatatggattagtggggttataaatactaattttattattactaataattatatgtgaatgtatgttaaaatgcaaaatatgttattcttgtgattctagctcggtagcgatggaaaacacaatggagggttatttttgtcacatgggtaaacatagaaccttttgttatagagaattatagtatgttaagtctgaatgttgagttttagcggggttatggccttggaccattttacccctaggccattttgtgtggtaggctttggttaaagggtaaaattggaatgttaggttttgttaggtggctgaagggtaaaggggacagctggccatttatatatttggagataaactaggtttatctaaaagaattaattaataaaagaggaagaaaacacaattacttggctttggttctctttctctctctcctttttcttgctgccccaaaatcagaaatttaacctcaattttccttgttgaatcttgctgaaaacttcaagggcaattgaaagtcttggaaggggaaaagctaaggtgagccctaaaacgaatatgtttttccaagttttaaagttatacatgaaatgttgagttagccattattatgctaagatttcgattggagttgtagtctgtaggttaggtttgatgttttagaatttgagttgttattgtttaattgtgtggttgagaaagtttgagttcaagaactcaaagcttgctcaacaatggcactttttaattcttggtgtaattgttgtgtttaagctgtaaaatatgtttaatatgctatatgttgatgctctggaaagtttggtggtgattggggaagattggagtaggttttgtaggcttaaagtttgagaattttcgtgttgaatctgcccagacaaccggaattctaattagttcagggctgttccaaccgaaattccagttagactgtatcggagaaggccaattttcgtattttggccacaacttttcactcgggtgtccgttttagacgttttatgtaccgtcttaaagcttatgacgagctctactatatggtatataaactacagctaaattatgtattttattttagggtgtcttcaccacaaagttcagtagaaaaaccttaggttcttttcgggcattagagaagtgttatagagtaaacacttatcaattttatgttgtgacataaggcctccattcaacgcataattttccattcaagtcgaccggcacacttgaatttgaaaatgagataagactaccatagaacacattacatatgtatgttgtgtttgtgattgtatatgttttgagtgatatcataacggcacaatcattgtgtcagttcggcagtacaggcaccgtacttgttaagagtgatattcaccccagaaagtattaattggcgctatcatagcggcacaacctttgtgttggctcggcagtacaggcatagtaatggttaagagtgatatcatggccaattgtacttttaggtactattgatgctatcatagcgtacgaacatagtgtcggtcccgcagtgcgatcatagtgctggtagtgggtgatatcatggtcaatagtaccaactgttaagaacgttcttaatcatctgataagcattacagataggtgtatgggcgcctagatgcaagtcgtcaatataataattgttgtatgcttttcttactgaggtttttggctcacagattctactttcatgtgtaggtaaaggaaaggtggaagctgaattggagtgagttccgagctagggcgatgattgtacatgtcaagacggcgcgacttggggtgttcgatctcaggacatcttgggctatattttgtagtcgttgtgcgacaagttgtaaaaatattttgctattacttgtaaaagtttaaatacagaatcctagtttatatagataaattaatatatgtttatcaagtttcttaaattaaattaaaagttttaacctaacacgattttcgagaaaaaccctttgattagcaaaagaggcacatcaaatagaaaatcactgtagcacgcctaagtattagggcattacatcaatgctcctattaaccacctccgtccgggcattgctttggggatgctacgaagagctatgattcagctgc

SEQ ID NO: 33854 - DNA, 1365 bp, Cannabis sativa
agaatagaactttcctcatcagtgagggataatgtagagtggagattgtccattacaatattcataaaagtgaaaaaagagtgatttagtacaggaggaagaagccggcgatggaggatgatgaaggaaatattggagggaacagttatcttcaaagatgattttgaataaggaagaataaaacagttgaaaagaggaaaaaaccgttaaaaaaccttaacttctacaaacccaaaaaagggcacactatccaaaattacctcagtttttgattttttagagaaacactcaaatggcgtgtttaactaattggtctcttatcaacagtattagtaaaaaaacttactttcgagaaaaaaagaaaaataaaaaagaaatatagaaaatgtcatgtttggctgacatggcacataaaaaatatgaggaaaatacaaaatttatgggttttttatggttttttgttccaaaaaaaatatgttttcaaaatttagaggtgttgccgaatacagatgtgaacaatgagtgaaagtagcggcattcgtaggcccataaaatattattgggccgcgtttccattgtcaaagcatgttcgctgccacgtgcgaatggcgtttaactgcgtgggtgggacatagtccgcatttttggactctttcacccattatttagaccagccgaccatcttctttcctactttgatgataattactcctttttcatttggaatcattatcacattttaaataaactcagttttcatatttcaccttaattccttttcttttcaactttgataaaaaaataaagtaaaaatagaaataaataaaaaaaaagtttacgatcttaagaaatttgaatcatgttaaatctctatataatttcttctttgttgttagggtcatcatatatctattctatataaagtgtgcttatataactgaattcttagtttatgaaaaatttataggtgacattttatttatatataataaaataataaaatattatttatatataataaaataaaaaaataaaaataaaataaatctcattaatatttgattacgaaatgcagtcgtgatagattcgaactgatatattgaaataaatctggattaagtttttagtaaagataatattttgtattttaaatttgatgtcatttttctccattagaaatatacaagaatgggacagcaaagacagagctgccaattcgatctgtggcagttgacatcattacgatgaattctaaatgattgtaccaaataattaggcaatggatattggattgtagggtcttcggccaattcaaggttttaaatttatttaggcactatgagtggcacttggtcgattaattct

SEQ ID NO: 33855 - DNA, 3298 bp, Cannabis sativa
atcacatagagctttagtttccactgaaccccctatagagcatggaatattgaaactactcggatctttaagcttgggcagtaattttttctgcaaaattgcacttcactcctcagtgagtgccactatctcggatttttctaacttccttttcttatctaaaatttatttcatgaacttcaggtcagttggcatttgctctaaggcctctgcaaatggaatgttaatgtgtagcttcttgaatatttcaagaaattttgaaaactgcttgttgaggttgttcttgcggagtctttgaaggtaaggaattttaatatggtgatctatgttaaccgaaggcaaagcttttctcggtgcaagaccctcagtagtcttcttttcctttggtgtctgtgtttgtgcccgttgatcttgaaacccatcttcaactggttgcttgccactaggttcctcataactctttccactcctcaaggaaattgcttgaaattgctctttttcctttgcctcactagtgctaggtgaattctcttgagtacggttgcccattttagcagtcaactgtcccatttgagtttccatggttttaattggggctctagtctccataatgaattggagcaataaatcagcttggataattgagcctccactaagactttattgttgcggctgttgttggttttgttggggttgatttctctgctggtagaacccctattacttgtgctcataattattgtttgagaatagttttcaatggcttttgcttaatccattggtaaattgttcacatcatccgggcatatgtcatatgtgtgagggcccccatatagctcacaagtaacttgagcctgtttcacctgagcagtcatcaacttcgtcaaggcctccacttgggttgtcaacttggtgatggtatctacctcatgtatactagcaactttgtttgtttggcttctttcagttggccattgttggttattcatagccatttcttcgagcagatcataagcctcgtttgcactttttttcataaataccccaccagctgtggcatctataattgttctggtgttaccaatcagcccattgtagaaattatgaaccaacatccacttttcaatcccatgatgtgaacattttctgatgagatccttgaacctctcccaagcctcaaggagagattcattgtccaactgacagaaattattaatttctcctcgtagcttggcagactttgctggaggaaaaaacttggacaagaactttgttgccaaatcagtccatgttgcaatggagtttggtggcaaggagatcaacaaacttttggctcactccctcagcgagaatggggatagtctcaaacggatggcatcatcactgactccgtttaccttgaaagtttgacacaactccatgaaattggaaaagtacaaattggggtcttcagaggggagtccaccaaactggactgaagactgcaccatttggagtatgtctggctttatctcgaagttactggcctctacggtaggtggtcttatacaacactgaacccccatcaatggttggagaatgtagtctctcagactacgaccgtttgcctgatcttcaacggcacctccgttattaccgttgttgccgccattattaccgccattagcattatcagccatgacttcttctatttcagcacttgttgaaattctttcttgccttttgtttcttttgtttcttctataggtcttctacatttcaagatcaaccaacagtattacactttgtccttgacatcgcatacaccttcaattcctgaaatagattaagacaattcgaaagagacaggttagcaatcggcagaaagaatttaaccaaagtagaatttaatctaatcttttgtaatatcaagttttaaacaactccctgggaatggcgccaaaaacttgttgtcaattttaatacgcaagtgcacgtatcgttgttcaagtagtaaactcacaccagtgaggttgaaccacatggaattaaactgaataccactaaattagacttatgattctatttggtagataaataattttgatagagtttaaaataaagaaaaaaacaagaaaattaaagaaagcaataaaggtatttaattaaggatgagaaattagggaaacgaaccttgctgcttcaattacccaattgttaatgctaattattattcctctttctttatgtgaatgacaaattataaaattaacctaactctttttagatcttttaggtcctaaatcatatgttatctattgcatctctaagatagaccaacatacaatccgcattaagcaataatctcaatgtcacataggctatgcaaatactttcgtttcacatcaaaacctagcttattcaattttagcattctcaacgctaactttttagattttgtattgagatcataaagcatgcctaaggtgatcaatcttaaacatggaattaagcacaaacatgaataaatacacaatcaagaaagaagaaataacaattaaaattaactcatgccataaaatcaatcaacattcatcatctccccaaataggagtttagttataaaatccataataacatccataatcaaatctaaaacagaaattaacatagaaatcaagagtttaagaaagaactagttggtgattgtgctccagatcgccacaattgctttctctacctccttcttttatgttttggtcaaatttctgcctcctttcgttctaaaacatgagccccttaaatagaaattagggttgctacatcagaatggtgaaagtcaaaaattgcccaaaattcccgtgttttgcccatagtcgggactacataaagcttagtcgcgaccataagcaaaacacaaaaatcaagctctttgcctactccatagtcgcgaccatgaaaaagggtcgcgaccatggaaaatggtggtggcgactactaaagcaaattgacagcttccacatctttcagtaaaatatgcataactttgacatacaaactctaaatgagttgattcaagatgcgttggaaagaagaaaagaaatctaaaacttctatgttttgactttttccaaaatatgatcagaacatagtcaaattaaggccttaagtttcagctttattttcttgcagaattttctctattctatagattgttgttttccgaaatttgatcagctgatatattctaagtgtcaaacctgaaaccaaagaaagcaagcgtaattctattcccaaaagaataacaaagaaggaaaat

SEQ ID NO: 33856 - DNA, 2837 bp, Cannabis sativa
ttgattatttgttttgtgttttagtgaagtggtagcccattttgggaaggttgaggtcgagcgtaggaatttcaaatgcatgagaccggagtccaatatctaaaacagtgtatgtagaaattgccatttggttgctttcaaatttttagttcattagtttagttattgtaatttggtgtgttatggtctagactcgattgtttggtggtggtggctttaaggcacattccctatttattattgactaactattttgtgagttgtgacagtttggttagttaggttagttatgtttgttatgtacataaatagacataaccatacttgaaagttgggttaaccgttttttgctcaccgcatttgatttggaatgcttcgctcatgaatcttgttactgtagttcttaatttttgtactgtgagtgtatgaatcacaacataatggatactatttgtgtaaatggcagttcattgattgctttgctcaaataatgaattttcgagagaggaagcgcaatggcattggatcaaagagaacttggtttatgcccacaagaatttctgtacaaactttgatatttaaaaatcgacatgaaccttttgtatttgtgctttaatacaatgtcgactatgcttttattttaaatgtactctattgtatgtgcttattgtgcagagggagttacatggaagaacgatgactgtggagaggatggcgagggagcaagaagtgtccactctttattacgatgaacatttgaatttatgtcacaatgtaatttgcattttcttgatacttttgtgttttatcaaatttttttagttaacttttttttatgacattgtttgttttagtttgtcgcatatggtgatacccctattgaatagcgagagtgcttcgcactggtatgcggtgaatctgaccatggataatgcaacaatggaaatcagagattcgttgtcttctgcaatgcataagaggtcacgccggaatgcttgcctagagacggtatacacgtgtgtacattgtttgttgttctattagtgtaattgcaagcatctcagctgtaattgttttattttttttgtagctgaacaatttggaccaattgcttgcctctgtgaagccagcaaacctcaaatttggccagttcctaattatttcttctggcagtgactacacacagcaacaaaatgggcacgattgtgggatgttgggaaaattgtcaccacgagagtaacaaggctaaatatgcagtgatggagggagttaagaagaaatttggaatgaccaaagctcttccatcaacatccacaactttaccagtatgtagtccatcaaggtctcctcgagaccctcgatttagcacagcgaaggctaggtccgagaacatgtggactggaaagagcaagtctcccaaaacccgtcattctaaaaggttggcatcaagtaacaagtagtaaaacactgttgtagcatatttagtacaactgttacaaaatttaggttttagttcataagttatatttagttatgttatatatttgcatcatactactattaggtgattctgaattgcactgatgttggtgattttagcatttactacatggtaagacttgtggttatttttagaattcggtggaagcaattattataactatatggtgattattattactaatgttatcttttaccattactataaggtttttgtttaccataacaatatgtgaagtacattattgagaaattgaaattaaccaattttaccattttgttaacactatgtgttttacgccaattatgtcgataccaaaaataataaaaatacctagacttatgtacagtacaatgtagatgtagtgagatgaaggcattaattctggccttgaatataaatttggatcataaagtgtatgtacagtacaataatgagaaatatgaattaattattttaccaattatgttgacacaatttattttataacaattatatcgatacctctaatatattaaaaataataaacaatggtgccaatctattactcattaaactccatttctaaatcatgtaatttaaatctatgaaaaaaaaaaacttaatgtatttttgaaatgcaatatattgaccatcaaggtttataacaattatatggatacctctaatatattaaaaataataaacaatggtaccagtctattaaacattaaactccatatctaagtaaatcatgtaatttaaatctatgaaaaaaaacttgaagtatttttaaaatgcaatatattgaaacacaacactattgactaacttactatgactgtttgtgtattatattttcaaaattactgatatttatctttaattcttattaatcgaacctagtttatttagttcttaaacaattcttcgtggatcaatatgtaataatgaaataactttgaaagacaattactgtacaccaacatattaacagtgaaaatcaatcaccaaagattacttaagaaattttttttaagaacaaagttgaatcctagctttgctttgacaacataaaaaaaaaaacataaaataaatatcataccacatatctctaatgaaatgaaagttggcaaataatgaaaagacaaataaatataatgaataataattttttaataatgttttcatagcgcatcttctctttcttcaaaatccttatttggttacgcaattcgggagtagcgtctgtaagttttataggatgagattgatcgatccaacaaaagtaatcacatcctcgactttcgttgttctcttgaagttaaaataactacattagcatatttacaaagcc

SEQ ID NO: 33857 - DNA, 1149 bp, Cannabis sativa
aacaacgtacctcctgatcttcctatggccggcaacagaatccatgctttaaaccgggatctccaaatactaccaatgaactttctgtcaacggatgccttcttcacttcttgtaacaccaccaaatccggattcaccttactgagtgtagctttgattgcctttctcttcatcttgtctccacttcctctaacattccaagttagaattctcataatgatctttttggaagcccctcttttttctgacctttctcataatttatgttaaaagtcaagtttttgagttctctattgctcttccttccacttttaaggcactgactcttttgatgctcttcattctctttaagtattagattcatgcccatttccgccatggattcaactagctccgatttcgaaaacaacaaagtattcctctcttctggatcagccaattccattctttcttgctcagcaactagctcatgaggctctaagtcacctttaaatcgatcctcctcttgccaaagttccttgatatgacataaagtatcttcatcttcttcttcttcatcattttcttcttcagtacacgaatcatcttcctcctccgaatcgtcatcttctgaactgaattcattaatttcttccacacttgggtcttcatccttatccaactcgtcaaggtgatcttccccgaatatctgctcacttacaacatctctgccataagaaatgaattttctttttctaatgtatactttcagcttctttttgctaataatttcctccccaagtagaacttgttccgttgcttgtaacactgagtttgcaataattctctctttagcattgaagtcttcccacaaactaatagctgcatttttaaaatcttctcttctcttcagtctgactgccttgaggatgccttcaaaaattagatttaatttattcaaggcagttgttgtttgacaagatgagggtacccgagcagccttttggtccaatagaatagtatatgggcccaaatgtttatacttaagatggcccatgtcacttctcagcatctccaaacccaatgaagggacaaacttcacaaccggcccacttaaagtctggcccaacctgtcctttgacccctcacactccaagtaattaattttgg

SEQ ID NO: 33858 - DNA, 2002 bp, Cannabis sativa
acttaaactccaaactaataatttctttgtcggtaaatagcgtgacaataccctaaatattaagaaaatactaaaaaataagattttgagaaaaacactcaaaaaaatagcaggccgtttcttaaaaatgacaggcaagttttcctggtcgtgactgctaaaaacaatgtattatttctagaaaaatggtctaccgtttttaattgtagaaacacaaaaaacctcatttctcctaggattctacccaaaattgtcaattaactgatcaaaacacctaattaggtcatacaaaatataatccaacaggaaaaattatcatcaagcttgcaaaacaaaaattaccattaatgaccaagctcaaactttgttcaaacccaacaacaaccataaaaaacagcaaaaattgacataattagtttaagaaataacctcagaaaacatacctaaacacttccaactaaaacagcaaccaaaacttaaaattacatgtgaaaatctaatcttaagttaacgaaaacaaaggaaagagattataccttggcttaactacaaaagcccttggattttctactgaattctcctagaatttttggtctgaatgtgatgaaaaccttgagttttcctttggtttacttgtggtcgaaccccaaagagagagagaaagagtgtttgaacttttctaattgatgattataggataactatagcttttccattatttcagcttaagattaataataactgccaacttatacatctagaaataggggtaaaattcatagaaaaaaggacaacaaattagagagaaaatactattattaaattttattgtactctgtattcaagtaaatatctctaataaggacccgtaaagtatgtaaattttaactacaaaactacaaaaatatctagtgttcatttattattatttaattctgtagtaaatttattacgtaaaagagtgtgtatttaattaacaaaaatctgcgttaacaccttctgtccaaaaacttcagttaagtgacaaagcatacacgcaataaatttttagtggtccacgtaatattaattattaaaatattataaaaaaatttagaaaaaaaaattaaaaaactttttttttttcttttttttctttttttttttttctctctctttctctttcttcatgaaagaccaaaaccccccaacctttgtaacttcttattcttcctccacctttaacccaaacaaaactccatctctgagacaaggtatggacccccataagctaacccaaaccaaaccccatctccaaaaaatattttagcttcctccacatttttgtggtccacaaggctctctctctctctctctctctctctctctctcttcgagttctgccttggctccatgccgacgaggtgtgtatgtcccttaatggaaaaatggaggtcatagtgaaatcagagcaccttgaaacccccaaccctatgatcccctgagttccccttctccatttttttgctctctctctctctctctctctctcgtcggagttaggaattttcggctttgacctatccatcttcgttagtcaatgagcgaaaggaaccaagttttggtttcccctcgtcaagagcttcaaggatctgtggcccaacccttcatacatctcatttgaacgagaaccaccaccatctacggtggagctccggtgagcgttttggctagcagaagcccttggtgttacatatcttgtttcgagctttgaaagctaaaatattttttggagatggggtttggtttggattagcttgtgggggtgcagaccttgtctcggagatggagtttggtttgagttgaaggtagaggaggaagaagaagttacagggggttgggggttatggtcttttgagaagaaagagaaagagaacgagagagcaaaacagggggttgggggttgttttttatatttttaaattattttataatattttaataattaatattatgtggacta

SEQ ID NO: 33859 - DNA, 1333 bp, Cannabis sativa
tagtcctttggacatagtagtcctttggacatgctttgttcaggttggtgaagttgaggcatactctctattttttgttgggtttgggcaccagcacagggttggatacccaaagtggatagaatgcttctgttatgaagtcataggctcgtagccttttgacttcatctttgagcgcttggacgcgttctttgtccaacaacctcctcttctattgtacacgtttaatgttgggatcgatgttgagatcatggatcatcacgaaggggtcgattccaaccatgtctccatgtgatcgtgcaaagaggtctaggttttctcttaaaaaatcagtatgattatttctggcgctaaacccttcccgatcttcaatcttccagctagacaagtgggatcaaccaccacttcctccaactcttttacaggtccaaaactatttgcaggatccccaaagcaaggatctatgtctgtgtccccgctttgggctggacatcattgccatttgttgggtttttctttcgagctcttggcaggcatcttctctttcttggctttggacagggccaagttgtaacactgacgggcagattgttggtatcacctcaaacatcgtaccccatgccttattgggaacttcaagcagatgtggtagatggatgtcatctccttcaggtcgtatagggctgatcaacctatcatggtgttaaaagtcgagggaacgttgattacgatgagctgggccataagagttctagtggttggattttctccaatagtgaggggtaatctgatataccccatgggtgcaattccctcgccaaagaagtcatacattacttgactgttgtgtgccaaatcagtaagttagagcctcatcttttcgtatgttgatctaaaaagaatattgtaggaggctccattgtacaccatgcatcttgccacagtcatattctctattagtgcagtgatgaccaaggggtcattgtccggaaaactgacttgggcagcatcttcttttgtgaaagagatcatgggctctccaagctttggttgctaagagcccttttcttcgatagccaggatgtcgcttttgggctaatgaaggagcatccgagcatagtgctccctagatttgctggtcttgcctgcaatatggagtccaccattgatgacacctaagtgacccaccactggtggtggcattggatctctattttgggcaccatgtgcttgagtctagtcattctgcacataacaacgcagatggggattgttctttcttttgaggaatttaagcttcctcttcaaattttaacactcgttggtgtcatgg

SEQ ID NO: 33860 - DNA, 1167 bp, Cannabis sativa
  modified_base (46)..(53): a, c, t, g, unknown or other
tctgtttctttattgataattgaataaaaaagattacattgaaatnnnnnnnnatttagggcacaaagcccaatattttaaacatgggcagtaggtcgagagcattaatttttggtgagaatggtgatcttctagtccagtcaagttttagatctgtaagtttttggctagtcaggccttaaacgaggatcttaagttgatatatatgtgcttgcaccaatggatcaacttaacttgcctgttgaccaacctgtatcacatgaggatctctaagaattaggccgagtacatagtaatctgtattatttggttgaacggtaggaggaatatcttgtccgtctaatcctcttctgtgattcagatcattcctgagatcgtacacggtgcctaatcggtcaaagactgattcacctagaggccttcgtgcctggctattgtgagcaaggggttggcttggtatttccgtctaaggacggatgttatgcttatcattccctcccaagtaacgggttgaaaaacttgctcgtctaccatgtggcccatagtttgactttgtggactcgaattggatgatccattaacttgggtttgctgagtgtgtttagttggacacccttctggcccgtgctgtggtatagtgggaatgtaagtatctgctactcgctgttgggcgatgacttaataggctctcttgattagtacggtggcctgccttgaattattgtcaatcacttcttgttgggctctcatgatttccatctctcgatccatccactccttgaactggtgcctttgttcttcaaaaacaaattttatagctgctctagtatcttgctaatcgtaatgaagagtgttattgtggccttgtatttgccctagtgtagctagtaaatctgtagttcgttgtcatcaccgattggcctttaagaatttgtagcaaatgggattctagtaccgggggtagtttgcttggttcgagtactagtggttctagtttcttgcaaacccagagtgaacctagccagaggggtagtcactcctttccctactgtttgtgggcctgttagtggctaaggataagctggagcggggtccgtcctaactagatctctagggtttgtaggtgtttggaggtttggatctgtagtcattagatccgtagtttca

SEQ ID NO: 33861 - DNA, 1194 bp, Cannabis sativa
tacaatttatcagaaaaagtctttttgacaaattgggcaatgttctctgcttacactttcacacgcttatgcttgacacagtttgtggtaaaactttcatatccttgaaaatggtgttataaagttgttacatacaatttgaattgcctttaatattcttggtgaataagtcaattttgttctagcgtaaccggtgtgacctcattttactagttcattagcttgataaaataatttctgactattctaatgagtttgattttttcatcagggacaaagacatgcggacattgtgtactttttgttggcaaaaatatcaaagttagtttttttttttgttgtttaaaaaaataaaaaatatgtgtgaccgacattgtcaattgagctttcttaaaaattctttttatgtttaattatttgcttagacactatttttgctcttaagtgttgattggtgctttttatgtatctttgtgtgttgttttgttcgttctttgcaatttaatatgggggcttatttttgaaaaaaaaaatcaagaaaaatgggggcataattttttgattttttcgaatttttgggctattttttcatttatggaaacatgtctttattgcattttatctattgtgttttctttatttttgttgggaatttggtcttatttttttgtgttgttttaggaaacttgtttttatttaattaattattttgtggttttttttttggtggcattttcggttttggtttggtttttaatttcttagattttgtggggatatgttgtttcctttttccatttatggtaacctttgtccaatttttaaaatatctttttggtttcctattttctctcctcacgtggtgaacaaggtaaggaaattactttcttttttttttctgattattgggtatttaatttgaagtgctatatatgttcaacttcccacttacccatgatcaccactattcacacttcaaaagtctaaccctcttcaagtttgagagtgaaaattttttttctagggtttcaaaagaaaaatggcaaaagctaaaaatgctcaaccgtccaagaagccttctcttggctctgcctctgcttctccgatcaccccacctgggccacctgctcttgtgaccggagttcctggttcgtcatctgctccgacgagaactgccagaaagtcgaagaccaa

SEQ ID NO: 33862 - DNA, 1529 bp, Cannabis sativa
  modified_base (1013)..(1023): a, c, t, g, unknown or other
acaaaattcacaatttattgtgactaaatatatttttagtcacaactaaaagtaaattagtaaaaggtttccaattggggatgatagctgccctctttgtggaatcgaagttgaatctatggaacacctttccctttcctgtaatgtggcttttcacctgtggcggtcctctccttggggtatcttcccaatttgtgataatggggttcggatgtgggactgggttaaattcttgtgggatctcaaaatcaaagacattaactctgaggaagtcttcctttatgcttcattaattattgacactatctggcggacgcgcaatgacaatgtatacaataattgtcctgttgatattaagaaatgtattaactctattcgtttatcttttgcagatcaccatgcttatttgcttgcccctcttcgaatacggaggatgtctggcgtcccccccaggattggctgaaactgaattgtgatgttagagtgggactagacagcatgtgtgttgcggtggtcgcaagggatcattttggcaaggtgatctgggttattacatctaaactggaattttttgatgcactttgtggggaagcggcgacttgctgtttggccctggagacggctaaggatcgaggctcaaagtttatcgtgattgagagtgattcgagggtagtgatcaatgctctcaatgggaaggagtcccgctgggagcttgagaactatgtctcattttgtgttaaattctcttcttttttttgttggttgtatttttgaacatattagtagaaattgtaattttgcagcccataatgtggctagatggacgttctcccaccagaggtttagttgtattccgatttcctctatccctgaataactattttgtaatgaccgtgtggtctaactgatattatttatatataaacacttttcttaaaaaaaaaaagtaaattaatgacaatttgtatctaaataatatgttttagtcacaagtaactttttgttgtgactannnnnnnnnnntagtcacaaaaaaattatgttatgactaaaaaattatcactaaagatagtttcttttttgtaatgagtgattttactgtagctcttggttgggttaataatcctcactcagatgatgtatttcatttaattcttttagataaatttttattttttattagttgttgttggtggtaaattttttaatgctattttgccgtctgtgaatggcgttatccatacattggcaacctctgttactaggttaagagagtgtgtatggatggacggatgcttgtccacaattttcaagttcttttgtaacagtgaatttatcttaataaattgtaaattttctttaaaataaaaaaagaaaagaaaagaaaagtcaaatggcatatatagttcatatggtgcttctacatgcaccaattaatagttgtagttttaattagttttgtaaggccaatgtgactagttttattttgtacagttattgtggctagttttgattttgtaaaaggccgg

SEQ ID NO: 33863 - DNA, 1651 bp, Cannabis sativa
  modified_base (736)..(742): a, c, t, g, unknown or other
acaaaagtttgaaaagtttgatggaattaatggttctccccatgagcatttggcctatttcacctctacatgtggtgaatctacccaatcagatgcactattaattagacaattcgtgcagtcgctaaaagtggcagcatttacctggtacactcagttacccctagaatcaataaatacttgggatgacatgcaaaaagcttttttggcacaatttgtgagctcaagaaagaccataagtctccatgacctggtggaaatgaagcaacgaactagtgaaagtgctaatgagttcataactaggtagagaatctcaatctccaatgtccagaaaggatatcggaagaagtagcggtttcaatgtgtgccattaaccttaaccctgaggtggcaacttttgttggcacagcagaacccaaaactttcaatgagctcgtcttgaaggcctggaatgttgatatacaaatttctcgacaaagggaggcaaaccctcactgagattcgaaaataaaaagccattcaagaagggagaatcaatggaaacttttatcaatactggcaacaaagataaagggaaggcacaggagccacaaaagaaattaactagcaaagaaaggaaggaagttaagtattcattcgacaatgatgacgtcgaccatattttcgatgagttgttaaaagctaaggcaatacgactccccgagctgaaaggacccaacgaagttggtatgacaannnnnnnaaattattgtcggtaccaccaaattgtgagtcacccactgtcggattgctacatccttaaaaacattatcgaaggcatgatcaagagaaaagagattgagactgactcttctgttgggaaagcgacaacatatacaacctccttaaatgagaatgaccaaataccaaatgatcccacacaaaaggacataatttctgtggcatttgaagttgacaaggaagttacaatagtccaagcccactcagacatgccaaggtcaggaaacccaaacattcctacattatatgagctcatgacagagcctaatctagaaatttgggaggactggtatgattgtgaagaggattcagaaagtacatggcaaacatgtactcgaaaaaaaccagcaaaaattccacctcggaagccatctggaaactctagagttatatttcagagtaaaccagatgtaatggaccaaaagaataagaaaagaatcagaaagtaaaaggtcgttcccaaaagaaatgaattcgaacaaccaagacgaaatttagtaactctggaggagtttttaccaaaagagttacaggacaaggcagctggttgtaatgacagtgtgtcagattgctgcatgactttgttaacaaaagaagatcctgaatctacctcattcgaaagtgaaaaagaggtagatgaaattaccttgcaagatatgcagcagaaaatttgtgcaaagaaggaaaaagaagcgaaagagcttgaaaaagttaaacaagaccttcaaaagtcttcaccttcggccaaccaagaattcgttaatgataatggaagaggcaaaagcactggtgaagaagaaatgacgcgagcaaaatatgatatattggctcatctaaagcgcatcttgttggtattattttaccaggatct

SEQ ID NO: 33864 - DNA, 1118 bp, Cannabis sativa
tgatttggaaaacccgcaatgacaaggtacataactcgactcagggtaatttggtgaatgtaattaactctatctcccattgttatacagattatgcctcatacctgttcctctcggttcttcctgtggtcacgccttcttggacgcctccgccgaaggactggatcaaaattaactgtgatgttaaagttggtggagactccatgtgcattgcgaccctggctagagatcactcaggagcggttgtgtgggctgttacgtcctgtcttaactttagggaccctctgattggtgaggcagcggcgtgtcagcttgcgttggacagggcgaggctcaggaagcatgactacgtcttagtggatagtgattcagaagtggttatcaaagcactgaaaggaatgcactatatttagaatattgataattatgtatctttgtgtaatcaactctcttattattttctttcttgtaattttacttttatatcccgcgtttgtaatttgctgcccataatgtggctagataggcttttgcccagaactttacaagagttatggagtcaccctccatacctgtttctatcctttgtaatgaccgcgaggtctaattttctttatctatgcaacatcttattttcaaaaaaaaaaaaaattaattttttcaggtcgttaaaagttctcctcaaactattaagattgtttgatttaagaacttttgttcgatttcactaaagaaaatctgatatgtataaaaatttaggagacgcaatttggtacatgttaaaattccaagatatgatttggtagacatttaagtttagggacacaatttagtatatggacaatagtcacattagcaaaattgaacgaaactagacaaaaattcttaaatacaaaaaccataatagttcaggaagaattttaaacgatttgaaaatttaagggcataaaaaaatcctaattagtcttattaatatagtaaagaatatttgggggcattaggtaatatttttgttcattaattttctaatcacaaaaataaaaataaaatttatgtttttaagattttatttttaaaaaacaaaaaaagtgttctatgaccacttttattttttaatt

SEQ ID NO: 33865 - DNA, 1501 bp, Cannabis sativa
  modified_base (1465)..(1469): a, c, t, g, unknown or other
cgcactacgccgagaaaaccctaggtcaagaaacccctaaagctaaattttcaattcttaaagttctgctagagccattctataaggtgccttagaaattggttctactctagatgctagatcgataatgaaattgatttctctctgcggtggtaaaccctgaacttcatcaggaaaaacatctagaaattcctaaaccaccctaatatcttctggccgatctgtctcaggtcatgtgatatccaataccacttccaaaaatcttaaacatctaccttgtaataaatctctagctgttaatactgaaatcactagaatctaggatctttgaaccaatccaacaaaaacatatggttcctcgcccttgggttggaagatcaccatcttccgttttagtcaatattagccgagtacttggataagaaatccattccaagtataatatcaaaatctgctaaacctaattctaacaagtcagcactcaactccttatcctcaactcttatcggcatagacctaatccaccttttagagataactaattctccactggacagtagggttccaaaccctttatcataactatcatacagtctattcaatttactaaaaatcctggctgccacataagagtaagtggccccagagtcaaaaaatacagagaagtaagagttgctgaccaagagctgacctgtaataactgaggggctagcttctgcatcagcctgagtaaaagaaaacacccttcctagagcgggtttttctattgacttatgttcttcattcttaagctgcaggcattctcttttatagagtcctggcaacccacactggaaacatcctttccctctacactcacctagatgatgcttcttccaactgggacactccgggtaagtgtatcgggttttggaaccaccctgacagttgcctcgaccctggttccctcaaaacctcttattctgacttgagccaccaggtacagatggtgcctttctcttttctggtcagtggtcaagtcactacaacccctaccataaccaaaggttggaggagtaggggctccaccaacaacctgagtccctgagaactcctaggtgcacacaactgtaccctaagctcgtagtaccttccccaccatatcagcatagatggtgttcttgtcagtagtaatcacaagatcatcttttattttcaaatttaatccatccaggtacttttatttcttgctgaaattggttggcacaattctcgaggccaacctagccaatcgatctaactgagttgtgtattcggtaacactcatattctccttctggatcagttgggtaaattcttttctttttgcacttctgaccgcttcgttgtgaaactttgcattgaacaactcttgggactcttcctaagtaactgtaataaaaacacgagtcagggacaccatgtcccaccaaaccagggcatcctnnnnnaattggaatgtggcacaggccactctgtcatt

SEQ ID NO: 33866 - DNA, 1677 bp, Cannabis sativa
  modified_base (203)..(212): a, c, t, g, unknown or other
gctccaaaagacaccaatagacgagataatgctaactttaaagacctgaaacataggctaaatataacctaacaattatcatcataccatagtccctaggatctctatatgtgtgtacattaaatcaaaacaataaaagatataattttagaatacctcttgaaacctattagggtatcctcaaaacttctcgtatgttgtannnnnnnnnncagttgatgaggaattaacaatttggactcacgcaagtgtcttccaaatcgatccaccacacacaaggaatagtgttggctattagggcaaagtgtataacactgttcttgttgaggtctcaacacatgagccagaacaattgagagaaaaaacaatttcctttttctctagatagattttaaaatttactgtgtaaaaataatgttttgatttctcaaatcagactcctatttatagtagttaaatcccttttattcaattattatttaattgtttatatgaataaaaatctataaccaaattgagttagtgatgtttatgaggaaatctctcaactacttgagagaatatctcaacaatcttgaagtatctataaccactttttaaattaaatatttacttaattaaattaattatataattaattaacctaaaaagataaatccaataaggatagggagaagctaggcgccaaccactgtttttaggacaaggttggtgtcttttgttctgacaaatcttgtctcaacaaattttgtcttaacaattttggtctttttccctatttaattaattagaaaaataattatttatttattacaaaaataaataattactattttgctaattgaaattagattttctttgaacatctttatacaacactttatcttcacccttgacatagtttcaagttaacgattcagggaccatggacttataattctaagcttcaataaatagattatttattgagtctcatcaacaaaataatcccttatttattaattctacgattactccattataaatatggaatttcactcttagtaattatagaattatatttacagaatttaactgcagtgaccattaatataatcaattcaagtgattagccctccatgtgttggttcgtaattagttttggtcaaaataccattttaactttctaattacttctttacctttagttctattaatttactagtggaagtataattcaagatcacatctaaatttgtgcacaacattccagttccaaaattaacacttaaagggaaccaacagtcgatccgttagaaaagataggattccataattgtacatcatgtttcagccatccatgttagattctcaaaacagatgttgtaagaatcatcttctcggagaaagttcaacgagttaatcaaagaagctaatgacatgaaaatgagttcatgataactaaggatttaggtcgatctactattgaccatcattatgatataaattaggtctttataataatgatatgttaaaaaaaaactttattcatatcggtccttgtcatatataatctctattatatacagtagcttcactttgatgtatcactacattcgtaatctgaaccaagattacttgcaccgaagaataggcattagtgaaccatactagcaaccattgataatgacttagaaa

SEQ ID NO: 33867 - DNA, 1044 bp, Cannabis sativa
acaatgaaatttggatataatttaaagaatattactatttattgtgataaccaaaatactttacgtctcatgaaattttttatatcatttacatcaaataaaactttatttcattcgagatataataatgtcaaaataatttcaagtgaagaaaatatacattcgtgataattctgctgatatatttactaagagtacaatcagagataaagttgttcaatgtttgaacctactcaacatactagattgcaagagttctcactggtacaacttttaattcactattggacataagaaaatgtatcaaatcaggtggaattgttgtgaatttgattcacttaccggatgttcacatattctaattttatgtgtccgagaatggtagttaagttagttggtcctcatttcagctcaatgactccaactgtccatctacaactagacactataactctacattcaagactaattcagcacctagatatatctctcacctgtcgaagaaatttttgagtgaagaagggttgtaaaaggttccttgtgtgtttgatcaatattcctcagtatgaggcattgagtaattgagttgtaaactcttgttgtagtgagttgaatcatcaataaagaatcattctttttctctattgtttctcaagctaagttttcggttttatgtttaatgctactaattttgattcaagttgattatgtttgaattatatgtgttttttattactgttttatgttctaacagtgagattacagtggtttaattaatccactaaaatttgaatttcatgatatctatagccatttatcattgtcagaattggagtacattaactccattagattgttgaattaaataatttaaatttaaacgatatcatttttcatttagcaactaattaaattaataataaatctaaacataaacttgctgttctcatcatggttagatagcaatatgttttttaattttattactttcacatactataatcatgtatgcttagtgttcttttaggctatgggtatgtggtt

SEQ ID NO: 33868 - DNA, 1377 bp, Cannabis sativa
tgaactttcaattaatcgggaaaacaacatggtcaaccaagtgccatggagtagcacataacatctttttgccagtaatatattgggtcatagtatgattcagtgttaaaacaaatatttcattttgcttagcaacaaacctatcatacagatttatgatgcaagcactaaagaggtaattagttgttgtaacctttaattttggctcatttgcatactttattttcttgcgtaagtagtagaaaatgatatcaatatattgaaaagtaaaattgagaaattattaaataaacaacttaaaaacaacacaaaacaaatgaaaatgtaataagtaaacaaccacaaaataactgtaaaaacacttactaaagaagtcaaaaagttgttatgataactaagcttgtgaaaccacagatcttgttttccacttcctcaataccaaaatgaaagggggagaaaacttatcctctcccttgagataaacattagttgttttcctgagaataaaaaaataatatatatattaaatacattaaatctaaaactaataaaaatcgatatgaaactaatccataaaataaacaattacactgatttcttggatctaagacccagccctagccaaacatcaaatttagcctccaaagatagatcaataggttcaccaattttttcatccaataaacataagctcaaaacatatctcacaattttgtactcagatccatcaagagattcaaatattgaatctagattagcatcaccagatcctagttccataaatggagactttaaaatagctcttttctttctatccctctttccagaaactaaaattggagtctccttgaaaataataatatcacaaaatcatagcagcaagaatcaccaacaacattgctaaaagattgagtctataataaaataagtaagtcaagatatatgtacaaggcaacaaaaaacatgaatgaaaaattattaaaacaaagcccaaacaacaataaaaatactatatcaaaaaatgtaccttctcctccacaccttgaactctagaagacatggtagactcaccaacaatggaagaacactccatcaagaataaaataacttatatcaaactgatcataaagaatatcaaaacaacaaagataaaatcttaaaacaaaccaaaaacaaaattaaaatagttgtttaaaaataaataccattttcttaacagcttaaacaccacaagtcatagtagcaccagtatcaataaaattatcatcatccttcgaaattagatcctacatcaatacacacacaaataaaagaaaaaataacttaaaacaaccagcttctaaattataaagcatggcaaaattgttgggttttttg

SEQ ID NO: 33869 - DNA, 1109 bp, Cannabis sativa
  modified_base (103)..(113): a, c, t, g, unknown or other
tttatttttttttaaatattttttagagttattaagagtgtatcatatattgaattggtaactttcgttattgatatcctgaaattattcaaaaaaaaaaaannnnnnnnnnnaataatataaaaggaattaattaattattggtatgaaataatagagtgatacataatgaaaaaaaaatgtctgtatgtacagacgttttttgtgactctacctaagtattatccaataattattattgtattttatgtatattattttttctctaacaaaattgacattatttacataaattagtataaatatgtaaactccccatatattaattgatttatatcatgaaagtaatattatattattaaattaccaataatataacattagaaatcttaaaagcactagtggtacttattactatttaaagatggtgtttcactattggtgtaattaaatattaggtctgacataatttaatttaataattattataaaatattactaactatttataaaacgtgatcttttaagtgctactaaacaccattaatacttaaatatatcatcattgggacagtttgataaagattttattggcaacattagtgctccaataaaattccaatatttaatattaatttgcacattaaatatcatacatgattattgactagtataacattcttcctcctatacataagtaattataactaacaatcatatgttatagacaaacaatcaaaggagataaaagtatcttaagcaaataaaaagaaaatcattaaagagtactaatattatttaaaatgttatattgtgatttgttcaatcacaaatttaaatttattagttattatataatcactaaattcttattactttaagacgttgttttagagcacccatataggctgttttactttatttttaaaaatattttactaatttttatttttgtattttatcttacacatttatattatatcacatattagtttttttatatcatttaaaaattatttattataaatttattttaaaaagaaataaataaaataatactaatatcacacggatattttaatttctttttaaaaaattaaggctattta

SEQ ID NO: 33870 - DNA, 1833 bp, Cannabis sativa
gtgaggacaaagcatgctggaaactctcgtgttggtttgtaaggtcagtcgacattccatgaagcacacagagtaacgtactcgtgtataagagtcatcatttcgtgggtgtaaggcccaatggacacttgaaacagagatgttaaatgtttggtgtctaaattagtgtttaattttgatatgattggaatcaaaattaatgaaaaattgagttgtgtgaaaattaatcttttatgattaaactttcaaagcttaagtacttaaggagaaaaatagccactttaaaagtggacacgatatttggctaacatgactcgcttggaatcaaagtgtgaggttaacaaatcgcttaatcttcatacaagatgaaatcatgaattttagagggatgagacctaaactcccatagtgttttactcattgatggtaacttatcttaacactagtaaaaatctagtgttaagttcaataagtaataacaagtcaatagagtgaatatggtacttaaattgtcctatctatggatgagtacatgtggtaaaaattagagggttaaaactgaaatttttttaatggagctgaagcttaataaaactcacttaagctaatcaagaagtgtctaaagagttgtgagacacttaaactccacctatatggagtaggggtggtgccacctcttatgagaattaggagttaactctaaaaagtccatgaattagatttgtgcacatggccattaacggtgcaaaagcaatccataaggttcttgagtgaacatagcaaaagtgtgtatgttatcaccggtttgttatcaaggaatagtggttcaatgctacagcaactaaattttttgacaacttcgtggtaattacactaaggtaaaattcaagttgaaagatattttacactatgcaccaatgcaatggtttctaatagagtgaagttatttaatttgggataaggtgaatgagtttcattacaaaatcaactggtaatgaaaggagtagctcattcattttatatatgtaatttatttctacacattagcaatgtgggactaactctagtatcatcaccttagtgtgggtataacaaatgacctttaagagaccaagggtcgaacgtgacatttgaaagaatcccacaaggccaaatttgagaaatttgtgggtgtacacgctggggaatttttagattttaaaatagatcaaaaacctcaacactagaaactgacacacattggtcgaaaggtcccaaatggaggttaaggctcatctttttggactagtcgtacattaggctcacaacggatcacaagaggcttttttggaaatcagatactcattagagttttatttgactattataccatattgaaaaaaatgaagaaagaattttattaagaaaagaatgaatagacagtagtgattacaatagagaagaagggagccttaaataggaatggctcaacttcaaacagttacaaccaaaaaggaaaaagaccaactgacttaatcgactttccaactaacttcctattctgaaaataaccaactaacaaacaagtctaggtgaataaggtgcgagaaatacaatgactaatcagagaagtaagtgtatttcttaatacctaatcttcaaggtggagcgtatatatcatatacatacatcttggaaacatgagaggttaatttaggtaaagtaagtggtttgatgaaggcaccgaccaattgaagtgtaataccccagaattgagaagtggattagcaaaaccctaattagataattatgaataatttaggaattatattattatatagttcaatatatgag

SEQ ID NO: 33871 - DNA, 1789 bp, Cannabis sativa
cttgatttttgtgaatgttgtgttcttggaaaacatcatagactgaaattttccacaggcacacacaacacaaagaaaattttagagtatgttcactctgattagtggggaccagagaaaactagtactcatggaggttgtgtctattttctatctattgtagatgatttttcaagataagtctggatatttcttttaaaacataaaaatgaggcttttttctaaatttacttagtggagaacacttgttgaaaatttgacaaatgaaaaactaaaaactctaaggactgacaatggattagaattttgtaatgatgagtttaaccactattgtaaagaaaatggcatacagagacacataacagttagaataacaccccaacagaatggagttgcagagagaatgaacagaaccattctcaacaaagtgagatgcttgctgttacaatcagggttatcccaaggattttggggagaagcagctttaactgctatttatttgatcaatagaagtccatcaagtgcaaatggattcaaaactcatgatgaaaaatggtctggtaaaccccctgacttatctaatcttagagtatttgggtgtgcagcatatgcacaccaaagtattgggaaattagaacctagggctatgaaatgtgtttttctaggatatcctgagggagttaaaggttatagactttggttttgggaacaaagagggtttaaaactataaatagcagagatgctatatttaaagaggataattttccatgcttgcctattacatctaaccctagtgcatgtgcaaaagagactaatcatgcaggtagcaacactgaggtcagaactggatctgttcaggtggaacaaacaggaaacacacctaaatagaagtaggaagaacatgttcaggtggaacctggggaccaggttcaggtggaacctgatgatgacaacactggcattgttgatgaagggactcaagaagatttgggggattaccagctaaccaggaacagagacagagagtaccaagacctaatcctaagtacagctttaatatctgggatgaagacattgcatatgccttcatgagtgagttggatatggtcaataatgaaccccaatcttatgaggaagccattaaaggaccaaattccagaaaatggaaaggtgcaatggatgaagagatggaatctcttaagaaaaataaaacctggattgtggtgcttaaacctaaagataaaagtgtagttgattgtaaatggctatttaaggaaaaagaaggtagaactaaggaagaacctataagatataaggccaggttagtggccaaaggatttatacaaaaggaaggggttcattttaataaagtatttgcaccagttgcaaaatacaggacaatcagaattatgctaagtctagctacacagtataacatggaagtagactaaatggatgtcactacagcttttctatatggagaacttgaagaagagatctatatgagacaacctaaaggatatacagaaaaggggaaggagaactatgtctgtaaactagtaaagtcactctatgggttgaaatagtcacctagacagtggaataaaaggtttgatggttttatgctaaagctggggtttttttaggagctattatgaccattgtttatactataagggaacttatataaataaagtcatatatctacttctatatgtagatgatatgcttataatcagtaaagaaagagcaagagtaaacaccatgaagggcctactcaagactgag

SEQ ID NO: 33872 - DNA, 2954 bp, Cannabis sativa
  modified_base (553)..(557): a, c, t, g, unknown or other
aatgggtattacccattgatgagtactaaacaaattcaactataaatattaattttaaaaatattaaacattaaattttggcccgatagcgaataataaaagagaaatttaaatttctatgcttaaattagctacttaattaaagaaaatataaaaaaatacttctttttacactatatcaaaaatatgtatatataaaaaatatttaagtaaaactcaacttttttttatcattttttttttgtcgaaaactattttttattattttttcatctaatggaacaaccccggcacatataatataaaaatgagaattttttctaattaaataaaaaaattaatcataaaaactcaattttttctaatattacccatttatgggtaatacccattaaaagtgcactcctatatatatatatatatatatattagagatataaaacggtgacatgatactctaaaatttctttaaacttcttaataaataattctaaataataattaataaaattgtacatttagttttaataaataagataatatatttataatnnnnntatatattaaattatatttttaagtaactatttattataatattaaaaaataattatattagccgtgtgaagagcggctatattgcctagttaaaaaatcaatcttacgaaaaattatactaaaataaagctaaacaacataagcgttttcttgtttcttccagataaattatataatttttaagtgtcataataacatagacctacgtggaattaggatgattggaaatagaaatatatgtttcaatgaaaagatgaggagaaaaagagcattgcccaatatctccggaagttggtgtttggtgaaatcttcaaaacataatatgaagaaagtgtagataataatttgttgtaggggcaataatctaataatctaagttaaacaataaagtaaagtatcatatattaaataaccagcattacacaatcattgttcttaagtttaaccaacaaaacaaactgcttttctaaacaacctttttcaaaagaaacattctaatcacattatctatctattataaagctcatttctcagttctccaactacaccaatgtaaaggtgttgtaattttcttagtcagttttcctggaatctttgagttgtcccctctttcggatcgcaagacaaaaccgcagacgccatgcatcgatgatgcattctggtaatgcatttgccaaagcccatagaagggaatgaggccagtaaggcgtgcagcgaggttcgtaacctatccaacgcatggctgctcgagcatagccgtcagttgatggaacaaagaaggaagatctcttgattgatgccatctttgttgccacatacaatggaacctgcataaaaaaaagaacacctaagttggacatgatagaaaaagtcctaatcctttggcaaacttccaaagcattgtagttaccaaccaaactataatatagaatagcaagcaagacaaagacaaagagaatggacttaataatataaaccacaaaaactcttctcaatttatcttaactgagttcatctaattagtgaagtgattagcaatggtaaatcttcaaacctcaacactattgtttagaattatgagaaaagttagtacatgaagtaagaataaacatgttgtatttcaagtttaaacaatggccaatcatttcctgagttctaacataacatataaaattgcctaactatgtcatccgaatggtgtttcaagttttcatttaaatatatatttttttttcaaaatttcctgcccaaacaagctagtgaaaactaaatgctcttcaactaaataaacataaaaattatgcatatatcatgatgacaagatctgatattttgggtgtctactattcaaagcttttgaccataaaaaccaaacttcaaaacattacctgacactgaacatcgatgccaatgttcctgtactcaacatagagacaccttgagaactgatcaatatatctgaatcaagaagcaaaaacaacccaagatcaacaatcaacaatctccacgaattgaaatttaaaacataaaaaataaatgaaaaatgcttacgcttttgtggcagcataaacagcataaagaggatcagaaggaataacaatggcagcaccagagccaatattgacaatagcacctcgttttctctgaaccattccaggaagaacagcttgagtgacctttgtggtgccttcaacattgaccttaattaaattcttcaaaagctgttcatctacttcatggaagaacctagcataagggtaagatactccaacattgttgattaaaatcccaacatccaaaccttcaatcgtctccctaatcctctgaacaccctcatcaagatcaccactgaaatcaacaacaacagtctttatctgggtcttattaccaaatttggcttgaatcgaatcagaaacttccttgagcttatctggatttcgacccaccaagaccaagttaagccctttacgagccaattgaaaagcaaaacctttcccaataccgtcagtgggtccagtaacgactgcccaagaaccatactttttcaaattcttggcaggtctgagaaaattgacgaaaacccatttgataaaagcgattaagaatttcagaaccgagagagaaccaacagaaaaaagcagcaaaacccataaaggctgagcctttagattttcaacaaagccaagctccatttttttacgtgttttggatctgaataaggctgtctgtgataaatattgagcaaggagaaggaaaacgaatgattgttagatggggtagagtggggttgagatttgaagaaggaagaggagacggagttagcaagaggaacaggggcgaggaagatgaagaagtaaagagattataaggagagttgggtgaagtagatgagcgga

SEQ ID NO: 33873 - DNA, 2868 bp, Cannabis sativa
tataatgtaaaatttatacattaaaactatctctctctttcatcttttttttctttcttttctctctttttttcatccttttttttttctcacacttctatataaaataaaatatgattatgtaacagaattattaatttaacactattttttttttattgtattaaatttaacaatgttaactctaatgtttgtttttcaaagaatataagttaaactcttaaaatataaattaaacctcttaaaacccaatcctaactcttctgccatcacacagtacagacgattggaatgcgacacaaccccctaactcctctacacccaggtattgctactctctcaacctgctcagtaggattatgtatactctgggtgtgaagaattaaagagagaagaaaaagggagagaaaacaaagtatgtttagcatgaaagaatttggagaaaactttatcaattgtattagagaagcaatcgtttatttatacagattttacaggcaaaacgaacttcacagaaaagtaacagaaactgacaaaaaacaaactgaaactaactaactttaaccaacatcagttagttggttatcatcccccctcaaacgaaaaggggaagaagtcactttgagtttgtttttgaggtagtgaaaccggtctttgggcaaagacttggtgagtatatcagcaatttgatcaacagaagaaacatatctaacagaaacttcattgttgagaatctgatcacgaacaaagtgttgatctatttcgatgtgtttgcagcgggcatgaaagatcggattagctgctaaggctgcagcaccttgattttctacccaaataatgggaatatcagctaagaccacctgtaactcagtaaagagagatttcagccactttaactcagcagcagtattagctagagcacgaaattctgattcagtggaagaccgagcaaccacctgctgtttcttagcagaccgggagataagatttggtcctaaaaagatagcataaccacctgtagagcgacgatcatcagggcaacttgcccaatcagcatcagagtaagcttcaatggataatctagctgctttagatagaaacaagccgtgtgtgagagtcccttttaagtatctaaaagccgtttacatgcttcccagtgagtgtttgttggggcatgtatgaattgcgacagcttatttatgataaatgctacatcgggtctagtgagagttaggtactgcaatgctccaacagtgctcctatagagagttctatcttcaaatggagtcccttccttaagagacagtttatgggaggagcttgtgggactagaacaaaccttagcaccttcaagatgaactttcaccagaaggtgtgttatgtatttgctttgagataaggacattccactttcactttgatgaatctcaaccccaagaaagtagtggactgcacccatgtcttttagagaaaaagctgcattaagatcactaataaacctttgtatgagacttggattaggccctgtgattaatatgtcatcaacatagactaggagtattatttgtgtatgacctgaaccatagagaaacaaggatgtatcagcacgagaagttgtgaaaccccagctgaatagagtggttttaagcttgtcattccaagctctaggcgcttgtttcaaacgatagatagccttgtttaatttgcaaacatgatggggatattgaggatcaataaagccttttggttgggtcatatatacaatctcattgagatccccatatagaaaagcatttgacacatccaattgccttacttcccaattaaaagtgagagcaagagtgaggactaacctgaccgtgacaagtttaactacaggactaaaggtgtccccaaaatcaatgcccggttgttgaagatatcctcttgctaccaatcttcatttacatttatcaaggctcccatctgcatttaactttactcgaaaaacccatttgttgtctattaggaccatatgaggttcataaggcactagagtccaagtacctcttgctttgagagtatagaactcacttgacatagatctattctagataggatctttgagagccgatttcactgttttaggttctcgaggtattagagactcaggtagtctatgcttagtggccatgtaagcttttggtttgtagatacctcgcatagatctagtcaccatagaatgtgtccttggtatagttgaaactgttgtattagaaataggaacacctgggatagaatgctgcacagttgctgtagcatgagttgcattagtaagggctgctagaatgtgtgtggcttcaagatttaagtggacactgccttgattgccctgttgtagatgagaaggatgcatttgatgatctaaaccaggagcaacatcaaattgagtaacaacatgttctggtgaggcaattgggatagggttgctgatattactagaagcagtgggagcagcatttccgaatatagttctagcagtatcagcaccagaagcatatggagaagttgctgaagtaattggtgctgcagacctgaaaacttgttgaacaccagtagaaaattgcattgtaggacaagcagtagtttcagatatttctttagcaacagtaggagtattgtgagtagcaggaaataataattcattaaaagcaacattcctagctataaaaattctcccagcagcatatttcataaacataaccttttatgtttgggtgaataaccaagaaacaaacattcttcagatttgtattcaagtttatgatgatgataaggtcttaaatgtggataacaagcacagccaaagggcttaagaatgtgataatc

SEQ ID NO: 33874 - DNA, 1497 bp, Cannabis sativa
  modified_base (959)..(961): a, c, t, g, unknown or other
aagctgttaataaaaccttgaaggataatatcaaaaagaagttagacgctgcaaaaggtagatgggtagatgaactaccacaagtgctttggtctcacagaatgactgaaaaaaaaacaacaaggcatactccattcttgctggcatttggctcgaaggcaatgttgccagttaatattgcaacccataaacgagatttctataatcaagaagaaaaccaagaaatttgagattgtccttggatctacttgaagaaaaacgtactgagttttaaattaccaatgcaacatatcaacaccgagttacgagatatttcaataagaaagtgaagaaaaggcttttcaatgtaagtgatttggtactaagacgagtatttgcaaacacaaaagatgcatctagaggagtatttaatccaaacttgaaaggtccttatgtaatcatggaaaagtaggaattggggtttataaattagctcggcttaacagctcgctaagaaagaactactgaaatgttgagcatttgcgaccctactaccagtaaactcacaaaaatgttgtaatctctttttgatgtaatttttaaaattcaattattattaataaagttgaagtattattcaagtaattacaaagtttgttctttaaaattacttgaggggtatatatatgtgtatgattaactggaatttatctagaaatacatgatatattgcaaacctactccactttaaaaaaaattccaaaataattgatcaagattgtctatggacaatacaaagtcaaaaagtgaacctttatcactagaaaaaaaaaatcaaagtagcagttgtaaatgagaattagctcataaaaataacactatgctacatgcgaagctgaatatctaacagctcacatttgataggaatgtattaaatgaggtactaagatgccttaaaaaaatacttaacctaaggtgtnnntagaaggcttaactattcatacaggcaatcaaaaatatacaaagtaattcacaaggtgaattattcaaagtatgcttaagtttgcttaaatcagattttaactttacgctatgtagaactgataaactgctcgcgaataaagagcatggcaaacgataactggtcgcgtacatagtagattattaactacttaagcaatatcaaaaggaaaataagatcagtggaaatgctcacctaaagtattttaaatttgatcaaagtataattgtttaagttgtgaataaaaatccaaacaaacaaatatattaagtttaaatataaaaatgcgaggcaataaataaaagataaaataaaagcaaagttggccgtccaacaatgcaaatttgtctttacaaaaaagttccacaagggacaaaccattgtctcggccatatggctattttcctaaataatgaaaaaatatagttaaaaaccaagccacctacatagtaggagacttggatgatcttcttcttctccctttgcttcggcctcct

SEQ ID NO: 33875 - DNA, 1642 bp, Cannabis sativa
  modified_base (544)..(547): a, c, t, g, unknown or other
  modified_base (1590)..(1616): a, c, t, g, unknown or other
tctgttaggttccatctcattatttcgtttaaatgttaacgtgtccttgcaaattaacaatttatcccctaaactttgacaactatcaaactgtaactcctctaaataaaaataagaaagattcaatattctttttagtaaattttaaaaaattaatttaaatcttaaaaaaataatttaaaataataaaaaaaaattaaaattttaaaagtaattaagagattttaaaaaatatattttttatttgaaaatctatttagatttaaaaaaatatattaaaaattcaatatttgtaaaaactaaattttacctgaataagtttaagtctattttttctccaaaaattttgatttgtttaagtaaacataccatctttttagtttcatttctatttttttcaaaataatttttatttttatagaatttttaattattttttttattttttgagatatgagtttataagatacgtttttataaataaataatgtttgaaaatattttttaggaatagtttaagttttttaagtaaaattaatatttnnnnattaatttaatatttttatcaggttttttaataatttttattaattgttttcattagaattaattttttgttgttaactcgaaaacttttcctggtggcgtggacattaatatttgacacgtgacaagaggaatgatggcacggagttgagcaattcatagtagttgacctgggtggggaccctagccctgcgcccaggttgactttgggatctctgagatggaagttcgaacttcaataacttgaatccaactcactatctttcagtaatttgtaccatgaagacatggagcaacctaatccaagccccgagagctacacgaacatgcaacctagaagccgacttgggcatctaagatttcaatcgacgccccattgacatatccaactaaggtttcagttttcgggaccatcttagtgaaaaagggtcaaaacatgcattgagacatcaactagacatatttgaggcatcagaattagaattagagcaagttaatttttgagcacccgggaccccgagcacctaacacctaagtttatactatgttaatatgggcaccttctaagtatcacatcaaatatccgacttttgcatcttctttttcttcatcgaaaacaggggaaaataggtccttttggagaagaaactacacttcttgagtgccaaaagcatggcccagtgcccaagttgacacttggggctggctctgcgcccatgttgacattttgtcaacctaagccattttttatggtgttttccaagatttctttcaagcatcttctccaaagacagaaaatattgagattcaactatttatggggaccaaacggaatttctagagggccataactaggacccaacgcccaggttgacaccttgtgctgggcccagcgcccaagttgacattttgttaacctggattgtttccaatcaagttcaccaaatagtatttcaagatttttttttgtcattagaaataatgaagatttgagcaaactcgagcccttagaaacggggcccatgttgggttttgtgccctaannnnnnnnnnnnnnnnnnnnnnnnnnnttactaattaatataagatcagaaat

SEQ ID NO: 33876 - DNA, 1947 bp, Cannabis sativa
tcataaaagtgtaatacattaattcattttggtcagtgtggctactgcccaaccatggtgatcctatttttctttttaactttttttttattcaaaaaattttaattggcttaatattacaccatagaccacttaagcaatcaaattgattgttaacgttaaagatggcctataaacgactgtaatggtatagaatgaagagagatctatacgacataatctcccataataagatttctcatcacatataagtagagatgaaaattagacaattaatgtagagggaatgcagttactacccccatttttgctacctatttatgctcccatctctgttccattcccgtctagttactagcggatttgaagtaagagaatacccatcggttatggagaactatcgggtatccattaacgtaaaatgaaaaaaaattaattaaaaaaaacttttaaatttaaattaaacaaatattctcacaaatattaattatgccttcataatccatagaagataaaagacaaaattggctcaaaattaaaaaagaaaaaacaacataaccaagaggagataaaaaataaatatgtcttaaagttttttaaaaaaaaacaaaaaaaattcataacccaagtatcatatcatagtctcatacctctcaagtctcccaacaaattaaaaattaaataaagatgaaactaaaaatcgagaagaaaatatatttatatttgtaattaaatcttcataatttaagcatatgatatataattttaattaattatggatgataattaatataattttgattaccaatgatatatatattatatatacgttaagaataaaaatgaaattatacatatatcgaagtcggatatagtgtggatagtattatctctatttttgcttcgggtattaacataataacattatccctcaccactaccccattaactaccaagatgggaaatttccgccccattaaagacgggtctctttaattatctatccacgcgaaataaattttcatctctacatataagcatgttaactggtttttaatttttctaattatacttaaattttaatttcttcttagttttaattaattaaacaggaaattatttttcttattattatcgaactagcacacatcgtgaaggaatagaaatcttaaagaaaatataaattttattttcttactctttcatctctttccaagattttgtacagtgttttcagttgaaattaatacttaatattaaaagatataaagttgatgaataatctagtacaaaattttaggatttaaaatagaaaatataaccttttcaaaaaaaaaaaaaatagaaaatataaatttttgatgatgcatttggatgtggaaatatgctctctatgtaataatgactagatctagtttcttccttatgtaatcattttaaattattattcttatatataatttccacctatacttttcattatttatattccatgagtactatatggggacaaggacacaaccacactagatctcctcaatctgacttctgaccttcttcacatccaaattaacacagatcactttaataatatatatagtaaaacctacataaatcctatcaattaaccacttgaggctagctcaagtggccatagaggatgcgtgtgtattggaggtcttgggttcgaatcccaggttatactgatgtaatatataaacgtttaaatcaaaaatacataaatcctatcaattagggtggcaaaacgggtttcgacacggcacacgaacacggcacacgaacacgaacacgacacgaattttatgggttagggttgggaaaattagatgcgggtcaaaacgggtcgaaataaaaacatatcaaacacgacacgacccgcttaacacaaatgtgacacatttgacacgatttttttaaatataataa

SEQ ID NO: 33877 - DNA, 1602 bp, Cannabis sativa
cccccccccccaatatattcattaagcggtttgaatttctcataacattatttgggttgtattttttgtcagtttattcaatttggtttgggtggtttgttaatttttttgaaccctagtctcgactcataacttctacctttgtggattcaacctccatgattgaggtaattacattgtatatccattttactaacatattttattttttaccattatttttatattttttaagatatactcacttttataaatgatgtcccaattatagcctttaagttaatgtaaattatgtgctagacttaagtgaaagttgagggtatattggacaactcactcacaaaagtcggtacattttaatgaaatataatatgaatatatttttgattaatagatacaaaaaaaagtattcatcaacttatccctccatgattgctagtttgctattacttcgtggaattagctacacaaccaagacattgataccatattatttactctattctttaaaatatatcataaaaattcaactttttatattttacaatatttttacattacatcatacatcaccaaaactctaattttttaaaattttaatatatttattcatttcaaatatataatattaatatatacacatatttccatacaaaaataattattaaaacctaaaacaattgataaaatatgtttaaaacaatgaatagtattctataaatgtaaatcatgaatagtaaattttaaataaactttaaaatgaataaagaacttaaaacatttgctatagcataattttagtacaattctttaaatattttaaaaatttctctattttagaatggctgttgtaagtgcgctcaactccaacgtgtctttactcagaattcatggagattaatgcatatttaaagagagagaatatttggggtaaaaaattaaatatgtataataaaaacaaaccaaaaaattgccaagattaggagaatgtaataaaaaatcatggtgtaacgtgacattaaaatttgtgcaatttgatgtggccagagattggtgacgcagcttgagttttttttttttttttaattttacccttctagtttgatgaggtggatagggatgcatggataagaaggagaagcaataatgcaatggcatatcatacatcaattcatgcaaggaaacagtggactgtaattggtttactcaaagtccataatgaaaccacacttcactatcacaatgctctaacacaaaatttggtaaataaaccagtaattatctaatattggaattacttctttttttcccaataaattcttatgtctagaagatattagagaaaggggtaaaaaggaaaaggattgatcgtagatgcctttttaattgtacaaagtcaaattatcatattcgattgagtaggcgaattctaaaataatattcatacaagaaaatacctcagtgtatatattccccaatactaaagaaaagggagaataatatcattgaagaaatatataaacttattgggtcaattctatgtgtgaataattttgagcttaataagagaaaagggaagagttaccattttccttatagaaa

SEQ ID NO: 33878 - DNA, 1742 bp, Cannabis sativa
  modified_base (126)..(137): a, c, t, g, unknown or other
tactaaaccatgctcctcagacattgatacaccaaatcatgcccttcgaactttgaaatgtactaaataatcatatcctttaaactttcatccatattagacttttttactaaaattagacaaaannnnnnnnnnnnaacaatctcaatagttcaaggggtatttttaatgaccttaaagttcaaggggcatgatttagtacatgtcaaagtttagagggcaaaattcataattagcctttaaataactgatgtaatgtttgaattctgctttttttaaggattaacattacacttttttagggtagttgaaatgctattaaatgacttaaaaaatctaaaactttataacaaatagcataatcattgagattaccttttctcccttcatataattaatctattccaaatagccctttacttatgaagagacacaacacttaaatcaaatgatgcaatttttttaatcagcattggtgggtccagacagtaatagaattaccgcccaaacattattttcttagaattaatttataatattttagattgttagagatttataaattacaacttaattgtaaaaacaatataaagattaaaataaacatataatatacaatataaaaattaaattacaacttaattgtaaaaaaaatataaaaattaaaaattaattacttaaatattacaacatatatgtataatatataaggaaagtagaaaaaataaaatatatataatatacaacatataatataaaataaaaaataagatttatatatacactcactcataaatttaaatgtagattagtgaggattactcttacttgaacaagatattatacttttgttcaaaaatcttatttctccctaatctataagcactaagagaactctcatagaaataactagaaattattaagctttttaggatttctaacaaagtgctttgttgatactcattatcataagaacctcagacctctttatatggtgtttaaaatattaatatttaaaattctaactcataatctcctatggatgttataaactcaatgagagtaaaatatatgtaacttatgcacacattataattcctataacatcaaaacttcaaattaagatctgcaaaacgtttttatacactaaatataaatgtggaggttacacatagtaacaagtaactatggcatatgttacaaaatgatgacaactaatatagattgttatatacacacttattagtgttacacatatctatatattatattatttataaaacatataacacatctcattttacctcccaaaactctctgaagctctctcctccgacaatcccaccattaccattctctccttctcgtctttcatctcttactcttgcctctcctgtcatactgctattaatataattaagtatttgattctacatataatttaatttaatagctattataaaatattgttaactatatatttgtaaagtggtgtgtatatatagacattactattgcttaataataatattctttcttaacataaaatattgttattagatactaagtggatgcagggccggctctaagtataggcggactaggcccacgcctaaggcctacttattttaagagtccaaataaaaaaatacattttaaaaaatacatgacatatttttttttaataatttttaaaaatactacttatttttattgtaaaggttcatttttttttttttttt

SEQ ID NO: 33879 - DNA, 4797 bp, Cannabis sativa
acaattgaacaatttactaatcttttgttcaatgtttacaaatctcgacctatacagttgaactctactctttatagacaagtgataactttaatattatttagtgtttacaaatctcgaccataaacagtcggactctactaatgacaattaaactctttaaaaatcttgaccatatacagttgagctatataatttataatggtcgagctctatacattatagtcgagctatatgatttaatatggtcgagctttcatatttactttagataaaactatatattttataaatgttataatgtctattgtcacacttctactaataaagaaaattaataatagtcttgatgatttaatatatttaagaaaaaattgtgtttctaaaatattattgtgacatttcatatttactttagacaaaactatatattttataaatattataatgtctaatatcatattctctactaataaataaaattaataataatcttgataatttaatctattttagaaaaaaaaaaaaaatcatgtttctaaaatataattgtgacatttcatatttactttagacaaaaccatatactttattaatgttataatttaatatcatatcctctactaataaataaaattaataataatcttgatgatttaatctatttaagaaaaaattgtgtttctaaaatattattgtgacattttatatttactttagacaaaactatatattttatgaatgttataatatctattgccatattctctactaataaagaaaattgataataatcttgatgatttaatctatttaagaaaaaattgtgtttctaaaatattattgtgacatttcatatttattttagacaaaaaccatatatttttataaatgttgtaataattattgctacattgtttatatttcataataatcttgataatttgaatctatttataaaatagtctaatatctattgtcacctctaacctttacaaaatttgataaatataaaaattaatttgattaataattatgaatctcaaccatgaatggtcgagctctactcattacagtcgagtcatataattataatttttactaatctcaaccacatatagtcgagctcaactactctcagttgagttattttttgaaaatttgattaataattataaatttgattggctccaatcttcttatacaatttatccaataacatctcaaatgtagtactcgaatcatcatcgacaattatagatataacttattttttggcgaccacttatatgacccatgttcatccttccactctccatcgtactgaacatagattactattcaagtcattactatataaaaatagatggttgatattaaaaaatagttaaaatatattgatgttaaaattataattaacaagttcaattttcaactaaatttaattaaattttatcaatgtatctatcaaagagtttaacaacaattgagtattaacactatcttgaccatgtttggtcgagctagttgagctctattaaaattatcatgtctattgaatgtcactattttaagaaacatcgatgaaaaaaatttaacaattaaaaatataaatcgggagcaaatctagttgagctttaccgtaacgtctgtcatctcaactgacaacagtcgagctctactaaaactgtaatctcattttacaaatgatacatagtattagtttaggatactaatttttgggtttattaagcatgaaattttaaatttcctaaatcacacacgtggtatctctataaattagggtgttacagtcttattcttccaagctccttaattggaatgttacagaatctttatctcagttgttaatgatgttgcgaagtttaatatttgtaatttttctctggagttgtgtaaacaacctagctggtgaagctagaatcaaattctctggtttgagaactcttgttggggagggacaccccctgttgatcccattttgtttgtcttttatgaacgttgtctcttgcgaaaaaaataataacaaatatgaaaataaaaaacagcacactacataacaattcaaaactttaagggaccgtgcgatcaaaattttacccatataaaaaatggaactaataccataaaccttacggccattaactttgtagttatgtctctgaagaaactagtataaataaataattaaacaaggcatagatactagtcgtacacgtacatgaatcgtatggctgtcgttactcgtcgaccccaaaatgctccagggaagtaatcaaagtgtgtcacactcgagatgaagagagtttcgttgtccacaacctttgaaccatgacaaggcttttaatatctgcatctcattggatggaggtggagtttccatctgcaacccaatactgcttgacagcaaccaaaatcttctcaggaactaggggtccatcttcatggtcaaccattttagtatcccatctcatccctccaattatctttttcaccttaattagggtatcaacttcatcccggaaaattactgcaccttctggtcgcaaaatcctgtccatctccagaaggatgtcctctgcattgcatctgaatttgtggatacataagttacagaagcaaaagataaaagtgcaaatatatgaagaaaaggaaaattattgactctatattatcaaggaagatacgatcttaagagccaggcaccatatgattatccagcaacaactaaattacgtcacaactcacaaaattcaaatattagatctgtccatcatattcactttcagattttgataagtagattctttaatgaacactgctatgcacacaattctacttggcctgttaagtgatttctcaggcctgtactaacaaaagaagccagcctagggttcacctttctaacttaaggttgatcatgtctgaaatgattgacatgttgagcaaaatcaatacttgaaacgtgtaaattgattgaagaatacttacttgtccttgtatagactgaaaacaccattggcatggatgaggtcatacgtcctcgggtatgtggagaaagcttcacacctacaccagtcataccagaaatgaaaaattgttaagtgagtggatatatcctctaaaaggtcggtccctttcatttccctaaagttagtgacaggggaaagaggcaatggacacggtttcattgttattttattctcatgggatgagaaaattgtttccaagtaaccaaactttagttcaaatctaaaccagctatcattaacagaaaaaaggtatagatgggaactacattattttagacaggaccgagattttagaaatacagtaccagtcatgatagatgccaatcaaccctcgttcaaatatgacactcagtgtgtttttctcagctatggtaggcatcacattcataacccacagttttggggagtgaattgctgcagcaaaacttcccaaaccagcattcatatccattatattgcggtaccttcctgtgtcaagtagtttgttgattttcttataagcattgacatgcttcctccatgttttgttgtcctcctcgtaatcctcaacagaaacaccaggaacagatccactagaaattctaggtggaacagaatgaagtcttgctgggaaaggcttcagttccccaccagcaacctcatccggactgtttacttctgggtatggagttacacatgtctccattgtcttatacctaataatcaccacgaataagaaaacttacatactatcatattactgaaacggaaatcaaacttataaattttcaagtgagaatttggaagctagctgcttaaggattgggtaaaatgtatgtattttgaactcagaccaaaataatgcttgggttgcatgtgaaagaaatcataccaggcatcatctggatcagcagagttgcagagggtagcctgtctgcttctgcacgattcagcattcaccctcttttgccaaacagcaatttcacccttctcatacttcttttcccagcagagaagctttgcagtttcttcaatgtttctctgttcctgctcaagttcttccctgggacgctgccatgatctgtaattcgccttccagttgatgggaggaccagaaagcacccaataacctccaggcctaagaactctgtcaacttccatcagataaattccacctgcaaaaataagatacaaatttaatttaaaatataatacggctaagataacaacatgtcttattgttttaattttagcatatacaatcctcaccatttgctccccatggaatcaagcaccgagaacaatgtgccatgtcaaatgctctagatggatacggaagctttatagtacccagaacaccaattacagccggtacacccctttcaagagcgaattgtacctgtgcttcatgtgaatctcttggggcaaaagacattgcaataacgtttctactccagagatatgcacccaaactagcaacctaaaaaaagaaagtaccaaccattgtcaatatcattataacgaagatcacacagataaaaagaatgtgaaacatacgtaccccacaaccagtgtccaaggcagtcctaactgtgccattcttaattggtatcacagaggcaagctggtcaatatatttgtcagctccttgaggaaactgagtgccccctccaggaaaccgaaaaacattcccttcatattgaatccagttctgaatagccttctcaacggtcaaactcttataaggtgcatttgcatagggtac

SEQ ID NO: 33880 - DNA, 8460 bp, Cannabis sativa
ttttttttttttgagaaaatcacaccaaacataacattatttatccaattaccaaatccctattatggggttaaagcttggtagctactaagtgtaatgtaaacactacaaattactcacacatgagcaatatgagacaaacacacaacacacacacacacacacaagttcctctttttttttttttttttgataaaaacacaccaaacatagcatttaaacaattacgaaaaccagtaattgattgtaaaagagaataagaataaagaataaatgtttccctttcctatccatccatgtttgtatttacaaaataactaaaattggaaaggaatgagtaacttttcactccttcctactgtaaacaagctcacaaattacaatcctcaaccatacacaaaccaattattcaacaatcagagctagattacaaaacacttattaaaaaaaatggttaatgggatggtaacagctatgatcatacataattacaacatatgacacagaagaaagaagaaaaaatgtttgtcaccttgaccaaagtgccagcatattgtagaacctgtgcagcaagccttccagaagctctcatgcattctatcccctcctcatcatgaacctcagctccactggcaatgccaggaggcttcttagatttcacataaggtggcattagaacatgatcaggaacaggtctacgaggtgagatctttccaggccttaatggtttacgctttgtattgggcaaatcatttctgctaattaaatccataaacaaactaccaatctttttaaaaaggaatatctatgtgaagtttcaatagctatagtagcatagcatggattaccttctattaaataagagattggtcaacccagaaaatgttcttgatagctgcatgtacacatgttttcttcctatgttgtcacaatttgaaacatgagaatccatccaatcattataaatatatcagtcaagacttacatgcacttaaaaactcagactacataaatgaaagttaaatagttgtgtctctctcactcactcactcactcaacatgtatgtatatggttttgcccgaattcatattgtaagaattacagtaaattttagtggaaatagttgtattggtgttaaatactaactgcccttttgcttgaagcttggaaatttaaagattttgaggctttttaaaagcttggaacctgagtactactgtatcaaattcaatggagagagagagagagagagagagagagagaacctgtgttgtagcgaaagatgtggtggagaggctgagagggcggcgaatgtagaaagtgagtagaagctacaagggaagacagcatccttggttgagcagcagccatggcggtggtcgtggtttgctgcttataatttcaattttctattttctattttctattttattttcttctaattccttttttcttagaaagaattcctcttttgcttttccctcaaaaaaaaaaatcctcttttgctattatcccattttagtattttttgctccaaaaatgttatcataagtgaaaaaaaagagttgtcccattttaattaattatttaactgattaatatagtcaactcttatttccttatgaagggccactataaaagctgctttgcgattgaatgggctaggcctaactcttttccagggctcatgaagcaaaagcccagctaagcccatcctttgccatacatgcaacctttttttaaaaaaaaaaaaatctataataaaatgtcatagattatgtgtttacattcttctattttacttttaattgaatataatatactatatctgtacatttatactattactattacacattatgttaatgtaagtttttttttcactgaacaatgttttttttagaaaccatttcactaaataatgtaacagacgtaaattttacatatttctgtcatttatttattcagtgaaaatagcatgtacaagaccacgaacatacatattagttaaaagcaaaagaaaaaaaaaaaacagaaatcgaaactgataaataagtaaaaataatccaaataaataatttaattgaaaaaatttaagcttattattggtatgctacctgtttacaatcttaatattatctaacataaataaaaaaaaaaactttagaatataaaaaaattgttgttactaagagttagtcaatgttatttcaaaatcattagtatgaaagtccaaataaacaattgataacaatttctatttgggaaaagaaagaaaagaaaaaatagaagtatgaagaaaaagaagggccaactctgccatcatcattagattagatgtacaatagcattaaatttccgctgcaacaattaaaggggaaaaaaaatgtgaatatctataattgaacaagaaacaaagttctttctcctccttttctacttttggggccttctcttggtaaaaggcagagacggttggcgccgctcatcatttaaatccgagtatcagaatctgaagtccgggtcgacatccattgcccatgcaaactttgccaggagagacttgttgaaaatctataacaaaggaagacaattgtatcaagtttcttctctattttctgaacaatcaacttaaatgatgaacaaaattgatggaaaagaatgcccacaggaccagaaatgcttgacattaccttctcaatgggaacctcatgtcttttgcaccacgcaactgtgatcctagggtcaaggtaattgatttttgatgtgcctaacgccactgttttcgtatcctctttgttatgcatgtcccgttttattttctctatctttgtgttcgtctgagctatctttttctctaacctgtaaaaataaatcaagccggagataataaggaagcatatcaacaagacgcacacaatgacacaactattagatgaaaaatctcaagtgacattacgcttcggggcttaagtttctctttgtctttccatcggcgtctttcaaaggaggctttccttttcttgccctgtctaaatctaccttaagctctgtaagaacatcctgcaaccagaataatgaagttcgctcaacataaaccagcaaaggaacatcacatgcctccataaatattcatgcaatgcaacaaaagaaaacatctttggtgtaactcccattctactagagagatatatgaccattacctcaagttcacgaactttctccattagttttgtcatttgtgcctcatgcgatttggatatggtacgttgatggttacaaatgatagcaacctgaaacagaacccaaaatcctgtgagaattgcttaaaataatggagaaacagtgaaacttcgtaagaggagaaattattttcacctgcttgtttgcagtattataaacagtctttttctcttcaaggtctccatctttggtttcttgactcaactaccaaaataataaataaataaaaatgatgaaaacgtcaggattaaaactagaagtaaaatttgataataagactagcaagagataaactatcactagacaaattcaatagagaaactacatgagatttatcagagaacgcagatgtaaaaagtaaggggaaaacaaagacttgaaccaaatctaggagcacattgaaagaaaataaaaaataagagaaaataactatctaaccatatcatccaaggtaatcgaggcattaaaagtacggaaaacttttgctgtaagtccaggcatgagctctttaagatgagcattcagtttactggtatccagcaagtcaaaaagatcatcgcccccctttttccctgaagtagcagataaacaaagatagtcatctgaactcccttaccaattattaaaaaagaaaaaggtgtgcaacacttgttaaaaagaaaaatacctaccagattgaaactgcatgattgctttataaacaggaagttcaacttccacagtgttttcgtatctgattgaatctttaccgaggaagttaaactgtgtgtcaagaaataagaattaactaaatattgccacttaacctagtaaaattaagagcagtttcacgtgttaaaattaaataaaataatgaactcaacagaaacttaaaccacaatacctccaacttgttggggggtattggttttacattctctactttcaatgtacaacaaccaacagtatctgcttcatcatcatcctgcaaggcatgagatcataatgtcagtgatgccttcagttaacagctaggggaacttaaagatgatgtagagaaacatgttgagcaacttaaatgatgcaatgtagcagattcgagcaacaaatataaatcaaacacctttcatatttctttttccttaacaagggcacaaataaacaatgacaaaaatgttaaactgaagagctgtcacgtgtggctctttgtcccatctaattcctctattaacaagtggcacacatataccattgataatttaaaaaaaagaaaatttcgttcaattagaaacaattacaaatctaactgtgtaaatgataaaaattggactggttgtccgaccttctcattcccagccctcagagcaagtttatcaataagataggtagcaactgctatttgtctcttcgtcacatctctgcttgtaaagtccttcgtgtacgcagttcgtatattctgtatatagccctgcactcaaaagaaacacgaaatttgacaattacacaaatgcccactctatgatcttatcgcatcctaaattaccccatgtactgttcactacccaaaccttttgcaaaattttctacataagtaccttcaacatccttgctttctcatatttttccttgtcactttgcccttttaaagagctactagccgccagaaacacatatttgaattcttttggattgatgggatcgttccagaaagctaaccatgttacagtgttgtcgtgccttacttctttccaactgccaaaaatttaaatgtgaattttccagtacacacacaaggggagaggggcatttttttaaaaaaattactattatcttttcttgaaagaaaaggcaaaaataatgaagagcaaaacctttcaccagggatggggcattctggaactggagcatcctttcctacatttatagtgacatcacttggccgaattcgtcttttcagctttccagactgaaaccagaattaaaagcaaaaggaagtaaacattaatatagattaaaaaaagtgcagatgcaatacaagtttacactgactattgtataagcagaactaagaacaaacctttggatgctccccgcgacctcggaataatccaggcggttcaactctgaaattaccaacctgaaattgcaaataagataaaacacattctcttacaacccttaaagcatgcagctgaactaaaagatgaaggagatcaaacaagaacctcctatattttttttatcacatggttagagccccataacccattacccccaccagagttgttccaaagaaaaaaaaagttaaccttctctttaacaccatcaacaatagcccacatatatttttcctcttgtttcagtttttcctccttcactgcttttttctcctgcatcagaaaaagtataccacattttcaaaatctataacaggtgcataagtatttaaggaagccaataaaaagtattgattggatcctcaatgagaactgataattatacaataagagatccgatcagctttaaaagttaacatgtgaaagcttcatagttacaaaacttacatctgaactcatttgtttcttcttctccttctcattttggtaccagtcatatattggagtaaaatcacataagtctaatttttgaattatatggcctttgccaagtaactttcgccaatcattccagaaattctctctgaagacctttttaagtgcgtattctgtgtctttcatgactgcaaacattgtagcaacctgcacagatgacagttcaaaggtaagtttaataaaagatataaataacaaacaaaatcaataattcaagacattaaaatataaaaatgtggataaaagacattttaaaaagggctaagaagaacccacctcctcctgtgcaggagttaagacaactggctttccgttgtaaagcatctttaccccatgaggttggtagggaggagggaaaataacaccattgtgttccaaggtcgtccattttttctggccatcaccagagctaggagacaacttagttgacttggaatattttgaatttttcaccacctttttaaacttgctatttttcttgaatgaagaaattgtttttgtgaccttttgcttcgaggtagatgttttattatttgaggcaggaagtggcttcttaattctttgggcaattggaacatcatcatcatcatcctcatcatctaccttggattcagccttcactgatacctgcttatttttcaccagtgcaggtgaatctgaaagctttggctttttaaccgaagaagtatcttcagtcttcactgatacctgcttatttttcaacagtgcaggtgaatctgaaagctttggctttttaaccgaagaagtatcttctgtcttcactgatggctgcttatttttcaacaatgcaggtgaatctgaaagctttggctttttaaccgatgaagcatctttttccctatccaaaggcctcttcaaattagtgtttagaggttttttcccatctgtcatagtggaaccattctgtttacttgtactcaacagtggcttcttatcaccacgatcgtaaggcttactacctgatgttcccgcattggatttcggaaacctatttaccaaaggctcatcatccgagtcgtccttggggtttttgacaatactctttgtcattggcagtccagtggttggatttttaagactcttattgccctgacttgtctttactcgtacacttaaaggtaaatcatcttccatatcttcagagtcatcctccgattttataggttgtttggcagaacttctttcttccttaacaacactagacttatttttttcggataaagatttagactggccaactaacgaattagatgtaattgaatttgctactggagacttcactggtgtggtccttacagttgaagcttttggactgccaatgggggacttcaccactgatgatgtcttacttgattgaaccaccttacccttttgggagctggagtttataccattcatacccattctttccgaaaccggtcttgctgactgtccatcggacctctgtaaaacaggtctctttaattctgcattcaattggttctgcctggatgttgaaacactcctcttaaaacttaaaggcttttcatcatcagaatcctcatcacaaagactcggtctagcaggagcctgaacagccattgtcccctaatattctgctttcgcatgtattataatcacatcaatttctgcacacactactaccctcttagaaaaccaaccagaccaaaaatttgtaaataaaatatcaacaaccctttggctaatattatctgaaaaccacacacgcacatacaaaacaacaacaacctaatgaagatatcataagaaccaaacacagttcaccaagattattgtataaactaaagcccaatagcataaatccaaacaaaacaaaaccaatatttgaaacccgttcaacacccattacagctaaaattgaaatgaaataccttttcaacaaacaagaaccaatctttatgattaaacacagcaccgtagtaaccttcaaatttcattttaccaccctcaaaatttatcattttcacagcacaacacagtaacacagtaaataaggaaaaaaaaaatacaattatcacctcagacagcagaagaagacgatcgagaaggctagagatgagtgttcagagagaaaataatgaaaccctaggttaattttagggggaaattggttgaggtttgggatccaaatttacgttccttgttgagaaattgtgttgtagagcaaaagagaggtagagaggaaggcgaagaggtccgtagtggttatcagttgtgagccgccgccggcaaatgatatcttgttcgtcgtcgtcgtcttcttcttcttctgggttgtagcgaaggaagaagaggaagcaaggtcgagacaagagggatatatatgacatataataaaatattataatttaagttttttaaatgtatatatgtagttttttttcttttgggaaagaaatgtattaatcaaaaataaattagagattttttgtattattatcacacatttttttaagaaaaaatattattacacaatctttttaacatttatattgtaacaagaataaattttttggttttatcattagaaaaagcaaatctagtgacattttgtcataaaatatactttttaattgttgagaa

SEQ ID NO: 33881 - DNA, 2160 bp, Cannabis sativa
tattacacgatcccaattcggttctagggttcaggtctcaattcgaatatggggtccggcttggggtctgagctcctggtcctatttcaaggtctgtgttcgggtttggggtttgggtttcggtcttggtgtaagtccaaggtccgggttcggtccgaggtctggggtctgggtccgagtccgaggtttgggatcgggtccaggtttgaggttcaagtctggagtccaatattctaggtcgaggttagggttgagtttattgtaaaaaaattataattttacacaatttattagtacaagtaaataccaaacataatattaattaaataatactaatataatacaatataattgaagataatattatactatataatacaatacaatatatcacggtgtacctaatgaacccaatattataatatatattattttattatattttatttgaaagaaagattgccttcatcaaaacgagtaaacctaatgaaaatatatagagcattgttattgggcaccagtggtgtcttgcatttctagacatgttgtcttgcgattgactagcgatactttttaaaaattattacattaaactatatggacccgatacttcattaaactaataacgattttaatatataggagagtgttaagcaccaatggtaaattttaatatttctcaagtatataattatatactctttccagaagaaaaaaaaagtgctaaaaggataacattaatagcattaatagtctcttacaagtgtcagtgtgtcacttaattaacacaagattaaatgcataaaaaattattatagataagaactaaagtattaaagtgctcatgcacatgaagattattctcatcctaaatataatatattatgtatggatcaatgaagcctcaagttccacataccctcacctcacataataaattttggattcgagcatctttttatacaaccaaaaaatctatttgaaacattctcacatcttactattatatattttggacatttaatattcgagcatcttttttccacaattaagaaatctatttgtatattctcacatcttactattatagtcataagaaagctcttatcaaaatacacacactacacacaaactctaaattaaaacttgcagattattaaaatttaaaataaaaatgactatataaggtgcatggagtttgataactccaagatatagatttatttattatttgacttttaaatttaatttttcaaaaaaaaaaaaaggtggtgaatttgtagtgtttgtttgttaatattaagtttttgtctttattttttatttagttaatcaaattttgaaatctattaatattttagattttaaataatttttttttgcataaaaagaaatttaagtaaatcataagaggattaaaagaaaaatttagaagttcaagttagaaacaaaagctgaaaaaattcttagattgttaaaaacagaatgttgtatcaagtaatacaataataaataaagatcctttcctcatagattgttagcactaactaccaaaaattaattcccttgatcaataattaattgagttcaagaaaagcaacacaggaaactaaataataaaaattcacaatctaaaagagataataaaattgataaataattcaataggtaaaaactagggcctctaatttcatcatttatccactctaacatttcataacacaattttaatatttcttcttcctattatgctagcaaatttactaaagaaatttatattcgggttaagatatataaatcccaatctatatacaaactttttacgttttcgtgatgaaatcttctaggccttcttcattttgttcttctatgtttcaagaatggcattctttctagtacactctccacaaaaccgaaataagattcactccaagattttctcattgacaacatgagaaaaggaactagaagtcctgctgcaaatcccaatccaacactcaaataaaaccacttatcaatgaaattgtcatcatcattgtgatcctcaatagttgatccttcatcgaaatcagtaccattatcgccaggacattttatgtcaagtggttcaccacaaaggcctagatttccagcaaaagaggaagcctcaaaggttgtcat

SEQ ID NO: 33882 - DNA, 1551 bp, Cannabis sativa
  modified_base (1475)..(1503): a, c, t, g, unknown or other
tacttttactgagtatgttaatcccctgctgtatggttctgttcctggcgaaatgactattgcaccaacagattctactattgtttctgatcattctgaattccagcatcctgaggttctgttggctgcaaggtcacttgctgatgctattccttctcttgatttgggaaccaatatggagaggcagattgctactcctgatcctaatgttaaagggaagggtcttgcttgtgcttcaggagtcaagaggcctacttttcactcgcaccaagttcaagttggtggctctcttcgttcacagctgaagcgagccaggtctggggatactgattctgctcctatttccacaacttcatcaactgaacaggcgggtgctgctgggcacacccgcccagaaaaatgactcttattagttggaatgctcgagggctggggaactctcgagcatttagccagctttcccttttggttaagactcacagactgttgtttctttttttgatggaaattagacttaagcctcactctatcaatcggtttaagacttctttgggttttgattttggtttagaagtccctagattatcttatgggggtggcttaatgttattatggaaagattgattgtaatgtaaatattttaaactattcccttaatcatatagattgtaatatctcttttgattctaatgatatatggcatcttacttgtttttatgattcacctgtggaaagtaataggcgttttacttgggatcttttggataagatttattataatgctcctaatcttccttgggttattctaggtgattttaatagttatttgtttagtagtgataaatatggtggtcgagttagttctccttcttattcttcttcttttgctgagttttcttaataaaaattttctcttattccccttcctttcattggtaataaattcacctggtataactcaagtgttaaagaaaggttagattgggttgttgtctctgaggcttggtgtgacctttttcctaataattctttacatcatcttggattttatggttcggatcatagagcccttaaactagttttagataataattcgtatactgttcctagttttgtcaataaacggtttaggtttgaaaatatttggttagaagaccctgattttcattctactgttaaagaggtttggtctgatcactctgttccactgtctacctctgggtttcagtctttctttaataagcaacaacattgtgttaatcatctcaagtcttggggtagaaaacataattctctctttaagaccagaatttcccagcttaacttagaaattgatcaactccaaaataagatggccctcacccttgaggagtcccgtaggcttagtcatctgaagtttgctctagactctctgttgtataaagaagagatctattggagataacgagcgagggttaatgtaacaccctaactannnnnnnnnnnnnnnnnnnnnnnnnnnnntactgtgcagctcgttgctaatcgacgaggtttatggaaaaacgtgat

SEQ ID NO: 33883 - DNA, 1181 bp, Cannabis sativa
tcttcagtatctgaattatgttcattgagaacatacattaaaacactgatatcaactctaacacagaaattacaacaaaaatcatcagtccatattcgtagtgcgtaatcaataatcttattagtaacaacatacacagatgtatgtagatgtgtatcagcgagcattcgattaatgatttcttgtgcatcagtgttgtcactattcatcaacttctcacgtggaataaatactgcattattgtagtagatgacatcttcaacgccgtggttcaacaacagagctctgaaatcttcatccgattcattttctagaatacgggaaaatttagcgaatagattgatgataaaaaacgaatcgctcataccacgaacgcttatggcgtttatattatcgacccttttgatatggaataacagatcacctacaactggaggagaagtgctccttttctttatccaatctctaaataaggatagaaagtgtggatgttaagagggcactcacaaatatatacacaatcattacaaattgaaactactttttctatatatatttaaaactaccattaatttcgattttttgagcaataaattattataataattcatttttcaaaaaatttgaacatttcgggaaagaaaaaaaaaacaaaatgacaagacaactatacatttttcagtttatattgaaatagagatagtgaaaaatatcaaattttcacatgagatgtggaatttggcactcaaaattttgaaattactttttatttaaaatttttgtttcatattaacataataagttgtgtttactggcagaattaaaaaaagaaatgcatttttttgttaaaagatattgaatatgaaaatagtaaaaatatataaatgaataaacactacttagataaaaaaaaaaaggtcgtataaaatatttaaaaataagaacttctttcaagtattcaactacaacaccaccaaagttatttaaaaatagcaaacttgtaaacggtcggacaacaacattaaaatttaacttaatctgttttctgtggacaattcctagaatcatgttcagctcccctacatatcttgcaatatcttggagcactagttagctttttcttctttttagcgcgaacatcactattactttttgctcttctactgcttccaccaaacgac

SEQ ID NO: 33884 - DNA, 3943 bp, Cannabis sativa
atattctgccagttctgttttgtcgttgcaaaactggtttctgcagtaatagaattacattctgcttttgcaagcgtatacagttttatattgtcatatatatatatatatatatatatattattgacatgtgcaaaaactcgatttttcagtcaagttgagaaataattaagtcattaacaaataaaaacacgactttgtttaacactacaaatttttttacttttaatagtgaaaaaatagtgaataaacctaaatcattattcatatattattaattagttattactaaaaagaaagaaaattgtgaataaatataaattatcattcttatgttattaattagttattactaaaaagtctctacctagccaaaaatattaatagtcataaaaatcataatttattatcagtaaatgtatttttttttttttgtcaaaatagttgttataactagaactaaattaataaaaatttgtatttaaattaatttttattgtgactaaaaaccaatttagatccttgatagaaaggaaaaagttaacaaaattgttccgctagtcaaagtgatgcggaggaacagcaagattgaagagttagagtcgcagatgcgggagtagtatcccgagatattcagttaaattttgaggatgaaatttctataaggaggggatagttgtaatatccgaaaaattatgattatgttaatttaggtattttttattaaatatatgattaaatgaataattaatcgtaatttattaataacagagatcttatcagattatagggatattataaataccattttcaaaataaaataattttgggttcaatgggagtggaaactcgacggagtggtcagaaatgtcacggcaataaaagttgagatatcttggaattataccgaactagtttagaaaattgagttgttagttcatttggagaaaattagaaatgatcaaaataccctaggtttaattttaggccttagtgttttaaagaggggtaaaatagtctttttggtggggtttaaaatttgtcttgcatgaattttctaggcttaagttaggatttttattttgggttataatattaatttaatgtttatttatttaattaagctaaaaaaaataaaacctaaactatggaaatcacgtcaaaaatcctctctctttcccttcactcgacaaccctaaaaactcagcataaaccaaggattttagctatatttcaagcagaatttaattgatgtagtgacgtctaaaatttgttcaagcttggaagtaagacttacatcccttctctttgaattttcaaggtttaggttgagtttttgggatttcggggctctggtatgaaactgagtttagaatatgtttttaagttttatttaacgtttgtttgtgtgtgtttgattatctccttagctgctaggatttgaattgggggaaatgagtttgaaaacttaaaatttcactcaattatggtattttgactattttgatgaattgttgagtgttgatggattatagacattgtttttatcctgttgaattgttctgagaagtttggacatgtttgatggaattttggtgaaaaaaactagatttttcccaacttgccagaaccagtcgaccggttggccaacaggggaaaatcttgattttcttcgagtctggtttttggcttggtgtgttttccaggtccttgtttagggtattttagagatgtctaagctatttttgatccagtaggggattaaggttgttcggttatggaattagggtttaattcaaagttaaattaagtagttgatcaagtttcgttgttgtgacataagacctgggatcgttgagcttagttttactcaggtcggcccgcacacctgatattggattgaggtaagaaagccaattgcattgctaagcatgttaattgagaaacaattattatcgtttgtgactcgattatgatcgaggtaaatatatggtcattaccatctattgtgaatgagtaattactcatttaaaactataaataggttttcttacttatcgtttgctttactggcaacgagtggtaaggatgctttatgaggcatgaagaacagcttgtcttattatacaaatagttgtcacgcaatgtttgattatatactatataaatgtttgttgtgaatgatgaaattgtatgttatgcattcttatgatattttgtgttatacaatgtttgtgattatttgctttcttgctgagtctttgtgactcaagggtgcttcgcggtgcagataaagggaaaaaaaaagtggatcaaccatgagtcagagctctcccaacgatgtacatatcaaccgcggtgtctcaacttctagtggacagaatctatccttttgattatgtttggaaatgtaaccctattttgaaatattgattttgaaaccaattgtaaaagtttataaagaggggattcccatattcagtactattttgtataaaagttatgttatagcttaattcaaaagtttttaattaagccacacttttcttaaattgatagtttaattataaattaatttgtaaaagcacacatgtggcgtccctgtaggtcaggacgttcattaggcattgcctaaacttgctgaacattgaagaacactaaaaggcctttatttttcagaggcacaacaaatggaacggtaaaagctttaaaggaatacaaggatatgttttaccaagtgactaaagtaggtggatttgtgggtgattttagtaacttggtgtactgctatgctagtctcatctagggacctattagatggagcaagtttgtctagtcagctcctgagttagttttttcagttaactaacccaagtacccctcttatcgagttttctatataaggttttgtggactacttctttatgtgacgatttgataattatgtttgtaatgagtgaggagagttggcatatcatatttctctcaagtgagttgatttgtaaggtgcaagatacctttatgacgagattaactttgtattcttctctttattcatctattattgaagattgaataaagcttggccaaaagtcaatttcttctgaggattagttaccataaaaaggataataaatctccttatatcttgtctttatttcaatatttgattcagctgttctaattcttcaattcttattttattttgaatgttaattcatcacagtatggaccgaataaatatatttaaaaaaaaaaatcataatttttgcccaaactataattaacgtgggccatgctattaaaaaaaaaaaaaaaagaacctgcattaggctagcatcaaggcccaaagcatgtattgtcaacatcctaaagtattaccaattacacagaacataaatttcatttaattaccaaaatttttatcatgaatttaaatttgatactggtaatgtaaaaaggcagaaattttaatattattaagaaaaaatatgtattagtggcatgatttttctcatttttttttttataaaaattaattttaaatttaccatatctttttcaatttatcggatgtttgataagcatggttttcattgggcttttttttatatacatttcaaaaaacacgtatagttttattgggcttgttatatatatatgatagaaagcacgtacgattttcattgggctttttatatttcaaaaaatacgtatggggttttgggcttggcttatctaaatagattggctataagaaagaaatgaggtttttataaaaatactggattttaagcaaaagtttacaatttcaccgtcatacggaatttcttacaaaaatattgtctttttgtaaaataattgtaaaaaaataaaatagaacaattaaaacaacagtggaacaactaaaaaacaactatggaacaatagtgaaagcttaata

SEQ ID NO: 33885 - DNA, 1589 bp, Cannabis sativa
agttagggtgttacattttctctccagaaattctagcctcacacttagccagttttttgtaattcttgtgagaaataaaaacttgaagtagatgtaactttattaccatcgcgacatggggagtgaactattataaattttgtgtggctctctatattatttacttaaatttattattcagcttgtcaatctagcgagctggtgtttgccactttttagcgtcaacacttgatatttttgagaagcttgatactgtcggcgatcacttttttgcataatccttgtttgctcattttgaaaatagttgtctatattaggatcaactataaaattttaataagttttttcttttaaaaaagttataatgtttaattgattaattaaatattttattttaccaaattattttagattttaaatttttttagtagccatgatataattatatcataaattagttattttgggttattaatataaataatataaagtatgatatattttaagtaaattatatttatttagtgtgaatcattgaatctgttgcaccaaaaataaaaaatctacactaaattggtatagattatacaccaaattaatgtaactattgaagatggtcttaaaatgacattaaacgttgtccttaaaaaaaagtcactaaaatttctttttgtaatagctagttgtgattattcttcacaataatgttatttgtaatattattaaattaagctcatttgtcttccttcttacttatatttatgtgaaatttgttccgacatgagataatagttagctctatgacattagagttagaaaatgagttatttgaaatgagagttcccattccaatattttcttgagattatttattactttaaattatttaaaagtaacattatattaacgtgacgcatcttgaataattaactgtttcttaaattttattaaaaaatataaaaaatttaatattaaattacatcaatgcttgaccacttaaatattcatttatagtttttgtacttatttattgatcttggcttaaaatagtatctattttattattattactttctttcaaactattttttacctgaattctttcaaactattatatttcttagaatgagtgatatattttcgatcgagatgcacagaacatagaattttgtgaatcggctacatattataaattgtgtgtgtgttagtgactcatttgtgtaagagaatcaatatattattccacaaaaacatgtgcaatctttaattatttcaattaactttttatcatattttgtaccatcattttagttcgtgtgggtacaatatatttaaagataacttttcaagtggtattaggcatagtatgacacgtttattcacaaaaaataaaaagaaaaatctctaagttctaattctcccacccgaatgttaaataataataataataataataataataataagtattagaatattaacagtatatattttttttgagatgaaatatcaacttcattgaataagttagcattatgaatacaaaaaatataagagttcaccagaaatagaaatatcaaaaatactac

SEQ ID NO: 33886 - DNA, 1173 bp, Cannabis sativa
aaatgtatataggtaaagaagatcctttatctcacatttaatactttgaaatgtaaatggaattacaagcagtgagaggtgatgtacactataaaatctttctagctactttggctgaggtcgcgcagcagtggtactttaaattagctctagggaagtttaattcgtggaactccttcatgtcaaaatttcatgcacagctctcctcttctcggtaactctcatctcacttagaagatttgttagagtaaagcaaatactaggagaacccttcagagcttacatcaatagattcatgactaaagctaaaaaagtgaaaggattgaccgaggaagggaggttggccgctatcttaggacgtattgaacctctaagtgaattatggaaatatataaaaagacttactgtagggtcaatggcagaattcttagattgtgcagacagatttataaaactcgaagaagtagttcaacgtgtggacacggttggagtaaagaaaaatcaacaacacaccactacagtctatacgtccatccaaccagaccaaaattcacaaaatcacagcagcttaaaccaaggtggtcagagatcaaataatgacaataggtagtgtaatggaaagaaaagcatgttcagtgggaactccgaacaacatccttgggagaatgcctcaaatttcacagcatttactatcctgatagaagatatagaaataatctttgcaaccacgtagtctgtggtgtaatacaaaaaacctcatcttatgaagaaagacatgaggaaaatggatactaccaaattctatcgttttcatgtagattatggttacaacactaatgaatgcaataatttgaagcgggaaatagagttcctcattaggaaaaataatctgaacttgcagaaatatgtcaagaccaaccaagaaccaagggtcgtcaaactaaataacactcaaaaccagttgatgcctccactagtggacgaacatcttcaagttatcattggaggcctccaccttgctggagattcagacaaagctagagaaaaatatgctcgggccttacagtatgaacagacatatgcaattctatccgtagaagaaagaaatcctaagcaactccgtgttagagaatcagttataactttcaacgaagcagataccgaccacatcat

SEQ ID NO: 33887 - DNA, 2369 bp, Cannabis sativa
caaggatttccttgatatctgtgtcagatatctgtgtcattgtatttatcgattgtatttatcgatgacatccttgtgtactctcaatcggaagaggagcatgagcaacatctccagatgtttctacagcgactatgggaacataaactttatgccaagttcaagaagtgcgagttttagctatctcaggtgtcttttctcgagcatattatcagtaaatacagaatcaaggtggatttagggaaggttgaatccattagggattggccgagatcgaagacagttatagaagttagaagtttcctgggtctggctggttattatcgttggtttgttgagggattttctaaaatctcaacacccttaacggaactcaccaaaaagaatcagcaatttttgttgacagacaagtgtgaagcaagctcctaggagttgaaacaaagattgatcatagcttcgatttcagccctaccatctgataaagaaaagttcgtggtatactgtgatgcatccagacagggtctggggtgtatactaatgcaggccgatcgggtcatcgcttatgcttcttgtcaattaaaggaatatgtttagcggtacccaagcatgatttagaacttgccgtagtagcttttgctttaaagatttggcggcatcacctctacggagaaaagtgtgagatttatactgaccataagagcctcaagtatttctttccccggaaagatttgaatatgaggcaaatgcgttggttggagttggttaaggattacgactgtgaaatcttctaccatcctgggaaggccaatgtggtggttgatgcccttattagaaagggtcccgggcaggtaactagtatgattaagatttcacctcagctaggagaagacatggtcagatcaggcatcgagtttgttgtaggaaaacttcataatttgacattgtaatatgatttgttagacagaattaaagtcacttagttaactgatctggaactggtgaagatccgagaagaggttttagctggccaagctaaagattttatggtgccagataatgggatgatgtttatacaagaccaaagtttgtgttccagttagtgcaaaactcagaaatgagattcttgaggaagttcataccactccatactcactgcatcctggcactaccaagatgtatcaagatcttagaccctactactggtggtgcaggatgaagaaagatgtggtggaatatgtatcccggtgtttaacttgtcaacagattaatgctgagtatcagagacctgctggattattatagccattgtcacttctgggtggaagtgggaggatatcaccatggattttgtggttgggttacctagaaccacgagaatgtacgattctatttgggttgtggtagatctatttacgaagtctgcacattttctaccggtgaaaacaacctttacggtggatcagtatgcggagctatatgtgaaagaaatagtaagattacatgggaccccaaagtccattatatcggatagagatctgaagtttaccttaaaattctggcagagtcttcaacgggctatgggtaccaaactgaagtttagtacagctttccatcctcagactgatggaaagtccgaaaggacaattcaaattctggaagatatgctacgagcttatgtgatggattctgaaggttcctagagcaagtacctaccactgatagagttttcatacgacaacatttatcagagtactatagggatggctccctacgagatgttgtatggtagaaagtgtagatctcctattcactgggatgaaacgggagaaaggaaatacctaggtttggaattagtgcaacaaactaatgaagctatagaaaagatcaaagccataatgcttacctcttagagtgggcaaaagatccatccagatccaaagcgtagaaatgtagaatttcaggtaggagatcatgtactcctactggtgtctcacatgaaagggatcagatgtttcggaaaaggggcaagttaggccttaggttaacagggcctttcgagattctcgagaaggttggactggtagcatattgtctggccttacctccagcgctttcagtagttcacaacatgtttcatggtttaatgttacagaaatacatttcagattccactcatgtgctgagttatgagaatcttgagctacaaccagatctcttgtacaaagagcaaccagtttagatcttggacagaaaagataaagtcctttagaataagacaatagctttgatcaaggtactctggagaaatagtaaggtggaggaatccacctgggagttagagtccaacatgagggctcagtatccagagt

SEQ ID NO: 33888 - DNA, 1887 bp, Cannabis sativa
aacttaccaagattctctctatctcttaaaatgaaacaagcacaggcaaagacatgaaaataagctacacttggttttttacctttccagattttatatgatgtttttgaagtatttggatagagaaaaacatgattaatgatatagcaagcaatgttaaaagccccgacccacaatcgtttggtaagtttcttgctatttagcatcactctagccatttcgtgaagggtgcaatttttcctttcaactactccattctgctgaggagttttgggtcctgaaaactcatgagaaatacctacagacttataaaaatcatcatacacggagttttcaaattctttaccatgatcacttcttatgcacaaaatctttctaatattgcaatccttttcaacattcaatttcaaacaaagagttttaaaagcattaaaggtatcagatttttctcttaagaaatctacctaggtaaatctaaaaaaagcatccacacaaataaatatatacctttttccatttaaactctcaatttaattggacccacaagatccatatgaagcaattctaaaacatttgaagtgtttatatcagaaatacttttatgagtgatttttaattgctttccaagttgacaagacttgcacttaccatcagattctttaccaagtttaggtaaaccacaaacaatgcctgcatgtgacaactttttcaaagtttcgaaattaatattaccaagcttagcatgccacacatcaatattgtcatttacaacagattgacacataattgaaggcaacaaggtatagcagttgtcattagatctaaaaccttcaagcacattctcaccatttttgttcaaaacaaaacaattgtctttatcaaagttaacgtgtaaccttgatcacatatttgacttattctaagtaaataagctttaagtccttccacaagaagcacccttttgatcttaggaaacccttcaaagttaagagtacctattccaagaacattaccttcaactccatttccaaaggttacagatctacaatgcataggtcgtatgtctgtaagaatagacctatcacttatcatatatctcgagcacccactgtcaaaatacaaaaaacgtgaagcacctgttctatcatattcagaaccaaaaccagcaaagcatttattctttttgacccatgatttctgaatattttccctttttactctctttgttttttcaaaatatttgaatctttcaaaaaattcatttttggcaaagttctttagagtaaaacacttagatcgaatatgaacttttctcccacaaaaaggacccgttggaatgaaatttttcaagcttaccattaatttaacttgctagttgtacctgatctattaacacaatagaaccagttgatgcaacagctttttgagaagttggaacaatcatgctagcaggcagaattccaccagaaataagcacttttttttttttttgaaaactgagactttgatgctctaagtcccacataatttctttgacctaaattttgtatctcctcaaaaaccaagattaagtattcttacattttctcaagtccatttaaatcttttgacagcttactaatttcatcattttttgaaattatttattcttcaaatttttcatttaactcagaaagttgtttgatttaaatgacaatttttttattctttcttgccaaggatcagttttcagaacaaagtttcaaccaagaatcatacatctccttgtaagtatcacttaaagattcatcagtcaatttagattcatcactatctgaattttctttatctttggaagtattattcaaacacgcaaaattcttaccattcaagcaatcaaacggctgc

SEQ ID NO: 33889 - DNA, 947 bp, Cannabis sativa
atgtgataatcagcgatgtggtttgcttacacttggctaagtggtatgtctttttcaaggcattagaaaagtaaattatgatcaaatataccggctatacatcagactggactgatatttacagtagaaaatatattataaatttaccgtaatatattttctaagtaaatatcactatgttgatattatattaatgatctcaatcctgagatggttagattctggcgtagttgtattgcacatgttttttgacttgttcattaccagcttacctgtaagattagtccatacttacatcttgagaacacagtagtgccattgagtgggagcgctaatcatagaaatagaatttataacttctataactatttaaaagtgaactgatggttttcttacagcttgtcttaacaacataaataatggagctcttatttcgtaattatattagtttactgcaatatcatttataagatggcaagtattttaagaataaaatacatcgaagtgtaaaacaataattttgtccctactcaatgtaaaccatctataaaggatctttgattgtttaaattgaaacaatggataatttatagcgtatctattcttggtgaatagagggatctatgtaatcaagagtgcaatctgatagtcaggaggaattaataagatagagaatttactcgatagattctataactacttattaggatcttggttacatagacccatggtccccacactatgtgagataaaattattttgtagactcaattaattgatttatttaatcaattagaattctaaataatgactatgtctatttatgaattttactaagcaatggcttatttgagaagaaaagagtaattatgatttgtttattaattaagagacattgaagggtttaataaataaatatattatatggtttaataatgaactataat

SEQ ID NO: 33890 - DNA, 1247 bp, Cannabis sativa
atgacaacaaagaagataatcctcttgaaggaatcaatcatcgtcctggaaaagagccactgagtcctcagggatcttttgattcatcacctgaacaggctactagctccgggaaaaccaagtattggggactcaggcttgaaaggcctaggataaacaccagccagtctcttcctaacaaggttgatgaggatggtgcctacgacccaaccaggtacatacctattgttgagttagaaaattgccatcttaggtgccgattggaggaagcgaactgccgtaatgctgaactagagcgtgaaatagtcgtagtcagggaagcacaggagaatagttcccaaaatcaacctaactttagagacaaagatccacgaggcaaacctcgtaactcgtaaacgaaggggcaagagacaacccaaagatattctcaaaactctcaggggaggcaacctaaggaaactgaggaaagtatagggacacagcctgggacctgtggaacatcagttggagatcgccaaccctctctccaagctcataaaaaaggagctcgcgcaaactcctatagggggaacgaggtgaatcaaaccttaagaagaagagcagaacgagaagaggggagggctaccgcgaggcatatagtacctcataatcgatcattgtgaggagagaacactcgtcccagcgatgatcaaaaaggcataatgtagcatataggaagagcaagattcgatagctgtcacgacctgtgggacctatgagaacacttgaacttgaaaaaactttatctttgtcaacaacttggtccaaagcaaagggatttattccatttgcgaatagacgagttggagactaagttcaggaggcaacaagtcagggaaccaggaaagcaatcggggtatgattctgttgaagaattcaagtcgggagcttcaagaacaaagaggaaagatgattccaaaaggttgtccaagaataagaaacagaagaaacacgacaaatatttacccctttatgctggctacaccgagcttaattaaacttgggaaaaaatctaccttgcacatgtacaggaagtcattttttagcgagccaaaacttatgagacacgcgagacgtaaaaggaacctaataaaatgatgtgaataccatggagatattggtcataccacggaagagtgtcatcagttgaaggatgagacagaaggtctcatagcgcgaggacaccccaagttgaggatctacatctt

SEQ ID NO: 33891 - DNA, 1607 bp, Cannabis sativa
ttgatgtggaaggatcggttattggcataggagcaattgttttagattactttggagatgtgattactgcttttctgaaacctctatggggttgtttttcctacaaaagagatggaagctaatgccattattctcagtttatgaaatacctcccgccattaatttttatgagttccagtttcatactttagatctgcaaaagaaaaaaaaaagctgattggtgtgggtatagtagacttccaaactctctctactctctttaggtagacataatgtgtttcacataattagtagtgagcttggatatcgatatcctatatttatataggtaagaccttttattaagatctctactacaattaattgtaaaaatattttgataattaattaataaattaaatttaataattaacatggtattgataatgatcattaatcaaatattttgtccataaaatattgattaacataccaaatcaatctattataattaattaattatatataatgtgataaaaaaaatattctaatatttatatattaaaagattttttttttggctaagtgtattaaaaggtaacttgtttgaaaatgggtatataaaaaaaaaagttttttattcctttttttttttaataaatcagtttgggattaaatgacttttttccaattggtgctattttccattttttttttaaatttatttattttattgttggtaaataagataggaaaggaaaccaaaaagaaaaggaaaaggatgagtctgaaatattaggctacttctggaaccttcttcagaattctcaaataatcaaaaccaacccaagtataaatccaatccaccgctttacaccatccatacacgtattacataccaaaccactcgttccgattctaatcgatcatcatcgttaccattttcgtcctcaacttcaagcgttgagcctacgatccaaaatcttcgaatatttgacctttcttctcaagctcagtagcagaagttaaagaacgtaagggtcaaagagaaacaaatgggagtggattactataaggagctcaaagtagacaggaatgctagtgatgatgacttaaagaaagcttataggaaacttgccatgaaatggcaccctgataaaaacccaaataataaaaaggaagcagaagccaaattcaagcaaatctctgaagcttatgaggtatgtctctttaaccaaaacccaccttatgaagctaactttttctggttttttttaaattagctgtcaatttatggttaatttcatttttacaggttctgagtgatccccagaaaaaagcagtgtatgatcagtacggtgaggaagggcttaagggtcaaatgccaccaccagacgccggaggaccgggtggagcttcatacttctcgaccggagatggacccacgacgtttcaattcaatcctcgaaatgcagacgatatttttgcggagtttttcgggtcctcgggaccctttgggggcttgggagggatgggtggaggaggaggaggaggtatgaggggttcaaggttttcaagtgggattttcagggatgacatatttggatcgtttggggaaggaggtggag

SEQ ID NO: 33892 - DNA, 1434 bp, Cannabis sativa
  modified_base (530)..(536): a, c, t, g, unknown or other
  modified_base (1399)..(1409): a, c, t, g, unknown or other
tgagagaaacatggagaagatccaaaggcggaaattgacacgatattcgaagagacagaaggtgggaagagagggtaggtaggtatatagcttctttaaggagcaaagctctagttccaacattgcttacacagtttgtaatcatttcggggatatttggaattcggcggcaatattattaacttaaaaatttaattaaaaatttaagtacacagtttagtccatttatggtacattttatttaattcaattaaaaattagattacaaaaatgtaagtgaaactcgtccaattaagaaaaacgaaaataataacccgtctaattaaattggtcagtttggtcgggtcaatctatccaaactgattactaatattttttaaatttttttttttatttttacactcaattattacattttaattaattgtaataatgagacaaatatatatagattgaatttaaaattcaaatcaactacaataaaaaaaaatatattaatttcaattttatattttttaaatagtcatatnnnnnnnatgatatataaatatatatataaaaaaaaatcatcttaatcgagttgattaggttagttcgtgttgattgagcgagttggtattattttcaacccacccaatatgaagattgggtgggttatattttcacgggtttttcgatttataatttttgtcgggttatctcaatttagtttaagcaagttattcaatttgaacggtttacaaaaatttacatacaagcctataatttaccttgactaaatgttacaaactacaagttataaaatttacattttatattttgatattagtggaggcagatatatttgagaataatagcacaattgtagttgtcactcaaaactttacaatatcttaaattaaataataaatataagttaagaaaaaaaaaattaaatataaaatataagttcgcatttttttttttttttgatcaacattagaaattatatttttgcaataacaaaattaagattttctttttcaaatttgatttttattgagttcaaaaaaaattgattgttattaatgtgtattaaatatatttttataaaattattgaattaaactatgttgaaaaattaactaaatagcactaataaatcgaggataagaatcagcccaaattgatactccacccgaaggcacgtaacagatctaattagtgcataagccacactatttacagaacgcaaaatagcgcaataagtatcaccaccaactgcaactaataaattagaaacatcaaaaataatagaatgaaatataatattcttaacgtctaaattaatccaatgtatgggtgggcatcatccaattcaatcaaattgaactgaaccgattcaatccaatccaattannnnnnnnnnnacatccaattacaattggattggat

SEQ ID NO: 33893 - DNA, 1548 bp, Cannabis sativa
cggagctatgaatctcactaaaagatgtctgaagctgattggtgaaagtaccaggagcgtgtcttcctatagcgagataggcacctcgatattaattgcttgggttcactcgactattatacttagtttgtatattgtatattatacgctaagtgttttcacaattattatatgtcacttacgtctactcatacgtaacgaggttgaggtctcgtcttgcgcatccaaggctgtatggtttctcgttaatacacgaggcaacagtttgtatatctttatctcgcgtaagaccttatagtcagcaagctgtaaatataccctgtcacttccgcatttaatgagttattctattttcaaatataattaccgtttcatgcattgatccatattctccttagtttgacacgtgtcctcctttgaaatgatggacaaattttgggtataacaattgccccttaaaaagttattttttgataaaaagtgatttttaaatgcttctgagggtacattcgtcacaatccctttcttcaagatcatgcatgcccttaattttaacagctccacggtttcaagggtcattattagcattaatgaaccgccctttcctctccatatgttcccaaaaactttaaacctcagtttaaattggaaacgaaagattccaagactgaagatcatcccattattccgaaccaaggagatacaatcgatcgttataggcgatcctcacaagagattttcgagggtaaacatcatcctttgcgaatggtggtctgatctgaattcgtcgttttttttaccattgttccttcattgatttttttatctttgtccctacaggaatggatgtagattttgagagcatgttcgaaggtcctccccgtgccaacacgaaatccagggagaaggtaatccaagccgatgaagttttggattccactatagaacccaaatggctcaagaacaaagcttacacgaggaaacctcctagtgtttatgaatttcctgaggctgggaatgaggtctcggccatagggaatgagttctcttttgagggaaatgagatcttctgatgcgaggaatgaaggtcttctgctgcagagaatgaggtctatgcagaggacgagtccttttacgtgtagaaggtcatcaaaacctcctctttctaattcttgttactaaattgtgaataataaaaaaaataattggaagtattggaataaaaaaaatagtaaatttgttttggcttacgacacggatcaatataatcacgattatattacactgtgctgatgacattataatcaggaatatatatatatatgttttggatttaatggaatctatacattaaatataagaaaaatgctccaacatcttactaaagtaaattgcttgcactgggagctggtattggaaacaggtattggcagcaaaggacaagctctagcaactcactgcagtgcagcagttcacacagagtaagttccaaatctcagcagggtatagcttgctatgtccaattcaaagcaaggtacattggtgtga

SEQ ID NO: 33894 - DNA, 1255 bp, Cannabis sativa
ggtattccaaatctacaaattatgttcttgacgacaaagtcgagaactttcttacaggttatggaaactagaggctcaaccttcgtccactttgtgaagaagtcgattgccactactgcgtactttgctcctcctcgccctgtgggcaatgccccaatcaaatcaatcccccatatcgcaaatgggtacggcgaggtcatcattcttagttcctttggtggtacgtgaggtatatgtgaaaatcttttacacttatcacaccttttgacaaattcgtgtgtatctttatttatagttggccaataatatccttgttgaattattttcttggacaagctttgccaacctgcatggtctccacaaaagccctcgtggatctctttgattatcttacttgcttctgtggggagaacacgtcgtaggagaggcattgtataacccctctgatataatttgccttctactatcgtgtatcgaggcattgaatacaagagttttcatgcctcatttttatctgctggaagttgttggttgagaagatagttgactatgggtgtcatccaagtaggcgagctgtcaatcatctcaacttcttccttttcacatatactcggttcgtttaacacttccaccagtaccaaattcaattcatcaagttcattctgcgaggccagttttgccaaggcatcgtcattagactttttttctcttggaatttgttcaaatttaagataatcaattttttccaagttctttcgaaccttatccaagtattttgccatttttatacccttcgcttggtattcgcctagaacttgatttactattaactgcgcactatagcacataagattcttgacttttaacacttcagctattctcaaactagctatcaaggcttcatattcaaccccgttgtttgtcaaattggaatcttagggcatagtgaaacttaaagttttctggcaagattagtatcacccctgcactcaagccattttcattagatgctccatccacgtacaatttctaagtgtctgcgtctcgcgagataagtggatttcatatggaattatcccttctatcaggaaatctaccaaagcttgccccttgatggatgttcttgggtaataagttatgtcaaactgccccaattcaatagaccattttatcaatcttcaagaagtatcgagttttgacataacttgtctcaggggttgatcagttaacacctttatcggatgtgcttggaagt

SEQ ID NO: 33895 - DNA, 3950 bp, Cannabis sativa
acttaattaaaaagcttagtgaaaggtcgtatcctctgatacgtttggttgtcactctgggttgagtgttgtggtgtgagtgttgtttcatgtggtggctgtcatggcgtctagcagtacgaaggaagggtaatgggagatgttattattctggaggaagaagataatgaagtcttacgggtgccagtaggcagggctgaagaggtagcgatagacacaaggtggtgtttggtgggcaaactcctaactggccgtgtctcggattttaatgttttccagaacatgatggctttcctatggcaaccgggaatgggaatgtatgtcaaggaacttaatcctaatctatttcttttccaattttaccatgaagttgatatacaaagagtcatcgatggaagtctgtggacttatgataggaaaccttttatttttacaagattaaaggagggagagaaccctaggcttgttgaaatcaaccatgttgatatgtgggttcaacttcataacttacaatctggaaatatgacactcagtgttgttacggctctaggaaactatattggatcgtttgttgaatcagacccgaataactttgtgggtgtttggaggggctatttacgtgtccgggttcgtattgatgttggcaaaccaatcaagcgtcgtatgaagattatcaatgaggactcttcgtggtactgggtgaattttaaatacgagaggctacctactttctgtttcatatgcggcatcatcggacattcggaaaagttttgtccaaggttgttcttgaagccgttacatctccatgaaaagccttacagcttggagttaaggcattgacacaacaacgacaatcgacctttggggcgcagtggctccggtcggaagcggcgatacgagatgaagcacgacgtgaaggccaacctagcaaatctgatcctccagcggttttaattcctagaaatacggaggtaatgggggaattagttggcaaatttcaaagctctgcaatcactaataatcagccactaaatgagggatatggtaatatcaaggagaatatggaagcaagtggagaagattcaacattgaatgttactaatagaggaaacttctttgattcctctatcaccaacgtaattgactctaaaaggagaaggcctgatagtataatgggacacgtgggctccctggaaagcaagttaataatgctatggatgttatggaccatgacattggagagtttccaaaaaatggatctttggcgggctctggtttccaagcccgctcagagccatgagttgtttaagctggaattgtcgtgggcatgggaacccgcaggccaaacaattcttagcggaccttgtgttccaaaagaagcccaatttgttatttcttcgtgagactttgtgtaataagacaagtatggagtttattagagtccaattgggctttgatagttgttttgtagttgaggcccgtgggcatagtggtggtttggccttgttatggaaggagtctagtgaagtggcaattcaagggtattcctttaatcatattgatgctactgtccaatggcaacactgtgttcaatggagatttacaggggtttatggggagcctaaaagagagtttcgatctaacacttggaatctctttcgttctatcaaagatgcaagcactctcccttggtgtctcatgggagacatgaacaatttaagttctcatgatgaaaaaagaggaggcaggccatacccggaccgactcattgacggatttatcgaagctttggatgattccaacttaaccgaactgcccttggttggttacccatttacttgggagaaaggaaggaatggcgataactgggttgaagaaagacttgacaaagcgttagtgatgcacacatggttgtccttattccaacagccgactctctacaacctagaagtttcaacatcagaccactgccccattctcttggtgtttaaaggtgtgtctcctcctggttcctttaattcttttcgctttgaaaatgcctagattagagagccactttgcaagtagttagtttaggggtgttgggagggttcgggttctagtaacattcaagaaaaaataaaaagatgtggggaggtgttggggaagtggggaaaggaaatcactggggacttcaggaatcgcattgataaatgcaagaagcagattagaaactctaaatggggaagagatcgaagctcaattcaacaacaccagcaagcaaaagccaatctttctgtggttttggctcagcgagaagtcttttggaaacaaagatcaaagcaattttggctcaactctggtgataaaaatacaaaatattttcattccgttgcaagcactaggaagaggaataatggtattgggcaacttcaagatgaaagtggcagatgggtaaattggggatcgggtttagaggcagtcattactagctattttagtgatctgtttcattcatcaaacatggacttgggtaatattctcaatggagttcggctgactgtctctagtgaacaaaatgcacagcttttgatgcctattgcagaggatgaagtctgaattgctctattccaaatgcatcctgacaaatcccccggagctgacggaatgaccccggcattcttccaaaagcattggaacatagttggtttggatgtggtcaactttgttcgggatttcttcaataatggtatcttcccgactgacattaatgatactcacattcttttaattcctaagaagaaaaacccgtctcaagtgagcgacatgaggccgatttcgctttgcaatgttttatataaaattgcctctaaggttgtggcttatcgaatgaaaggaatcttggactatgctatctcagacactcagagtgcttttgtttcaggaagattgatttcagacaatgttatggtggcttgtgaagttatgcactatttaaagaggaaaacaaatggaagaaagggatacatggcgctcaagctggatatgagaaaagcctacgaccgtgttgagtggggttttttggaagccattcttcgtgtgatgggattttgcgaacgatagattggcctcatccttatatgtgttaattcggttcgatatcatgtgattaatagtggacagaagatgggaccaataattcctactagaggtatccgtcaaggttgccctttgtccccatatttgttcattgtctgcgccgagggtctctcttccttgatcaaacactttgaagctcagaaacttatcacgggttgtgaggttgcgagaagtgcacctcctatctcccatttactctttgcggacgatagttatgtgtattgtcaagcatcgcaggaggaagctaatcatgtccttacactccttcaaatctttgagagagcttcgggacaaacatttaatctctacaaatcgtcagcattcttcagttctaacacaagggcggatatccgaagcagaatctgtggtttgatgcaaattcaagaagctggggtagatagcatgtacctaggcctcccaagcacggttgggcgtaataaaaacacagtgttgggttttctaaaagagaaaatgaagaagcgaataagtagttgggagggcaaatttttatcccgtgctggcaaggaggttcttataaaatcggtggtccaatctcttccttcgtatgccatgaatgtctttctttttcttattggtacatgtaatgaacttgagagaatgatggcaagtttctggtggaaatcaaaaagagctcataacaatgggagtggcgttgtttggatgaattgggacaaaatgacaagatcaaaagctgtcggtggaatgggatttagaaatttgagggattttaatctcgctatgcttggaaaacaagggtggaggtgttcgaatttattttactaggatcttag

SEQ ID NO: 33896 - DNA, 2277 bp, Cannabis sativa
  modified_base (602)..(608): a, c, t, g, unknown or other
agccacaacattggccttcccatgatgataaaggatctcacaatcgtaatcctttacaaactttagccaatgtctttgtctcatgttcaggtctttctgggtaatgaagtatttcagacttttatgatcagcgtatatctcacatttctcgccatataagtaatgtaaccaaatctttagtgcaaaaactactgctgcgagttttaggtcgtgagtagggaacctctgctcgtactcctttaactgccaagaagcataggctattacctttccaacttgcataagaacatagcccagaccctgtctcgaggcatcacagtaaacaacaaacttttccttatctgaaggaagagttaatactagagcggtaatcaagtgctgctttaactttagaaaacttttttctcatcgattgctccaaacaaacttcaagttctttcgggtcagctccattaagggtacagcaatatttgagaaatcctcaacgaaccgatgataatacccagctaaacccaaaaagcttctaacttccgtagccgattttggtgttggccaatcccgaacagcttcgatcttggccaaatcaaccatgatcccatctnnnnnnnctatgtgacctaagaaagagacacgagataaccagaattcacactttttaaacttagcatacaacttgtgatctcgtaaccgatgcagtaccaatctaagatgtagctcatgttcccattctaattcagaatagaccaaaatgtcatcgatgaacacaatcacacatttgtccaggtaatccttgaacacccaattcataagatctatgaatgtcgtcagggcattggtgagtccaaaagacatcactagaaattcataatgtccttaccgagtacaaaattagttttcgggatatcttcctcttaaattctgaattgatggtaacctgaccgaagatcgatcttggaaaagactatcttcccctttcagttgatcaaacaaatcatcaattcgaggtagaggatacgtgttcttgatggtaagcttgttcaactcccagtaatcaatacacatctgcaatgacttgtaatgattgaattttagagtatggattagtaagggaaattaacattaattattgatatttttatagttacttatgaatttatttaatttttggtcccattattaaaaataggcactagagttataatttctcaattctggagattttattaaactctagaggtattatttgagttatatatgaattatgctacttttataatttttgctcggcgatgatggaaaatgcgatagatggccatttaaatcaaataggtaagtctagaacattttcttagtgggataaatattgcagaaaaattaaataccaagtttgagcaaggttatggtttttgaccattttacccctagactttaaattcttaagtcataagctagaagggtattttggtaatttagcaagtgggggacaggtggctattttagagctttacacctagttaatgttaattcgtcaaggaattaatgaaataggcctttttcacttaggaaaaaacaaaaaaattaaagaaaaaatcaaaaatcaagagaaattcattctcattctctctctctctttgctcagcccacatagaaccagaaggaaccaagtttttacttcatcttttctaaaaattcaactaaggttcaaggagtaattggtgtaggtaagccctagaaactcttaacttttgacttaagttttgattgattttggtatgtaattttttaggggttgttagggtttgaatagtttgaagtttgatttctaagtttaatttgagttagaatgttgttctagcagctggtttagggatgtggggtgatggatgcacaagtttgagtttgaaaactcaagctggttcatccatgacatgttttaattttgtgtgtttttctggattctattgattggcattggttgtgggaggtgaatatagttgttctagaaattttggtgggattcggacatgttttgtgcaggttttgaattgtttgggaaaacctagtgcaaaccgattaaccgatttgccaagacctataaaacggttaaccggtcctggcaggttcccctgaaacaattcttttcgtcgattcctgtccattttatagccttatttgggtgattccctgttttctagagtattgtagtttcagttattagtaacagaaccttaagttggcagtttggctttcccagattagggttttggcttattattt

SEQ ID NO: 33897 - DNA, 1040 bp, Cannabis sativa
  modified_base (63)..(73): a, c, t, g, unknown or other
tatgaacaatctacatattagcgaaattgaatgaatttagaaaaaaaatccttaaatccaacnnnnnnnnnnnttcagggaaaatttttaacgacctcaaaagttcaggcggcgtgatttggtacatgtcaaaattcagaggataaaaatccaaattagccttaaaaaatgttattcttaaaatttacattgatgtcactagggatgcacacggggcggggaattagtagggagtgctctccctgttcccatccccgttaaggattttaatccccatccccgcttattccacatcggggacgggacgggaaatcccctaatggggcggggacggggcagggaatcccctattgtaaaaataaagttttcttaaaaaatttaattgtataaaattattaaattacattaaagataaaatattacatattatttactttttaatataataattattatacaaaaacacaacttcaaaaattgtaaaaatgatattaatatactttaaaaaatacaaatgcatatataaaatataaaatattaataaaaaataattaataaattaaacgggtccccgtcggggcggggagtgtcatcctcgtccccgccccattcggggataaaatttgatccccgtctccgcctcgttccccatttagacggggaatccctgccacattaggggcgggtccctgcgggcccccatccccataggaaaaatgtgcattcttaaatgtcacacaataacattgatgctatattttttttataataagatattaaagatgcaacatagataatagcttaataaagaaaaaaattatatatataataatgtgtgggatcataattatagtatttttaaaatatattataccattagagtatttttagaagtatgtgccaaaaataatgtggaaaaaagataaaataaaataatatatctttgaattatgtggagatacagtaggatctctatccaagaatacacttgggactaagtaaattatattctaatttggaggttataactaaatagagtt

SEQ ID NO: 33898 - DNA, 1298 bp, Cannabis sativa
ccttgttgaggtctgtgaaatcaatgcatacacgccatttttagttccgtttaggcactagggtaggatttgctacgcaggttggatagaaagctttgatgattactatgtttgtgcggagcttttcaacctcttcctttcatgcctgtgattgttctttgtcaaataaccttcttttttgctgtataggacgagcattgagatctattattgggatttaatgccataaatgaaacccaattttattgtaatcttatttatgatagttgtttccatttcacatatatgaagttaaatgctagttgtttctattttacaaactatagtttccttcgtgattaaattgttttcattttttgacattaaacgctagttgtttccatttcccaaactatagtttttatttcaaagttaaatgattttttttttttttgagattaaatgctagttgattctattttacaaattatagtttccagtttgagattaaatgctagttgtttccatttaacataaatgaggttaaatgctagttgtttccatttcagattttatagtttctattttgaggttgtattgtttcaatttttgagattaaattgtttctaatttcaatgttagtttacattttttttatatatatatttttttttctattagcatatatgaggttaaatgctaattgtttctatttcacaaactataatttctattttaaggttaaattgtttctatttttgaggttaaattatttttatttttaagattaatttttttttttcattttcaatgtgagttgttttcttttttacgagaaaggagattcttgattgcacaaatgtttcagaggaataattgatagctaactctattgctccaaagtatatagcttagatcaatttacttttcactaagaatttgttgaaatttgcaatttttttatatatacaatacaagccccaaagatataaggcactaaaatctgtgaagaaaaaagaaaagccaatggagattgttgggcttttgacataatttcctcaatacttttgacataatcttgggcttcaatatcacacgtataaatgacaatactagttgtttctatttttttattttatttgttttcattttcactaaaaatattatagacttttgcaacctaacttttctactgaagaaaatttaatacaaatttacaataaatagaaaactctcactatattactaggtaggtctcatgtgaagcaagtctccatgtaaaccaaagaaactaacatattattaggcaagtctccatg

SEQ ID NO: 33899 - DNA, 1513 bp, Cannabis sativa
tattggggtccacaattaaataaattcataaataataataaaataataaaaattagtgctaattgcctttattaatccaaattactaaagcggtcattacaacgaaagagacgtcaaatttgcatttgatgcgttgcttggaaccgaggtattccaatgatgatattctcctgaggacacttgctaacataattagccgtcattttacaaatccatactacacgcgctccattaatgaaagtaattcccatgagccacaaaattaatgccatgtgtttctttatttcaaaaagcgagaagttgttgatcataaatagatttgtttggaagtcaaaaagatttcctcatttttaatatacacatgccctcatgttatcaggaaggtagaatgcaagccttcaatgtcccttgagttctgaaggcttgggggataaatgttattaatgtttccggatggaggaaacatgtaattctaagatggttttagctcaattgttctaggcccaatcgcaggcacaatcaagataataagctgggttcattagaaaagtcaagccttttttatgctggaaggatgactcaaccatacgagacaaatttctagcactctgtgcatctagataacatttagcaaagctttcagggtattagttcataagcatccaaatatccagctacgtatcacattcattaattaacaaatcccataacatcaggacttgattcctaggatcatgttcaagaatcatatcttccgactatagagataaagtaattttcaatcaagcattaatgtgcctttattatccacaaaaataggatacaatttgacaactatcaacctgatgtggcgtcctcgttagcagaagatcaatgcctcatgggtcgggcttcactagatgagccagaagttgatgtattatttgtatttacgccatcagcgggcaatgtacacatattagaatcccaacactacaaatataagaaaatccagtcatgcaaagggttagaatttgattggttgagtgctcaggcaaattctaaggttcaaacacttggcaaaacacttgtgtaaattaaaatagtttttctagccttatcataataatattgacttttggactagaggtcgtaatccttaaatgtattttgccacaaaaaaaaaaaaaaaatttaaggtggcgtttggtaacacttttttgtttttgaaattgaaaaagtgaaaatatttttttaaaccatgttctataaatttgttttcacttttcaatttattaattgagaatcaaaatttttaaaaaaagtcgttttcaatatttttttaaataattttttcttcttaatcaatattttggagtccgatcggacccggatctggacccaaatccacccccatgaccctggcactaaactcgtcatttgactcgaacccaaatccgaccccggacttaaacccgacttaaataaaatcaaaaaataaaaataaaattgaactttacagaacacacttttg

SEQ ID NO: 33900 - DNA, 4441 bp, Cannabis sativa
aaatgcaagcaaattgttccaattgcaaagttgaccatattgtagagacatggatcatgaactcttcgagtgaaacatgagttgaaatgaggctatcaatagagaaattagagaacttccaaaatttcctttgatgtttgcactggaagagagcatgaataattgtctccttctcacggtgacataaagaacaaaggctattagtatcacttatgtgccttgtatgcaagacgtccaagactagcaagcagtcttgtattgctctccaaaggaaaatttgaaccttagatggaattgatagtgaccaaatttttttccaccaagtaactcctgctgtattactggtgttcggttgctgttcttctaagagcagagccatattgtaagcagatttaatagtatagcatccattatttttatggtgccaaatgagatgatcattatggtgaaatagtatgaatcttctcaacatttgagtccaggaaaagagattgaataagaggagaatcccatcgtctattgtctgaaatcgggttcgaaacattcatttctctgtcacctcctttgaaaagaagaggtttaaagtaagtgaaaccaggtatccatagatcggttgcacaacaaatgttgtgaccatcgccaaccttccatctcagtccttgtgtcaggagctcttttccccatatgatgcctctccaagttaaggatggataagttccaatttcagcatccaaaaaattattatgcttgaaatatcttggcttaggagagaggttggattctgaaaaattctccaaccttgcttagcgagtaaaacttgattgaaatgaacgaaacttttaaaacccataccaccttccactttagcttgacataaagcttttcaagttttccaattgatactagttcctgaagaattggagccccaccagaacttattcatcatgacctctatttgatcgatgagcgtattagagagtaaaaaacaactcatggcataagtcggtatcgattgtgcaaccgcctttaaaagtacttctttacctccaatagagaaaagttattcttaccaagaggataaaaatttccaaagcttatcatttataccaacaaacaatatttgttatcccttccagagtatgatggtagtcctaagtatcgttcatggcatagttaaataggtatatctaaaatctattgaagattcgattgagcttgtttagttgtgtttgatgagaaagagaggactgatttgctgcattaatattaaacattaatacatttaaattttgtaatacaaatcttatcatattatgaaaataattatttataattaatgattttaattttagaattatataaatatatattgatatagatagattttttataattttatatttgatttataaattatttttacgttttacttattttttaactaaaataaactttaattttaaaaactaataaaatattatataaaatataatcatataatactattataattgatattttctgaaatatttttaacaaatttttaattaaattaaaataattgtgtaatactaagttaattagttttaaaattatatagatatatagatattagactttcttcaaagaaacatcacaaaaagtaaaaattcaataatggtacaaattaaaatatatattaagatatagaattatgatttctctaaacgtcaaatatagaaacatatccagaaagagaaaagtggtccctactataaattttttttatattttttatttgacttataaattatttttgcatttatatatatataaaatttacttatttttcaattaaaaaaaattaattcttaaaattgataaaatattttataataatatataaaatataatcatataacactattataattgatatttaatgaaatatttttttaaaaaaaaaactaagataattaggtaatattaagttaattagtccctcatataagagaacaaaaaaaaaaaatttaatacaaataaaagtgaataattacatgtgttatttataatgtaaaacataacatataacatactaactaatcaatatgtgacttctttaaacatatattatggagcatatcatctaaaatttggaaacatatacaaaagtgagaaaaaaataatataaaaagatgaaatctcataataccacatcatctctcttagttttagaatcatttagatgtagatgtagttatctaacagtttttgttggattgataaaatattttaagaatataataatatttcgttaatttaacggtgttagtagggttatttttataaatatatatatataaatattaatataatttagtttagataaatttaaatatataaaaatattaatatattatttgttaacattattattttttttattgttattttaatattggaagtatatttatttttaacattcttaaaatttatatttatttttctcaaatttttatctttaaatatcgaaaaaaaaaacaaaattaaaacattaactttcagtaatttataaaattttaaaaatacacataacaaaaataaaaaataaaaatataaataagtatatgtgtattgcacgtaacaataacttaatatagatatatgtaaaatatctgttagatgccatatattatttacatgtacaactaaattaatggcagcatcctaatacaaaaataatacttaattaccctcatagaaaatgtgaacgttcaacatttctagttcaacatgtgtcttggtcgaaaaagtgtccctgaacaatatgttgaattgaaagtgtcaagcactaggggaaatttcaaaacagcaaataaagcgattggaacaatggcaagcatagaaattaataaagggacccatttaatcccatgatcatacgctaatacaaaggcaaaactaaaggctaccatcatggctatcattgagaaaaagagtgatgttagtccaataatcagcttcaacggtaaccgtttgagaaagtcatattctgtgtaacgagatatgaggattgacaagaacattaccattgcaactattgagttcaataatgcaattccatctgacaagacaaagattagaaatgaggtctttgcaagatcatttggagaccctttgtcattgttacctcctggtaaactgaatgctgctgcgaaaactacagtagcaattaaagttgccacaagcatgcatgattgagctgtatgtttcatccatgtctctccttctctcaacaatctcttatgctccaaacaaaataactcttcggggtttttacctttcttatttttggccttttcgtaagaaggttgcacaatcttcttcacctcctattttataaaataatataagacaatatatcatatgaataagttaatcaaaaaatatatgtacatcaattaaatatgtttattattttcctaacgcagtacagatatttctcacattatttttacatctaatgaattaggaaatgttataaataatgataaatttcccaagaaattttaaacgatttatggagaaaaaaaggaaatgtggtgtatgtggtaatcatgtgtgacatgtccaaagcatatgatcgcttggaatgactattcattgaaaaacatttgggctttgggattcagtatgggtttcataaggcttattatgttttgtatcaactttgttataagcttgcaaatccttttgaaaggagggcctactaaatcctttaggcttcggagaagaatccagcaaggatatcccctctcattatatattttcattctttgttcagaagttctttctcgactcatttattacaaggagagtataagagaaattataggggtcaaagcagatatgagaaatatcatggagtgtttggacaagtattgtcaatgtagccaaaaaatcaatatacacaagtaaaatgtgtttttctccagtaattttgattagagaactaaggacgaaatcttggattttctttagttttgtaggtcatatttttgtatagaaaattatgctgattgatattgtgttagttgcatgttctggactgtttctttcctagctatttaagttgatcatctaattcttttttagaggcatctttttagtctggcttcatttatcttttgtcatgccagcttttagttttttgtatttttattttttggttcagctcattgcaagctggattgagctgatgctttggttagttaagttggtgttactggagtgttattaaataagctgatctagctttttctaactaactctccaactttgatagaatcttctagtgattgttgctctgctaaggcaaaatacttttctgtattcttctttgttgtaggtgttgcagattgtaattcattggatcttcaaggattgaagaaggactgttgat

SEQ ID NO: 33901 - DNA, 2383 bp, Cannabis sativa
ttttaaaagaggtaacgaaactcatttagctaacagagaaataataaggaaataatgatataaataagaaaaagaaaattccttcaaaattattaaaatataattaaaaataagatttaaaatttatcggtgactctttgaggtggcctccatgcgcaaacgagtcaacaacatattagccaaataatatggcacaaatagtcaaataaaatagctcaaactacccaaaaaaaaattatggtacaaactagctaaaaaatgatacaaactagccaaatatataaatacatatatagaacacaaataatcaaaatatttgactatataaaataaaacgactaaatgaatacctattaatataaataagctatcaaaaacgtaagaatgcaatttgaagtaaataataataataaaatataaaaggaaatccaaataactttcactaaaaaagcaacacgactacattagaaagaattaaaccttattaataacaataaaatgataaatatttaaaagcaatagatatacaaaaatcacaaaacaggagaacatttaaacgcattttaaaaacgtaaaaatgttgaacaaaaataaaaccataggtgtcacgtaattaattacatgaaaattataatgaaaaaagtataaaaaattaaaaaaaacaaaataaaatctatttaagtaacaataaaaaaaggaaacaaaaatttaaaaaataatttaataaatacagaacaataaaataaatataacaaatacataaaattaataaatataaattcaaaattaatttttcaattaaattacgttaatgaaaaaacaagaatattttgcttttcaccaagttttaacagctatcaccgcgtgagatgggactaccattagtgtaaaattcagtctttatatataaagatattgattaatagattgatgattgatactcattactaattgcgtaattgtctatttttttattaaaataatatatgtaataatatttactttattataaatttaattaattattaaatttttatatttaattatgtggtctataaaaattaaacttaaaggggcagggctatcgcagttatttattcaaatttaattaatacgtgagtcactaatcatgaaataaattaatttttctaaaatatatatcaataaactttggaacccaaaaaatataattaatagagaaaaaaaaaaaaagaaaagaagaagaaaggacaagtcggatcacgtgtggaaattattttttttaagaagaagaaatcaactatttccgtaagtgtggtataatattcaaccaaaaaaaacctacaccagaaaaaacttacattttataataatataaaaaaattatacagtgcaccattctaaaaaaaagtttattggtggacttttatttgttttagtatttaaaagaaaaaattagttaaattttttaatagtcacttatcttatagttaattaatatattttataaaattttaaaaactttaaaaaaatttaatacattaaaaaaagagcttaaataatttatttatatgcttataaaataaaaaaaaaatcttacatacaatactatttaaattttatttttaacgtattaatttttttttttaattttttaaaattttataaaatgttttaaataattataggtataatactaaaaataaattaaaaaattatggaaagagatcaaggagcacaggtaaacctgtgttaggagtgcattgcagaaattgaggattagacaaaagagatgggacacgtagcccatccaatataattggggactttgggaagaagtaacagtgcaattgccaaacaagacgtcattaagtacaaaagagtagccttaccaatagctgctgcttctgctctactcagtcaaagcccaatgggccccacaacccattaccctctgctcatgagtcatgacacctcatatatatatccatactaataatacaattttgaaaagttcctaatgaatttctaactattcaaaaaaaaaaaaaaaaaaaaaaaataggataaatattttgtatagtaagtaaagtatattattgttatttaagatatattttaatattttataaaatttaaacactgaaaatagaatttaaattgtgttttacacgcgtaattattttattttatacacatattaattagattctttgaacaatactttctatattataaattttttaaaattttataaaatgtcttatataactataccatatatgaatataaaaaatatagattaattttttttaatactgaaataggcaaaaaaaaaaaaaaaattgtttcatcaataacataatgaaaaatacacaatacctaataactaaacttttacaaa

SEQ ID NO: 33902 - DNA, 2386 bp, Cannabis sativa
gtatttgggtcgatattcaagtggtgatagataattttagggtcaattcctatcaaatctgaatgagccaaggcgaattgatcctggtttgccctcagaaaacttattagttgctattttagtctttcatccaggtttttcccaatgagtacacactttgtgggattttctggatctaaaataacttcctccaattcctcgattggtttcagcaggttctgttcctcttgaactgaggatccagatcctcgtcttgcttctcgccttcctcagttgtgactgccattagctgatgaccaactcttttattttgcagttctatgcaatagcattcccgagtcagtagttggtcacctcgcactacccatacacctatcggtgtctgaaacttcagtgataggtgtttaattgaactaactgcccctagtccaatcagtgtgggtcgacccagcaatatattgtaggctgatggtaggtcggcaataaggaagtcttgcattatgatagtggataaaggtgtctcacctactgttaatgggagctcaattattccttgactggcgacactatcgcccgtaaatctacatagatttaccatgcaaggttgtaactttgctctttccagtcccattttctttactctgtccttataaaggatattcactaaacttccattatccaccaacgtgaggatacctcacattatccactaaaaacacaattggaggtttgtcagccttggttctcttagaggattctagagcgaaagctgattgctcgttcttaacttctttgtcatatttcttttgggcattgttactttctcccgcaagatgtggccctctcgagataaccagaatgccctctcctacaagaggaggaggttgtaatccctggttgcttgggttggttatttattgggcggattgattcgactggttttgtccattgccttgtcatttcacatattgttgaaagtaaccacacgagataaggccctctatctcatctttcaattgacaacattcttctgtcgtattccttatgtccttgtggaatttacaaaatttcgttgcatcccttttgtatcttgcatgtctcatgggctcaggtttgcgaaatgcgaccctgtgctcacgtgcaggatagatatttttgtaagtttcattaagctcggtataaatagtgcagattggcacgtacttgttgtgctccttcttttttttcttatctttggctgattccttagagtcatctttcctctttgtactagagcctcctagattgtcagcctttgtcgagacggtgcttgtcgagacagtgctgggtttacctcccgagccagtctttaaaaacttcatctctttccttgcttcctcctttcgacttgagctctttcattgaactcagtaatattttttacagggtgaccctgcaagtcattccacagctcgcctccagctgttgagagatcagttgtaatccccgcttgaagtgtagtaagatgtatactgtcgttcaagtttctaactcttgcagcaggtgtgctgaaaagacttaagtaagcctaagcgtctcgcccagttactgctttatgttagtaaaggaagatgcttcaggtcgcctgtctcttgctgcctggagctgtttcttgaagtctttagacagctggtcccaagaggtgatagagtgatgggtgaatttgttgaagcagctgttcgctgccccagttagcgaggtggggaacaagatacaacgtaagtcatttgtaacattactgactcgcattatcgtattaaagttgttgaggtgagcgaccggatccgtagtcccatcatatgacaagacgtgagggtttttaaatccctagggaaattcaacactcataatggctggatggaaaggctcaggttcttcgtccgagtcataaccgggcagtttcccatattccctatcttcgtatctcctgaatttttcctccaactcaatgattcacaattggataggatcctcttgcttttaattgagttgttgacgtaaatcaagcttcttttgattcaattgattaagaaggttcggccgctgtggatcatagttacttactaacctcgtttttgagtaactttcagtcccaattgtgcccgaactttctccatcaccactgtgacgagttttatcccctcctcgcgtagatcgactgtaatctcgagatctcatacgtcccgagctagaactggcctcgtcacgtatgcgccttctcctttgggaacaacttgatacatgtcccttgttggggtttgtatacgccctttccctattagtgcgagaaggacgttagcgacgacttggtggtaacccacttgtcctaggttgagtcccaatattt

SEQ ID NO: 33903 - DNA, 1578 bp, Cannabis sativa
  modified_base (677)..(687): a, c, t, g, unknown or other
tctctctctctctctctatccttttatatttttctataatttacatgattaataaaagtagtatatgttttaggatattttgtagtttattcagagttaatttatgaacgatttacatattttaacaaatttgatgttttgttacttttatgttattgtttaggtgtttttatagttattttctattgtttttattttttttttatagttgttgcttagtttatgtgtattttttatcgtgtatatttttaatttattctagactatttttattgtatatatgtgcatttgatttgttatttttatgttatttttcagttatagttattttttttaactatcactaactcaaaaagaaaaagagaaaaaaaaagttaaaagaattataacaatatattccatgaaaaaatgaaaaaagataaatcaagttgtcaaaagtaaaaagaaaattcgtaatacaaaacatattgagttgatattattttgcttcttgcaattaggtcaatattttgtagttatattattgttattttatagttgttgtcatattgtttgttaagttatttttaattattagttattttttttaattttattaaaagacgatatttttataattttaaaactttaaatacaatttttttataaaattattacagtaaaaatataaaaaaaannnnnnnnnnncacagtatttttgtaaacttttcttcattttacaatattggtttttttttttttttttgaaatttctcaataaattttgctgaacttaaactagtagtggtatatgtgaaggcaggtggagaaacataaagtcattatataaaataaatagggtttgaattattttttacatttaattaatatcatttggttgtatgttactacgagccaaaatgaaaatacaaattaatattcaaccttcccccattcaggataacaaattgatttacagcaaaaataaattaaaggaacgaaacaaattgtatggattaggtacatcaaataaaacacatccacaaagtaaaagtatatcttataaataaataatattatgtgatgcgagggatcttccgttgccaatttcaatttggtcattcaagtagctagggttagcaacaactccttttccattggctaaatcgacatttccaaaatgaacaacactacattaaaagccaaaaatgaatcttaattgagaaatttaatatataattaaatatgttggagatttttatagttatattaaatttgtaattataatagttatatttatttttaatcattaaatttgtgtaggccccgccatttttattaaaatttcattgtaattaactaaaaatcactatttaattaccacatatgattacttataataattacaactaaaaatcaatatgtaccacaaatagttacttacaataattacaactaatgtgttgcatcatgacctattttcgataccgtgttttaaaacaaattaacactacaaaaaatcttacttttattcacaataaaatttgtgattaaaagtgaaaaaatttgttactaattataaaattattattcctatat

SEQ ID NO: 33904 - DNA, 2028 bp, Cannabis sativa
aaaaaataaaataaaaaatggattattgttatggtctgatttgttttacctaaaaaaaaattaggaaacagaactcaaagcctattattttgtttgtttaattatctattttgatttttattaaaaaaaaaaattatctattttgattttaaaaatttaatatcttgtaataggggtaaaatagtaaaaaatgttgttccattgataaaacagagtactataaaaacctctataaataaataacatataattcatagaaacaaaatcacaatctaacagaatattataattgtagaactgagactgagagttgaaaaagaagataaacaacaatgacaatggatcaaacattccaacaccggtaattaaagctacctaattatcattacccttttttcattttttagtaaagttataatctttttaatttttctcttaacaatttgattttcttttttgttttcttggatatcatcataaacagaacaagaaaagagaagaaaaaccagattatgaaataccacaaagaagataaagatgatgatgatcttgacaatgaaagtgattatgaaaatctcccagaacatgttttgtacaaaactttcaccaatttgcaatttgatcttgaagaagtgaggttagtttgtaaaaggtggtttaatttgatatcttgtaccaatttcatcaatcaaaatttccttcaatcaaaaccttcattgttgatacaaagtacatctggggttagaaagaaattcaagtcaaaactgctagagttagctgatgatgatgatgatggtcatcttgatgaagggctgagatttaatgtgacaaaatttggtatgactagaatgggaaaatttaggtcaagttgtaatggtttgatcttacttgaacacacaaagagatttgggtattataggacaacatgtgctcatcatggtggttatgtctatagagaacgtccaagaatatatggtatgattgtgactaatgtgatgaccaagactcatattagtctcccaatttgcctatctaaatgtacacatttaagatgttgtttgtgtttggttttcaatccaaacacaaaacaatacaaagttattcacattagggcaaatagttttggtatagagacttttcttcttgggagtaataagaatgaatgggatgttatttcaggtccaatagtgcaaaacacaccctatgatgataaatcttggactgacccaatttcatgctcaaatggtcgatttctacattgggatgtttctttagacaaggctattttgtcaatggagacatggaatgaagaagatgatggtttgttaagagtaagagagactagcttgccatggagtcattatgtgtcgttttatagagaaaacatgtcgttgttcgaaatggcgggtaatctttcactcatgtatagattctcatttgtagttgattcatatttgggttttgaaagattttcataaccatagttgggaaaagaagtttagtattgtcattaactcaataacatacttaccaattcctaatttgaagaagccttgtgagtttgacaataggttacctcaattttggaaactaatgcccatttgttgcttaagagaggatggtcaagtcattgtcttcaaacatgtgaaaaccctttgtttgtatctctatgatttgaagactatgaagttgaaaaaattgagtgattttaagtgtaaagactatacaatcttgttacacaggcgcagcttattccattgggacaacaatagtgttaaataggtataatggttttgatttttgaagcacaaaaagtcaccaatgtgaagatcttatagtgtttgttttgtaacttcagtgtttttgtttttttgatttgcttttgtaattttggagaatttagctattttcataagtttattctattcatatatgtttagtgtttgagtatgtgaagttgtgaactcaaattctttgcatattaccactttgctccttatgtatatgagaaggagtattattgtattt

SEQ ID NO: 33905 - DNA, 1631 bp, Cannabis sativa
atctccaaagctctggtgggaaaacgcccacttaaccacattattggcagtaaaattatagattctactaatattagaaaaattacaactagtaaaagagggagatgacttaatataaaaggagacatagttctcaagctcccaccttgactcactcctattaagagcattgataactaccctcgaatcactctctacaataataaacttgcaaccgagcttcttcgctacatccagtgcacagcagcaggccgccgcttccccacagagagcatcagcaaacaacagtctggcagtataaacccaaatcaccttgccaagatgaacccttgcagcaacattagtacacatagtgtccaaccccattttagcatcacaattcagttttatccagtcttgcgggggagggcgctagtcattcgtcaagcagggtgtagagcaagggaacacagaagcatggtgaacaacaaaagaagagcaaatactatcaatgcatttagttacatcaaagagacagttattatgtaccttatcattcctgatccgccagatggtgtccacagttaataaagcataaaggaagacctcatcagaattgatgcctttatttttaaggtcccaaataaatttaaccttgtcccacatccggatgccagtatcacacacaggaaaaatgccctagggagaggatctccacaaatggaaagccaccttacaagataagaacagatgttcaatagtttcattctctatcccacacagaggacaggacacctcctcaatgggaaattttctgccgatcacagaatggacaggaagagccttggctagaatacaccaccaaagagtttttagtctttcagaaattttactgttccacaatctgttccgaagagacggggcgacctcacaaagaggcgctctgtcaagggcttgagcaagataagccgatttattcgagaactgcccattcccttccaacgtccaaatccacttatcgttgcccagtctagacgggttaccccctttcaagatattaggtacagtaaccttatcgaaagcactgtttaacaaggggatattccatcccccattatctaacaatagatcagcaactttggttacccaaaccatggaggagccgttagaacgagggaggaaaccttttctatgatcgacccaagggtcatttcaaatattagtatccttcccgtccaccaccaacttacaagctcctttttttttaagatagttttagatttaaccacatttttccaaaaccacgaatcagaattcttggaagtacaattaagaaaaggctttcctttaaggtatttcgcttccaggatctgacaacaaagggattggtttcctattaaaaggttccacccccattttgccaagaaggcgaggttaatttctctagttttacggaaaccaagcccccctaaagacttaggaaggcaaagtttatatttgagttttagtattttattggggttctaatgtttgagtttgtgtttatgagatctatttttatttaattagttatttatttttatagattttgagaacttgaaatttgatgttgtttctattgattattgagattgaaagtttaatttttcata

SEQ ID NO: 33906 - DNA, 2164 bp, Cannabis sativa
  modified_base (2105)..(2105): a, c, t, g, unknown or other
acacacacacacacacacacagccgcccccatcagagcaacactttactccatcagttggccccgtctgtcacaatacggacctgttctcgatctctatcttcgccacaaccacgtcctccatccgcgtgaagatcagaggtcctgtccaatcatccgtcgaagatcccgtcctagccatccgcgcaaaggcttcgtcccaatcgtcgttccttctctctgtacgtctgtacgaaggacccatctgcctgaggtcgtcgttggccattcctccactgtcagagcccatatcccgccatgattgagctaacgcatgaggcagagacacaagctatcattgaagagaggactcaagtgactatgatacttgagtcgctatctccttacttcaaggctttcaccacaaattatgtgatgaacatgctcgagtttaacatgacccaattattgaacaagtttaccgtgtttgagaaccttaacaaggataagtccaaagaaggggaatcaaacatcgttgaagcaaaatccaactctcatttctcttctggtaagaaaaagaagaagaatagtaaggacaacaatggtggccagcccaaaggcaagaagtcacccaaggccaagaagaacaaagctagccccaagtccaagaacaagtaggctaaaggcaactatttctattgtggcgcaatgggacacaagaagagaaactgtaacaagtatctcttcgaacttaagaaatataaatatgatttattttttcttgaagctaacttagtggaagatgataaatccttatgtattattgattctggagccactaatcatatttgttcttctatgcagatacttgaatcgttaaaggaactggctgatggggaagtgactatgcgcgtggataatggagcataagtgtctaccaagggtgttgccaaatttaataataaatttttgttattgaacaatgtttatattattctagaatgtactaagaatattagttctttatctcttttgcatgaataattttttaatatttgttttattaataatgagattattatttctaagaatggtgcgcctatttattttgcaaaatagagtaacaaactttatgtgctcattccaagtgatcaattaattttaaataataaattatttaggcaaaaggtttctgataatgatgaaacgtatctatgacatctacgtttaggccatattggcctagcagaataaatcgattaacaaatgatggtcatttgagagaactaaaagttggaactcttccgatgtttgagtcttgtttagaaggcaagatggcaaaagacctttttctataaaatgtaatagagctaaagaataacttgagcttatacacactgatgtgtgtggacatattaatattcaaactcaaaatggctatgaatactttgtcacttttattgacgattattctagatacggtcatacttacctaatggccaagaggtctgaaacttttagaaagttcaaagaattcaaggctatggctgaaaaagcaattaggtaaatcattaaaaacactttgatcagatcgtggtggtaagtatttggatttcgaattaaagactattttttggaagaagggatcttgtcctaactcacagcacctagaacacctcaacagaacggtgttacagaatgaataaattgaaccttgttagacatggtccattcgatgatgtattactcatcactgtcgctaaacttctagggatacacacttttggcgactacttacattttgaatgtagtaccctcaaagagcataatcaatactctaatggaattatgaaatggtacaaaacccaatttgaaacaattttagagtattgtcatgttatccatcgatagggaaacttttagttttggttttaagtccccaaaaagtgatttagtgtgtcattcattagtttacgaatattgtgatttaaggacctgtaaatcatcgagcaactgctccacttagattaatcggcacacctgaatttagaaatgaggtaagataagtatgggtgcctatttttaacctgggttatatttatgattatgattatgcttttcttactnagtctgttgactcacagttattgtttgcatgtgtaggtaagagcaaggctaaagctgag

SEQ ID NO: 33907 - DNA, 1921 bp, Cannabis sativa
  modified_base (67)..(71): a, c, t, g, unknown or other
tgtttattttattgttttagaaattcatattaggatgttaatgcaacatacatggtagtaaatctannnnntggtaaaatatttccaacaagatcctacctcaccaccttgcacaaagctgctaaataatagcatggttgggtcatagaccaaatatgatggtgcagaaccggttatttctcaaaaacatttaaaaagaaaaataggaagaattgagtcagaacctgtgagaaacatctcattgtttcaaggtaatcctactaagggatttacatcaagcctaagtccataagaaatgatgcaagtagtgggtttaacttttcacaattgaactcgtacacattgtctaatggcataaatgaatggacttcaagagaaaaagaagaaggaaggtgggaatgtcttcatggttttaataccataagaaccacttctactataactagggcattaaggaataaaccaaaacagtacataagacaagtagcatgctcaaaactacagcctgtacaaaaatgtttagtttatgagtgccccagtttcttagcagttcaatccaaaagttttggtaaatgctccaatgactcatatcgtgatgttccatctataaataatgagaagactttcccgagaaagttagtgaaatgtaacaacattgaatctgatagtatgccagtgtttgttattggaacaatgagtttggaggaacaaattgatgagttgcaaagaaagttggcggagaaagacgctgaagttgaatatcttgcatcacaattagctaaacaagctactttaagtaagcaaaaacaagtggaacaggggcaagtgtcaacaactttgccaacacaaccttgtccaaaagagcctacaccatcaacttcagtacctcatcatgaattgaaagcactaatcatgaaaagtatccgagaatgttatgaaacaacaaatattcccattcttggataccataaaccatacccgtcccattatgattatgttccatatcccccaaattacataaacttacaatttgaaaagtttgatgggataaatgggtcccccaaagaacatctggcgtactttgtctctgcatgtggtgaatctgctcagtcagatccattactcataagacaattagtacaatctcttaaaggggtggcattcacttggtatacacaattaccaccaggatcaataatcacatgggatgacatgcaaagagccttcattgctcagtttgtaagctcaataagggaagtcactcttagtgacttagctgaaactaagcaaagaccagatgaatctgtcaatgaatttattactagatggagaagtgttcaacttcaatgtccagaaaaattgtctgagctatctgtagttcaattgtatagacaaaatgtcattcccgagataacagtttacttattccaaagcaagtaatgttgaggtgcaaatagctcgtcaaaacgacatgtcacatgaatcaatggctacctttgtaaattatgacaaaggcaaagaaaaagttaaaatactaccaaaagagtttattataaaagagactatggagtattcgttcattgatgaagatgatgtcaaacaaatattagatggattattggctgcaaaagctataaatctcccaacgcttaaaaaaacaaaagaaggcactaatactgacaaaaccaattattgtcagtaccatcgaagagatactcattcaacaacaaaatgttgtgccctcaaaaatatcattgaaaagatggtccaacacgaaaagatttaaatagtgtctcaatttcaaaaagcacattgtgacattgttttctttaactaaggacaagtcttccttttaaataaggagaaaggtggtcacttgttgcaacctaaaaaaaatgagcataacaaaaaaaaaaaaaaa

SEQ ID NO: 33908 - DNA, 2440 bp, Cannabis sativa
  modified_base (409)..(418): a, c, t, g, unknown or other
  modified_base (977)..(979): a, c, t, g, unknown or other
agaagctaaaatgacaagcagctgatcgcaatcaaaatgatcttggctccctcctcgacgaggcatccctatgagatacactttaattatctcgagagggagagggtcgcaagagtacaaaaggcagttactccggtaaaagcaaacttgtaaaagaattgcgacctgagtatatactggctcgttatgattgccataattggacgtcaaccagtggcagtcgacgacagaactaaaaccaggattactccacctggaactccggtatatgtcagggattgaccctgaatattgaaacgatttgtgggagaatgttagggattgaccctggacatcaaaactcattttatcaaaaccagatgttcttggaagattgataaaataaacaattgaactggggaagttcttnnnnnnnnnntgattgtaaatcacattattgatggaatatttcgaattccagttgtgaataaaataatcatttctttcaaacaagtaattacaaatcgtaaaatctttaaaattactcgaggggcatatatgtatgagtaaccagaattgatctggaaatacatagtacaatgcaaacccatagtttcaaattttgaaaactttataaaatggcctcgaccaaacctttttgacggaagaggggtcgaactgttataactccctgatcaaatcttttcgacgaaaaatgggtcgaatcattataacaccttgatcaaacctttctgacgagaaagggatcaaaccattgtaatttttgatttataacctatctgacgagaaaggaaaatcaaaagttacgactagcgcataaaactgaatactaacagtttgcgctaggggaagtattaaacgagacatccaaatgtcttgaaaaaatacttaaacccaacacgtgggtagatttttaaactactcacgtaagcaataagaatatatataaaatgacaagttcattaaaaatatatttnnntgtgcttaaaatgggatcatttccgatgataagatggaatttatgacggttcgtagattgaggaatgagcagatctgctcggacataaagtaggaaattaactacttaacatcgaaagaaaggacaatcaatggaaacccctaatgaactttatgtctgtgatagtttatattatgaataaaacgcaagtaaacatccgcataataaagttcatacttaaaagtgtgaggcattaaaaaagcaaagttggtcgtccaaccttgcaaatatgtctttacaaaaaagtaccactaggggcaaaaccattgtctcggccaaagggccatttcctaaaagaaaaaaaggagctaaataaaccaagtctacatgctgggagacttggacataatttcttcttcttcctcaacttcgtcgtcgtcttcttccatcttggtcttctcgcagagagctaaagtctcctcttccttctcctccaagaagctggtatccatgttagggttccaaagccagactcggtatacagtgcgaaaaccaactttatcgcaccgttctacgatctcaatttctttctcgaaaagtttctcagcaagcttctcctcaaactcatcagcttggactttgagggccttctcggcctcctcttttaccttctcggcttctttccttgctgtctctgctttctccttcgctttcccagcttcctacttaaggcgagtaatctcctgttgggcgttgtgtcgttgctcacacacatccttgcattgggatattaatttgtgagtctcgcccttcaaatactcaagtcgctgagagagtagtcgattggaagcaaatgaagcctggagaattgcaaatagatgagtataaaagaggtataaaaagatagtataattatattaacaaagccgacataccatgaagtgacaatctaaggtcctggaaagcatctcctctggatccctaagattgagaaaatcccaatctgggggaaggagagtttgaagtttgcgccaacaagcgaccctgtatgcctgggcaaactcagagccagcttctccaactgtgaccgatagggtctcgacggcctgattcggagaagcggtagcgggagtcacctcgagatgaagggcattagccttaggaatgacgggaggaggaacttcctgtttaatctcgttgtccaaaaccttgagatcaataggctcggccggtaacttcttcttttaagcggtggtttccctttccttcttgggaggaaccacctcagcggcaatggggcctccagggttggatgaccttttcttccccttacaatccaagatgtcttcgtaacccatgtttgcaaaacgagatgaggtgttacaatcattataaaagatgtttaaaaaagggaggactgtaaatttccacctaagggatttaccaaaatcactagaaggcgagctatcactagatgagggg

SEQ ID NO: 33909 - DNA, 1714 bp, Cannabis sativa
cttcttaggaccatatctcccacaaggaatttctgtgctttcacttgtttgttaaaataccgagctactttttgctaatgtgctatcagttttaagtttactgctgtttgtttttcatcaatttcatcaagtgattctgcaaggagtacatgattggcctcttggctatatgttaatcttctgtgggacggcggctcgagttctacgggtagcatagcttcatatccatatgtcatggcgaatggagtctgtccggttggtgttttctcaattgtgcgatatgaccatagaacttcaagaagttcctccggccaatttcctttagcatcttcaagtttcttctttagggtctccttcaatgtcttgttgactgcttcaacttgaccattcgctaggggatgtgccactgcggagaaactttttatgatcccatggtttgcgcagaaatcagtgaatgattggctatcaaattgtttgccattacccgagactatcttgtacggtaattcgaatcggcaaaatatgtttttcacaatgaagtcttgcacttttttttacgtgatggattccagtggctcgacctccgtccacttggtaaagtaatcaacttgaaccactgcgtactccactctgcctttgcctttgggaaattgtttgatcaggtcaattccccaaatggcaaaaggctagggactttgcatctgagtcagtttgttgggccgtgcctgaggtatctttgaaaatctttggcatttatcacatttattaacgtaggccttgaaatcttcaatcattatcggccagaaataaccttgccttagaattttcttggataaactttacccggctgcgtggttgccacaaaatccgtcatgtacttctgataaaagtcgtgaagctccttgtgttacacacctaagtaatggaatggagaatcctcttctatacataactccctctaccattatgtaccgcgcattctccagtgttgaggtaggctgctattggcgtcatccagtttggggatgtattcatcatttcaacctcttccatgccggtgatactaggttctttgagaaactggacaggaatcagatttgcttgatcatttacagtgctgctcccaagttgagctaatgcatcagcagtcgtgttttctttccttggaatttgcctgagagcatagcttttgaactgcgcgagaagatcgtatattttgcttagataggctatcatattttcccctcgagcctcgtactctctagatacatgatttaccactagctgtagattactgcagatctcaatgtgttcagccttcacctcgcgggctagttttaggccgccgatcagagtttcatatttagcttcattattggatgccttaaagccaaatttgactacagcatgtaggtgttgccccccaggtgtgacaagggcgatttcttcactggatagttgatctgtggccgaccagtccacatgtagcttccaagtcggcttattttcactattactcgactgaggtatttgtactggctctaggttgttttctgaaatgctttcttctttacccgtacattcgactacaaaatccaccaaggcctgacccttgatcgctgttcggggttggaagataatgtcatactgacccaactccactgcccatttgagtaactgttcagaggcatccaatttttgcaatatttggcgt

SEQ ID NO: 33910 - DNA, 1994 bp, Cannabis sativa
tgtaagtaactgagttttgaagtcgccatgccttagaagaagagaagcaaaagaattcttgatgaatatgatccacatgtggctcagttcattagagacaagctaaatattcccaaatctaagaacttagacaaggcgcatggtaggaaagtgattgtagctgagcttcttaaggctgccattgaaagtgatgacccaagagatcgggctttcaagttaagatctcttgtattcagcaccatctttgtacatcaagttcaattgataatatataactatcttcttttggaaactatttttaggaaaccacaatttgggtgtcccaatgattcccattgatttcacataaatgcgggtgcttacttgcctttacacttgtggtttatatcgatagagaatttttttggagtctttcccaaccaaataaatctaaatgactatagaatcttctccacctttttcatcttctcccacctaagaaattggtctgtcccaactcccacaaaattaacttcctttgtgacttgaaaagaagtccaactcaaaaagagaaaggattttaccacttccatcaatttagtccatacatagaaaatgtgaccaagagcaactacaacctttaccatcaagaatacttttataccccaatacttccatcaagacatattacattccagaaggctgacccttttaaaagacctgctctattgattgacatgaagaggggagcagattccatgctcattgaaattgatgcatggaaaagagatgggaggagtttgtaacgttcacaaagttagcctaattatgtcttgtcagcgaatttatgttgcaacttgctttttggatgactcttgaacaatgcctcttgaacaagatgaagaggatagtcaaagtgaaactatcatcctgtaatatcctagaattatgaaatggattagcaaaatcctaactagataattatgaataattaaaaaattatattattatataatttaatatatgggaatttatatgatttatactttgttaagaccccgttggtgagccaggtgcattttagtaattatgacccgagaagggtaaaatgatgaaattaatttaattatgtgcttaatagaactatattattatatagtatgcctgtgtcgtcttttcaggtgtgttttgacaggttggcgcggtatagtcacaaccgggtatttctggccgaactgggttcgggcccgaaatgtaatttgaattgaattatttgtcattttaattattggtgaataatctgaaagtttaattggagttatgtgtgtgtgagttgacttaattacccttggttgtgtgtggatgtgcattttagccctaggggcaaattggtcagtttcacttttaggatataattgataaaagaaatgaattttaaggaaaaggaatgatatttttctggttttgttttcccaaaaccgaacccccccccctctctctctctctctctttaaacctatttctaaattgaagaacttcttgaaattgcttggatttggagcttggtaattgtaaagttttgagcttgctcttggattgagtttaaggtagtttttatttggctttaatccttgttttatttatgattttaagtgttgtaagagcatagaatgtggtgtggcttgtgattatgaacttgtgatgcatgttcaagcatgttaggttgtcttgagctttaatttcttgaatttgtttaggttaagtttggatagaatttaaaggaatttatttgtgtttttattctgttattgaaccctaaaattggtgtttgatgtatgagttcttgagcttgagttttatggaattaagctcaagttggagctttgattttcatgaattagtaatctgaaattataggatttattgctggaattgatgcatgaaataggttattttgaccctctaatatttgttagcaaccctatttgattatttgagagtttggttgtgaattg

SEQ ID NO: 33911 - DNA, 2174 bp, Cannabis sativa
aagtaaaatataccgcctgacagtcttttgtaaaaaaatgacaaaagttatataccatgtaaattttccaatatttttaattggattgacccaacaatttgtgacagcaaaaaaaaaaatcatactaggctagtttagaaaaattaggtagttagagcacaatcttcataatatcagagtaccaccaagcattatagtgaaggattttcgaattgaagtgtcaatttcatttcatgttctttgagatgagaatattcttcctcttccaatttcatcattttcagtggcaactttcttcttgcctttatgaggcctagtcttgtgtacttatcatggacctcttcattagcttcttggtgaatattttgactcaattcttcatgttgggcttcttgggcttcatgttgtggattcactacaacatcagcaagcgcatcaacatcatcacggaattccccatttgtgcaagaaaacttcatattactattttctaaagctgttgctagagtttttactagaacaattaggaaggtataaattttttcatatttttttttattttcataccaaaagccattagactaatttctttatctgaaattcgaagtgtaccatctttcattgaattcccatatgacctccaccaaagttgaatagggcaaatcatagccaagtgttactgcaaatttttccaattcagacatgctgaatttctagccaatcacaatactcaaaataatcgatctcaccccttcatactttttctcttcaaaatatctgtaccatcttccaccatggtgcaatatttctgtgaactattcatattccaagtctgccaaaaaattatagcattaaaaaaatcagctcaggaccaacacaaacaaaaaagaaacaactcctaaaagtttatattcactttaccacagtaaaaaaacattccacaatatttatttcattcaatgaattcacatgtgaacacacgctactttccagaaacaaatagcatcccaccgaatttttttttatgaattagaaattgtattgctcaaaactgctttttacaaccaaataacatcatatcctaccaaaatttaatattacacctaactcacaaattaacatatgcaaataaaaataacactaaaataatactcaaagtaaaagtcaacaatcagacatataaaaagcacgaaaatccatttcaaaataataatctgtcattcaagttccaacttcagtatttaccatatgcagggaagccatttcaaaagattagttagttttgtttggtagattttttttctgtgtcgtaacttgtaacgttataatagaatttttgtttgtattttgactgtacaatcactataagtaaaacatttccttctcataatgtacaagcaagcattcttggttctaagactttcttttcatttcacactttttttctcttcttgcactctgttttgagttgctgtttcatatattaatgacaaaaaagtacataaaaaatttatttattgttatataaaatttgatttatgttatattttgtgttaaatttaacacaacttatagtacctgccgaatttaaacaatattatatgttattattagagttcaattttataaacatggactaaaagatgcatatacactatatagtgtagacaatttaatattaattaagtaaattctaatcaagaattgccaagaaaatttgctaaatgcacatgagccaaccaaccctatctgtttatctagttatgtatttgatgcattggcaattacgtgttctcgataaagctggaaagatattcattaaaatataggacttatcttacgatagatagatatccttttacaggtacacaatgttttattcatcaaaaaaaaaaaaggtacacaatgtttaatcatatcatatttattataacttgtctactttacacttaatttaacctttttttttctaataattaattaagacttgcaagttgggtctacctgtttggggacatacccaacacatatatacatgccaatttgtacgcaatatataaccattataaaattacaagatacatgtattcatttgtttttttagttagaaaaaataatttacaatattattccgaaacttcactacaaacttttggagagtacaaaaggaatca

SEQ ID NO: 33912 - DNA, 2374 bp, Cannabis sativa
ctccacaggggtatgagagtaagccgaagtaggagagctagcatcatcaatgaaaaaagtgccaaccatctgacgatccacgatatcatctctaccatttggactcccctcactcgggttaacagaacacccgatagagttggaattgtcattgaagggttcatctaacgccactttggaatcacaaacttggttacttttgtcccatggaaaatcacgaacgactctggggtgttggcaaagtaacttgagaggtctcgagaaaaaagaagcagatgcaccatcaaattttcttttcttaataggcgtggttctctcatttgtttcagaagtgggtttgaccccaatgtcaccaccaatctttcttatctcatataaatccaagctaccaaaatgttttagctcttgcaacaaagtctctaggccttggaaaaaattggataatgccatgtcttcatcaagtaggaggtcggcctcttgcccacaaactgagctatcccttgaattaatagctacatttttatccttctttaacaaattctgtctagcattcttgcacggcccattcgacttgaaggagcccaacgcacttatcttggatacacgactctctttatatggcccactgacaacttcttgaaacgtggcccaaataaaaggagaataattaaggatattaggagcatcaacattacccatttgttgcattaaagatctcggcccactatccccaacatccaactggcccaccgccccaaccaaagagcacgagttgactaagtcaaccaattcaaacacaccctctctatcaacaccacacgactccccataaaattttgaaataggctctaaataaggaaacatagcagtatcctttctcaccactagctgcttagagttggaaacatcacaagaagaggaaatagcgttcctctccgcctctgccaccttcgttcccagatttgattttaagcaaattgttgtgattaggagagcttttgagtgtcatttctggtaagaattcttggtcaggcaaaaaaactctgccaaatgattcctccatggtctgcatcaatcaccaccaagttaacagagtccctcaattccatggctatgtcttcttttcctgctgtgtttgtagaccaaacgacaccattcccacttgtcgaaatgaggttgccactaatgtcaaagtcaaacttatcaaagtttgagattggtagatctctattagcagttcaaattgactttgaacagtccttgtgaataattggaaaggaaaggatttggaatacgcacaggaaagaatctcaatccaaagattatttgcagtcaaaactacaaagtggaaagattttaaacaatttctttaaatgaagggattcatatatcccaatacaaactaaaattaagaaaaacatctaaaaataataataaaaaaaaaaacttaccaaaatcttaatgtcctctcaagctttcaagcaacaatctcaaatctttccaaaaaataaaaaaaaaaatcatttaagattcgtaaatggcttacggttatcaattcatttatcttttctttttttttcatttttttatatattacataatattatttaaatattttttttgagataaatattatttaaatattaaagaagtcagtgtttttttgttttgggtgtcagtattattagacactactgtacaaagctttttaatcagctatacgctaatatatattagttaacgtgtacacttaaaagtcatttacgaatctctacagcaatggcacagacaaaaatttggcaatataaaaaagaaaatttccaatgctcagaagaaggttgctgatttaaacaatgttactgaccgaacctctaatgccatggaagagttgaaacacagtgaaaatgtcttagatgatttgttaactcaagaagagacatattggcagcagcgttcgcgtgttgattggatgcaaaatggggaccaaaataccaaattttttcatgcctatgcatcatctcgcaaaaagcataacacaattaaatctcttgttgataatgatggagctgtgatcacctcaaaaattgtaacatcagatatgaacgagtccttacttcggccttttaccaacgatgatgtttacaatgctctcaaaacaataaattcgaacaaaatcccaggaagtgatggaatgtcagcaatgttctaccataaatattggtctatagttggggatgtagttactaaagttgtgttgggagtcttgaatgatggtgactgtttggaatctattaatcactcactcattactctcattccaaagatcaatgttcctcaaggtgtgggagattttagaccaataagcctatgtaat

SEQ ID NO: 33913 - DNA, 2631 bp, Cannabis sativa
  modified_base (719)..(725): a, c, t, g, unknown or other
  modified_base (1616)..(1616): a, c, t, g, unknown or other
  modified_base (1786)..(1790): a, c, t, g, unknown or other
  modified_base (1992)..(2010): a, c, t, g, unknown or other
attatttaaattgaaattgaaaatgtttttttttttttaaaaaaaaataagtattatttactaaatttttaattacattttttaattttatgttttatggtatttagttttttttatcaacaattaatttattattttattcttaatagtaaatcaattttattttatttaaactattaattaattttacattatctttactaaaatttggcagcataacagcttaaaaattgtaaactcaaaatttccaaaacctataaataacacaaacaaatatttcacgacaatatatgaacaaaaaaatgatccacccatccaaccacagtcaattttatcacagaacaaacttcactaacatgcatacacatattaactaaaaacaaaaactactagtaagagaaagcaaaaaaacatacctagtgcaaaataacaactgtaagtagctagcggtaatccagagcagtcaaacatggacctaattccataaaaaagtaaaaccaaattaaaaatttaatacctaaatacatatgtacacatacacacatatatacatatatacacacacacatacatatacactcacatacacatatccattcacctacactcacttacacatatacacacatacacagacacatacactcacatacacatatacacacacatacacatacacacatatatacatatgtatctacatacatacatacatacannnnnnnatacatacatacatatatactcacctacacatgcacacatatatacatacatttctacatacatatatacatacatacatatataaatacatacatactcacctacactcacatacacatatacaaatatatacacacatacatatatacatacactcacataccatatgcatatatatatatatacatatatacatacataatcatacacatatataaatctaaatatttaaaaaataaattaaaattaaaaataccttcaggtagtgcgttggacggtggtgcagtggtggtgtggtggtgcggtcggcgctggtgcgatcggagttggtgatcagaggttttttatttggagaaaaaagagagaaacaaagagggattgagagggataaagagagattgagagaaattaagagagattgaaaaagataaagagagattgagagggaatcaaagagagaacgagagagggtgagaaatttttttagaaaaaaatgaaaatggggaagaaagggagcttcgtgctccatgatacatatatatacttttaccggcgcaattagatgcattgttcctttcaggtaccttagggctattttcactgcactccagtgaaaagtgggtggagactaaaaaagataactgagtttattagctgcaaatatgcaatatcagatcttagggttgttcaagaaattcgtaaactatagtttaaaagacaaatcagtttagacaaatctgcttaagacggaactaaatgaatcagtggttggtgatccagttatttggaccctgttcgtcttatgtggtctggttatggtctcgacaatattcttactggtttgaatcagagcagaccatttatattcatcattatatatatatatatanatatatatttatatatattacattaatgacacaaacatcatatttcttttttgaaaaatattctaatcaatacaataattaatatggggtgcgtttggtaacacttttttaattagttttttatttttaaaattaaaaagtgaaaatatttttcaaaatcatgttctatnnnnntgtttttacttttcaattttttatataagaatcttcattttaaaaacaaaaaaaaaaattactttcaaaattttcttaaacagctttttttaatcaatattttggatattgaccctaacttagaccttggaaactgcactcgaacgcgaccccaaacttagacctttcgcagtcccgacttcagacccgacttaaataaaannnnnnnnnnnnnnnnnnnataaaatttacagaacacacttttattttttatttttaaaattgaaaaaaatggttatagaatatatttttgttttttaaaaataaaatttttaaaccaaaaattttacttttatttttatgattataaatttttaaaacaaaagtattgccaaacgccaccatgattgattaattgattttgaaaatatattcattagtaaaaatttaatattgaccattatcttttattttcttacaatttaatatattattattataattaacatgtagaagttacttattattattattattattattattatttgttagtattaatgatatgaatatagtagttagagaagtatattgctgcaattcgatttattactatatcatcaatatcatgataaatatgctttgagagcactttcttttcttttttttttttttaaaaaaaattcaattaaatattcaaaccacaatttcaaactaatccgttttaagtggattggtttggtttgagcattttattaatgtggtttgatttcaactttttttttttttgaacaagaagagtaatctttattcaaaacaggcaagaacaaccaaaggttacaaaacagcagcagtccgagac

SEQ ID NO: 33914 - DNA, 1884 bp, Cannabis sativa
attggtctaaattaccatcatgcagggatgtgattgtttgggctatatcaagtactttgatgctcacttcacaaatttcactggaggtgttgaaactttagagaactgtgtatgtttgcatgaggaagatcatggaattttgtggaaacatcaagattggagaactggtttagctgaagttcgaaggtctaggcgtttgacagtgtctttcgtatgtactgtggctaattatgagtatggattcttctggcatttctatcaggcaagttaaacatcccagttatttattaacattgtgtgtacttgagtttgaccacttttgaagttgaagatacttctagaatacaatgatcaccaaaggttgtgcttgacataggatttatcatagacttagactatacattgaaatgttctaatgtgcagttccaggatatagccttttattactttttattctacttttccattaactaatagtcacacttgtctgcttgttttgcttaagctttgtggaaagtttctaaaccgtctgtaagttacctgatattgcaggatgggaaaattgaagcagaagttaaacttactggcatacttagtttaggagcattgcaacctggagaatttcgaaagtatggtacaatgattgcaccgggattgtatgcgccagttcatcaacacttttttgttgctcgaatcgatatggctgttgactgcaaacctggtgaaactaacaatcaggtaaacttctgttactatgaatttaaaatactccagaactgtctatagtttgtggtaggatgttgtctcttaggagcctttataagtgaaaaatgcgaattcagatagaatactttcttaccattatttcccttctctaaataatgtgtaggttgttgaggtggatgttaaagttgaagaacctggagagaacaatgttcacaacaatgcattctatgctgaggaaagacttcttaaatctgaatcagaggcaatgcgtgactgtaaccctttggcagctcgccattggattgtaagacatccttattttggctctgctcatcttactttgtttttgctacttctttattatctgaatagttttaaatgcattgattgacaatatataccatctaatattccaggtaaggaacacaagaactgttaataggactggacatttcacaggctataagctagtgcctggttcgaactgcttgccattggctggtcctgaggccaagtttttgagaagagctgcttttttgaagcataatctttgggttacttcatatgcacgtgatgagatgtatcctgggggagagtttcctaatcaaaatccccgtgctggagaaggactggccacttgggttaagaaaaatcgatcgctggaggaaacaaatattgttctttggttagtttgtctaccatccccttcctttctctgtctagggtgcaaccttgcatttatagaagatccacacctttaaccaaatttagtcttttacagtaaattatttctaatttttttggaatatttattttcatactgacttacaaagaactattaaattgcaggtatgtgtttggaatcacacatgttcctcggcttgaagactggcctgtcatgccggtggagcatattggctttatgcttatggtaagccatcgtcaaccttattccatctatcatgagcactgtccatgaatatccatcttttttgcttgcatgtgcatataatttcaatcttatcacatggggctgggatagaaatatagatgaaaattgcctgacactagcaaaaaaggacatataatgtatatttttctgagccaccgaaattgtactttatgctactaagttaaaaaaatgaagatcggaagagc

SEQ ID NO: 33915 - DNA, 5619 bp, Cannabis sativa
caactcaagctttgcaagcttgggttagaatgcataaaccgctgtatgtgttcttaatggagacaaaaatggatgaggagggaggaaaagtggttgaaaggatcattggttttccttactccaagactatccctgctgaaggtgtggcggggggatttactttgctttggaaccaagacattaatttaaaagttattgaagctgctaatgggatttttgaagcggcaattaaagacccagagaaaggtttgaagtggattttatttgctacttacggaagaccatacgaggcagagaagagagaatttcgggacaaattagagataaggattaatcggtgcaagcatccttggttgatgataggggacttaaatctaatcgttaatgcttgggaaaagagaggggtagaaagtttagtcaccaggacactttgatcctccaaaatttcatctcaaactcggggggagtggaccttggattcaagggatgccactttacttaggaaaataatagattttctggggggcttaccagggagcgattggatagagccttggcttcgggagattgggtgtcctcgtaccctaattcctctgttactaatttctccatctcggtttcagattatgggttcatcttggtggacacgaatgaagggaaaagtaaaggttataaacctttccggttctttgaggcttgggtcagagagccatcgtgctctgatacggtgacacgggtgtggggtgctaatgggaatggaagaaagagaatttcggtgagacttagtgacacacggtgtgccttacagaaatggagaagatcttcctttgatgattgtgaccggttgatcaaagaagctgagaatcgattggtgtggatccaaaatcaacctattaacttggatcggtcccgagaggaggctaatatccagtcaaggatcatggaactctggttaagaaaagagagtcagtggcgccaaaagttgagagagatttggctcaaattgggggatagaaactcaaaattctttcatgcctccactgttatcagaagaaggagaaacaaaatttatgccatcaaagatctcaatggggactgggttagacaagaaccgaggattggtcatgtgttcaacgagttctttactcatttgtacagctcttgtaacccggtccttgacaatgatcttgagcaactgttttgtgttgtggtcaatggtcaagacaatgagatgttgaagaaaatccctcccagtgatgaaattacttctacggtggcagctatgcaccctttaaaggcccctgggccggatgagatgccagggtgtttctatcggcattattagaacattatgggagaggaggtttcagctatggttcaaaatttctttgcaaagggagtccttcaggcaagtaaattgtacttatatttgtttaatccccaaagtagagaatttttgttctgtggagcagtttagacccattagtctttgtaattttgcttataagattatggccaagattatagctactagacttaggggtgttattgacaaattaatctctccgctccaatccgcgttcatcccgggatgatggattgcagaatcatctatcttaacccaagaactagttcatacgatcaagttaaagaaaggcaaaggtggtttaatggctttaaattggatatgcacaaggcttatgacagaattgagtggaagttcttggagaaggttttggagtgcaatggttttgacagattggttagggagctaattatgaaatgtgtctcgacggtttcctactctgttcttctaaatggtgtcccgcaaaagaagttcttcccgcaacgtgggttgcgtcagggggatccattatcgccatttcttttcctcctgtgccatgaagtcttctcaaaacttattgccaagcagcaaaggttgggaaagttgcatggcatcaaggtttctagaacggctcctgatattagtcatttgatgttcgttgatgatactattctttttacccgagccaacagagccaatactgaggccattttggaatgcattaagacttacgagaagtggtcgggtcagaattgtagcttggctaaaactagtgtgttgttttctaagaatactgagtatgatatgaaacaagatatcctgagatgtctaagggtgcaagagtgtgtgggttccgagaagcacctagggaatccttttgtttttaaaaggagcaagagggaaaacttcaaatttttaaaagaaaaggtgcttcagaaaatcgaagggtggaagtcgaaactcctatccttcgctggtcgtactactttggtcaaagtcgttgctttgagtgtcgccatctataccatgtcggcttgtaaactccctgcctcaacgtgtcaagagttggatagcttaatccataaattttggtggacgggggtaatgataaggaaagattcatggccttgttgagttgggacaagatttgtagaccgatggtttcaagggggctgggcttcaggaaaatggttgacatgaatagagcattattggcaaagttagcatggcaattcgcatctggttgtaattccccatgggtgaagtgtttttctgcgaaatattaccgtcggaattcattttggaaggtcgaagcgaaatgaaatgattctcccacttggaaggggattctgcaagccagagagatcctttgcaagaattgccttactcttgtggggagaggtgatactactaatatttgggatcaaccgtggatcccatggctggagtttgaggatttcaagaggcttgcgtgggaggttcgaggtcgatatccgttacttaactctgtggcagatctctctacttcgaatgggaattggaataattggttggtattggaaatttttggtaatgatactggcacgcggatctgcgggatccagagattaccggagcacggtcctgattccttaatttggaagccttcacgggatggaggattctcagtcaaaagtgctttcaatgtgtgcacttcaagcggtggccatgaggctggtgcggatcagactatttggaaactcatttggaatgagaagattcatatgaggcactccgtcttgatttggcgtgccttggttgggtgccttcccaccaaggataaactcccctttgtgggagataaatcgtgtatcctatgtgactcggcttgtgaatccagtgtccatattttttgggaatgtccctttgcctgagccttatggtttggaggccccttcccattaaatcttggtaatagaccagcagttacaatggttgaaagactgaaggatgtcctcacttacaccccgagggatctccattatcaacttctcaattacttggggtgcatcttggattgtgtctggaaaactaggaatgatgctctcttcaaaggcaatcgggtgagtattgagcatgccttaaagaaattggcctcaagatatgaagagactaccctgacgtatcgtgcagagaaggaggatttaatcaatgttaggtcggatgtgcgtcgagcatctacgctaaactacaacacgttgatcatttttttggtggatgcctcctggaaagaagcgaacgcaggcctggctgtgatcctcttcgatcctggtgcacactcttggacttggagtgctaagagttgtaaggccgattcggctgtggaggcggaagtgcttgctattttttgggcgctgcagctgagcaaagacaagggtcatgagtcggtgactgtgttatctgatgcccaagtggtggcaaacgctttgcaggccaggcgttgtccccctgtgtgggaagtcaggtcgttggctatggccacccttaacctatgttctgtttttaatgtttgtaattttcattttatttctcgttcaaacaatgctacggcagatgctattactaagatggctagaattgaaggtaattatgatggtctttgtatgagggaggggtcccctggtgtgatacccaattttctaattcaatgaactcccatgtgttcttacaaaaaaaaaaaaaaaaaaaccctattcatatacaaaatagtccatcaaaaaaaaaattagtttacagtatttgcccaatcaaatttattaattattataaattcagtagtctaaatttattcgtcaagtatctttacttaaaattttgggaagagtaaaattttgaatatgatttgactatactattcaatggttgagatgataattatataaatccagtggcccaaatttattcatcaagtatctttacataaaattttgggaagagtaaaattttgcatatgatttaactatgccatccaatagttgagataatgatcaaataaattgagtggcctaaatttattcatcaagtatctttacttcaaattttgggaagagtaaaattttggatatgattggactataccatccaatggttgagatgatgatcaaataatccagtggcctaaatttattcgtcaagtatcttcacttaaaattttaggaagagtaaaattttgaatatgatttgactatactatccaatggttgagatgatgatcaaataaatcagtggcctatatttatttgtcaattatctttacttaaaattttgggaatagtaaaagcttagatatgatttgactataccatccaatggttgagatgatgattaaataaatccagtggcctaaatttattcatcaagtatctttacttaagattttaggaagagtaaaaagcttggatatgatttaactataccatccaatgcttgggttcatggtcaaattaatctattgactcagatttattcttgagatatcttatctttacattttggaaagagtaaaaccttatatttgatttgactataccacataatgattaagatgatgatcaaataaattcagtggcccagatttatttttcagttatcttatcttcaatttttgggaagagtaaaagctttggatatgatttaattataccatccaatggttgagatcatggtgatttgaatccattggcccatataaattgctcgatttcttatctttaagatttaataacaaagataagattgtacacactataaaatatgaacctcatatttgaaaaaaaaaatgtaatacaaattagtttccataacagatgaattctgatattggtagttcatcttatttatcatcttcttcatcatctttagacaataattattacgataaattagaaaattaagtggtatgtcaagttaccgctaataacaattttttcatcattgaaaaccaaaataaccaaggatcaggctcagttcctatagtcatatagttattaaccatgatcgagaaaatactgatcgcaatctcttcagtgactattttgtagagaattctcgattttcagagtcaatattttagtgacaatttcaaatgggttgttctttattccttcgtatttttgatacaatagcaatgcatgatgactactttatccagcaaagagatggtattggtaaactcggattatcaggtttgtaaaaactaatagttgtattttgaatgttggcatatggtgtaccag

SEQ ID NO: 33916 - DNA, 3096 bp, Cannabis sativa
caacatggacacatccgtcacagcctttcgataaggccttctggtagaatctgacctatataaagaattaacaaaataccattgcaggaccatggaggatgttcttgccaaagcatgggctcaaatcaaatgggaggaagatgaatcgaacaggcaaccgatctccaactacttaagctctcgtgagaatcgggggccaagacgagtagatcgcaagtcatccgatcatgttgaaccataccccaccaacagatccagattccagatcatttcaaggcagtggatgagctccgccccaacgatcacgtgattaccaagaaaggggacaatcatcccaaaagtttagaggctatcaagataaagcaccaatcccagattatactctaacaatagaccctgttgaagtggttgctataatgaaaggcatgggaaataaagtcaagtggcctgggaaggttgaaaagccggaagctcaaaaagatatgaccaaatggtctgaatttcatggtgatcacggacacaccacagctgaatgtatagcactcaagtttgaagttgtagggctactttgtcgaggacaactacgagatttcctttcagataaaggcaaagcaactgtagcagaaggggataaaagacaagagagtccacctgaaccccctcaaaatgcgaggaccgtgaatgtgatctcaagaggatcaaaagttggtggaattacgtattcagtagctaaacgccatgcacgagaaccaatcaacagtcaagcaaagccaagaaagctagagacagttgttggatagaccatcagctttgtcaatgacgaagccacagatttgctccaccctcaccatgatgccttagtcatttcattatacattgcaaactgttttattaattgtgtattgatcgataatgggagttctgctactattttatttctcaatgcgctcagggatatgaaagttgacgagtcaacaatcatctgcaaatccacagtcttaatcgggttcactggtgaccaaaagcactcaattgggaggtcaacttgcatgtttggatagaaggagtaaacctccaaaccaagttgatcgttgttgactgtccttcttcatacaatgccatccttggccggccatagatccatgagatgaaagctgtgccatccacataccaccagcttatcaaatttcctacaccatggggaataaagcaaatatcaggggcacaaagagcagcgcaggagtgttatcagagaactctgaaagaaaaacaatcaaccttatagcaactatagcaatcaaatgcaatgattgatctggatgagcctaacatggaggaactagacgaagtgagcattagcaaggaattcccagagcacaaagtacaaattggggccaagctcacaccggaacttcgagcaaagttgattgaatttcttattaggtatcatgacaactttgcttggtctcacaaagatatgacaagtatagaccctaacattgttatgcataagttgcaggtagaccccaatttccctccaattaagcagaaaagaagaaagttcgctcccaaatgcaacaaagtgatcaatgaagaaattcaaaagctcatcgacatgggattagttagagaggtcaaatatccaaaatggttggccaatgtagttgtttttcgaaaaaagaatggaaagtggaggatttgtatcgatttcacagacctcaacaaggtgtgctccaaagattcattcccgctccctcacatcgacatgcttattgattctacggctaggcacgagctccttagcttcatggatgcattttatgggtacaaccagatccttatgcacccagatgatcaagagaagacatcattcatcacagaacgagggaccttctgttacaaggtcatgccgtttggactaaagaacgtcagtgcaacatatcagagattggtaaatcaaatgttcgcagacatgttagggacgtcaatggaagtatatatcgaggacatgctcgtcaaatcgctagcagcagcagaccacctcaatcatctcgaatagtcattccaggtacttgaaaaatataatatgaaacttaaccctggcaagtgttcttttggtgtttccttaggtaaatttctaggatacttggtgacaaagcgatgagttgaagcgaacccagatcaaatacgctccatacaaaacattcaatcaccaaaatcaatcaaggacgtctaacacattagcgggaggatagcagcactcaaccgttttatttcaaaatcttttgaacgttgtcacttgttcttctcaacaccgagaaaatgaaggactttgagtggacaaaggagtgtgaagatgcacttagacaacttaaagaatatcttgcctcacctccgctcttagcgaaaccaaaagatggagaagcactctacatatacctagcactctttaaaacagcagtcggcgctgtgctaatcagagaagaggaaggaaggcaacaacctgtctactatgtctcaaagactcttatagatgcaaaaacaagatacagccaacttgagaaactggcactagcacttatcacagcaggacgcaaactcagaccatattttcaatgccaccctattattgtgttgacacaatatcaacttggtagcatcctacacaagtcggagctttcaggaagactcaccaagtgtgtagtggaactcagtgaatacgacatcacattccaaccaaggaaagcaattaaatctcacgtataagctgacttttccagtgacatccaggtacaaggaaaagagttgttgtgcttgaaagaacaatctaactctaagtggagattgtcagtagatggctccagcaacagcagaggatgtggcttaggcattgttctcacctcaccctaaggagatgtcattcaacgagcaatcaagtgtgacttcaaggcaatgaataatgaaactgagtacgaaacgctccttgctgggctcgacctcgccaaagagatgaatttcaaagctcttgagatcacgttagattcccaactcatagtcaaccaattcaatggaacataccaggccaaggactcaaag

SEQ ID NO: 33917 - DNA, 1580 bp, Cannabis sativa
acataagcaattccacgtcaggtggacaaaaattagaataacagtagtggtgtagaatcagtttcacatgccttgttcttttgcaagagtgttagaagagtttagaaaggtataatttactatccctatttatctcattcaaatactatttcttttcatgaaattatttttaatattttttctaacatgagcaaagaggatatggaatttttctttgtatatccaagtttgtttggcataacaggaacaaggagataaaaaaaactagactccgaatcaggcccatgccatcatcaagcttgctaacagcttcttggccgaattcagagcagcttccactgcctaaagtttaacaccaccttctatcaatctcgatgccacagtcacttggacaccaccaccacaaggtttctcaaagatcaacacatatgcagcaacttcaaagaaccaacttaaagctagtttacggggaatcatttacaataatgaaggaggcgtcatagcagcagtagcctttccccatgaaggaggtggagatgctgcaattcttaaagcaaaatcacttcttaaatctctcctttggtgtatcaaagaggggctcccactgcatcaggttgaaactgactagcagtctccgatgttattactgttaataaagaagacttctcactctttggagatctaatttcaaaaattaaaaatgttttgtctcactttctcaatgtcttggtcaatcatgtaaagcgttccgctaatacatttgctcataagctagtaaagttgactttgaggatagacgaagtttcactttgaattggagatgaatcttgcaattttactgctctcctttcctcttagggcaccctttctctcacaaaagaaaagaagcaaagttatcaaaaaaaaaaaaaagcaaagtgatgttttcttgacacattaattaagtgtgtaattcttttcaagccgcgaaattattattattattttttctaatgtaacaaccgcgaaataaattaaacataagtgaattgctaccctatgtttaactgtgtttcggaatctttatagagttaaatttgtttatcaataataccaatgtttggagaagaaaagaaaaggtaaattatatggagccaattaattaaaataatataagattgaatctaagatggataaatatccactatactacttatcttcaatttggtgtttgtatatataatacaccttgattaaaacgaacatttatcgaaaacctttgatatgaggttaaatatcaaggatatagctagatatttaaaatacaatattataaattaatgaagttccactagtaaacctttgatgatagctttacacacattattatgtttgtttattgagccagatatatgattgtatgaagcccaaactataggattttcatatcgggttgggctctttatagtgggtttatagctttggtcttcaaaatgaatccttcccaattaagatattaaacaactttttataaagatatatagaagataaagctagctcggtagctcatactcacgcacagatattattcagagctttat

SEQ ID NO: 33918 - DNA, 7855 bp, Cannabis sativa
caataggatgccattacagtcaatcatgacaccagaatttcaaatatatattcctatgacttgaatcagtcattcgtggaaagatattactgttcctgttcgtagcagattgccaagttaatattttatttatgttacactatgttatcctctacaagattaaacttgtttaacaatgcctctaattcttgcaaggccgtcttataacgttcttgcgattgtgccccttcttccacaaccggaagggagagcttaattagattattataccagtacaatgggttattatacatgtcaactgaagaatcactagagtcatggtcaagaagatacctgcacttgaaatctttactccaccgaggcagaatgtaacgagatggaatttcctcgatgccattgtagttaagaacattcaaggcgtgcctacatagatagcctttgtaattaaacaaactgcaaatgcatctgacgtccacttgtgttgtctcaaacaaaacctcatggtacttgacttccttctcactcccctcaacttcaaccctttctttgacaatgtatgtgataattggcccattgaaattgacttgccttgtgttgaaacaggaatacatcccctcaacttcagattggaacctcttgaagatttctcttgtgtatattttcgatagctgagtctcgaaattacatcttgttttcaattcaggggttgtatttcttgactccaggtctgctgtgacttctttcatgtgcctcctatgtagagctagatcgtatttatcgacaaattccttaaatgatgtgtgtttatgtacataaccatcaaaaaaagcaatcaaaccctcgttttcttgaataggaatcattccagcaagaaatatgtcctttaagtaaactggaacccaaagctgtcgttcttcatacagcaactgaagccatttattattttccaggccacaccgtttgatcatgtcggcccaagaagtttcaaattcggcaattttcaaggaattataaactgatttattcaactgtcttttaattgtttcgtatcccttcaatcctcccaacttctctggaactctatgcataatataccacaaacaataacaatgacgagccttcggtataacttcagaaattgctgtttgcaagggtttacaatggtcggtgatgacaactcgtggaggcttatctaacatgcatttcagccatgccctgagcatccataagaagtaatctactgactcttgtccaataaagccacaacccagcaatatggactgtccatggtggtttactccaacaaatgatattaaaggtatctcatacttgtttgccaaacaagttgtgtctattgcaattgtgtcacaaaaataaccatatgcagccctggacctagcatcagcccagaaaacattcctgaggtgaccgtcatcatcaatgtccatcaagtaaaagaaatttgggttcgtcattttcatgcgacagaagtagttgtacactgcatgagcatctccttcttttagttctaaacatttagagcgatcatcagagctcataccctcactctcgttaaaacttaagtatccattacacccagaatccaacacggccgttttatacaacttaatagtgtgtacttctgtaacaggctgagggggtggttgagtctttttggcagcaacaatcattcttttgtgagacttataaaacctcttaatttgtgggctgacttgatggttatgttcaagttctacttcaacaattctccaccttgtagaatccacgagtttgatgacgatcattgcagggcaaccagttcgtgtttctggtcttggattgttagcttcactctttttcttgaaccctgcactgctgcagcttaatttagctctataccgctcttttctctttgatctgaaccatgaattgctcactctaataccaaaaccctgctgtttaccgtaagcattgtaaaaatcataagctgcatcaaaagaatcaaactccaatcccacagttggaagagggggatcctttctttgtgtttccccagattcttcatcatgttctactattaagaaatgtccatcaacatcatattcatcaccttcatcaaacactggctcgctattgagacaaacttcttccatctgaaacacaatttaagaggcagacaactttaagtccaatgctggtaaagcttgcatcattcatggactgttaaactaagagtttccccagctgcaccattttcgcctatctgaaaatataatcccaacaaataactaaaatacatgccattgctgatgcataagaaataagaagaaaaaaaaaggtacaaataattttaactttgtatacatctccaagaaatatatatatatatatatatatactagatatatatttcaataatggaattgaacccatgccagtgaactgctacagtatctatctccacaatatttcaatttataaacataatggataaaagaaaaagaaaaatacgatcattaagcaaacattccacatgatcaagcttgacattcattcggtatggcccataatgtagctaagtggacttttacctacaattggtatggttgtttagatgtccctggcttaccttcgaacttattttgtaataacatgaggtttaactttgctttatttatataaactcactattctcaacaaaaaaaaaaagcttgacattcattcaggtcctcaaattttagagtttagaggtatacgaattcaatgaactcttaggttgaatgaaaaattagagtcaaataaaattggcacccttttagtgcttagtacgtaatagaactacaactccacaaaattaattgacacatttttataatttagttggagtatactattttcaatgacagagaaaaactctttcctcttcaaacaaagccaatttatgatcctgaatctaattccataacagagagcataccacagcacaattctcgcataaatttgattcgtggccttaaatgtaattcaatagtagaaagggaaataaaatacttttgggtttgactaaccctaatttgtttcattcaccattagaataggagtagaacatttagattttgaacttggaaataaccctaatcaaatgaaacaatctacattcaggcctcgtagtgaaactcagaagggtgaattggagtaaatggtggtatgtaatgtagtccaaccatgtgcccaataagatcatagaaacaaagagcatatgggcgagtaagctagacattctacagcttctagaatattatttcactttcgcaaacgaagaaattgcctcaaaacattcgattacacggttttgggacagagtgcgtttgctttctattcttttttataaccattaattcaaacaaaccaaaaaaaaaaaaattgaaaaactattgaattattgagatttgccagtagtacaagggcctgaagaatcagtaagaaatcaaattcaggcgagtgatactggcgatttcgatttcgcaagatttcgaatgaaaatattggctggatcgtcgtgaactcaaaatccagacaagaagctgttcttgcttttcaactcaaaacaaaacaaatctttgatttgaaaaaaaaaaaaaaactaattctagcggagaaaattgaacataaaattagcttacagtggagaacgatggtcgaaatctccgtggaagagtagtaggtccgttgaactaacttactttttatatatttcttcatagaaaagcgatgaactaactgagatttggattttgtatggattttggagaggagaagaggctgcgactgcgacatatgaatgggcctggactactagtccgagctctgttgggccatactgttgatagatagcccaataagcagtgtagtgcagtgttctgaattttcactctagacgacatgtggtttgacttatgtgaaacctgttttgtggcaagtgattcatcctgattctttgaagttgaatataggtattactatcaatatagaggacggtgtgctactgttcatgatttttaaggcaccatcttcaattttgacactaaattttgtattgcaccaatattaaatatggtgttactctttcagtttcaactttcaatcacaacaccaaaatgaatattttttttattgtaatttattcgcaatttaacaaacaaatacaaagagagatactgtaattacagtgcacactatattgttgcacaccataatggttagagttagatgcctatgttgttttacaaaggaggtggaggcttaaaccttttttgtatgtaatccattttgagctcgatcatactatttccttgcaaaatagatagctaactatattttctccaatgtataataggattgtattcttaggaacactatatcatagttgtctattttttgttaggtgtattgtaatattgttattcatagtttatccaaatatatgctacaaataaactataaaattacttgatgatgattttaattgtagccgagtgattttaatctatgggtatttggaaatttattaaagaaagattgatttgataattgatagttcttttcaaattctcaagcaacgaacgaataatctcctttaaaaaattgaaaaaagctaaagaaaaatctatgtgaacagaccaaaactgaacatgttgtagttgacacaaacaaaattaagatttcttattttgccattttagcttggagaactgcaaatgcatgcatgactcttttatttttaaataataaaaatctaaaaaaaaactgcaaaaagcgataggctgccgaccaaccaaccaaagatagccacgtgactcgtgatacaaattgtctccgaacaagcatcataattcgattgatatctccaaagtaccttggtgctaaaaacatacatactcctatcttctttataggaattgggtcaagagtataagctatttttagttagttatttttgatcaaattatataaaaaaattctaaagaaagagcattcaatggattgcattaggacaaccatagctccaaaggaaagaaaggaaatcatcctcataatgaaaagattccaagcttcctattgtttataaggtcccttacagaaaaaaataagctgaagagaactttctagcttagaatttcttctatgcagaaaatcaaaatgttctgtttcaataaggattcaaatacacatacgaattaaaaggtatgagaggccaataactgtcagcaattttctcgcaccaacatacactttaataacagtcataacaatgtcactatatcacctcgacaaagcagtatttcgaccacaagaaaaatacttatactgttgtcgatatgtatctctagcaggttcatgaaattactagcagcaatatacaatgccattaaagtcatctccttcatggcgaaagtgctagtgtttcataccataccatgagaccaattacacaagttcaactttcactctaagccctttaatggaaaaacaacatattacagtttcacaatccaattgtaagtcacacacttcaactgtagacatttcttcctcaatctcatgacattagtaaggtaagcactaagctatgttctaaaaccgaattctaaggaacaaacaagcatatttcaaaacaaatttattcacttgcatcagataatggcacatgtagaaacttcctacacaacaaagctaggaaacaactatcttgaataaacaacaagaagatcaaaatcagcaaaactaaatgtttagcatagtttcatttcacaagataagaaaaactatacctattgggtgtttgtggtaagagtttcacatggtaagtttaagttgagaagagttgagattaaaggaatttcaaactcaagtattcaaagagtttgagattaccctataaacaaattgaaaaatgagacccacttccactaaaatgatactaagaacaagtttagttttacatccctattccaaataacctaaacatccaattagtgttgagcgttactattaggtactagtagttattacattcaattatataagacccgatacataattgcactctaagcaccacttgtgccttttagcattaagcagctcagaataaggacccaaagaataacatgactaaatccctaattttgatttcttttcaagaactctccacaaacaagatgagcacaaaagcgatatccataatgaatgcaaataacaatccaaacatagggaaattgtaaaatgaaatggcattagtcttacacagatggcatggaagccaatcatagttcaattatatcaaaatgtaatgcttttttccaaagtttcagaaaaaaatagcaagcaaattatttcatgtccaactccagaaaagaaaaaaaggaaaacaatttatgagaaatgaaaaaccctagcttctttcttatgggatatcccagggtttagcctcgggaacggcgaccaccataccttggagatcaggcgagaggacgacctggcagctgagcctggagtgcttgttgagaactctagctcttgagtatttcttgagaatgaactcctcgtcgtaagagcggcccggaagcctgtcgagccattcctgggcaacgttgacctcgcattcggcggagcaagcgtcgatatcctctagccggtgggaggctggctcgatcataccggcgttggccaaggtcttgagaagagtgtgaccggtcaagccaacaatctcccgcttttttccatccagatcgatggcgaagagcttgacaatacgatcagaaacttttcttgaggaagagggagatggcgatgtgggtgaggttgaagtgacggaggatctcgaaattagagagtttgaatagaaggagagggcaggaagacggtggatttgggcggagagtctctgtaggttggagactgccattgttttgggtggttcgaccttcgaatttcgattgaggtgtttcggatgattcccttcttcgaatgactcttttcgtttatgctgccactatttagtatttaccttctacatgtaacaaattaattttttttttttacctcaggtattaaaagattgttagatttatttagaaatttttaatggtgaaaaaagtttagaaatatgatttagtacatgtaaaaaaaaatcataattaacatttatcttcactcacttctttcacacatatgttaaaaaaaaatgttacgtattaacattttctttttattagtatttacatatttattaaaatgaatgttgatgttgcattgtttcctgtaacttattagtttggttgaagcccgtatcatttgacgttctggtaatatggaacttgagttgggttctagtgatgtggaacttgagttgggtatagattactctggtagtttcttcggtgatttctatgtgggttgttatacggattttggttgcgatttaagttgccccgttaattgctatagggatttctatgtgacattccgtaaaaatatataaaaaaaaaaattgggatgaagtgtaaaaataaaacataaaacctttgaaattatgggtatccgggaggctctcggtgggatcaaggacaaagtatggtcgacaatggttcttgagtttgattgtttagtggcgattgaggtcattcgaaatcatttcatgatgaatttttctttttggtttagttgttgataaatgtaaacatttgattaattgcttgagtagaatccattttttgtttgtttaacgttctgctaacaaaataactcatagtttcgttagactttcctgatcttttttgtttgttttgacgatttg

SEQ ID NO: 33919 - DNA, 3315 bp, Cannabis sativa
aacaatggggcccataaataattaaattcataaataattataaaagtataagaaattagtgctaattgcctttactaattccaattactaaagcggtcattacatatgcctaggcacgacacgacacatcacgaaaaaatatgggtttagggacaacatggcacaaaaaaaaatatggacttagacacgacacgacacgacaagcccgaaagcacgacacgtaagcacaaatagattagattaaaagcacaacacgttaaaatgtccaataatttgataaaaataacaataataaatatttatttatcaattaaaatgatagaagtattcaaattataattatttttatatgattgtgtgtaactattattgaaaaaatatataaaagtaactaaaattataaaaaaatacatatattttagtatttagctcattaattgtaataaaaatgtaataacatagaacacgaatttgaaaccgtataaaaaaaacaagttggtctatttaagaaaaacgaatcggtccgaataaaacactaaacgaaaatgatcatgtcatcctagagtcgttcaaacaaaacatatgactcttacgcaagtaaggacagctacttcaaatatcataaccaaattcagttaatccactaccgattgggtagaaaagattgtgtggttcatgatatctaatgtgtttccttcaccaagcatcctaactaacaattaaaatcatcgacaggatgactaaattgcatgtatggatcttagtattaattgtgattaatacgggaaaaataaaatatcaacatgaatcacaattttcgataattgacatgtgaaaacttacgataggtaagtataacacattcaataaaaaaatttaatctcataattatcaaataaagccaattgcacattttcaaaatttctaacattgacaataaatactcataataaattctatagtatatgcgcaaaccataattaatattttattacacgttattcatagtgtatattgaaaaagaatttacaataataaaactcacaaaattacaaaaggcatacatataacataattgtggaataataaataaataaaattgaccttgtatgagattaaattaattaacgataaaatcgttacaattctcacaatttgatgattaacaaaattgacatacttagattcacgataagtgaatacataagcattcaattaattatttgatagcataattataatttcacaaaatgccaataacataaaataatttagtggcatgaatataattatgtctataaaattgtgagaatacttattataaaataatttagtttactttaaatatgtaattatgtgttaattaatcatttaaattcaccaatgccaaaggatgatgtcttatttgtcaaagaaaaatagaatacgttataaagaattaattaatcagttagatattcgggaatcaaaaaagcgtttattgactattacttagcaaatcgtgctctataatctggtttgatcttgtagtccaaataatctcataccatgacgtatctgtaatagtagtcatgagtggaaaatttccttttctcgatcttgattcgagtagaaattcaggaattatgttctttgttgaaccggagggactcgaattcacactgaattcagagaactatttagcttggataccatatgattaggtaccgtatgagcaggcccggcaaaacccttgtataacttcttcgatttcacgacacaaaataaaatcacacaattaagtgggagaattgagattgagcaaaattgtaaaaaaaaaatgtccaaaaatagctgtacacgcgcccccagcgcctgtttccttttttttttctttttttttttgactggtcgtgaaaacgatatgtcgttgtttataataaacgacgtgtcgttcgggtttcaaacgtcaaaagagctcagccctttaaaccacatcattttctgccgtttgggttgtacgacccgtcttcttcgcccagaaactaggcgcacaggtcaggtcccggatctgtatgacctggatcgtgacccgagtaaaaaatgcgcctccggccaccattttggtcggtgttttaggggttttgttgctcatcctattttctgtcgacctcaataataattttctccattcttgcccaaaaaaatacaataataaattttaaattaaagaaccaaaatgagtttgtacaaccattttttttagcatctctatcacatgatatgcatacaattaacgatagaatacattgtctaataacaaattcaagccatactttcaacaataatttcatcagcaaaaagaaattcagggagaacaaagaacgcgaaatgggtttcctcggatctcaaaactaaaaatacactgtaaaaataccgaaaaaaatatggataaacccaccaaatcattttttttttacattatcaaaatattaatcttaaaaaatattactctcaaatgaaaaatttgaaacaaaatggatttattactaacaagcgctaaagtcaaatgagatggctcattataccaattgttaaaattacttcacaatgagcattataaaaaacataatcatataaaagatttaaatataaaccgttataatgaaatcattatatttagggcattacaagataatgaacatacctctctaatgtgtattgatttcttcatgtcatttagatccttttactcgatcaatcctcttctttcaatctacacatcaaagaaaatatatgtgcaaggggtgtgtatgagcactactcttttcactctcaaaacatacatatacccacacacatccttagtcaccaataaggggcatgacccccccttttataaggattagtgggtcttttggtcttatagtccaaatagagaaaatttattatcttggcccaatggactgaccaaaaatgttttagagcgtgtccatggcatctcattatggctcgatgacaatactatgcattaccaattatatagttatcattatacgctaatatcgacacttagtgagcaacactctattatgttagtccacataaaatattctaatacaaaattattagttaaaagatattgattgtctacacgtataattcagatgttattatttttacaagtaaagaatattttatggatatgttagaaatatatgaatatatcaaaaatatccatgaatattttcatgaatatgttagactttttatttgggcttacattaagttttattggttttattaaaacttgggttgattggatagttctttgct

SEQ ID NO: 33920 - DNA, 5123 bp, Cannabis sativa
  modified_base (1987)..(1992): a, c, t, g, unknown or other
  modified_base (3506)..(3514): a, c, t, g, unknown or other
tttttttttttttttggtgagtaagaattctattactcaactttaacaaatacaagcaaactatttacatcacataagaagctttgtaaaccaatatctttgtctactctcaaactaatatctttcttaattctatttataattgtgtgttgggtagaccttgataacttagaagtttgtgtataagttagaatataataataatgtataataattaaatatgattatctgattgattcacagcagttatctcaatttgatagtgcaatattattaattaagtcttctttcttagatctctaaattagaagcaaatttattaatttgattatcaaagtatacaattatagggttaggcaagggacttagctacataacctagttagattgggtctgctcatcaaagacttcagttaactagaaaaacccataattctaaactttttacacacagatgctaaacctattaactattgatcactaacaatatggattaacacagcaaagaactatccaatctacgtacctaacttttaataaaactaatagaaattaatgtagacccaaattaaaagtttaacattctcccacttgggctgattaattttaatacatatatattatatatcaaaatagttttgcgtaaaaacgacttataggttgaacaacaggttaatatttgtggccactttaaaactaatagttctttgatagcatctcaacataccggtctaatttaacctttgctattgaactatgacaatcatataacaccctactagtttaagcatgttatcatacttaattataaaagttttcacctagcgactatcaaaataaggccttctatccttaagattgaacactctaaccgtctcgatatatacaatctttatctactcgtgctcactgttaatcagctttaactttgcctttaccttcacatgtaaacattatatgtgagtcgacaaactcaataagaaaagtataatcataacataatataaacgagattataattaggtgcccatattcccaattataatcttatctcgcgacccacgcatactgagtctagaatatttgtacgacagtactattaaccataatattagcctatactcggtactctagtcataccgatatgatagcatcaatctatactatgcaaacatatatatgtcggtatccggtgcaactctatgtacactaacactatcgttactgatatgttatctaacatgcattcataaacatggacactaaacatgtaaacacatatgtaattattatactagacttatataagccattcctaaatgaaaattcataaataagacatagtctaatttataattctagttgaataattaaaactaattaattgagtctacaagccaatattatttcaactagtgcggggacaatgaacctatataatcgagctcccaataagtcgttctaaaatttatcgagtaaattctctatcttattaattcctcctgactccactatagattcagaattgtactcctaattacataaaacactctatatgttccaaatatatatgcgctattaattatttatttcaatccaaatcatcaaagatcctttatagatgaactacatcgagtagggacaaatttaccattctatccccaatatattttatctttaaaatacttagttttctataaatgatatttcagtaaactataattactgaaataagagctctttcatttatatctgttaggtcaagctcaaaggaaattatcattttacttctatatcattatagaagctatagattttgtatctattattagcgctcccactcaattgtactaccatgtttccaagatgtaagtattgagaagatccacttggtcaactttaacgaataagtcaaacaaaacaaataatacagttaagctagaacctagtcatctcaggattaagatctattgatctaagatcaacnnnnnnatattgacttagaaagatataatagtatgtttatgatatcttatccaatgtcaatattggttaattctaatgtatacttcatacatctgatactagtatactttattaatatcctagaaatgacataccacttatacaagtgtaagtaaattttatcactgattatcacgtcagtgtaaattcagtgcactaataaatcatgggactaaagactttgaagcatataattaaaattactttccactgtgaagacatcattgtaattgtgaataactttatgttctatattaaaaagaaattgtatattaaactacaaacatgaaaataacatgtaaacttaaatagcttctaatcttctattgatagaaaataagattatattgaaatagattttatttagggtatataatcctaacagtatcttctttctccagtttcatcctagtgaattgggaatctacgtttcctgccatacaacatctcaagagagccatccatattgtactctggtagctaatgttgtatgaaaattctatcagtggcaaaaacttaccccaagagccttcaaaatccatcacgtaggcccgcaccatgtcttctaatatctaaattatcctctcgaactgaccatctgtctgaggatagaaagttgtattgaattttagcatttcccaaaacttagaagtgaacttcagatccctatctgaaacgattgacttcggagccccatgtaatcttactatttcctttacataatgttctacatattgatctactatgtacattatttctaccggcataaaatgtgttgacttggtaaatcgatccacaattacccatatggaaatcaaacatacctgtggttctaggtaatccaaccacaaaatccatggtgatatcctcttatttacactcataaagagtcagaggttgcaaccaccttgcaggtctttggtgctcagccttaatctgttaacaagtcaagcattgagatatatattccaccacatcctttttcatactgcacccccagtaaaagggttttacgtcttgatatatcttgatggtgcctagatgtaatgagtagggaggggtatgtacttcatcgagaatctcttttcttatttccatactatttgggacacaaactcaagttttgtaaagtagcatttcattacttgacactgtgaaatatttatcttggccagttaaaacctcctctcaggtctttactaactctgagtcctctaactaaatagctctaattatttccagtaagtcttattgtaacgtcaaaaaactgagttttccaaccacaaacttaatacctgatttgaccatgtcatcttccgattgaggtgagatcgtaatcgtgttaaacacctgctcgagacctttcctactaagggaatctaccactacagtggccttcctgagataaaaagataatctcacaatcataatctttaactaactccaaccaccgcctatgtctcatattcaaatctttctgnnnnnnnnnatatttgaggctcttgtgatcggtgtaaattttgcacttttctctgtaaagatagtgtcgccaaatcttcaatgcaaagaccattgtagcaagcaatcagtcatgagttaagtatcgttgctcataatcctttagctgtcgagaagcataagcaataatcctatcggcttgtattagaacgcacctcagaccctttctagatacatcacaataaaccacgaacttttttcgaactgacggtaatccaataccgaagctgtgatcaatcgttgcttcagctcttgaaaactggttttacatttgtttgtccacacaaatagttggttcttcttagttaattctatgaaaactggttttaatactaaggtcactaggattcgggaaccctgaactgatcccacagacatgaacaatttttcaccttcaggttgtgagatcaccatcttctgcttatactcgatagtagcagcatatttggacaagaagtccatttccaatataatatcaaaatttgctaaacccaattccactatatcaacactcaactccctctcctcaactctaattagcatagatctaatccaccttttggagataactaattctctacgaagcagtagggttccaaatcctattttataactattacatgaactacccaacttatcaattattctggccgccacataaaaatgagtggccccagagtcaaacaaaacagagtaataagagttattgactgaaagctggcctgcaataactgaaggagtagctttagcatcaacctgagtaaaagtaaatactcttgttggagcgggctttgcctctatcttcaattcttctttttttaactatgggcagtctcttttataatgtccagttacaccacactggaaacatcctcgacctctacactcgcccatatgatgctacctacaattggggcattcagggtaagtgtatcggttctcagacctactatgttgattaccacgaccttggttccctcggaaccttttgttctaactcgagcctccagacatagatggaacttttctcttctaattaatggttgagtcactaccacccctaccataaccaaaggtaggaggagcagtggctccaccaataacctgagtcctttgggactcctaaatacactcaactgtgccctcacctcgcagtgccttccctaccatattaggatagatagtttcatcatccattgtaatcattaaatcaagtttaatcttgggattcaacccatccagatatttttctttcttgctaaaatcagttggcaatattcctaaagtcaaccaagccaatctgccgaactaagttgtatattctgtgactgtcatattttttttggtcaactgcatgacttcttttctcttggcactaagaactgcctcattataatacttcgcattgaatagttcttgaaattcctcctaggttattctagtgacgtctcaggtgagggatatcatgtcccaccagaccagggcatcctcctgtaattgaaaagttacacaagccactctatcattgccagtgactcctataaaattcaaaattttattaataatggttagccattgct

SEQ ID NO: 33921 - DNA, 962 bp, Cannabis sativa
ttggagaaaattgttgaacatcctagagaagaaaagtcatacaaggcagtttatgaagagccatttcatataaaaacaacgaatttacataataaaaagtatcaacgctaatattacctctaaactatttcttatccgagtgaagtgattattctcctttggcgtttgtactagaccattccgaaaagccatcaacgttagaatctgattctgatttgatcgacgaaatcacataacaacgttgtacaagtcctattatggctattttgtcgaagtcgattttgatctctcaaataaaaagttcacactcgaagccgaagctgaagctgcctttacaactctcctaaaatcgtctcctcttgtggcttatcctcctccaccttcttctctggtgacttagacagaggtgtcgacggctccaattttggagatttgacatatttggtctttggaattgttttgggttacatttcctatttcttttatttttttaatattttaaaaaaattattaaatatgatataaaagaaaataatgtgaaaatttaaaatataatattcttaattttcattacaaaaatacgctataaaaacccataaaaatgaaaaagaaaaaacaaaaattttataacccaaaacatcatttaattctgatatgtacaaaagttaactcttaaattttttttttcatgtaatttgtactagacttagattaattagctaagtaatatgaaaaaaatttgtccctaatttcctattcctaccatgtgccaccaataatttcaagtcatttaatcaaagtagttaacagattcattagctcttgtctaacgttaacatccattaataattactcaattctctctctaactagttaataccattctatttctccaataaaaataaattaataaccaaaatattatttggtaaatactattttgaaccctatgttttacaaaa

SEQ ID NO: 33922 - DNA, 1681 bp, Cannabis sativa
atttttttcatgatacgagagagatattccatcccaattacaaataagggagacgtgggatctccttgctgaagactatttttggattaaaagaagccaatcttggggttttaacacataccataatgaccgccaaaaacttcgtaggaaaatgtaacgctgccagcatttccttaaggaaatctcaatcgaaagtgtcatatgctttttgcaaatgtataagcaagcggagtgagcactttgccaatcataaccccacaccatatccttgtgcacattttgtctcccttgaataaagccactttagttggcaaagataatgtcagggagagttaatttaagtttggagcagatcaatttggtagcaactttatagaccacattgcatcaagcagttggtctacaatcgctaacagaatcaggctagaccttcttaaaaattagcataatagtggtgtaatttatttacttaaggaacttccctatatgaagaaaagagaggactgtcacaattaaatctttgccaataatctctcaagaatttttgaaaagcgtactactaaaactctcagggccaggagctttatcatttaggccaagtagaagaagatatttcaacatcttccaaagtgtactcagtcaatagccaatcagcttgagaagggctgacttttggaccctctttaaccaaacctcttacgaagtctagttttattgctcattttagaacctaagattctcataaaagtcaaggaaggtcttaattacctcatttttgtcattaacccaagtcccattagagtatttgactgaatagatatagttttgaattcttttctttcggatactagcatgaaaaagcttattgttttcatcttcatgagaaatccaattaactttagctttttgtctcaaaaaattcagttaattcttgtgagtttcaacataagtttttcgggcaaggatttccttggaaattaaatcacaatttccagttggttcctcaaggactactgcatgttgattaaattctaataagcatctgaatctttcaccccgatttcaccttttctagtttgattcagctctttaaactttactttaaggcctttgagtttattgatgaactgatacataggagtccttgctatattttcattccagccagcaaagacaataatctcagaaaagccatgtaaagtgctccaatatttaaagtacatgaagcttcttttgattatgtacacttgggtagactaaaagaatagaaggcggatgatcaaagtctccttccggtatgaaagtaacttcagttgtagggaaattttccatccaatctccattagctaaaattcggtcaagcttagcatataccctatcatgcccctcatgtaactttagctaaaatctaataacttctgctgtagtaacttcttacaaaccccctattttacatgttgttctaaaaaaaagtgttgttaacacatgttgcagaaatataatataacgtagcaacaatatgaaaaacaacacaaaaccataaaaatgtaaataaaaaaaaaaaattcataaaaatgtaacatttttttttaagtgcattatgtaaatttttcttaaatatataatgtcaaattttggatacaaataataaataaatattatatttgttaaaatatttgtt

SEQ ID NO: 33923 - DNA, 1168 bp, Cannabis sativa
gggagaggcaacctgggtgccctaaggtgtttctacctccaaatggtttgatttgaagtttgaagtctattgttttttcttattttatgaaattgaaggagatgttcgggaaacatctctagaaatacattatatgtgccccaggttaactacatgttaacatgagcattaggtctaggttgaaattctcctaattctgtctttttgatgtccaatgatctttttggtggaatatgcacacacaaatcaagtttcagcaaaattaaagatgcttagagatgtcactggagtgacctaggcacctaggcactgatataagcttgtagcccttgggcactaattgtaaaaacttaggtatacacatcattccttgatagatatgaggaattgggttcgaaagaagttatggaaaacctaaaccctagttgtcgtgggcccatgataacatgatgtcagtctgggtgttaactcctacttggtcgcccccaggtatagttctgtcacaaaatcggtatcggggctcaagacttgatcgtggcatgtctttcaagtactttgttatagttgtttgagctgtttgtagggcgatgaagcttaaaaacgacttagtgaaatctaagcctgcgtgtgcccccattttgtagatgaaactggcccacttgggatgtgggtcccatagttttttccttcttaccgtgtgtcaaaatcgatgtctgtgtcatcaagccaaattgagaagaaaaataatgtacatcccttggtagttatcaaagttatggggacaaaatagtttataacctaacaaaaaattaaatttctataaataaaaattttcaagtgaaatttttaattggttgtatatattaggggataatatgatagtgtaaaaatattaattaattttgttttttttttttgagtttattcagctagtgagtttttttattggagattttacgctaagtactaaaattgacacaatttttacaaaaatactgtggtacggtcataataacatttttactatttcttaagaacaaaaatactatgaaactattacaattgtccactttctattctctctacttacatcagcatggtttttgtttagtttgttttttattatttttattattattttattactaatatcttttttttttttttt

SEQ ID NO: 33924 - DNA, 1821 bp, Cannabis sativa
  modified_base (1437)..(1441): a, c, t, g, unknown or other
ctttgggttagacattcacatattggacctaaataaatataaaattagtatttttataatgttcggtgtggtgtggtttgaaccgcatattaataattcggaaccgaaaaccgcaccgcgcggtgtaagaaaaattcaaaccgcgacagcaccgcaaagaatttcaaaccatattttttttttttgcggtgcgaacggtttgagcggtttgatgaacacacctaattaccataccacttttgccctttacaacaatatataattacattgatactactaaagtgttaagtgtaacataatgagatatatatacatttttaaaatgttaatttacaataataaaatttgtattctataatttttaagttttaaattgtactaaatttaaatgtcaaacttaaatttttgttacaaatatttatagtattaaaattaaacaaacaaaaagtaaaaaaataaaatgtagcaagaagagcgatgcacgtgctaacctcacctagtaattataaagatctaaagagtatacttaattgatgatgttgaataaccaagaaaaaagaaaatagaatgattgctaggtctaattttttctatttatataaattttataaaaagaatgaaaaaaaaaaattaaaaatgttataaaataacataaaatagagaaaaaaaataagaaagatagaagagagagaataagagagtaaataaaaatttctcagtagtttattttaatgtgatgaacttctatttatacaaaaatatgattatagtaataagaaactaaatcaatgaaataaagagaaatataatgtatttatggtggtaactaatgtatttatttggacatccatactaatattttataatactcccccttggatgtccataaaaagtggatcataatcttgcaaaaaaacatagtaggacaaaaacttagtcaaaggaaaaatagtggggtgtgaaataactccttctcatttaagcaatcgtggagattttctaatcgacgaattttggtcttatatgtcgtcttctcaaatgttgatgttggcaataactttataaataagtatgcataattgacactcgattgaatatgttggacaccaatatagtcattctccttaagatcataagttaagaagaatttggtgaaaatgtcttttgctctatcttcttcattatagcttgagcaatatattttgtgttatcttcatagagaattgctattgttgatacgtctttattgagtgtaatccatatgtttcctgaatatgttatgtcaatgatctcactcccacacattctctacttgcttcataagtacaagtatgttagcatgatttaaagttgccttgataaaaaatttttcaggaaaatcagtaggataaaatctaagctaagaaaaaaataagagtgcaatatatatatatatannnnnatatatatatatatcatattcataattatttgctagttgtcttgttaaaaaccttgtgagaaaaacataatggaacaaaacttgacctaaggaaaaaagagtgcaacatgaatgcgtctccccctcatgcacatatgaacataatatttttagtgataatatacctcataatgttattgttatcacttttaaaataacacagtatatatctatgaccatatatatttaatataactcttctagagtatgtgtggacttctaaattatggatgaggagtttctgaaacatcaatatttatccaacttattgaattattcatctgtatgtatatacaatgttattcataccaaagtttgaaattttaagaaatatgaacata

SEQ ID NO: 33925 - DNA, 2702 bp, Cannabis sativa
ggacacacactcgtgctttgaacagtagcattccattgtcagagattgaaaagtccttagctttgcctgctaagacatcattctgaatcttaaacaatccagggtattctagttgagctgctttgattctttccaacaagtctgactgaagtgtcaaattatgcaatttcccaaccacaaattaaacgtttgccctagacatctctgaggctaactgaggagaaatcatttttgtattgaaaatttgatcaggtcctttacgactcaaggcatctgccacaacatttgcctttccaggatgatacaggatttcacagtcatagtccttcactagctctaaccacctcctttgtctcatattcagatccttctgagtgaaaaagtatttgagacttttgtggtcagtatagatctcacaccgctcaccatataagtagtgtcgccaaatttttaaggcaaacaccactgccgtaagctccaaatcatgagttggatagcattgcttataatctttcaattgtcgtgaagcataagctatgaatttatctacctgcattaacaaacagcccaaaccctgccttgatgcatcacaatacactacaaatttctcttaatcagacggtaaggctaaaataggagctatgatcagccgttgttttagctcttggaaactcccatcacacttactcgaccatataaatcgttggctctttctagttaactcgaataacggcattgcaatcttggaaaaaccttccacaaaatgccgataataacccgctaaaccgagaaaacttcaaacttcagtgactgttttaggtctaggccaattcttcactacttcatcttctgtgggtttaccataattccgtcttttccgacaatatgccccaggaaggatacttgtgacagccaaaactcacactttttgaacttcgcatagagtttatgatctctgagtcgttgcagaaccataggaagatattgttcatgttctgcttctaaccgagagtacacaagaatattttcgataaatacaattacaaaattatcgagaaaatccttgaataccctgttcaagagatccatataggctgccggagcatttgtcaacccgaatgacataaccaggaactcataatgcccgtacctagtatgaaaggctatcttcggaatatcttcttctcggattctcaattgatgataacccgatctcaaatcaatcttagagaataccgtcttgccctgaagttgaccgaacaaattgtcaattctaggcaaaaggtatttgtttttaatggttaacttgtttaactctcgatagtcaatacacattcgaagggtcccatctttcttctttacaaatagaactggagctccccaaggagacacacttggtcgggtgaatactaaatccagcattccatgaagttgtaatttcagttcttttagttttgcaggtgccattcgataaggtgcctttgaaacaggttctgccccaggaattagatcaatgataaaatctatctcccgttgaggtggtaaccctggtaattcctcaggaaacacatccaagaattccttaaccactttaacctcttcaggtccaagtaacacatgtttactagaatcaactacaaccgctaagaatcctacacacccactgcgtagtaaatccctaactttcaatgttgagattcttgggatacgagaacattgaactgaaccaacaaaaacaaatggttcctcattctctggttggaaagttaccattttctgtttgcaatcaatactaggagagtatttggacaaaaagttcatcccgagtataatatcaaactcggccaatggtaactccacaagattagcgctgaattccctgtcttcaattctaattaacaccgatctaacccactttcttgaaataattagttccccattaggcaatagggttccaaatcccatctcaaatacatcactaggcctaccaagcagattaaggactcttgatgatacatatgatcgtgtagcacccgaatcaaataaaacagtaaaaataaaactgttgataagaagctgacctgtgactactgaagggctggcggcagcatctgcctgagtgatggcaaatacacgtgttggtgcaggcttaactttaagcttaggttcctctttcttcaattggggacaatctttcttgaggtgccccaccgatccacattgaaaacaagctctccagttacaagtcacaggatgatgtttcttggagcgcgggcactaaggataggagtaagtctgacgtgcccctttaccctagtttcctcaaaaccttttaccttgccctgaactcctcgaagatgggaaaattctcttctttttctcaaaagtggaatcaccactctcttttccagagccagaactagggagagtagtgatcccaccaacaccaggagtctctcgggtttcttgcaagaacttgactgctccttcaactcgaagagctttgtcagccatctcagcataagttgtggtgtcatttgtagtgataaccagatcatgcttaatcttggcattcaaccccgccaagtacttctctttttaactaaaatctgttggtacaatcccataggccaatttagccaagcgatcaaacttggttgtatattcagtcactaacataccctcgccttgtaccaactcaa

SEQ ID NO: 33926 - DNA, 1505 bp, Cannabis sativa
ggggtgttcatcaaattgcttaaatcgctcggcacggtaaaaaaaatgcagtttgaaattctttcctgtgcggttgcagtttgaattttttcaaaattgcatagtgcagtgcaggttttgaattgttaataggcagttcaaacctcaccgcacattataaaaatactcatttttatatttatttatgtgaatgtccaactcaaaacccactaattattatattattaaaacttaatttttttcatatttattttcaagctttatggtatttaaaataagtgttgctcaaactttattatatttgtgatagtgttttgtccttaatttaaaaatttacaatattatcgttgtatagtgtgctaaattgttaatccacctttctatatttatttattttgtaggtagttttaatccaattaagtgtttacaatgttatcgttgtataatgtgctaatccacctttctatatctatttattttgtatgtagttttggtccaattaagtgtttatatcagatgcctcttgaaggtgatctcaagtttttttgtctaaatttccgagataacttgatcttatataagttgttttgcttgtagcgactcatattctgactttgtatatctttgggtagacaattagcttgtagactggaagttcctccgcgtcgacgattatcatagtgtgattctaatcactctctcaaaaaaaaattactagtgatagttcaaaccgcagaaactgcaaaaaccacactgcaccgtattattttttacgttgcggttttttagtttcgcagtacgggtgtagtttagaaaattaaaaaaatgcatgtacagattaatttggaaaaatatcaaaaattgcaacacccatacaacaaacgctactaatttttaatttgtaacgagccacgagtgtttatttacaacaaattctttaaatattatagagtgattccatattacaccccttacaaaaaatcattgtggtaactctttataaaaatacaaatgacaccggacaccccactataaaacatcataatattttagtacatgttttaggtgcatatatcattactaaagaacccttttcaaatcccaacatttaacatttatttcgtgtacgatcaattcttctttctgtaattcggtgtttcatatttcacaacgtggctaagtggggacgcttttacagttgtcttacaactcagatcctggtgtgctcgataatttgtttcttgtttcttcttggtgtctatgtagctttttctctattttcgggcttcttttttttttggtttatttttctggtttgtttttagctggttctgttgctggactttgattttgtttcaatgaattggtgctgtttgttggcaccaccctttcataaaaaacaatggcccttaaatgatcaaacttttaaaaaatatataattttaatttgaaattataaaatgataaaattaatatttcaaaatattgtttttaaactaattatt

SEQ ID NO: 33927 - DNA, 1917 bp, Cannabis sativa
ttttatttgatattgattaaatagggaataaagctggttttaattgtttaagtagaatgagaatgtcctctaaaaataaaatcattgctaatattgtgaatacttgatagtggtcttagcttttttctatataggtgttgcttgatataactttgttgtttgatttaatgagaatacgtctttttttttttattgggattatattacaaatatacaaaaataataaaaaaattataaaaatacagtttcacaaaattttaaaaaaatttatgatttttttgattttatttacagaaaatacaatttttttatattgtactattattaatttgatattgtttttttgttatttgtatgctattttttgatattatttaaatattatttttatattatttttatataattttcttattatttttgtgttattcttataaaaaaaaaaactgtaacaactaaaaaaaattcattataaaaatataatattattttataaaaaataatgccagttttttatttaagtaaaaagtagcaaccctgaacccaatttgttttaggcccatatttgaataaagatgtgggtagattgggttatgggctttgttaaagccattgtaagcccatttgaaaattgttttgggagagagcttatcttatcttgccttgtttgtcatcttaatactcaattctcaactcaagattctcctctaatcctattattccaatatatatttataggatccacaattcacgcctttaacatcacaattcaataaaataaaacaatgcaatcctcttttactattcaactttgttttgttttgttttgttatgcaaaactatattatttttatacaaaatccacattgaatatagtgatattaacacaagtattatattatatccatttcaactccaccaactttgctaattgagtcacgagcatttaatttaatatttttttttgaaacattggataactcatttttttctatatataattatcacttaaaaaacctgaacatcaactctaattatgtgtataatacaccatcaaaattattttttttatagaaaaaaaaggtcaaaacccaagagtagggatggaaaatcattaacccataaagagcttaacagcctaatgtgtttggtctataaaagaaaaaactgaattggttggtgtaattttgaatattaaataaagatcattatgagtaatgatatacataatcaaaatatgcattatgcatcaaaaattagtgcatctctaatgaagatgaaaaatggtgatctattgctaaaaataaaataaagttcttgtaaatatttgctctggtatgttaaaagtatatcgaatagcaaaaattaatataaacttacatcaatgtaaattttatgacaataaacatattattttaatgtcatttttaataatttattattaattataaaaattttacatttattttttacataaactaaaacaaaatattatataattcaattaacatgaatataattacttattacacaaccaaataaaatttacacattattccacaattatattttttattatattctctataattatatttttttaacacctcattccaaacacccatttaatggcatttcttaagaaaagaaaaagtattccttttcttttattatttattaaaacaaattctcctttcctaattttaataaattaaaatatacaattgtataagaaaatgactatcttaccattcattctcattacttattaataggcttaaggcaatgtcttgagtgagagaagttaatggtcaccaaaacacaaaaacacatgtacatcaaattcaaccagaatgagaacatggtctccacaagtacaaaagtacaaacttgtacaaaagcataaaatggatccca

SEQ ID NO: 33928 - DNA, 3263 bp, Cannabis sativa
  modified_base (3216)..(3217): a, c, t, g, unknown or other
aatccctctttgatatgcgactactaacactaggggagtgttcgtggttgtgtatgactctttcctcttgcattggatgacgtcatcttatcctttgtattattttattccaatcaagctaagtattttatacccctcgttggagttcttctcgagttagggtttaagagtgaaataccctttctcagaatgccgatgagacaaatttaggggcaaaaccctatacatgccaccattggcagtccattagggcagtggtcgcatacggccctttctgcgccatgtggcactcaaacatgatgctacttggttcgtcattcgagtttaatctttgtctcgtcttcttgcttcttggtcaaagttttaaagttgatttttctgaattcttgaaaattaggtataatattttccctctaaaagtgtttgtcgtatacttttaggaaagacttttgcagttttacccgcctttattctgattatggcatgcgcaccaacctctgcttgttcttgacaattttcgaagtacccgattgagatattttacacttacaagtcgtttaatgcgtcgttcacattttatttgttaacagattttcaactcgttttttttttttttttttttgtgtttttgtctttcagtagacttttttgaaaaattgaaaagaaaaaaaaattaaccttgaatttattaatcatatttcaagaatatttaactcatccataaataattaatttattttcatttgaaattttttaatttcgtcacataattaattttcaatgatcatatgcattttaaattcacacttgtgaaaagtcattaggaatgtggggaattttcctcaccaatctcaccttctattcttttggcatgtggtagatgagtgtggaaaaaaaacttaacaattattgcttttaaaatatttgaatgttaagtttaattttgatttctcgtatcataacacaatatattacatgaattttctttactaaatattactattaaaatttcacaatatattactatttttttataaacacaatatattattgtgtgtttttttttctctttgaaatgaagtgaaaagcaataattgtaaagtttttttttttcacacaatcatttaccacttggtaaaagaatagtaggctggtgagggaaattccccacattcctaattatttctcacatgtgttttctaatattatgactttatattaaggcaaattatgtaattcctcacgtcaaaaaaaaaaaaaattatgtaattcctcacttctttatgaggtgtggcatccttcaacacattattaggcattggattgatttctaaagtcaaacatttatatcctatggctaaaatgaattgaagggtaaattttttattttaatagaaataggcaaccggctgttattattttttttttttttaaataatgttctattaaattgtactattttataatattttaataccaaattattttttttttttgattgtgaagtatgttatgctctttatcttttcaatggtaccattttataatactttactaatttttttttctttttaaattaagagaaagaattaaccaacataaattagtgtaaaattaataatttaaattataattatagttattatttaatttaatttgaataagtgatttaaataaataaaaaaatgattaactatgtatttattgggccaaaattattttcctaaacctaagctacctaagctgtaatatcctaaaaactattatgataattaattgggcatattttattaaatatgtgattgtattgatgttggggtaagattatgatcttactttggctaattgtgtgataattagtgaaaaatttaatagtagttaataaagcgtaatttattaattactgagactatattggattatgtgggtattgtagataccatttttgaaataaaatatttttgggcccgtgaccgtgagaactcaacggagtggtcggaaatgtcacgaaaaaaaatatggatcgaaatggaaattataccagactagttttgagtgtatggttgttgatttagaattaccaaactacccctaggtgtgttttaagtttaaaggttacttaacgggtaaaatggttatttgtgaatattagatgtttattttgttttacttgagttagtggctaatcttttattaataatattaagtttaaaaaaatagttattatagtaaaagttcgaaaaagagttaaaagagttaggaagacttcaactcatcctcttactctttcccttcgagcagccaagaaaccagccaagaactagaggaaattatcacctattcactttgatttttatcacatcttcatccaatttcggcctagaagccttggggtaagtttcatgccttatggatttgattttctagttgttaggttggttttaggctagggttttatgatgttgtgactgtaggattaaagtgaattaaggataagttttcaggtccgatttaaagtatgcttgagcttagattatgtaattcaagtggctgctagagttgtagttaacaattttaagttagaaacttgatttttggttctaacatggtgttttgcataatttgatgaaatattgtgaattgatgttttggttatattattttggtgggattatactgttctggaaggtttcattaggtttggaggagttttggttttgttttggagcaaaaaccaagtttttcccgtttctgcagtagggaaaactggtaaaccggtttcacaggtgcagtgaaaccggtgaaccggttttggtagcaggggaagaaaactttggtttgtagcctcgaaaccagttttgttcggggtgtttttcagagactagatttgagtattttagtaacgtataagctattttgaaccagtggagagttagaatatgtccgattgcgaagttagggttattccaaagtttgtaataagttgtttattgagcttcgttgtcgtgacataggacccgggatcgtcgagcgtagttccactgaggtcggcccgcatacttgactactggattgaggtaagaaaagtattaagcaccgtatatggttaacgttatgattgttacagtcttaattatgatcaagattccagtatgtatttgttatgactcggttatgatcgagggaaataataggaaatgattattatcgttgtgnntcgattatgatcgagggaaatgatatgaaacgattattatcgtagt

SEQ ID NO: 33929 - DNA, 1262 bp, Cannabis sativa
gccaaacggtagacggccagatcctgcaagactgtcctttgggaggagttacacataccaataacttcactgctactgaagtttcaggccaacctatcggccaaataagtcagacaccaatgccacctagtatctcagtgtttgataggttgggtgtcgcacatgacctcaagaccaacctaaattgcagaaggggcctagatgaacaatacgttccaccaattgtccaactaagtatccgcacccaaggtccagttcaaagagatccaaatgtgacacaggctggtcaacaggtcgaacaagttcatccacttgtgcaagcacaaatcgatcaacttaaaaatatagtgcaaggcttgaccgacccaaaactcactggtctcgaactcgaccgggcacgaggatcacctttctcccctgaaattgaagttcttgagttactcccaaagtttaaaatgcctacctagaagatgtatataggaaaagaagatcctttatcacacctaaaatattttatgatgcagatggacctgtagggttaataagaggtaggtgagtgatgtacggtgcgtgcataatttttcctgccacactcgcagaggccgccggacaatggtatttcaaactgcctctaagaaggtttaacttatagaatgtcttctcatcataattccatgcacagttttcctcctctcgtcaacttccctcgcaccttgaagatcttgtcgaagtaaggcaaatgccaggagaacctctcaaagcttatattagcaggtttatgacagatgctacaaaggtcaaggggctaactaaagaagggagactggttgcaatactggggggcattgaacctcttggagagttgtggaaggacataatctgtgggatcaatgactgaatttctatcgggcaaatgggttcataaactcgaagaagctgttcgccgtgtggatattgtcgggcaaaagaaaaatcaaccacatgccacttcgacagggatgtccgtccagaattcacaatatcccagcagttcaaattcgaataggaagaggtctaacaacggaaataagaaaggtaatggaaagaaaggcaaattcactggcaatgttgagaagcaccccaaagaaaatgcctctaaatttactgctttctcggttctaacaggtgacatagagagacacatctaagttatttcgtgttatttgtttttattcattgtaattaacattgttatagaaccggttctaatttaattataatta

SEQ ID NO: 33930 - DNA, 3122 bp, Cannabis sativa
ataacctttgatatcggactggtgaattaatacttattcgtggtggaaatttatgttgaactgtcatttttagtttccatccaacagtggttggggtgatgtcatctactgattggtgtagaatcgacaactgatatgcacatttaataatgatattttgaaaattaaataaaataaaaaatttatagttataagaagcaatacctcaaatgtaataaaattatattaatatggaaacaatataaatcatattttaaaagtaattagattagtatatgaaacatttatgagtttacgaatgctaattacatagtcactttgcaagttttttgaagagattaatttaaacatgataatactaataactctgtgtacactatatttttagtcgagttcttatcttgttgggaagttgaaacaagttagattaagactctaactgtcgatgatgtctttgctcttgatattgctatatataactaaccgtgtgaaaaaataggttgtggtaaatgaatcccaacgtaatccaatgtgtgtccatttgacttatttatagtcattgcaaaactcaatctgatttaaaattatgttcatttgaatagaaaaccactattttcatccacatttggcaagaatggtatccttagaatgaacgctctttttcggatatggtgtaccacggtaatttcagcatctacgacattttattcgaatgcctgacatattaaacatgttccattgcataaaccttcgaaatgattaatgtttctaaggtgcatgatgggacaattctttttgagttgtaattcatgtgggggaagtccattgtgagttagagtgtttaagaagtcttccattactgattgctcaatattatctaccgtctcatccctactatagtagaggttgacttctctgaaacttccaattaacaacaaatttatttcatcgattaagttgttctttggtgtaagtatcgcacggttcatcatggtagatacattttctaggtattgctaaatgttgtggaaaacgttttctatcaagatatttaaagaactgatgttgtcatcatatggtacaagcatttcgtttggaatttttatgttgtcattaattgtgtttggtggcatgccattgcctaccgacaacacgtagtgcaaaaacaatagatccagcatggctctcatattttaaattagtcaaaacttagtcaatgtaggccacaagtatgaataaaccaagctggaatttatctgctcttgtctcattccttttcgtaccacaggtaacacctatcaaaaatctcctccaaaaagaattacctttccgccaaatggtaaggttgtatcatttatgtcttgtagcattatatctaatgcttctatgtgttgctttctggtcattggggcctcgtcccatataattaattttgctgcacatagtagttttgcaatctcactctgtttgttgacacaacacatgctttttccgtcggcatcgagtggaagcttaaaacgtgagtgtgtcgtacgacctccgggtagaatagatgctgccacacctgatgaagcagttgtgagtgccacgacgccattagatcgtatagttgcaagcaacaccttgtataggaatgttttacctgtcccacagggcccatcaatgaagaatgaattgcttttatttgatgaaatatcttccattactgcattgtagacttggtgttgctcagtattaagtctttctaacgctgtaacatcttcttctggaatttctacctccaatttgcccttgatttctctggattggaattcgtcattatcaaagacaatgtcttcgtcaagtagttggtatgaattaatgtcttttcccattgactcaattgttgaagagattgactgtagtacttgatatcttacgttttgtgtaccattttcagaatttttgatatcaagtgacattagttcctcaaaatgttcccatagttctctgggaggattgcagtagaccaatatggttgcaaacaattgcctcaaactggaaggaatttgataaatggatgcttcatgtaaacagtcctctaaacaactatctctatgtagcaatccatgcattgttgctgcatcatgatatgttggtgccagtatgccgtgtattgtcctgatatcttcaaataataacggtcctcttacgtgatttcacagtatgcgcagaaaatatctttagccttctaatggatttgctgtatcaatacaccctattattgtctctctttcttttttttccattgagtccactttcttttttggttgttccgaacatagtattcaggaatttgtttgtataacaatgtcattgcattttcatctagtctatttactgtaaagaattctgttaacatggattttttataatgttcggaattagcaatgcttgacatgtcagaatttcttcagaatgtaactgggtgttgattcttgagatgtaaatgcaagctatatactgccggtgacatctcatttacaataaatctgtatattctctacatagcttaagggacagaaatccatcgagctgtctggaactgatgtatttcattaactgcttgattatttgattcagagaccaagttgaatgtaacaaggtcatggcctttgtatatgtattgtagagatactttaccgccttcactgtagagcatatttctacattaatgtgacagtcaaatgtggcgaggagatatgggttgtatggaactatccaacgattgtctaaatgttgccccccgaccttcacagtcacaccattatttgaacgcctataaatagggaaacagtcattttcgactgacgtaactagagcatactttttcagaaaattatttttgtatcgtggattttcccctttcatgcacacatttattttgttcaattctccataaggtccatgcatcatgtgttttacaactgccttatgcaagtggatatttgagtttttattgggaatctctactgatacgatctcatcaaaagatttaggaacatggacttttcaatccctttgcaatataattgaaaagtgtgcatgcggaggtcctctttttggtgctcaataatgtagac

SEQ ID NO: 33931 - DNA, 1934 bp, Cannabis sativa
atattttttaaaaaataatttaagtttttttaagtaaaattaatattttttttataaattcaatatttttatttaattttttaataatttttaatatttttttccgaattaatataatttctttaaaaaatagaatattataatttttaaaattaattttgtttaataaaagggggcaaaattttgtattattcaaagttcaatgggtaaaaatgctaatttttaacggtaaaagaaatagaatcttacagaatgggtataattatataactgttatattttaagggaaatttttaacaaaccgtatattttaagggacaaaatcagatagtgctttcaaccagtccaagagctcactcgaaagccactgttagatatttggtttgatttttttttttcaaaatcaaaagagcgattggattgtaaaaataaaggatttctaaccatcttgttatcctgaaatgaacctaaatctattaggtgaaaaaaaaaataaaaaaaggatagagagagcttgattgttccgcttagggcccgtaggaatcttaagccttagactttagcactcacaggaacatcatcgagaagaagaagccaaggcaaatggacttgcaaccactttaaccattaaccttagagcccaaatcgaatgatcattatacttggcagtatttggatgctggaggagaaaggtaagttcatccaactcttccaagaatataagaatttttttgcttgatcttcaccaagcgagttgaataaaaaagcgaaagcgataagcaacagaagttaatagctgatatgcgagtagtaaaccagtcaatgggtgcaacattaggttccatttctcgttttctggttaggcttaagcggagccaatcacagattaggatctcgtcccaccaattgaatgaaaatggtgttgaaactattctcagaacgaccgttccaatgatgacgaactaaattcttagagcaaaaaaaattcagcaaagcacgatcctatttcttaggcaggatctgtctcggagagatatagaaaagccctcaaagagctcggtaccaaacaggcacagctaaggaatcgtgctccctcccaaatgctttcttttacgtgagccacaactcactgcgtagccgtttaccacgcaatacaggacaagaggaggcttcctgaagtttcctgaaaaggaaacagatgttgattgacaagcaaccatttcccaagaccgcgcaagcagcgccggtggcaaagaagaatcatcaaactaatggacggacagcaatgcaagtactagaactcttgaaatagaggaaggacctaccgaccgattggtaggagagctttcatatcttttcggaccttagtgaagatccttacccttctgctgaagagttattctccccaacaaagatccactctagaaacccatgaagattcataagaataggaagagaacctaaatagaatagaggcagaagcctcttccagctcgagctcacagacctctctgagtcaattccaaatggaactaaaaaaaagattactcctttcgaatgattcagtgcactcctcagcaggcgagtttagccttgtcagtgctcgtaggaaaaggacatacgagtacgcaaagggaagagagttgggacggagacgaatccaagcaaatgaggttacgaacgaattggagaggaagctagagagatattatactaaggtatagtgtcgttaccagagaaggttgctcgctgcttcgccaaaagcgactagtcgcctcctttcctccactgaaagatgcttagccagaaggacgaagggggtttcacgctgctactgagtcgtcggacttatccaccaagggaaggggaggtgaatcaaaggagagaagaagccctcgtagtcggtttgttccctagcacccgctttgggttag

SEQ ID NO: 33932 - DNA, 1540 bp, Cannabis sativa
  modified_base (296)..(301): a, c, t, g, unknown or other
gaaattgatctccattttttttaaaaaaaaattacaatcagttttatgaggtattttgttgtgaaactagttttatttttattttatgtttcaatgttctagaaaactgatttcctctttatttttttaattgtaatcagtttgagttattgcgtgttacttgtttgtattcattatattatataaccggttctattttagttataatcggtttgagttatctcttgttatttatttttattcattataacattgttatagaattggttcaattttaattataactggtttgagtnnnnnngtgttatttatttttattcattttgttatagaaccggttatatttcaattataaccagttcgaattgtttgtttttattatgttatagaaccggttttatttttagttatatttgagacatctatttctggtgattaatccggcgatagtgacttttccggtgatattttcggcggctgtgactttttcagtgacaataagtttttcggcaccgatgactttttcggcgacttttccgacaccgataacttttctggtgaaacttattattgttttacaaatatggaatttccacttttttttttttacaaaaatatggcataaaaaactcatataaatatatataaaaaaaactcataatcccataatattatttatttatgccatataaaataaactatactatatttttccatatttatgaaaaaaaccctttttcatatgaaaaaataattaaaagtttacttttatgtgtcaaattcaccggagatatttcaaatcaaaattaaaatagaacatcttatatatagtataaaataaaaacaagtaacacgcaacaactcaaaccagttataattaaaaaaacaaagagaaaatcaattcttaaaatactaaaacataaattaaaaataaaattagctacacaataaaatgagtaaaaatgaataacacataatacctcataaaccagttataacttttttctaaaaaaggtggggatcaattctaaaaatgcggaagcataaatctaaacaaagccggttccataacaaaataaataaaaacaaggagaattaccttatataccattttttaaacttttttttttcttttcaaatttatggttttaatgtagaaattataataaatgttcatttgatttgtcttgaagatgttacatatagaggtactcatagagataccttaatgttataaagtattaataatttaaaaatgataattgtgatggaaacggtactctaaaagagacttcctatagaagttagagataacatattgatcataattgaatatttgaagtgattctatataggtacctataaatgatataaaaaaatatgtaacttaaagagatctctataagttatgttaatatgggaggaaattatcatataataaaatttttgtcgacaatagatgtaaatgtttgcatatgcaataaactaacatgagatagcaaggatcatgaaattcgatttgtcaaaaaatatggacata

SEQ ID NO: 33933 - DNA, 1959 bp, Cannabis sativa
  modified_base (1069)..(1080): a, c, t, g, unknown or other
  modified_base (1483)..(1501): a, c, t, g, unknown or other
aaatagcgtagcaaaacgtaaaaatagacatcttcttgaaactgcacgtgccctcttgtttcaaatgaaggttcctaaacctttttgggccaatgcagtttccacagcgtgccttcttattaatcgcatgtcatcctctctactcaatggtgagatcccatttaaaattctttttcctagtaagtcattgtttccaactgctccttgggtatttggcagtgtttgtttttctcacgatgtctgtccacatgtcaccaaattagaccataaggcattaaagtgtctttcttggttattctcatcttcaaaaagggtatagctgttagtgtcctgatctcaacaaatatcttatttctatgatgttacctttgtggaaaatacactttatttttccccttcacccactcctactcgtcagggggatgatgatgatttattagtatattctttcacatcctttgcgcctaatacatgttctaatgttccttcaaaaaatacatgttccaatgagtctcttgttccttcttctgcctcggtcatagctcccataatgtttatacctccaccacctccaccagttcccaagtctcctataatgtataccaggcgtctacctcctccacctctcatttcatgtcctgtacttgcatcttcgtcattagattcggagctcaaagatgatctacccattgcactatataaaggtaaacgtcaatgtacatatcctatttgtcttttgttacttataatcttctctcctcttcttctggctcttttattgattctcttgactctatcgctattcctaaaactgttcgtgaagtaatgtctcatcctggttgtcttgctgcaatgataatagagatgaatgctttagttacaaatggaatttggaacttggttaatttatcttgagaaaaatgggccataaggtacaaatgcgtgtttttggttaaattctatacagatggaacaattgctcgcttaaaaatctctcttgttgctaagggttatgctcaaacctatggagtggactgttatgatactttctctcctgttgctaaactcnnnnnnnnnnnnctgttcatttccatgacagttacttgagacaaaaaaaaaaaatgggagcaaaaccttgtgatgctctaatgaatctagctgcgcatcttacacgtgatggggaaccatttgaagatcttgagaaatattgcagataggttagaaagttaaattatgtaactgtgactcgtctagatattgcattcttagttagtgtcattatccaatttatgtcttctccaacaattcattattgggcaacatcagagaaaattttatgttccttgaaaagtgcaccaagacgaggcataatttataaggatcatggacatacccatattaagtgtttctctgatgcagattgagcatgctccaatgagcaaagtgatgagttagaacaatcaaatccacttagaatgcaaannnnnnnnnnnnnnnnnnnaggaatgcattagtaattaaatttggttaaccagaaatataaatgaacatatgatttttccaaatctatatgttataggctctcaagattaaattaacatattcctatgcaaatgtagacttagaagagaatacaacaaattaagcaccaattttccatgggtcatacaacctataaaatctaaaaatcactcttttacaaggtgataatcttgcatcatttaagtatttttactaatcatattttttccaaaattaagattagctaacaacctattacaattggtgatcaagcaaaagtaggtagacaaacattaaacatccttgaatgaacaaaacttcattaccaaaagtatttataaaacatcaataaaattcacaatccaaggttcattaaaagttctaactaaaaaaagttagttcatgctcaaaaacacaaaaatacccaaaatgaaaata

SEQ ID NO: 33934 - DNA, 1097 bp, Cannabis sativa
gtcttttggtcttattagtgttgagctttctcttgctttgttgttataccattttgattggatacttccaaatggaatgaaacatcaagatttggacatgagtgagtcttttggtgcaacccttcaaagaaaaaatgttttacacttgattcctattgcttatgaattgccaaaaaaataaatataaacatagttatgtactttttatgttatgtaatatgtaatgtaataaaatattattgaagggctttgtttgttggtgtaattattatagagatgtgtgttcattaatatttgttttgtctcggttgaattgactatacactacatagcaattaattggactttgaaaaataaataaaaaaagacaaaatgtatagcaatgagttttaatttaaattagtttttaaactttagagcttgaatattttgggtctctttttaatttaagcgtttatatattacaaccatacataattttggactcgaacccaagacctctaacacacacgcactcttctatggccacttgaggtcaagtggttaaatattttgggtctcatcgttatatatatatagtacaatattaagacatagattaattaattatattaaaaatcacatctgttatataaagtcaaatattattttatttttctctcttttttcttttttagaagggaaagcatttcattcacccaaaaatatacattataatatataagaaaaatgttgtttgtctcgagttaagtgaattgaactttttcccgagccacatgtcaatcatatggcatcttattagttttactagttattattttaacagtaaacattaaacaggtgtcaatatatttaggagcattgctattgggcaccagtggtgcctagcacccttaagacgtgttaccttacgattggctaacgatactcctgaaaagctattatattaaactatatggaactcgatactaaattagaccaatagcgatattgacatgtaagagggtgcttggcaccactggtgcttttagcattattcactttttaatttctctttacacgttttacgagagacatacaaacccaaaaaatggatt

SEQ ID NO: 33935 - DNA, 1708 bp, Cannabis sativa
ctcttgataaacttagtaagaaggggtggaagtttaatttttataaaataatagagttttgttgtaaacattataattaaatggcttaattaagtattaaaaaaaattataatgaagacttcaatataaaaataaaattattaatattaatatctaaaaatggtcttattaaatatttaaaataaagattaattattttaaaaaattagttaattaaagttaatttaattctaaaaaagaaattcttacatattggtaatccactattacaagtcaacaaaaatgtaactatcatggttacaataaaaatataaccattgaataatcactcatatatatatttattttaccttcaataataaaacttttagaaactaagattgatggtaaaaatacctctaattagaggtcattcatactatttttattaattaaggttttgtgtgtaataacttcaaattatgaagagttttgttgtaaatatttaaattatttaagttaaaaaaataattactaaaagaactttacttattaacaaattgtataaaattaattaataattattagtaatttaatttttaaaataattaattttaattaagtttttataagaaaataaaatatcaagttacaagttatttattgtttatttttcttttaatttttaaattaatcacaaccatttaacaatgatctagtggttaaatataaatgtaaccataatgcttatatatttgatgtaaccattgaaacttcctcaatataaaaatattttaactcatattgtggagggattttattaagagctataattttactttgtagttattataccatctattggaagctttttaaaattgtttcaaaagtttcatattgtacttgacaaaccaataacaacaacttttgatatgatgtaatggtaaattaacatgaaatccattttcttggcgatgtatcaatcaaattttataacaatgtgattacatacttttaagcaaagcagtaaaaaatattaacttgaccattctataacttaaggaaacaaaatctagcaaaaaacaaaaacaacttatttgctagggacaagtgaggtatgtcttaaataggataatgtcaaaattacttttggcctatgcaaatggcaatttgtcatcacaatcccaaaattgtcagaatgacactgcagctgttgttctttagtgtaacaatgttttatgccagataatgcttcattttcttcctcatccatttgatgatgacagtttttagtttgtgttttgtttaaaggaaaaaaaagttagtgcaaaatgccaattaaaccctagcttaaaagaaatttattttgctgttgtccccttttgcgggaagagaaatacaaatacatgcatatatataatctgtattcattcaaccccataacttcatgctctgaaccatatcccactaatgggatgaaattaagaaaggtatgtcagtctctcacaaacaatatgggcttgcgtactttagaagtgtggtaggtcgattatttttagtgcatgttgagaaattggaacaattaattttattaaattctacatattttctctatttataaatgaaatttgatcagtagtgaaatatgtccaactgtaatagtccataacaattattgtcaaattgaacttgtagcaagttgtcacataaatatatatatatatatgga

SEQ ID NO: 33936 - DNA, 1066 bp, Cannabis sativa
agtcttccaaagttccacgacttttacttttactgtctgaacattacactggtcgtgtgacttggcagggcggtagttcgtattaccccccaaagtgaaagccaagtttgtggaaatgcagttattggaaatcgtgaaggagaaatcccctttcaagtgtttttttgagagagagtcattagcgttttcaggtgctcttatccatcagctcttcatgcataagattaaatcagataaggatgatgaggtgcatttttatattgcaaagaagagatgtcgattcgctcgagttgagtttgccctggtgattgggcttaatatgttacgtggaactactgaggctgaggttgaggagaaggcaacatcagaccgtttgatagtagaatactttaatagggatccatccatcaacattggttgactgcgcaacgtctttgagagttacactgagaagcatgatgtttacaagttgggtttggtgttgtttgtgatgggtgttctgactgggaaagaaaagaagaccctagtttccccatttatcattagaatggctgacgacctcccttttttctacgagtacccatggggaaaaatttctttcaacttgttgaaagatacttggagtaaggacttcgtagaaaagaagaagcatatggataagaagattgaaaagggaacgactcagaaggagtcaaagtactcggcctattgatatgttgtagatttgcaatattgggcttatggttcgctaaatccagtcacattggtccctcgagcatcagtaggaccactagcatcattggtctccccaccattattaggacctgtactgtcagtggttcctctggcattactggtttcgtctggatgactactactagtaccaggtgtttggcgattttctctgcgggacattcttatccgtgtcggtggcctcagtggtatttaatacgataatggagttaagttcaaagctacagcaacagggacctttgtaccttggtcgtctcttacgttatcattgccctcaacataacattcagggtctggaccatcaaaaaaacca

SEQ ID NO: 33937 - DNA, 4882 bp, Cannabis sativa
attcttttctaaagcttgggtttcggtgtccatggcttgtaagcaatgctgaaagagagaagtttcagcatagttttttggttcaatgtgggagtatgctgcaagaacagcagcttgaaatggggaatttagttttatgtaagataagaaaggttcaatgggatctatggtagaggcagtatggcatacatagtcttgtaggtatgctggttttttactggtgcgaccagtggttgatggtgcagcacgaagttgttgtttctggggtgcaaatgtaggtacaataacttttgttggtgttgtatcagtggaaactggtactggtgtaatggtgttaggtgcaacagggttttgtggaatgatatgagaaccatttagaactggtttgggtatgggattggtggccattggcctattgatctgctgcactggtctgactgtgggaagcacaatttggggaaacaagttgttgaccctagatggagatgttgcagagaacaaaggaaagatttgttcataaaagacaacatccctagagatgtaaacttgtttagtttcaatatccataagcatgtaagcattcataccttgtggatagccaatgaaaaaagaggctctactttgtggtgtgaatttatatcttttggaaaaaaaggtggacccataggctaaacagcgaaagcttcttaagtgctcatagtgagcagcagtgttgtgtagggactcataagaagtgaggcctttgaacaactgtgaaggtgttttattaatgaggtaagtagcagttttcctaaggaagggccaatgtactacaggtaaattggattgaaaaccaagggctcaagcaacatttataatgtgttggtcttttatttcaacgaccaatttttgttgtggtctttccacagatgaatggtaatgtatgatgcctttggacgcataaaaggtttgtaggttcaactccttagcattatctgatagaattgtcttaatgttggttgaacattaagtacaaaccatgttagaaattaggtataacagtttgaacatcaaacatgtttttcagcatatatatccaagtaaaatgatatttatcattaacaattatgagaaagtatttgtggccttctacacttgtgatgtggagagggccccaaatatccatgtgcactaagtcaaatatgtttttggcaaagttatgattggaaagaaaaggtaatcagttttgtttggccaattgacaaatgtgacagtggtgattggcaaatggaaagatcgattggaaatgtacatagatggatgaccaaagtgattgtgccaatgatctacatttttattatcaagatgaaaggaagtggcattagctactggtgcatcttgttgcagcaagtatattttttcatatttttcagctgtcccaatcaccacattacaagtaggatcctgaataacacaagtgtttttatgaaaaacaatgatattagaattattattaacaaattcagagatggagataagattgatgttgaaacttggcacatatgacacattatggagggttatatgagtattaatgtgaactgtgccagacctgtgaaccaaaattttatggccagtaggaagaattacatgctgaggaaaatgatgattggaaaaggaagtgaaacatgttatgttagcacatatgtggtgggtagcaccactatccaaaatctatgtgaatggagaggagaattgatttgtacctgcaagattggaagcagcaggtgccatggcagcaagatcaacatgaggtgtattgttgctgggctactagatgaggagagaaatcaagtactgacactgggttgaaagatcagagggaatggattgaccatctgcatcactcttggaactgctggcaagattggttttagctttccctttttcttgtcgccttttatctccataaccaagagggaaaccgtgtaagaagtaagacttgtcaaccgtgtgacctgcttttccacaattggaacaagagggacgaggtttcttggctcttgtaggattggtaggcatggagtttgtagcagatgccactggaactgtttcagcagagccaagagacagttgacgctcttcttgaatgatcatggcaaacacacgagataggttgggaactggttcattgagcaagatttgggctcgaaccgatgctaaagattcactgagaccaatcaagaattgaagtacttgattctggttatagtaatctaaaaagattttcataacaccacaagtggaggtggtgattggttgaaattccttcaactcatctataagggaattcattttagtgaagtatgatgaaacagattggtcaccttgttgtaaacgggtgagttgggtttgtaatttgaaaattcgagggccattgccgtcattgaatatctcatcaagatcgtttcacacgtcaatggccaaatcaaaatacataatgctttgagcgatttcttgagaaacagaattgactaaccattacataaccgtattgttgcatctaagccaagaattgagatagagattaccaatttttggatttgggagagaaccatcgatgaatgtaatctcgttcttggcaacgagagccgtggtgattccttttttccaagattgatagttgctgtcattgaggacggtggacataagcacaagtccaggatgatcaccagtgctaagaaagaaaggactagaatgaccatcattgacagggcgattggcatgaggagttgtgctgtggtgatcgtcgacaatggtggattgatcttgtgttctgcgatggaggacttgtagtttgatttctgcgaggaacggctgaggaatttagattaggaccagcaggaggatcagacgtgatgtcagatgctggtgggtcgaccgtggatggaggagcaccatcttagaatcaagttgaaggtctggcaatggaagcaatgggcagagatacttctgatatcatatgagagaaaaatagagcaattggaattgaatattgttttattactcgatatactgctggaatacatgagctgagtttatataggcatagagaaactcagttagttaggatgaaagactaactaacttaactaactgacatttacacctaacacctatattaactaactctaatagtgagagtcttaaaagttgtccagtttatcaccacttgtatgtttttccccactctataaaaattatatgaaatatgggattttacatttttttttacttaaatatgacatttctaagtttgatcatttttatgacattcttttattattgggcttttatatgggtttgaatgtgccatatttaagtaaactccttttttaaatcccatattttgtattaatcagtctcttctcaaatcaaccctaaactttctctctctaacggccgacactagctccttcctttcgtccctgtcctttataggcgttgtaggctgctctaacctcaatgtcgcggctactcaatggacccgcctgactctaactctagatctccttatgtgttccttgccatcagcataagatgtcgttgagctctaagtttaacgtttaaatatcgtaacgtgaccactgcaaataccctttattacctttataaaagtacttttgaaagcgtcctgcccctccccttcccaattttcaatttcactcttctctttagactttttcatttttcaaagtctctctctttcttccctctttctgcaacttttgtcagacccattttagagctgaacttactggagttgcatgttaataaattgaacccattaccaatgcattgatctctcccagcttttgaaatcttctcacttaacctcagcaaaagttttgatctttttgtaaagttttcaacttttaaatttaaagatacttctttttttggatgttgacgaaaaaagtttcagtttttagaagaagaaagttaagagtgttagacatgagaaggaaagacaagctttttggtatctgggtaattttttcatccagttttggtgattttggaaggtgggctttgaagattttggcttaaaaaactttcacatatgattgttagctcattgtaatgcagggactaaatttttggtgagtttgtttttctttttcttttctttttttaaagtctttgccttttgtatttatctttattattttttttattttctcctttcatctctgttattgtatatttctcgcggtcactgctagctctggcgaagctattcctacaattgaatggacgaggaggaccatagacaacaccccaaaagctctacgtgatgttttaattccttctcaccctttctctcgatctttttgagtgaaagtgaattagagaaacaattagaagttttgagatttgtttaaatgacaatataagaaaatatgatatctactcttataatcttaaggaatttaggaatgataatttttgtttgttctttaacaaagagaaaagaaaataagtttagattttgcaaatatcaatgtctttggctgttattttctccactggatccaagctaagataaagacgatctttttaagggctggccaacaatattgagggaaccacctattttttaatattattatctacgtgaaatcatattattattctgtgatgtcttttttaagggccagtttggcacagctgtgctgtaggaaaaaacagttgtagctgtgctgtgaggaaaagcagctgtagcaaaactatgaggaaaagcaactgtagcaaagctgtggaaaaaagctgaggtgagtgtttggtaattataaatttcaaagtactgtgagttgttaagatctattataatgataatgat

SEQ ID NO: 33938 - DNA, 1863 bp, Cannabis sativa
tcatctactttatattattttataacaatatatatctttttccagcgcttaattaattaatcatttatgtggttttaataataacaataaaagatttatttctttatggctaccgttgggttatcgggaatggtaaaacagttaggataaatgaggacccttggatccctagaggagctccttttactcttcctacaaaggttcaagtgacaattcaaactctaataatcgaagaaggggaatggaaaactgaagagatcgctagctggtttcataaggaagacgttccttgggtgttggggattaccccttcgaaagcgaggaatgatacaatcgaatggagccgtaccactaatggtcaatacacagtggctagtggttataagttgcgatttagggatcctaacatagcagaatgttctgataattcagctaataaagcttggtggaaggtggtttgggggtcttggcttactcgtaaaatgaaaattttcatatggcgtgtgttccacaattgactaccggtcaaaacagagttaattaagcgaggtatgtccatgaatataacttgtaactggtgtaagagtcatgttgaggatgtttgccatgctttatggaattgccccaagttacacaatgtttggaagcatttcgggttcatacaccaattcccttcttccttacggcatgccccagacttcctaatggtgatgaaggggaagctttctaaagaagagtttattttctttattggtattacttggctaatttggtttcgtaggaataaatgtatttttcaaaataaggacattgaagacagcatttggattccttgggccatggagatgttagagctgcaccttgcttttgctcacaaagactcacatcagaagccttcaaaggacaaggttagctggtctcctcctccactgggttcattcatgatcaatacagatgcatctctcattgatgggcaaccgggatgtggtttaggggtgatcattcgtgatcatttgggcgctttagttactcctgcaacagactacattcctggctgccattcagtgcttgtagcagagactttggcgatccgtttagctctgaaactcgctgctacaagatcaatgcagaacattttcatagcttcagatagtcaatcggtgattacagctttgaaagggcagactcgcatcaacacggactggggtataataattgaagactgcatcctagcaagcaaaaacttcaataatctgtcttttatttttattactaggaagtgtaataatgtagctcattgccttgcaaattggagccgtttggttcatgtttctgatgtgtggacatcgtttttgcctgattgcgcagctgcttctttgaaagcagatttgcccctgggcgctagtgtgtaattcagattttctataaaaaaaaaaagatttatttctttatattaacagataaaataaaatcaaatgtaatattaattcctaatcctaatagaaaaagaaaaaaagatggaagatgataattcttaatttaccaaattatatattcgataagtagtgcctatatatatatataaacccactaaataacaaataactataattaatggctggaaataatagcattgttatttttgtgaccaagtttcagaatttcgtaacccttttcaacattgatgagatgagaaaagtgttacgaaattctgaaacttggtgacgaaaattggagacctctacaacccaacttccaaaaaggccaactcgtactcaagctcaaagtcaagttcgaactccacaacaacaaggtacgtacttttgatttgaatatagaagccatactctgttttttgttact

SEQ ID NO: 33939 - DNA, 1226 bp, Cannabis sativa
ttggttagcaaggtcagtcttcattccatgaaaaagccaagagtgatatacccatgtataagagtcattagtccgtgggggaaggtccaatggaaacttgaagcgaaaacgttacaaatggtatcagagtcttgacctaaccaagaagtgtggtcaacgaggacgttagacccccaaaggggggtgattatgatagccaaattcgtgtgatttgctggagaaagactgggagttgtgcaatctcacatcgcctggggaaggttaattatgataattttgagactgtgtaggcatggaactacacagttgaagatgacttaaatggattgattaataatatctatattaacaagatgcatcttctttttgatatcacatcttgaaagaacttcaaagttaagtgtgcttaacctggggtaatttcaagatggatgacatcttaggaagttttcccaagaagcgggtgcgtgaggacaaagtacactgaaaagactcgtgttggtctatagagtcagtcaccattccatgaaaaaaccaagagtgatgtacccatgtataagagtttattagttcgtgggggaaggcctaatggaggcttgaagtgaggacattacaaatagtatcagagtttttacccagccagaagtgtggttgacaaggatatcggacccccaaagggggagtgattgtgacaggcagtcttgtgatccacaagagaaaagaccgggagttgtgcaatcccacatcgcctagggaaggttaagtgtgataattctgagactgtgtatgtatgggactacacagttgaagatggtttaaataaattaattggtactacttatatcaacaagatgcatctttttttcaatatctcatcttaaaagaactctaaaattaagtgtgcttgacctgagataatttcaagatgaatgacctcttggaagtgagaacaaaatacattgaaaaaactcgtgttggtctgcagggtcagaggcttgaagcagagacattataaatgatatcagaacattgacccaaccgaatataggaagacccacaggcttgaagcgaggacattacaaataatatcagagccttgacctaatcagacccctaaaaggggtgattgtgacagttagagtcctgtgatccgcaaaaagagagactgggagttgtgcaattccacatcgcctgataaaagttaagtgtgataattctaaaactat

SEQ ID NO: 33940 - DNA, 2267 bp, Cannabis sativa
aaaaaatagagaatggtacatatttactaaaattttgagaaactgattatatttaaaattaaaaaaaataaataaataataaacatacaagttttttacgtgattcaagcgttaataatccttaattcacgagtcaatgcaactgtttagatattacaaatgtttacattaagagtttctctattcctcttatttctcttgagagaaagctcttcaagaattttagcttggtgtctataaattaatgaaaattgtttttttttttttgtttaaagaaaatgagagtatttataggcacatatggggtaaagggcatcccttttacctacctaaggtttcatattcaacatgctgctaaggccggtacgactaaaggacaatctgaccattggatggtaagaaccttcttcatcgtgtgccgtacaactccagtgagggtttttgtacaaaccacggcaggtgtcataaaaaggtctctcctttgcaaaatactctctaactagatcgttaggcaaaaagcatgttcgaaggtgcgtatgcacactatcatggcctgacacgggggacaaaatctgattttgtgttagaaaaaggtaaaaccatgtatagagtaatccatgtatggcgtgttgacgtggccatcaccatcgcgcgctccaggttcatcacttaaggaaattccacacgggagccatctgtgccaactaccttccatatctgggagacgttccttaccttacgtgtaattttgactagctaattaatctttgttgctgctatattttgccctccaatcatgccacttgtcttatgcatgaaaacttggatagcatttacccccaagctttcgagactctttgaattgcgagagcttgctatctttcccggtactgaccgttgacagtggggcaactcatcatgtttgctccaacttagcatgttttcattcttttactactaattcacatgctaaaactgttaatttacctaatggaacttctgtcaaaattgaaaaagtgggcactgtcattataaactcaaatctgactctacttaatgtactttatgtacctacttttaaattcaatttattatctgtgactgcattattaaacaacaattccaattctatgcttttcactactaatgaatgttacattcaggtaccttctcggatcttgaagattgggatagctaaacgatatggcagactctactatctggaataagaaatcagttcaacttctaatttttccattttttgtaatgtacaaatagacaaacgccaatggcacaatcgccttggtcatccttctatacggatttcaaataaaatcaataaacaacttcattttcctcataatatttcctctacatttcattgtccaacatgtcaatcggcaaaacaaaagaaattaccatttcaatcaaataacaatttttctaaagccaattttgatctcattcacctcgacatatggggaccatatccaacaccctctgttgaaggttacaaatattttctcacaatagtggatgaccactcaagatatacttggatatacttactaagggccaaatacaaagcccggccccctaataatccaaaaaaatttcatgtatgtgcacactcaatatcagacaaacattatgtctgttcgaagtgataatgccaaagaactcaacttacccactttttacaacagtataggagtcattcactacaacttctgtgtaggaagaccccaacaaaacgttgtagttgaacgcaaacaccaacatattctcaatgttgctcgattagccttccaatctaatctccccatcatatattggagttatatcattaagacaggtgtttacctacttaacagaaccccctctacaactctcaaagacaaaacatcttatgaaattttgcataatccactttagatgctcaatataaacttaaagatcttggcagctttcatttcttccttggacttgaaattgcacgatgcaccaaaggcatatcagtcacacaaagaccatttactctccaacttctcgaagattcaggctgcctcggatccaaacctgcatcaacacccatggaacccaatataaaactcagcaacagtgatggagatctcttgccaaatccaactcaatataggagtttaattggaaaacttctctacctcaccatcacaagacccgatattagcttcgttgtcaataaactcagtcaattccttcaatcaccaaggaaaccctacatgact

SEQ ID NO: 33941 - DNA, 2087 bp, Cannabis sativa
  modified_base (435)..(445): a, c, t, g, unknown or other
  modified_base (1935)..(1943): a, c, t, g, unknown or other
atagatacagaatctatagcttccatcttgacatagaagggaaacgataatttccttagagcttggcttaatagagataaatggttgagtactcattttagtaattatattagtttattgaaatatcatttataagtagctaattgttttaaggataaaatacattgaagggtataacagtaaatttgtcactactcgatgtagatcatctaaagaggatcattgattattaggattataatagtggataattttatagcgcatctatatcgtggaacatatagagcgctttacataattaagagtgcaattccaaatctatagtggtgcaagaaggaattaataattagagaatttgcttggtaaattctagagctacttattggaaccttgattaaataggcccatgttccccatactagttgagacaatacnnnnnnnnnnnctcagttaattaattttaattaattaattataattctgaaattagactacgtcttatttataaaatttcagtaagcagtggcttaattgcgaagaaaagagattttaaggtttatttgttaattaagagagtttgtggagtctaattaataaataatataaatgaaaattttgtttgataattaattataattattaaataaataattttaacatttataggattaaaattagaaaaatggcacttgtgaaataaaagataaatggttgaaaaaatagcaaaattataactagtgcgacccatctatatggccggccactaagtcctattttttctattattttatcattttttattccatataatttaatcctaaccctaagtgaaatagtatacaaggaataggatgatctcattatctaatatctctaataacctagtttacattctctcagacaagtagagtcattgagaccttcttcttccttcctctttttcgaatctctttcattattcttcatcaaattttgatcctatagtgagtgaatggatgcccacctatagtaagtctagtactcaatcatagtgtgtaagactgtgaagaatccaacaacctgaaggagtatcgggctcagatcttgataatactctccaatcaatgtaagatttctcaattttatatgtgtttaaggttcattgtttgaaaattcatatttagggtgttaataaacatccgtgttagtaattctagatcctggtaaaatattttctaacaactggtatcagagccaggttaatgatttttacttttaagaaatatggatttaaaatgatgtatgtgtgatttagatgtgattcatgtttatctatgtatttatttgaggattgcttgatgtttacaaaatatttacgtaaaataatttgatttatgatctggaattattttatttggatagtatagaaaaaattaagcaattcacttttttttatagaacttaatttcgattttctttgaattagtaataaatttttgaaaattggaaaaatatcaggaaggggatcactcccctgcacgcgcgcacacctgagtgacactcgatgtcacgcgcattcgaacaagggagtgtccaagatttcttgaacaagcttcctgtctaaagccactcctctacgcatggaaatcatgcatgcaacatagtgcgtcgaggtttctcggccagttgcccacacccacatgcgcggatggtatgcattgcataccatctgcacccaatgcaaaaaagttttattgttttatcttttcatgatttttcatggaattaatttcgaattttttgtgtaattttgaatgtaactttttatttttcaaatttcaaatctaattatcattttggaattaattaattttagatattagttgattttgaacctgagaaaggataatatctacattttttttgcttaattggttatcttatttttaaaatttnnnnnnnnnatcttatttttaaatttaaagtcagatatttcctatattttaattatttaaataattttataaaaggataaataccattatagactctgtgttttgcaaaagttaccaattggaccttctattttgctaaatgataaatggacc

SEQ ID NO: 33942 - DNA, 1629 bp, Cannabis sativa
tgtgaatccattttatatgtttctcaaaataaaataatttggggttggtattgtcttagccagaaggtaacacaaataagagtaatgtgtcaagcaaaaaaattaaaagctttaacttgattgctttgctttagtagttaatgaacattgcaatcatcttatcttgcaatgctagcaacacatacgatgctttgacagatcatataaagttctgaactaatgtactagctttaacaattgcctaccaaaaccaaagctaaatataaacaagaagctcatttccatacatttcttattaacctgttacctaaaaaaattggttaacatatcaagcatgtaagatcattgccttcatcaacttcttactccgttgtttgcatttcaaataataataataaaaaaaaaaagagtaaattgtgtcatatatacccaaagttagttttgaatttgtaagcggcataaattttttcagtggcataagttgtataaagggaaatttcaatttgactaaagtcaatgttcatgtggagtgtagacaaatcttttctactcataatccacttatccctctcaattttctgttttgtttctcttcagttagtttatccaattatactattatttttatctcttcctaaaaatcattgaacaatatacatgaaactcaagtatccaagagaaaaatacaaaaatcttccaaaaacaacttacatattgattgaacattttaacagcattctcagcttcttcaaccgtactcatcgtcacaaatccaaacccacgactctgatcagtttccctgttgtagataacctgtaacaaagaacagcaaaattaaaaattatttttttaaaaaaaaaatgataagaataccttccataacattgaaattaatgaaaattcacctcacaaatctccacaactccagctttttcaaagagcatagccaagttttgactatcgacattgaaagacaaattcccaacaaaaagcttggcttcctcagggggttcaacaaaagactcttcttcctccctctccttaaaaaccccagcttcctcacctccatcgctttcgactgaggcgtcttctccctcccaatccgaaacgcgcgcttcagtctcgtcggcgcttagttcgtcaatggtagctgtggcgttgtctccttcttgttgagcccaatcggaggtctgggctacgaatgtgaccaaggaagagaattgaggcttcttcttgttggataagagcgaagaagaagagcatgcgaaatggagctttgggggtttggaagggattgagagaaatgggtacggagttttagtggtgaagagggatgggagagagagacgacatgagtctgataaagctacggttttggagagagatagagttgcagaattcatgtctagagagagaaggggttttagagtggagagcagaagaagagagtgaggataaggaacgaagaaggagaagaatgaaagattgagtgaggggtttattatagggaatgatagtagtacactttatgggcttatgtacactacttcaatctcatataatgatactgggcctctacaacatttcggccttcctcattcttccataagcttttgtggaaattatggc

SEQ ID NO: 33943 - DNA, 2271 bp, Cannabis sativa
  modified_base (611)..(617): a, c, t, g, unknown or other
cccatgcggcattaaatgcgagatggctgttcagataggatctgacacctctcggaggtgctttgttgtagtcttgctctccgggagtatgtgagacttacatgccttctccgggaggcatgtttaaggtaatccttcgcttaaggagacttagctgctttattcgaacgctaaaccctttctatctacgtgtcatcatccggttggtccacgtatttcaggcaaaatgaggggcaacagttactattaacgcaaattttcgttaataattaatgagcctttttcgtaataatttaaacacagatatatataaaagaaaattgataagtatggttacctcgcttttagccaacgacaataagtcttgattgtaagcgataagtgatataatttagatataatatgaaaagataaataaaggacacagtttttaaagaggttcggccccaagtagttcggtaatagactactctccttgatttgtattgacttaagaacaaagaatacagtgattcttctcttagagctcttacaatgacatctttgagtatgctctcttagataattcttttgacccctttttcagtgagaatgaatcactatttataggnnnnnnngctacatgcttgagggaaggtttctctttttcttacaatgtctataattggcaagaatacacattacatatatagagtacactgattgtgggatttggacagcttgacatgtctctgtgatacgatcccatatttatagggattgctcgtgagcttcacgatgcaagtgctgaaatcgctaagtgttgatatgctgttcagattgtctactgctcggctacgaggacctcgtccgtgcaggtatatgcagtgttctgctcggaacatctctttcgggcaggtatggagaatcaattccacgtgtcaccagcatgtgatgccacgttagagtgcaaaaattgggataacatttgcccccaagtctacacgaggcttctgaagttgcgtgtagacttcatccgagctggtattatatttgaatgggagacatgtgtcgggtgcatctattcgtgattcgatatgagtcagtccaggcgtcctttcagtttttggctaactaatgctctgacttaattagtgccttgagacacgtttcccatgcacgcttttgacggttattctcttgaggcacttaatttctttttatttcccaatatttacttttggggggtgttcaacaaccaatttaataatatatgtaagaaagctgtaggaagtttaatgaatgagatttttacgtggttgggacattaatgagccttagtccacaagtcttttttatttatgagagtatttattacaaggaatgttattggtagatatttctcttagttgctctctttaattctagtgaacccaaaattctcgacctccatctcagtgtatttgaggggtattactgaatcacttgtccttatgtgcaggttcgataggggcacatattcctagttgatgcaaaataggaaatacatggcctatactgtaggtatatttagggttaggaggatataatcctttatcccttcttgattgatgtgatccctcataaagtagccgtctgtagctttattaatcatagcgtaatatctgtaaaagaggggttacaccgttagacatattgtttatgacagttccaatacgttttctcccatgcggcattaaatgagaggtgaccgttcagataaggcccagtacctcccggagatacctgagcgttcccttggtctcctggagtatgtggagcctttacctctcctccggggggcgtattctcgttagtactcctgatgctaaaagatttagttgattcatctaatagtcgtgcttctcagatccacgtgtcgttgtcatattggttcacgtattttgggcgaaattaagggcaacatttatccccaagccttgtttggtgcaaagtaaatgaggcttgccaggtgcctccaactgtctcattgatttcttggcacgtgtttcagacgcgtgggctgcatttatgacagtcatcattaaaatttattgctttttgcaggcaacgattcacttcccgtccattaatgatctagcgtatttaattggtgtcagacaaatactcaagcgtttccatccgccctgaagaacatttatcccaaccgctagatctgcagaatgcgaatcgattcgattcccaacgttcgatgacgcttgatcatagctcctgttggatattattttacca

SEQ ID NO: 33944 - DNA, 3563 bp, Cannabis sativa
  modified_base (217)..(222): a, c, t, g, unknown or other
  modified_base (345)..(354): a, c, t, g, unknown or other
aaatcttgaatttcattcaaaaaaaatatttctcttttgatagccttaatattttttgggtaaatatcattttggaccgtgtgttttgcaaaagttatcaattttttttgctcagaaagttatcaattggaccctctgttttattaaatgacaaaatagactcagtattttctaaaatagtacaaatagaaccttgaactaattttttgtcaaaatnnnnnntaataataattcgatctaaaggtgttatgacaaaactatttatattttctgaatttgttcgtattaggaattgtctttaagttaattatattaaaaaaaagttgtcaaaaattaagcttaggnnnnnnnnnntactattttagaaaatacaggatccattttgtcatttaataaagaaaagggtccaatcactaatttttataaaacacaggatctgaaaatagtatttatccatattttttaaacaaaatcatcttgtattgctagctatatttttttttctaatgagtacttgctagctatttttatttgttacaaatgaatgtcattaatgaatagttttatgatcgctaatctattttgcttatttcaaatgaaaaaaccttggagtggaacctccaagaaaaagaaaaaaaaaaagatgtagattctttttatttatttagagggaaatatatgataatatgaattgaagggagaaaccataacaaattgatggaaagtgcatatttttcatattccaaaatgaattatttatcagagtattaaacaatgaatagccaaggctagtatgagtctcacattcacataatatatcttcaaattccagccatcttagccacctaaccagccaaccaatcaaaaaatatatattcagcccacccaaaaaggcttcccttttacaatcacacaagttcatccgcaaataatgcccataaccaaacaaaattgttgacctttttcttctttgtttccttctctcttcttcaatctcctctctaaacccaacaccatggcctcttcctccttatccctcctctcacctccttccatatcctccacccaactccacaatgcctcatcctcctctgccaccattgccaccaccgcccgccttgtgctgcgcacacctaagcccctccacctacgcaccacctcttaccgaccctttgtcgttcgggctcagtcagcccctactctcacccaagacgaccttaaaaagctcgccgcagacaaagccgtcgagtatgtcaagagcggaatggttctcggactcggtactgggtccaccgctgccttcgtcgtcgctaagctcggtgagttgctcaagtccggtgagttgactaacattgttggagttccaacctcaaaacgcacggaggagcaagctcgcgaattgggtattcccctttcggtgcttgatgatcatcccagcattgatttggccattgacggcgcagatgaggttgacccagatctcaatttggttaaaggacgaggtggggctcttctgagggagaagatggtggaagctgcttcggccaagttcgtggttgtggctgatgagaccaaattggttagtgggcttggtgggagtggtctggctatgccggttgaggttgtacagttctgttggaagtacaatctggtgaggcttcaagagcttttcaaggaggaaggtgtggaagccaagttaagagtggaaggtggaggaaagccttatgtgactgataattccaactatatagttgacttgtatttcaagacccccattaaagatgctttggctgctgggaaggagatttcagctttggaaggggttgtggagcatgggctgttcttggatatggctactgcagtcataattgctggcacaactggagtcgatgttaagaccaagtgatttttctttctttttcttcctttctgctgctcttttttggctttatttcttgcttgttgttctatgatcattggttagttttcgagttcatttgggtgtagctcggagatggggtgatttgggtacttcttgcaagttctgtactttaacgcttttatagattgtttgggcattggggaaaggatatgaataatagtgatgtaagtggaaattgtgaagtaataaacattaagcttaagctctgcttatctgattttggcattgatacaaaccgctgatgggaaaatctgttctttttctctagaattagttcttgatgtatacaagttttccgcttgagcatacaatttggaaactagaaattagaatgatatcaaattattgactgaatgaaatatgaggtttccaatgagagatgtgttaaagatcaattcacattgagcatgctattttaaatgacaattaacaactaatcatccgagcattaacataataataatagacatacctctaatcttgatattgatattgatctccaatggtcatgttgattacacttctttaatctacacatatggagaaaaaaaaaaaaaaacttggttgtgatgaaccctactcttcctctccatcatagcccacacacattccaccttaaaaatgctaataaagagcacaaccctctttagaagaaattatgagccaattgggtctacatgccaaatatgagagaattagctgtattggctcaatgaactgaccaaaaatattttggagcgtgactataggtcccgagcgtgttagtacattatgtctattctattacggctcgatagtaatgttatgtatatcgattatatagtcattattatatgttaataccgacactgagtgagcaacactttaattatgttagtttacataaaatattctaacattcttacataattacacatgtatgtgctctcactatgtaatagtgtcaacaaacagaaatctcaagaaatattaatgcttataaaattaattatgcatcatattatatcgacatgatataaatataatacataatgagacatctgatattcatgaaatatgatggtaactactgatctggatcaactcgatcataacaccaagactaagccactggcttgcatcaacaagtgtgcacacacaatactaaagagttatccagaatatgcatgaattcaacaaccaatagcaattattaacatgtctatcatacatgaaacaataactctcactgaccaaatacacatttggcttccaacaatccaaacaaaaatgactttcacattgaggtaagccgtgtcaatgtagtcgttggcatgttgtttgtaagtacttgttatgatactaatggatgaccccatgactttctcactatatgtggaatgtcatcatcattaatagagcaataatactcctcaagttttgagagaaagatatgactatgatatttatcatataggtaataacagaatcaattactcttaacattaaaatgaaatattacaattataatgtacaatcaatgtcctcataacacgctacatactctatctttacaaatgaggatgttgtaaatgtccatacaatacctaatcacatataacttgttggaatttattttacc

SEQ ID NO: 33945 - DNA, 1460 bp, Cannabis sativa
ctgcagtcctcgtgggaacgatctcacttacctgagtattacttcttaaaacgatacgtatacttgcgtgttggatttatcacaacataagtatagtaatatgtatggtaattatgtgccctgtgaagtttaaagtgatttggacatgtttcggtagtatttcggtgagtgcaaaaactgagaatcgggattttttaatccctgcccaaccggtcaactggttctgtaccggtcaatcagttctggtagaagtggtcaaccggtttgccttttcggggtagtctcgagaatttgggaatcttatttttaccgtaactttttacttgggtgtccgttttggacgttttatgtactgtttcaaagcttacaacgagctttaccatatggtgtatattttagagccaaaatataaattttattttagtgtatttgaactacaaagtttggtaggaaatcctaggttgtcctttgcaattgttaagtagtgttttaagataaacacttattagtttatcattgttatgacagaggactcgagatcattgatcgttctccaagcaggtcgaccaacatacctgaactgaaacttgaggttaaaaaaatataatgcaccacatggcatgacaggttttgtgatcatcggctgtctgattagacagtaataatatgaatgtgacatacaacttcacttgattaggtgatatgatagatggatttcaaatatgaaatgagtttgcctgattaggcaatatgatatataaatacacatgattaggtgatatagtgcagctatgccataggctgagcttgcctgattaggcaatgcaacatatgtatatatatgatgaatgccaggctatggcataaatttgcttgagtaagtaatatgatattggatactgacattcaggttgtacatgtgggacagctgttataaagttatgattatgaattgaagccattatttgccaggttctaaaattataaattgtctgattaggcaataataatatgatcatactatggacgtaatgtacgagctcacctgattagatgatgtgatcctcttggtgacgtatcgggcgtaggtgcgggcgttagtgatagaatgaaactgttgtaggatttcctcttggggacgtatcaggcgtaggtacgggcgtcagtgatagaatgaaattgttgtaaggttttctcattgctaggttatggcatagaatgaaaccattgtaaggtttcctcctggtgacgtatcgagcgtaggtacgggcgtcagtgacagaatgaaactgttgtagagttttgtcattgccaaattatggcacatccatgaggcgacagtcttctctagcaatgtacatattgacctgaccagcttgcgtgccgggctaccaggagttgttttggcatgtatctattgtgtgttttggttttatgtttttgaggagtcgttgtatatt

SEQ ID NO: 33946 - DNA, 1508 bp, Cannabis sativa
cctggtaaaatattcccaacatggagatcatacaacagaccttgcgaagtttttgagatattgaaaaagtacaatatgaagcttaactcaaaaaagtgttcctttggagtttcctcaggaaaattttttggattcatagtcaacacgaggggcattgaagcaaatcatgagaagatcaaggcttttatagatatgacatcaccaactaaaccaatggaagtccaggccttaacaggaagaatggcagctcttaacaaattcattcagaagtcaactgataagtgcctaccattttcaatgtatttcaaggcaacaaaaagtttgaatggacagaagagtgcaaggaggcctttaagagcataaagaggcatttttcaacacctccggttttggaaaaaccaaaaactggagaaactttactcctctacttggctgtctcgaaaaatctgattagtgcagcaatagtgcgagaagagggaaagctccagcaacctgtttactatgttagtaagaggttattgggggcagaatcgggtatccccctcttgaaaaacttgccttatgcctaagccacacatctcgcaagttacggccttacttccaggcacatccgattaaggtgtcaactgatcaacccttgagacaggttttatcaaaaacaaatgcttctcgaagattgataaaatggtcaattgaactggggcaggttgacataacttatcacccacgaacatccatcaagggccaagctttggcagatttcctgatagaaggaataactgtagaggaaaattttcttgtttagcgagatgcaaaaacttggaagttgcacatggatggagcatccaatgagcatggatcgggtgcaggggtaatacttatttttccagaaggcttcaagtttcattatgccttaagatttcaatttgctggttatgaagccttgatcgctggtttgaagatagctaaagtgctgaaggttaaaagtcttatgtgccatagtgatttgcaattgattgtaaaccaagtactaggggaataccaggctaagggcttaaaaattgcaaagtacctagagaatgttcggaagaacttggaaaaatttgattatttcaaatcgagcataaaccaagagaactaacctctaatgtcgatgcctttgtaaaactagtctaacagaataaactagatgaattgaacttggttccagtggagaggctaaatgagccaagtatatgtgcaaaagaagaagttgagatgatagatcgctcgcctacctggatgacacctatagttaactatcttttaaacggacaactttcaactgacaaaaacaaggcacgaaaactcttgtatttggtgcctcgctacacgatagtagaaagaaaattgtatcgaaggggctattcaatgccgctcctacggtgtgttctgttggtattatatttatccaggatcttagatctatttgcaagtatgttgttttaacaacctaatattgaacttct

SEQ ID NO: 33947 - DNA, 1903 bp, Cannabis sativa
aacaactctaagaatataaataacgcagttgagatcaaacctaaccatctcaggattaaaatctattgatctaagatcaactaagtgatattgacttagaaagattcaatggtaagtttatgatatttttaccaagttcaatcggttcagttcaatgtatactccttatatctgatattagcatactttaccaatgtcctagaaatgacataacaagtatccaaggggtaagtaaattttattgcatgctgattatcacattagtgtaaattcagtgcattgatgaatcatgagacataagctttgaaacatataatcacaattaccttccgctgtgatgaaattatgtaattgtgaataacaatatgttttggatttatcaaaaattgtatattaaaccataattataaaaatcacatgttaacttaaatgacttctaatcttctattgataataaataagattatattaaaatgtattttatttagggaataaatctcaataattatgtatagagtgtaaggcatgatttgatagagcattgaattagctttaaaacacaagttgaatcgcgtcaattagatcaaaattgagtagttatagttattttacagaaggcagttcatgacctaatgcccaggttgacatatgacgtcaatctagacgctaggtaagtgtaaaaatatccaaggaatgtactttaagatatctaagtgatattttgacatcacttagtctatttatgtgttctggttggtcaccgattctcaaagatgttgctattttgtataaatgagagtctcaaaactcttcattttcaggccagtgaactggaaatgagaaatgcaaaattgtgaatttgatttctctgactttattagatcattgtcattgttaaaaactagatgaatggtaaaaatagtatctgatttggataagcaggatccaatgcacaagaccttttgtcaacctggacgctgtgtacttactcccgagctcccaggattttgtttttgatacttccaaggcttatgaacttgaggatgaggactcctatttcgtttttgaccattctgaatttaatggtcacgttaaatttgacatttaagcaattgaaggtaccgtcccaagttgattgtcaacttgggcactgggcccaaccctatgtcaacctgggccctgggccctatttctagggactcaggattgtagttttctcccctagtttgcttggatctttattatttctgatgacggataaaatacccagaacacttttcgctgaacttgatcggaaacagccaagttgacaacatgtcaacttgggcgcagggtaagccccagatgtcaacctaggcacttggccctattttttgtacccattaattgttgtttttcctctaagaagacctattttcccattttttatgaagacgaagaagctgcaaaattcggatctccaatctgatacttgaaaagtgcccagattgacaaattattaacctaggcgctaggtgctcaaaaattaacttgctctgattctgattctgattctgatgtctcaaatatgcccgtagtgtgtctagttgatgtataagtacaaaaagtattttggcaaataattatataagtaagagtataaaagtgtaaaaagtcgtatagtagtattttttgtaaataaacttattttttttcaatttcttatgtaaaaatttcattttttttacaatctcgtagttaatttttgtatttgaaaatacatagacgaaatattgtttttatttttttgaaaaataattccatgtcagtgctcgttataatctatatatacctcaagatttcattaattagtgttatttgttctctcattaattctctatttttttatatgttttattagttt

SEQ ID NO: 33948 - DNA, 1407 bp, Cannabis sativa
tatatattcaaatgaattatattagcaaaataattatcaataaaaatataattttatcttataaacaagtataaaagagaaactaaatgaaattatagatatataacttttaaaattaaagaaaatgaaaatatacttttactttttctacgtgcaaaatatatgcacattcttcttttgagctttataaattaacaatgagaagaatcttctggttcttcaacaaaatatttaatcaaatcatttaataatttattttgtattttgataatttattgtgtataatcgatcatgtcaaaataacttaattcatgaactccaagttcagtataatttatattttaatgaaacttttgtaggatagtttgtaacactacaacacataagtaatcattacaagttttatttttatatacatgaataaaataatatattattttccaaaacatatacactcttaaggagtcactattatgtttatcaaattttatttttcttcatcatcaatccaatgatgtctacatttaaaagatacatgacaacttcaccatgttgttgtaatagtcaaatagatataatcataatacatcatttatattttctcatgtctttctaacaagtggtctaatttattgaaagactattcaacagtctaattatcatgacttgatatatttatatttaaatatacaaccagtacatataataagtcatttcttgtcactttcataactagataaaaactatacaaggccggccctgaaatttagtgggccataggaaaaaaaatatttttgggccctcatttagaaaaaaaaatgtggtatttttcaaaattgataaaaaaatgtgtaattttaaaaggagataaattttttttgggcccctgagctaggtggaccctaggcacaggcctagcccgcctatgctcaggaccggccctgctaggtacatacaactatttcaagtagaaattgtatgtaaaacttctttagaaaggtttttaaataatcattttgtgattttattactttgattatattagattatattggattattaataaattttactataatattagtaaattatatattcacttctaggaatatgcaaagaatatgcaaagtgaattaagtagtagatgtatatatacatatcttgtaacagtaatagtttgaaaccattatttttaagaaataataaaatatgtatgtattaatttgcttatgacattactaatatatgtaaaatttatattttaaatttgaatatattgaaatatgtgtacaattcacattctatttaataaagtcaaatataattttaccttgattataactttgaccgatgagtaaagcatatagtaaaggatgtttcataagtgtatttatgaactagtttcca

SEQ ID NO: 33949 - DNA, 1279 bp, Cannabis sativa
tcaccattaaatcatcatcaatggccaaaattagcctaaatattttttttttcatatattttgtaatattttattattgttttaatagaaccccattccctataaaaggagagctctactagtttattttcacatttagaaaagagcccaaggtgagagcatctttctctagtttctctctctagaaatagagctcttgccttagtcaattttcttgtattctcatgagcaatactaactcaaagtagacgtagctctattaccgccgcgacacgaggagtgaactactataaatcttgtgtctgtctcttacttacttcattaacttctattttctctcgccaatctagcgagtgagtgttggccaattttctgcgtcaacataaaggattaccattttacatttctactttactacttattctttaagtaccattaattcactagttaataatttatctataatcttattatagatttgagcttaaaatcattcagtatcagaattaacccttaagggaactaatgtatactctgttaagaaagattggactccttcttgttaattcatgttcccagatatccatgtaaataaatttcggtaaataccattttaaacactgtattttacaaaagttactgatcgaatcctttgttttataaatgacaaattgaaccatatatttgtcaaaatagtactaaatagtaccttgaattaattttttgtcaaaataaaactttagaataactcaatctagatgtattatgacaaaactggttacgtttttttccatctattcgagcaaggaattttttttaagttggttatattaaaaaagattgttgaaaattgagcttaatgtcctatttgtaccattttagaaaatacaaggtccattttatcatttaacgaaacaaatggtccaattagtaactctgaaatggtataaacccaataaatttctaaaacaagaatcactagcctcatacaatgaagggaccttaacaaaaattagaaaatttaattaacatgaaccagagttcatcaacactcatgattaagattgatctatgaacgatcatctgttatgatatgaatactaatctttattattaaatggcttttgtataaagattgtgattcacctcggtccttatcatatataattatattatataaaatgtcttcaccgagatgtcttaccacatcaataatctaaatctagattatttgtaccgtcatgatactcaataaactgcacttacaaccccaattaaa

SEQ ID NO: 33950 - DNA, 2585 bp, Cannabis sativa
  modified_base (1075)..(1077): a, c, t, g, unknown or other
tacaacaaacagattattgatgaaagattaagcaccacacgggagagatcaagctggaagcaccagaaactgtaacgggatgcaacccttagaaggttccagagagagaaggattcgtgttttgttttgtgttgatacaaccaacaactcacataatcaatcaaatcaaatcaatgtcacccatctccataagaggcaaatttcatttattttttgtttttttgaacaacacactacatgatcatgattcatgcatatatatatacatatatatgccctatatatatagggtatttctagcgtagggcatagtatattgtacttatgctataaggtagtttttttaaccaatctgacattagaaaagaaaagatgtatataacttttgttgaaaaagtgtagaggattatttatttaaaactttatttatttcttttttttttttctaaaatcaatttttatatattgttttattgattgagtcacttagcctcagtaagcacacgccttagacattggcgcaggggctgtccaagtctggagatatttggattttggtcttctcttaataagtatataacacactattttttattaaaaaatttatatttttatgtttattttttttttttatatttttacaattttctatagaaacaataaaaaaaataacaaaaaaattacataaaaataacaaaaaattaacaacaaattaacaagagtgcaacataaaaaaacgtattttctgtaaataaaattaaaaaaaattgtaaaaatatttaaaattccgtgaaatcgtatttttgtaattgttttattatttatgtgtatttgtgaaataatccctaatattattttatcattttattgttatacttttatcatttataaaatgagaaatttgtagcataaatatttaagtttaatttttaataataataatatttaagttatatttctaaaatttctataaatacctgaccattaagtgttaagttaatagccacgtcacagtccttgattaatctaagttattaaatttatatttttaatttaaaaattaatttaaatatannnataagaaaatgacatgtggataataatttaacatttaatagtcaagtaccaacggaatttcaaaaatataacctaactactattattactgtaaaaaataatatgtaacccataattaaattttcaatatttatgtcacaaataattaaattaaagtttaatttaaaatattatacgaaaataattcatttatctattttacattaatattaatttatatttgtaattgctaatcataatcttgaattaaactctagaaatatatgatattgggtgattctacaatgcactcccttaaaagggatgtattgatgtaccctctacttgttttggtatcaagaaaaatttagtctaattttttttcatattcgtgtacgttatatctatttaagatatcctacaaaattttgaaaaattcagaataatttacaatataaaaagtaatattcaaacattctattttacacgcgtataaataaaatagtcactcgtgcaacacactatttaaaaccttgttttcggtgtattaaactttttagaattttttaaaattttacagaatgtcttaaataactataataatgtgatacacattcagtaaataaattccaaaaactcaaataacaaaatttaaataattaaatggagtttgagaagatttaaacttacttatttttattgtcttcacggggtttcaatccactttacttaattttttaaaatatggtgtaaagtaattgttgccttagagagagaaagagagagattaagagacaatagaagagagagaaagggagaataaaaattgagcatagccttcaattaggagagaaaaataaagtttgatattttatattgataaatattatattaatagcaaagttagtaactaaaattattttttgaaaatatatacctatataaaaaaattaaactaaattttaaaaaaataataacatttaaattaaaaattaataatttttcataaattattaatattattttattttttaaaataaatatatcattatatatatatatattattataatgtataaagttttaattgtatacaagcagtcttatcgtaaaagtatacatctgatatcataataatcacatgatctaaaaataatggttaaaaaaaataccctatcggtaggaaacttttgctaggtcctaccataatcttaccctatatatatattatttatatataggcctatcttttatttatttgtgtttttatgtttggaaattgtacattatctttaaagttatatgaactatttcattttaattaactagtatgagatggaaacttatatttttcactatattttttattattctttttaaattacggtttcacatttcaacatagtatcaaaagtaaatttaagaaactcttataatgagtatccaattcaaattcaagactaatacaaaatatatagatgaaagagttatttctaatatgaaggtagtgaacaaaaaaaaaaaaaaaa

SEQ ID NO: 33951 - DNA, 1337 bp, Cannabis sativa
ttacattgtctgtatctgttcgtgttagaaattgtcttaaagttaattatattgaataataaaatttttggaaaagagaagccttactatactaactttgaatttattttttatttttttaaaaaaatcataactaattggataagattaagttcatcaatcaccaaaaataaattatactaactttgtgacaaactaaaataaaagaatattaatatatttaatgtaaaagtatatcacccacaataatctctaaaccatgtgggacgtttgtaaagtgactctcatattattaaaagcatacaaaaatgtggaaaaatgaaaaaataaagatataatcaacaaaaattaatattataaaataaaaattctaaaattatatattatttttatttgttaaaaaacttaagtgttttttttaaaaaaatttaaatattcgacaaaaattaaatagtgcaaaaatatgtgaaaataaataatattaactttagaacaaataaaatatacatgtaacttataaatttaacatatagttttaattatttaaatacattaaaataaagaattataaaaaaaatactttttataggaaaaaatatttaaatgcttttttataatttttttaaacttgataaagattgaaaaatataaaaatataatttgcactcactgaaaaaaaaaaatataactaattaagaaaaattaagatcattaatcacccacatagaaaataaattatgctaactttgtgacaaataaaaaaaaaagaatattgatctatttaatgtaaaattatatcatccacaatagtttttaaacaatgtgggacttttgtgaaatgactctcatattactactatcataaaaaatgtagaaaaatgataaaataaagatatatttaacaaaattaataatgtaaaataaaaaattctaaaaatatatattatttttatttgttgaaaaactaaaggatttttttaaaatttaaatatttgacaaaaattaaataatgcaaaaatatgtaaaaataaataatattaattttcgaacaataaaatatatataacctatagatttaatattaacaatagtctcatctcaccaaaaacatattaaaatatatatttaaagagtttattattctaataaaatttcatgtaataataaattaatatagttttaattatttaaataaataattataagaaaataatttttatatgaaaaattaaataaataattttagtaataattattttaaacttgaaaaatattgaaaaatacaaaaatatattttgtatttactttaaaaaaaattataactaattgggcaagat

SEQ ID NO: 33952 - DNA, 1004 bp, Cannabis sativa
  modified_base (294)..(295): a, c, t, g, unknown or other
taaaagaggataatataaaaagggtataaaatctaatttctttaataatttttgacacactaaatttatttttaatgtgattttttatttttttttttgaaaggaaatttatttaatgatagtgccacaccaaatataatgtcatgatcaaatatcaatttataatcccatttatgagataattacataaggcactattttttgtaaaaaaaattatacatttacgtttaatttttttttttacattttacagttttctatagaaataacacgaaaactacataaaagtaacannaaaataacatctaaataacaataaaaaaaataacatacagaacaaaaaatcaacaacaaattaacaagagtacaacataaaaaaaccgtattttttgtaaatgaaattaaaaaaattgtaaaattatttaaaatttcgtaaaactatatgtgtattctcccttgattcattcctccaaccaaaggccttattttaatttttctatgtttgaacatacaacaactatttattttgtatgttagtttcagatacaaatttacaatctgaaaagaaatttgagttttaactgaagtttttttgatgatctcacgagccttgagaatcagaaaagctgcctcctttcttgttaattcgtctaaagctggagccttcattcatggctcatccgaaaacgaagaccataccaagctctctcaacttgataccattgtttctaaagtacgattatccaactccaacagcgttgatgatattgttaaatctcttctaaacgatcagcaatgtaatagctttaacctatctgacaacctcgttgatgggttgcttaatcggtttaaggacgattggaaatctgcgttgggagttttcaaatgggcagagtcgcgtttagattatgaacacaacccagatgggtacgacttgattcttgacatacttggaaaaatgaagcaaatggagacgatgatgatgattttgcaggaaatgggta

SEQ ID NO: 33953 - DNA, 1163 bp, Cannabis sativa
taaaccctaacatccaaggccattattgtttaaccctattactcccagggtacatgatgtaagtttggtgagtaattccatttcacaatagagaatacgagatgcagaaagctacatcactcatttttggctatggatgtggatgttattttgtcgattttattgtttatgggggtaaggtgtgatcactggtgttggcatttcgagaggaatgtggtgtataatgttaagaatggctacacccttgcgtggtcacttaaatttgagcagggtgtggctgattcttaggggatggtggagtgatggaatggtttgtggaatatcaccatcccaccaagagtgaaggtgtttatttgacagttgtttcactcgaagttaacaatgacttctcagtttgctgaaatatttatgaaccattgagctgcttcaagtgttgtgaggaaacaaaaactactgaacatgctctgtttttctattctcagttaacaccggtgtggtctcgattgagtgtttggtctcttctacgacattattattttagtctagttctagagctactgagggtcttgtttgaagagttggacagtgatgtattggaagtttttgtcatggtcttgtggtagatttggttcgatcgtaaacaatgttgtttggtggtgctcatcgagattggaggtgattccggagttggcacataaagggttgtgtgagtttaaggagcatcgccagactgattcttttccagtggctttggggttggtgagatatggaaagtggtgttgtctggtaggggagaaaagtttcttgttgtgtactgatgcttaagttgttcctggcaggagttttatcaggatgaggggtgtgattcgtgatgaaaagggggttgtgtggtcatgctggcagttggtgcgataggtgagttccaagtctttgtggtcgagttattggctttgcagatgggtcttctattatcttaaagactcgggtttgctatctcaacggttgagtgtgattttgctatagtggttggctaggtttatagtccccaatgtttttcaacacattatttatgatgtaatttctttattaacaactattggtgatgattcttgtagtagggctgagcatcgatcggtttggtcgtttttttttttttttttttt

SEQ ID NO: 33954 - DNA, 1457 bp, Cannabis sativa
gggctaacacagcaaagaactatccaatcaatccaagttttaataaaaccaataaaagttaatgtaagcccaaataaaaagtctaacaaaaataagtgtgggggaagatgtttccattattttttgaaaaaatttgatatatgagtgtaaggatcctgggacatttacgattccatgcacaattagtaaaaccatgtttaatcattgcatgatagacttaggagcatattgtattctaattttatgtatttttttgtttttgcttctctaaatctcgggctattaaagaaaatttgtgttactattcaattgatgaacttactaatgtttatcccaaaaggatagttgaagatgtttttgtgttggctaatggacttgtcactccaagtgattcccaatcctacatcaactctatttgggagacccttcttacttactgcgagtaagaagttggatatgaaagcatggatacttttttttttggtaagttgaaagcatggatacttagaatggaatttgatggtgcaacactcaaattcaacattttagattccattgataagtacataaagaatgagtctttgttagaagacccaacgtgaagaccacatgagcgcaacatgcagtcgagctaacaacgttaaacaaagtaaacttacgagagtttttctttacttttttctttttattttgtattgatattcttgattgagtctttaggacaatacttatatttagtgtagggagaaaaattatcgtgtctatctatttttttcctcagttgtttagttatttattttattattatttttttaattatattagtttttttaaaaaaataaattaatgagcatggtttaagtgaaattttgttgacgatgattgctcgtgttcaatttatgcttttactttgatgtcttatgcatggtcttgtgaaatataattaggttgatgataatattcttgattgtgtgatggatatgatgattttagaaaaatgatggagtctacatgatttgtgtgtttaacgcatgactaatttattgctcaagcttgatttttaaattttttgcacaaaagttgaatcatcataattgctaatgttttgagagatgaatgcatgtttgattgttgatatttgatctcaaccactctagaacttttttgataattatttgaggcaaaattgataaattacacatgattttgagatatggtataggcaattttttaagatcgattgagcttttcaagcctaccttatattgtaaatcccctagttctccaatttgagcttaaatgtttaagtcttgttttttttttctaactttatacatgaactttttgagccttaaatatgttcttcattttttttcacactatagtatattgatgtattatgtttgtaaaggtgcaagagctatgttgatgggaaatattgatgattatgtataagt

SEQ ID NO: 33955 - DNA, 1170 bp, Cannabis sativa
gtaatctagctttaaaagttttgacttgtccatcagcaccttttttctccttgtagacccatttaaatccgattggatgagaatcatcaggtgcatctacatattcgtagagttttttttttaatggaattcatttctgaatccatgtctgttgaccattatttctgttccgaaatcatctttaactatttataggtcaatgggtcgtcattaacaccgtcacgaaaaaccatattgatttcaccatctaagccataacaagatggttttgtagaaaccctcccactacgacgtggaactatgatcttttgaacatgaacattagtgatagtttcctcgattgtgtcaatttgctttggttcaaccgagggagtggcatcatcctctatttgagcattagacgatggaacattagtattagtttgagttaattctaatctaaaagcatttcctccaatactacttttctttggggctttaagtttttaatatagtcattctcaaggaatgtggtgtttgcggaaacaaacactttatcatcgttgtgattataaaatattcaacccttagtctatttacaattcgcgacaaacatgcaaacttcaattacttttctagctagccatctttcttttataagacataagcagggcacccccaaattttgtaatggcataaattgggtatatgaccattccacagttctaaaggtttctcggggactgatttaaatggaacaatatttataatgtcagtttacatctgaattgcatattcccgaaaggatattgatagagttgaatatccaagcatagacctaactatgtccaaatgagtgaaatttcttctttcagcaacaccattttttgtgtagtacctggggaagtaaattgggattcaattgtaagttcaattaaatgatctttgaactgaatatccatatattctccaccctatcggtttgtaagatttttaatatttttccaatttgttttgagccaatgctagaaattctcaaaacttttcaaatgtttctgatttcttgtgcataaggacaatgtgaccatatctaaaaaaatcatcaatgaaagtgacaaagggctcataaccatttatggttttgacatttagtggtcaacatagatttgaatgtactaaccctagtggttc

SEQ ID NO: 33956 - DNA, 1869 bp, Cannabis sativa
tttttttattatttttgaaatattaaattggataaataatattcctttcggtacaaattagaacacttggcaacaaatgctagtattttgggtatagacacatacaaatgcaaaaatttgaagtcattgtcttattttctaatgcaaaaattttggtcaacaatttatacgcaaaatacaacgaaaactctatttatattataatgtttattatttttataacattcttagatagtaaccttctttaagaaaatgaaaaaaattaaaaaaaataaataaattatgttagtgttatataattaaatctatatattatatataaaataggaaaatttggctatatatttgatgaaataattttttaatatgaatttagagattctcttttttttgtttttaagaaaaatgaaaaatttcattaatagataatagtcaaaaagcataattaacaagatagacaaattatgtcgtttacaaaaataggaaaagaaaaccttaatagatccttcaattaaaatatcaattagttgtcatcgataaaacatcaaaaaagtgcgaagaatgatcgatctccaatccaaattaatatgtgacaaattacatctatcaatgactattagtcaaagatcttctaataaaaattaagtaataacaaccctatatattattcaaactaaaataaaaaaaaataaacaaacgaccaaacgattaacaatcgtaacgaaaaatcgtaccataaacaatgaggtcaatatgaatctgagaatcctccaaatctgaacatggactaagatagtcatgctactgacaccaaaatatttttgagcctattgagaatctcccccacccactaccagatgccaccaaatccacacccacgaagctcgacccaaaatgctttgagcctatttagaatctcctaacgtcccgaaaagaagcaagacaaaaaatctggtcttgaatgaacaaagccctactgccagtactatcaacaccattaaattattgaaaataagcttaaaataaaaaaaataataataaattaaaaacattataatcatacccgatgccacacattagtccaaaaacccctacagtctcctttcctcgacatcaatttttggaaataaacccttaccctagccatcaacctcctctcctgccaaaacaaatctccaaccgacaaccaccaccacgacgcggtaagaccccagaacacccaaaccagacccaaaagatgtatatccgaccccacccactaccatatgccaccagatccacacccacaaagcctgacccagcaccacaaacgcccactgcaaggatcagaccaacgctcacaaaaccccaacccctcgcccaaagaaataaagcccaaataccaaaaaaccaaacaaaagaagaagagaaaccaactttagaaaagctagggcactcattaagatgcacaactagagccacaccgaaagccaaaaatagttggcgagcccttgtcaaagaagaaatggcaacaacgactgtaaagggaaaaggagaaaaccctagcaaagcccactcaagtgactaaatgctattactattattgaatattatattactctaaatcaaatcttcctcatccaataaaaaaataatttaaaaagaatttcaaaacatttcgtattaatgattatatatttttcatcactacctcaattatatatatatgattattaacacaaaccattgactcttagaccacctccaatggggagatgtaaaatttgtgttatatttagcacaaaaagtaattttgtggtaaatttatacaaaattttagctttgtgctccaatccacaattgtaaaattgtaaaattttgatataaaat

SEQ ID NO: 33957 - DNA, 1204 bp, Cannabis sativa
ctgaaccatcaaacttatctatattaaccttcatggaactcataatggtatatgtataaaattatttcaaagaaattatatagataatgagtttagaataatcttgttgttgttctttgcaatcttggtgttgtgtatttaaattcttgctggtatgaatgtgattcttgatgctttcttaatgctttcttgattaatctttgctgcagattgtgccttgtttggctctgataccactgtaggaattttattcctaaaatgccctacacacagcaaaaaagtatcaatgaaaacccaaggtcaaaccaaaacttttaccccagtcaaagacccctatttgactccctaaacgacagctcctatttacctaaactacaggtcgttttaatttaaacttggatccgtaaattgcattagaccatatatatattctttatcttctcaaacacaaactcaccatctaaatgaacccctagaaaagcatccctacccgagtcttccttcttcaatgtgcttctctgaagaacatgaagaacgccagccaagaattaatcacaacccagaaatctccctagcccagttcataccagatcccctaaaccgagccaccttcttcgtggttcttgtctgaagaagacgaagaacacaacccagaaaacaacccaacccgatgaacaaaaaacccttcccaaaccgattcaaacccagaaaatcacatacataaaatagataaacacagcagtaagaagcaggagaaataggagaagaaaacaccagtttttatagaggttcctcaaaaatattgtactgggtacgtcctcttcgagctagcctcgttccattatgattcttcaaatatcaaagattacaagaacaggattccagtacacataggtacgaattggtaatcccaaatatttacagtgttatattcctctcttttctctctgtttttctctgtgagattgatactgatagtagttctttttcttctttgttgcatgaacaattctcccttgagttggatatccgaaccctaagccaagggttccaaggtttactcctccaaactcaatctttggccattttcactctaggaaaaaatttggtttttttttgtttttgtattgttctgctatgaatctaatattgagttgttatttatctctgatctggtctgttgtgatattttttgttttttttt

SEQ ID NO: 33958 - DNA, 1656 bp, Cannabis sativa
cccttcattgaagatagggggttcattgaagatagggggatagatattggtaacccgagccaaactacaaacatccttgttgtgtttgcgcccatcagagagcaaatcctaaataggcattggactaagtttgtggatatcactgagcgcagcaaccaaaccttagctttagaattcctagcaaattggccagaaagagaggatgacaaggtcaaagttagggggttaaagtgcctttttccacagccgccattcatgttgtttatgacctatcgacctttactgtagaagagcaaccattgagacagcaacttcgagcaaggagcttgaattatgaggacaccgctgaaaccctaggttatccaggccttaggttccatgaatttgatggagaaccgtatcaactgtttcggtgtgaactcaacccggtacccaaggcatggttatactttgttagtgcaaggttggtaccaaacaaacattattctaatgctcagatcgacaggcttaagtttgtgtatggaattatgaaggggtacaacatgaatgtgggggacatagttagagtgacttttgatatgatggttgagggctcttatggaggtggacttgggctttctgatattattaccaacttgtgtgaggcacatggagtaccacagtactcttatgataccaaagcagcgccacaacgcagtatcaccctatccacagtgcttcgattcaaaccaccgcaccctcatggtcaaccgccagcttcagagagatcctcctgcaagagaacaagaggagcatgaagacattgtaccgccaagtattgctgggcctcttgacctagccatgcaatacactcgtgatcagttgaattatctgattcagcagaacattcacatgcaaaattacatggccgaaaggagcgcttttgatgagcagcaggtggcccagttgaacatgttactcacgaggatgaatgtcggtgtggaagaacccaactactttgccatgccgccacgcttcaacccctatgatcagccacctccgccaaaccccttctaatagggctcaggtaagtttctctcatccagttttattttcatacattggggacaatgtgtagctttagtttggggggagagacttaattttttcagttctttttgtttcgttttagttagtttttttttagtgtcgtttgttgatagctaagttgaagattgattgaaccactattattcacttatgcaatggattaaaatcttaactgtgtgcttgactcataactttttgaattaaattggatgtgtattagaaggttgttcatgtagatttaaacatttttttttgacggatatcagttgtgttctatttggattgtggaatgattgacttgacatggaatagcatttgtttcacatactctcttgaagcgaaatccttaatgctttttgtttggaaaatgatttaggcaagttttctttggatcgattgagcctttcaagcctaccaaaaatgttttgtcctagtataccgaaagttgagccttagcctattctaaaaaaaaaatttaccatttaactaagctgaattcgttatctttaactactttcaccctcaacataccttattatgccataagcctttaagcaagtttggggg

SEQ ID NO: 33959 - DNA, 1323 bp, Cannabis sativa
  modified_base (1060)..(1062): a, c, t, g, unknown or other
cagaagaaggaaggaggaatgagaagaaggagatgaagaaagcaagaagaaggagtgggtgtgggtgtgggtgtgggtttgcgaaagaaagaaaggaggaagaagaaaggagtaaatcaaaagaaaaagaaaaaagaaacagaaagagaagaaaaaaaacaaaaaaaaaagagcagaaaaattatattttttttcaattttgttttaatttttttgtaatttattttatattttaaaattattttttaaattttataatatttaaataattaatattacgtagaccactaaaaatttgacatgtgtacacttgtgtgcattgtggcatgtccaccatggcacttaacataatttcttgacggaaggggtaaatagctaacagaaagggagtttgtgtagttttgccaccaaaattttggtttttatggttaagtgttacaaaatggaaagttcgggtaatttcgccaccaatatcccttattaaaaatataaagatccttacatgcaattgctgtgtgtgttcatcgccccatttgttgtccttgcagtgaaattttaaaaaagtatccacaacactgggaagctcccccgtctggggatcagcctatttttaaacaaaattagaaattagaaaatattattaaaaatttgtttattaacaaaattatagtcatattaaaaatatcataccccgctcacaatgtgaccaactatggtcttagatccccatccaccttgaaccttcatgttagctcggtttttcgtattttgttcagctcttgcaagtaatttaacgtatatctattgttagcaaattgagaaaaaaaatattaagcatatagaaaaaaaatattacaactgtcaattaatatctgttgtttcggctctttccagtgtgcgataatttctgcccatacttccagtgtcactatatctggaggtgatctcctgttcgcttcctcctccccgtatttttcaatattctccttccatgccttcttcgtatctactctccagtcacgtaacccttttgacatagatttggtgacgtaatccacgnnnataggattattagttggcaactcaaacttggtccgaaaaaaaatactaaagtcatatatattgtatttttcttatataatgctattatacccaaaattcggctggaggacacatgtcaaggtaaagggaatgtgaattggtgcaatatctttttatggaataactcattaattgcgtaagtatcggagtatatttataacccgctgactgtgaggtgaatagcgagccaccagagaaaagtaacacataccttagcttgca

SEQ ID NO: 33960 - DNA, 1817 bp, Cannabis sativa
  modified_base (1711)..(1721): a, c, t, g, unknown or other
agagtcaatcacactcgatgatgtacaatcaaccttgaatttgaaagagctgaatcaaaggagtgagttacagaattctggaagtggtgatgaattgtatacaaggggcaaaagtgagaaaagagaaagtcacaaagattcaaaagaaaaatcaagatctaaatcacagtttgataaccagaagaatcttagatgttggatttgtaagaaaataggatatctcaaaagggcatgtccagagaggcataagacgggtgattcaagatccaaaggagatgcagcagtgagtagtgacggttatgactcagctggtgctttgctatcttggattctgagtgttcattccatatgacaccgaataaatcttggttcaaaaaatttacatctggaacttatgggactgtgtatcttggggataaaaagtcttgtaagatggtaggaattggaatcataaggttgaaacttcatgatggtgttgaaagcgtgttgaaggacgtccgactagtacctgatctaaaaagaaatttgatctctatttgaatgttagaagatcaaggatttcttgttaaaattgagaaaggaatcttaaaagtttgtagaggatcgatggtggtgatgagaggaagaatatcaaatgggatttatcctttagaaggtaccacgttgagaaatatgaaggtgtgtgtttcaagcaagcacgtaaatgaaactgaagtattgagtgttattgagtgttggactacccaaagtgttctcagtagaagttgtgtccactgcaacttatttgataaacaaatatccgtcaacaacactagatttcaagatgccagatgaggtgtggttagggaagccaacaagttatgaaaactcaaagttattcggatgtgttttttatgcaacttgaggcaagggccttaaagtgtattttcttggtgtattcgaaaggggtcaaaggatataaactatgatgtttggagcccaaaatgagaaaatgtataattagtagggatgtgatttttaataaatgtgttatgagatttattcacaaacttgcttgaagtcaagccaatactaactgagataaaattaaagctccagaaactgagcttgaggtggagcctccaggaagggtggagactaaaacacatgtatattacggaagtgatgattcagaagatgattctagaagtgataatctaaaaagctataaattagcaagagacataacatagagagaagtaaagtctccagataggtacagacatgttcatttaattgcattcatatctcatgcttctttttattgtatttgatataccatatgtatataaattaagttttcaaatcctatatgaaatatttttatttgtttaggtagttttatttgtcactggtgccggaaaagtcaccggagtttgctacggtgccgaaaaaattcccaaagtagctgtcggtactggaaaagtcaccagagttgttgccgacgctaaaaaattagttggaattggcattgttgctggaaaaatcactgaaaaaatcacaaagaaataaatttcttgatgaagaaaccactttcttagtgatttttcaggtaataatgccaattctaatgaattttctgaaactggcagctactccagttgcttttccggcatcgacaacaaacttcaaaaaagtaatcgaaattggcatagtcgctggaaaaattacnnnnnnnnnnntttcttcatcaagaaattggtttcgttatctttcttcatgaagaaaccagtttcttggtaatttttctggtgatttttctgatgacaatgccaatt

SEQ ID NO: 33961 - DNA, 2454 bp, Cannabis sativa
tttttagaagccatgatggtgaatttggggtacagtctaccatggattgagaagattatgaattttcttacttctgtgcagttttcttttctcattaacggtgaaattcaggggcgagttcttccacaacgggggttacgacaaggtgatccacttttaccatttttgtttttactctgtgctgaagctttttcatgtcttattcaacatgctgaacaacaaggtagattacatgggattgtgtttggaaggcagagagtaacggtgtcacatcttttctttgcggatgacagacttgtgtttcttgaagtaaccgaaaatgaatgtcggtggttcaaagagttgttggaaaagtactctattgcatctggtcaacttgttaattttcttaagtctgagatgtgttttggtcgttctgtttctgcttcggttaggactcacttggctactttaatgggagtgaaagtggtagataactatgggaagtatttggggctgccatcttttgttgggcgaataaagaatcaacattttttgagttcattaagaataaggtgtggaatagattgaaggggtggaaagggtcattcttttcggctgctgggaaagaggttctaattaaggcgattgttcaagctatacctacgtatactatgagttcttttcgcttaccaaagaagactattaatagtattcatagtatggcagcccggttttggtggggatcatcggaaaaggatgcgaagattcattggtgtaagtggtccgttcattgtaaacataaggagcaaggtggtcttgggttccgggtttgggtctctttaatcaagcccttcttgctaagcaaatatggagatgtataaggtacccgaattctttatgcagcaaagtgttgaaggcaagttactacccaaatgttggggtgttggaggctaaatgtgggaatcatgcgtcctttgtttggagaagtttggtgtgggggaaaaagattattcaagcagggtatcgatggcgaattgggaatggaaattcagtgcgggttcttgaagacccgtggctgcctaggccggttaccttcaaaatttatgacaagccttcgttaccggatcaactccatgtcattgatttgatgaaagggaatggggaatgagatgaagagtttgttagagctgtcttcaatccaacagatgctgagttaattcttcaaatggccacttcggaatgtgatattgaagacaagatcctatggcattatagcaaggatggggaatattcagttcgcagtggctatcgtatggcggcggctttacaggtcagagacatccaatccgatacagaggctactgagaggtggtggagacaactttggaagctcaaaattccaccaaaggtgaagcattttgtatggaagatggcccatttttggataccaaccaattcggcccttgctcatcggaaaattcaggttgagccttattgtactcagtgttctagtggtgcatatgaaaatgtttttcatggattatagggttgtagagtgaactgtgatgtttggaaaacaaccgggttctctggcaaaatcaatagacaaggcaaagaggatgttgttacctttttgatgagaatgtcagttagtttggcgaatgaggactttgagttttttctagtcttgtcttggaatctttggtatattcgaaattcgattaaccatgggagacacaaacctaaggctgctgctattgttgaatggtgcagcaagttttttgctgaatttcgagatggaactgccccgaagaaggatggatcaaagaggtctgctgctcgttggattgcaccagtgcggggttcttttaaaattaatgttgatgctggggtcaaagggggggaaggattagcgagtgttagctcgtttgttcgagaccatgatgggcgtgtgagtggggctgttgtctgggtagtgaggaaagaattaactcctcttcatgctgaacttactactattgcaggtgggcttaaggtcgggttgcatcagaggctgccatcttttactgtggaaaccaattgcttgcaggctgttaatctggtgttgaaagatgaagggggttgtagagatgttgatggactcattacacatattagaagtcttttgcaagatgtaagggttcatgggatctcttttgtttataggaaagcaaatcaagttgctcatgtattagccaatgaaactttgattaacaaagctagtgccatgtgggttggggttgtacccccttgtgcgagacaagcggttcagcttgactcgcctaatcctgtgtaatgtttgtttgaatgaatgaatttcaaaaaaaaaaaaaaagtcatatagatgagttgttaaaaaaatgtgtgtatgatatattagaatatttctagttaaggaaataaaataatattattgattctgataaatgaata

SEQ ID NO: 33962 - DNA, 1249 bp, Cannabis sativa
tttatcaaagagaaatgctaggcaccttacaatagaggtgatatttattggtgtagattaatattgtgtcccacacattttgatttaataaataatacaaaaaactgctaactacttgtaacacgctacatccgtatggtgaggcattgtttatagggcttcaaggtacctagcaccactataaggcgcctaatagcattgagcattgctaggcaccaagatgcctatagtaccattatgaggtaacgccttataattagttaacggttctttatagtctttattaaagtaaaataaatgagacctaatattgaattgtaccaataacaaaaaaaaactatatatgtacatatataccttccaataaaattgtggattgtgaactttgatagttactttatgggaacatatatatttttgtgtttccttcaaaagtgaaaacagtgcctccttcttccaatatactgttatgacacaaacattttatatatatacatgatcatctcacatgaaacaaaagaataatattgtaaatttaaaaggatttcaaattcaaaaaatacaataaattacatgaaacatcctgcagtgataaactttgtaagaaatttagtaacaaaaaggcgtgctcctctttccatcatagaaggtaccattggatttggattaccaagaattagctcacaactttttccaattaagttatgtgctgcaaccattcctgcctacaaattataaacattattaatctaagagaaacaatcatttcactgtctgtattataatttgttaaatttaattagtttagtaataagtacctttaatccatcctcataggatccataacctgaaataataagtagatatatatatagtgtgataatgctaatgaataaaagtatgattttcttgtaaacagatatattattaccttgatcataagctccgcaaaaccaaattcctctttttccttgaattcgatgaaactcgagtgaaactttcgatgaagtaagagatgggagtgaatgggtagttgaaaacttaagcaatgtttgttttggtgggtgattaggattaagagtcacaaaaaaagggagacttgtttcaccaagattctgcatattcatagtcatatatatctctagtataattaagtttatttaattttgacagagattgtatatatatatatatatatatgaaacaatttgtgtgtaatgatcacctgaatcacattgagccagtatgt

SEQ ID NO: 33963 - DNA, 2001 bp, Cannabis sativa
  modified_base (866)..(880): a, c, t, g, unknown or other
  modified_base (956)..(975): a, c, t, g, unknown or other
  modified_base (1122)..(1131): a, c, t, g, unknown or other
ctatgcggtatcttttaataaaatgaaagtccatcttaatttttttcttaacatatataattttcatttacgtgtacaattgagtttactttttattataattttttttcttttgaaaattgaaatgaattttaatttttttttattatagttaataagtttataatcattcattttcttctcagtttaaaatttctaaattttttatttatcaacaataattttttttggtattcattctcttttttttacaattcctaatttgtgtatttatttttaacgattaatgtatatatttaaaccaaaatatatttactaatagaaatatagaagaaaaacataaaatttgttaagataaactttttattataatcaatttaattacttatcatataataattattttaatgactaatttataagttttgaattttatatcaagaaaatttaaattattaaagagattataataatactgtgagccgaactttagtcaaaatagaatataataccatgatttgtaggtgttatgaccaaatttactacattttttgcaccctcttttgtgattggaactaattttaaatttgttatatcttagttctactaaaaaaaaaaaagtttgactaaaattatttagagtagtgttgtattttatttttaaaaatataaggtttaaactattttttaataaaataaaaggcccaatcaataaatttatatatgttatagattgtttttagtattatgcaaaaatagctataaattaatatcataggatttaaaaaatatgtaatttaaataatatttaattaatcgtgtattttttcactacaaaaaacaactacttttagtgacaatttttnnnnnnnnnnnnnnnttttttgtgactaaatataatatttagtcacaagaaaagttacttgtcactaaaatatatttagatacaagttgtnnnnnnnnnnnnnnnnnnnncaataagtattgtgactaaaaacacatttagtcacacacaaattgtggtttttgtgactaatacatttaggcatggactttttagtcacaacataggaatgacgatttataattagtcacaactttttacttttagtcataaatttnnnnnnnnnnaaaagtaagattttttatagtatttttttttattgggagagtgggattcaaacagtggcagaaggacatggggtcatgtgggggcacatgaccccactaatttttttaaaatttatattttgtatgtatttttatatttatatatatatatttgtaattttgtccccataaatttaatttttattttagttttttcatcccatattataattttgcccatataaatttataatttatatttttatcttcacatattttcatatttagtctcatatatctactctaatctctataaaatttatatttttctttatgataaaaaaaaatattttttataagtctaatttttatccctttttttttttttttttgccatcgtgtagttggctttgccactagatttaaacttgagatttcctctttaagaggagtatggaaccactagactatgtctatgagcactttaataaattatgtatagattattacttttattattattctcactatttttttaattttatactaatttaagggagcacgtcacgtgtccaaaaactagtatatatataaaaactgataagttttttttgtatatatataatataataataaaaaaatattaataataatataatataataataataatattaataaaaaatttattattagtagttatcttattatttcttagctattaataaatctctatttctagggtatttagccgacttcgagtatcctaaaatatcttagtatttctaaaatcaacttatcccaataatcccatcaatatttctaactaaaactgttgtgatatttttggcctctaatcgggtctctagggtcgccaaacatgaaaatatt

SEQ ID NO: 33964 - DNA, 3512 bp, Cannabis sativa
  modified_base (1892)..(1892): a, c, t, g, unknown or other
gaggcaacaagaaatttgaatggagagaagagtatgaggaggcctttaagagcataaaaaggcatttgtcgacacctccagctttggcaaaactagtaattggagagacattactcctctagttggctgtctcgaaaagtgcaattagtgctacaatagtgcgaaaagagggaaggcaccagcaacctatttactatgagagtaaaagattactggtggcaaaatcaagtattcccgtcttgaaaaacttgccttatgcctaatccacgcatcttgcaagctatgaccttacttccaagcacatctggtaaatgtgttaaccgatcaacccccgagacaagttttatcaaaactagatgcctttcgaagattgataaaagggccacttaaactagggcagttttacataacttatcatccacaaacatccataagggccaagccttggcagatttcatgatagaaggaataactccagtggaagatatgcttgttcagcgagatgtagacacttggaaattatatgtggatggtgcatccaatgagcattgctcgggtgtatgggtgatattaatttcgccagaaggctttaagtttcactatgccttgagatttcaatttgacgcgtcaaacaacaaggcttagtatgaaaccttgatcgctggtttgaggatagctgaagcgttgaaagttaaaaatctcatatgccatagtgattcacagttgatagtaaattaagttctcggggaataccaggctaagggcttaaaaatagctaagtatctagagaaggttcggaagaacttggaaaggttcgattatttcaaaatcgagaaaatcccaagtgaacaaaactctaacgcctatgccttagtaaaactggcctcgcagaatgatttggatgaactaaaccttgttccagtggaaatgttaaatgaaccaagtatatgtgaaaaggaagatatcaagatcatagatagctcgcccacatggatgacagccatagtcaactatcttctcgatggtcaacttccaactgacaaaattgaggaacaaaaactcctgtattcagtgtctcgctacacgatagtagagggaaaattgtatagaaggggctattcaatgcccctcctttggggtgtccttcccgcagaagtaaacgagatcatcaaggaaatccatgaaggcttttgtggggatcatgcaggttggcaaagtctatcaaaaaagattattagacaaggatattactggccaaccaaaaacaaggacacccatgaatttgtcaagaagtgtgataagtgttagagattttcgtatatacctcgcgtaccaccaacgaaactgagaatgatgacttcgtgttacccatttgcagtatgggggattaatttgattggggcactttccacagggtgaggaggagccatgtacgtagtggtggctgtcgatttctttacaaaatgggcagaggctgaacctctggtttccataatctataaaaaagttctcgactttatggttaaaaatataatttgtaggtttggaatacccattaaaatatatagtgtcagacaatgagactcagtttgatggtgaattattcactgagttctgcgaaaggaacaagataatcaaaagcttctcatcagtatccaggcctcaagcaaatggacaagtggaagatgttaataagaccttgaaggatactatcaagaagaaactagacgctgccaaaggtagatgggtcgatgaactacctcaagtactttgggctcataggacaattgaaaagacagcaacaggacatactccattctcactagaatttggctcagaggcaatgttgtcagttgaagtaaatatctcgactcacagaagagagttttatnatcaagaagaaaaccaagaactcttaaaattgtccttggatctacttgatgaaaaatgtacaaagtcgcaaattactaacacaacataccaaaactgagtgacaagatacttcaaatggaaggtgaaaaagagactcttcaacgttggagacttggtgctaaggcgagtatttgcaaatatgagagacacatctgcaagagtattcaacctaaactgagagggtccttatgtgatcgaagtgatagtaggaaccggggtttaaaaaactggctcgactgaatggctcattgataaagaactactggaacgtggaacatttacgaccctattaccagtaaactgatgttgtaactcatatttctgatgtaatattttgaacttcagttattaataaagttgaatcatttttcaagtaattacaaagtgtcattctttaaaattacttgagggtcatatgtgtatgattaactaaaatctatttggaaatacatgatatattgcaaaccccctactttagaatttttcaaaatttttaaagttttttattaaataacctttctaacgagaaaagaaaatcaaaagttgtaaatgagatataactcatgagctacatgcgaagctgaatactaacaacttgcatttcgtgggaaagtattaaacgagacaccaagatgtcttgcaaaaatacttaaacctaatatatgaatagaaagcataactattcataaaagcaatcaaaaatatacaaagtgataaatcattaaaagtatattaaagtttgcttaaaatagattataattgtttatgcaaaacagacttgataacttctcgcaaatcaaaagcatagcagataataactgctcgcgcacgttgtagattactaactacttaaataatatcgaaggaaattacgagcaatggaaatgcttagagtattttaaatttgatcaaaatataaaattaattgtttaagtgttgtgtgtgaatgaaaaaaaacacaaacaaacaaatatattaaattcaaatataaaactacgaagcattcaataaagataaaataaaagcaaagttcaaacaattggatgaatctggacaacgagtagcgaggcatccatctcgctataacaaggtatagtcatggtaccttcactaatcagctccagacatcttttaatgagatccactgctccgtcgagtcagctctctcaaatagaagctgacattaaaatgatgattgactgctaaagttcaccttgtcactaagaattgcgattgtcagatggagtgttatgtcttaatagcaaaaccgatggtatttacattatcaaccttgctgtcagggttattgttgctatcccagtgagatgccccagcgaggtacactttgtagcatatctaaatccacgtcagcattgacccagtaaaagcggataaatcacagttgtgtgattttcaaataataaccacatttattttacgtgggatgtaatcaaatcccataatttcaaggatatattgttgtgggagattaatctgattgtaattaactgcctccatatgtaactataaataggggcagagtgtacagaaaaagggacgaaaaatccttaagagaaaaa

SEQ ID NO: 33965 - DNA, 5431 bp, Cannabis sativa
  modified_base (277)..(287): a, c, t, g, unknown or other
gatatcttaaatagttataacttacatgaatatgaaaaaaaaattagactaaaaaattcttttagatgctgaaacaagtagagggtgcatcaatacatttctttctttttaagaggttgcattgtagaatcaccttataatttatatttgtattttttttaatatattagtattctttttataaatttaaattatattttagataataattagtttattaaataatatttgatgagtaatattttaatttttatataatttaatatttttatatatnnnnnnnnnnnttataaattttattttttttattaagagattctccattatgttcctccctccattaacagattttctatcctatttttaataaaaaaataagtagaaataaaaattaaaatccttaacgagaattagaaccggaaaaccctccctgccaatttcccaatccttcagctttcctttttctattgtaactttattgtttagtttgagaaacaaaacaaggtagaataaaatgaacatatatacataattaaggtgacacgtcgatacatgattaaggtgacacgtcatggggacccacacccactctggtacaccctttcttttcttttgaagcgggcatcaaagtacccatcgtttgacacgtgtcacacataaggtttctctctctgttttattttttctctctttctagggaccaaccttgattgaaggtctgccatagcacataatccaaaagcttctctctctattctatatgtgattattgaagattacgggtgagtgagtgagttggagaccgatcttggtgccgaacaaggagtgtttgctttcaccatttggaccaagccatatccaatcccatctccacttctttctcctctttctctctctaaaactcatcaacatacaaccattctctaattttcaaaacattgctttattattattattattattattaattgtcaaaatagatgggatggtattttggtaatgattgaatgcaatacaaaaacagggattcaaatttgattgatgagatactacttttttgaaagaggttgttgatcatgactgctccttcttctaatgctaatagtctgatctctgttcttcctgatgagctcaagtttcaatgtatgcttcttcttctcttcttcattttacagctttttttcttaatggattaccatgtctcaaaaaagtgtcaaattttgtgtttcttttttctaccatcaggggaaagttttcttttttaatttatttattgttgaatagatttgactgtgtaaatcgtttgggtttttatgaaaagggttgataaaaagagcagaattgatgtagaagagattattaagtgggtgatttatctttgaattttgtgctgtgttggttagtatggatttttttttttttgaacaaggttagtatggatttttagagcaatatgtttgtttacttgttgggtagagaagggtttgttcaaacatgaattttcttcacttttggttctaagaaagatcaaaaggtggcaaggtagataatttcagggttattattgcttataattcttggattaaaaattaaggaaagtgattacaacttaattatattatgtaaacatcttctctttaagcattaaaaaacaagaagtatatacagtgttcctatttctaagaggtttgctttcttcccaagttacttacaatgaatgatgtcttacctttttagtgacttctatagacaaagcaagttagccaacttgaaacaagtttaaaaatagtttggtagaatagagaaaattaaaagaaaatggtactattgcaaatacttaacaaataggaaacatgtaccataacattaactttattatcataatttgatgctaccttactgaattgctattttggagattgagtttagttagggatagaaaatctgtgattaggcctattggatgcttgttattaacaatttgagaagaaaaaatcagaaattttgctgcaccatccaagcaggttttctttgaacctgaagtgttgtgaaaatttaacttcgagtttaatccgattagacaatttttttttgttattttgaagttatttttggagtaatgattgtggtttttgtgatcagttgagctggaaaagcaaaccttttgtgatctaaaagttgtcaataacacagaacaccatgttgcgtttaaggtatatgtcatccactgtgaacttacatttacactttagcaattcattacaatgagatttattgggcctttggaaggcccttatttaaaatatgtggtattattaaaattaaagaaaaaaatgtgtatttttacaaataaaaaaattaagtcttggactgggtaagcactgagtgcaggcctatcttagtgaggatcagccattaaagttattcacatttatcataatagcacgttaagaataaatttatagagaaatgtaatagaataaataaaaaataatcggaattaatatttataatacgttgtttactaaaattatttggaaataaagtagtaataatttattttgttttccttataagtataaggaaatgtaatcagaatgtttaaattgattaattttttttaaaaaaaagttactataatatatttgtaacatatattatgaaagataaaatttaatactaaaaaataaataaaaactattaccctaaaaaaaatgatgtgagaagtatctctttttattttattctatattttaagatatctccaatgtgagatgtaaaagttgagctatattttgtacaaaaaatagttttgtgatatttttacatcaatttttactactgtacttcaatgcataattataaatcttgatgcaaaatttaataaaattataattattaaaaaatataaaataataataatataaaatttaataataaaataataataataatgcaagtcacttaatacaaaagaatatattaactaaaatttattaataaaatattaaaaatgtcataatggtaaatataaaaatataacatttattgtgatgtaaattttacatcatgctatattgtgatgcaaatttggatcaattttaactatgtgaggtttttgcatcataatttagtacactattgaaagatacttttaataaagtaaactatattttgtatttacatcacttatttgcatctccataagagatgctctaagtaaataaatgtaaagaaatgattatcttaccattaattctcattatttattggtaaatataaatgactttttattttcttttttattgtgcaggtcaaaaccacatcccctaagaagtatttcgtacggccaaacactggtgttatactgccttgggactcatgtgttataagaggtgttgcttgttacattgttaacatcttgaatttgaattaactagcataaaatgagcctactttattttcacaaacaccaataaaaaattagctgattgcagccaaaattaagaaaaaaaacattttgtccttgaccaatatgtagcctgcactgcatactatgagtactcataaacaaagattggatactaacttttgaattttcagtgaccctccaagcgcaacgagattatcccccagatatgcaatgcaaagacaaatttctcttgcagagtacaatagtttctccaaatactgatgtggatgaccttccacaagatactgtaagatgttctgcttttaattatgacaaaaataatgttttgtttgaatactcgatttgtctttcctaccaatagtggtgaaaatcggtcaattatggtcggtttttataattttataactgactgtttaaaaattataaccgtataaaaccgaccgtacgatttttggcagtttttagtgatttttcagttcggtagttttcgacgattttttgtagttttgagcaatttattgcagtctttggcgatttttgcagttttttaatttaaccatttttatatttcaaaaaccgtataaaaccgtcatgtcaaaaaaattgaaaccgaccgctaaattcagtgatgacgtgaaactgaaaattcagttacggtctggtcggtttcgatttttcagtttttatgaacacccgtaccttcgaagaagacactaatgtttgcggaattttgttccatattttaaacagtttaccaaggagggtggaagggcattagaggagtgcaagcttagagttgtgtatgtcacagctcaaggaaacttagacgatgaaacaacaaggagctctatgcgcagccccgataccacttgtgtaagttataaaaattgcgtagttttctttgcttttgatctcgggttttctttcactgcttaacaacattaatacatatgtgatgtagttaacaattacattttaaagttattgaaattattaagtctgttgtaaaaaaagtgtttcgttttatgtagaaccagactatacaacagctcaaggaagaaagagatttagcgattaggcaaacactgcagcttcaggtggaactggttagtacaataattattcttctacttattaacttgatttttttattgaaatgggtacttgaatttaataatagaaaacattgtaataacaaattggatttgtaacatagtttttttaaatttgtagcatggttactcaatttaattgattttatttatatgtgtgatttaggatttggctagaaggcgaaaaaacaggaaaggcgaccctggattctcctttaggtttgccgtaattgtgggattcatcggaataatggtgggcttcctttttaacctattgtcctcttcaccaactacacaaaattaaaatttatatgttcaaatcaaacttcttcataagaccttttcttaaaaatatatatatataaaaaaaaaaaattgtttttttttttagttttttgggttgaatttatttgtatacactttgtcaagtttcagttgggattggaatgggatgtttgctcgtttccttcttttctctgtatattgaaaatcttgcaaaatttatgttctgaatttcctccttcatagattatgaaacttttggtccttttcggttttgttgcaaaatttattttatgaatttctaaataaatagatggctcatgaattaatgattagcataatattggttttttctttttttgcaaagtaattagtatgatgttgtttacttcatcaaaatttggatatagaagatacgctatcaacttcacttctattttactatttacacttttgttaaatgttactgttgtgtacacaagtgtacgtgacatatttttattacttcatgttattttattttttaagaataatattaaaattatttcaaaataaaaataataatttaaaaagacaaaattacaaaaatattaaaaaataaaaa

SEQ ID NO: 33966 - DNA, 1085 bp, Cannabis sativa
tatagtttatctttgattattgaaatctccaatgaagcaggattcttagggggagagattgaatcgagatcaaaaactcaagcaaacgtatatcctccctttctttgccaaagacatacttactccagtgatgaagctcctctttgagaattttaaacgtttacaaagttgatttttaatcaccttgagccattctattttaggcattcgccacaaccatcgaacactccacattctctgtccaaaaattgaaaactaaaactctatgctcttcttctccgagtccaacatagtatcgagaatgattggatcacaacctctaattaaaataatacatcttagttatatttcatttctttaacaagtttaataatgagcataacgatcttattatttcgataaagaaaaaaacctatgattatctttttaaaaaaatttcaagcgaacaatatcccacaataggcaagtttgagacaccgactttaggaatataaaagtaccacctggaagaacaaattactttgcctaatttttcacgaattaaataaatattgtcatgattatttttccaaataaaagtgcctctagagcttttaatctcaactccaccagtgtaatacatgaaatagtgaacaatctaccatgaactcaataattgagttaggctagtcactaaacagttgtaaatactttttctctgccatgtcttgatttttgaacaaaataaaataaatacaaagttaattttatttatactcaacaaaattataagtaaaatattgtacaaataaacttaaatttatttttaaaaagaactcatatttttcaattttttcttatttatattattttgtgctagtttcaataattatttcaatttttttcacacattgttttttcttttttgaatcatgtataattttttcttaataaaatttcatattttttaaaaatagagtgttcttattaaattttggtgtgtaaataaaattctcctaaatacaatacaattatatttagacaatgctaatacagtagaacctctatccaagaatacatttgggactaagtaaattatattctaa

SEQ ID NO: 33967 - DNA, 1560 bp, Cannabis sativa
aacaaaataaacaaaaccatcttttcgaaacctcagaaataaccaaaaatccaatctttttttgctttagaaacctgaaaagccaaagttttttttttttttttatttcttcttcttctttttttccccaaaaaaaaaagcagagacttaaacagagaagatggcaagaaaggatgggtagtcaaacaacctgaaatgatttgaaactgcaatgattagaataaaagtaaagaaatcgaattgatcttcaaagcatggaaaatcgatctctattaataaatatgtgtaaagcctgatcttagtgcaaaaacgacatcagactcgttcttgcagatgcagcagtggcgatcctcgcatacaatgcggaggcaaacaacgcaagtggagcaaacctcccgatgtccacagggcccataggcaacccactcgagagtgtcagcgcaaacaacacagttatcttccatggctgtgattggttttgggagactgaaattgggttgaaatatataaatattattttgatttatacttgttgctgagccagatcgtcgtcctcctcatcatcatcatcatcggcgttggtgaactccgaaaccaaccctcaatcgcaaaagagcggtgaatgaaagtgtcaatcgtgaataaaaataataataataaaaaaataaactaaccctcaatcgcaaaagagcggtgattgaaagttgcaatcgtgaataaaaataaaaaagaataaaactgttatttttgaatagaaataaactgttacaaaaataacgttgtttaaattttaaaaaaataataaaaaaaatatcaaaaattagggatatacggtttgttagagagatatctggctaaaatatatatttttttaatttaaaaaaaattgtttgatttttttgggtttaacgttaacagtctgttaagttaatctaaataaaaaaaaaaaatattcaaaatttgatgtatgtattttttttttcagaatataagaaagaaagaaaaaaagaatacaaattaaatataattatatattatgcagaataaaataattgataaaagtttatggtgttaataattaatagtaatagtatatgagcgtaagttttggggtgattatgtagtggtcaattgtcatagttggctgactaattataattaattagttggtaaaattaagtaatcatcaccaataaaataatacaataataccaaaaaaataacggagtatttgatataataattccttgacatgatttttgattattaattttgaaatattttttatctcgaaattgttgaattaagattgtagttattacttaagagaattactctatatactgtttttttaatttttttttcttcaaatttacgatttgagtttctaaagtgcttgcagcgctagttgcaatatgagtttctttacgattttttgttgcgatttaggttgcatcgctagttacaattaatagagatttttatagggtaaataccattttggatcttgtgttttgcaaaagttacagattggaccctgtgttttattaaatgacaaaa

SEQ ID NO: 33968 - DNA, 5443 bp, Cannabis sativa
ctctctctctctctctcatacacgcccattagggctctttctctcttctcttcatctctttcacacgccaatcctaagttggccaacaccctagctagccagcaccctaggctgtccaacaccctaggctatccaacacttgagatctgcctattgattcatactttgtaatcctaagggtgctatagcagatcccacccatattgatctggatagtatttccctcagtataaatacaaccaaaaggggagtacggagtagatcattaccctctatcacaaggggtccgaacctctataacaaatctttgtgtttattaatctttcattttgtttgtgtaacacgtggcaagcatcagatctatacgacccagctgtcagttgatcactttttgaggtcaacactttgtgacaaaaaggaacaagtgttagagaattgaatggtaggagtcaataatttctgctgcaaccactataaagatttcttaatccctttatgtgttatattattattttaggaaattcatatttaggatgttagattagacataatgtaacatacatgaatagtaaataagatcttggtaaaataaattttgaacactaatctctcatggttatcaaagaggtagtgtggataaaactcttttcaacaagcacataaaagttgacttaatcattgctcaaatatatgttgatgatatagtgtttggttctacatctaatcatgaagtataggttttcgttgatcaaatgaaaaatgagtttgaaatgagtatggttggtgagctctcattctttttgggtcttcaagttagacaaatggaatgaggaataattgtttcttaaagcatgtatgccaagaatcttttcaagaagttcggtcttgaattggctaaataggtaagtactctgatgagctcaaccttgaaattgagaaaagatgaacatggagtaaaggtagactctacactttatcgtagtgtggttggtagtttactttacttaactgctagtcgtcctgatatatgttacagtgtaggtgtttgtcctcattttgaaagtaatcctatggaatctcatgtctctactgttaaaaggattattagatatatcaatagtactcttgattttagaatttggtattctaaagacactaattctaaattggcttattttagtgatgctgattaggcaggtaatgcagataattgcaagagtactagtggtggttgttttttcattggaaacaatctggtttcttggcataataagaaaaaaaattctatatctttgtctactacagaggtcgagtatatagtcgttggtagatgttatactcaattgttatggttgaaataaatgttgattgattatgattttgaattgagtattttaacaatttttttatgataataccagtgtggaggccaaaattggtctcatgctcaatatcacatgcgatgttttcaaagaatgctcaagtaagattgggttggaatatttgactaattatgatggtacgatcacaacaccaagcccaacgagcccaaaacaaaacagtcaagtcatacattaacattacgcatgacccgtcattgagctcacaatgatctgacccgtatacgagaccgagtcttattactcatctaacaatctttgaagtggtcagttaattgaccatgtaaataactatctcccacataaagtgggggaagagtgcttctaaaggagggtgagtcgtcatgagtaacgtccttccatggacgcctataagagtcactctcgaccactgagaaaggacatcaaatttcagtcatctcaatacatttcacttatcgttcaatctcattctctctaaaaatacatacttatttccacagtcaagataggtggtaacttagttcgatcatttattctcatcttttttattacagtgttaacaatcttgctgacttgaccgtcagagtcccttcggtctgcaccatcccggtgtcccaaggtttcccagttactctcttctttcttctacaggttgtcagtgcccacatacgatcatctttgattgattgtggattttagcatctacaatttggtgcccaccatggggccctgacaagctgcaatcgagcaaagtgtttcgccttttatcattcagtcaatccacaccagagcaatggcagagcacatggaggaaggagagatcaatgaggaacaaaccagctttcgtgaacaacttgccactctcacggctcaaatgaaagaaaacttggagcgcactcaagcactggaaagagaaaatgcgtcgttcaagaaagagaatgccgcaataaaggtccagcttgagtcattgaatacttcgatggcaacaccggacaatagtcgaagaagattcaaagttccaattgatccaatgcaatcacttgacgataccccaataggcggatcaagacaagtgacctgacaaccatcaacaacaagggcaactaacgtcagggttggacaacaaacaaccatagtcaatcagaatatgggttcagcagtcaattcatcagccattcctccagtagtcaattcgtcagccattcctcttgcagtccattcgtcagccattcctccaacagtcaattcgtcagccattcctccaacagtcaatttgtcagccatccctccagcagtcaacttgacaaacctgactgtccccgaaggctctctaaaccaaaaaccccttactagagcaaacaatgcaataattgatttaacaacttctattgtgaatgcaggagtgaatgttgcacctacccaagaggagttgattgaacaaataattgcacaaaaactggaaggcatggaggccatgatccaaagattcctgggagtgccaattccaatcaaaaagagcctacctagcagctttgcatattcatcctttgtagatgccattgccttggtcaaaatgccaaagaagtttgtgttcccactgatgaaaatgtatgatggaacgactgatcccaacaaccacatagctagctacaagcacaggatgttcactaccgcaatacctcgcgagttacgcaaggcgtgtatgtgtaaagggttttggtctagtctagtcggcccagcccttgagtggtatacaaacttgtctaataattctattgcttcttttgctcaattaactgatatttttgtagagcaattttctagaaccaggaaacttgagaagctatcagatgacctctatataattagatagagaagggacgaatccctaagagactatgtagcaaggttcaatgccgagaaggtgtcaatcacagcctagaatgtggacacagccgtcacagccttctaaaaaggccttctagtagaatctgacctatataaagaattaactaaatacccttgcaggactatggaggatgttcttgccaaagcatgggctcaaatcaaatgggaggaagatgaatcgaataggcaaccgatctccaactacttcagttcttgtgagaatcgggggccaagacgagtagagcgcaagtcatcttatcatgttgaaccataccccaccaactgatccagatcatttcaaggcagtggaagagctccgccccaacgatcacgtgattaccaagaaatgggacaatcatcccaaaagtttagaggctatcaagataaagcaccaatcccaaagtatactctaacaatagacattgttgaagtggttgatgtaatgaaaggcatgggaaataaattcaagtggcctaggaagattcaaaagccagaagctttgaaagatatgaccaaatggtgtgaatttcatggcgagcacggacacaccacaactgaatgtatagcactcaagtttgaagttgcaaggctaattcgtcgaggacaactacgagatttcctttctgataaaggcaaagaacttgtagcagaaggggataaaagacaagagaatccacctgaaccccctcagaatgtgaggaccgtgaatgtgatctcaagaggattagaagttagtggaattacgtattcagtagctaaacgccatgcacgagaaccaatcaacagtcaaggaatggcgagaaagccagaaatagtcgttggacagaccatcagctttctcaatgacaaagcaacagatttgttccaccttcaccatgatgccttagtcatttcattatatattgcaaactattttattaaacatgtattgatcgatactgggagttctgctaacattttatttctcaatgctctcagggatatgaaagttgacaagtcaacaatcacccgtaaatccacattcttaatagggttcagtggtgagcaaaagcactcgattggagaggtaagattgcatgtttgggcagaaggagtaaacctccaaaccaagttcatcattgttaactgtccttcttcataaaatgccatccttggctgaccatggatccatgagatgaaagttgtgccatccacataccaccaggttaacaaatttcctacaccatggggaataaagcaaatatcatgggaacaaggagaagcgcgagagtgttatcacagcaccctaaaagaaaaacagtcaaccttataggaactacaacaatcaaatgcaatgattgatctagatgagcctaacatggaggaactagacgaagtgagcattagcaaggaattcccgtagcacgaagtaccaattggggccaagcacacaccgaaacttcgagcaaagttgatcgaatttctcattaggcatcatgacagctttgcttggtctcacaaagatatgacaggtatagaccctaacattgttatgcataagttgtagatagaccccaatttccctcaagtcaagaagaaaagaagaaaatttacttccgaacgcaacaaagtgatcaatgaagaaattcaaaagctcatcaacattggatcagccagagaggtcaactatccagaatggctagccaatgtagttgttgtcccaaaaaagaatggaaagtggaggatttgtatcgatttcacaaaccgcaacaaggcgtgccccaagattcattctcactccctcacatagatatgcttgttgatgctacagctgggcaggagctccttagcttcatggatgcattttctgggtacaaccagatgcttatgcacccagatgatcaagataagacatcaatcatcacagaacaagggaccttctgttacagggtaatgcagtttggactaaagaatgctcgtgcaacatattagagattggtaaattagatgtttgcagacatgctagggaagtcaatggaagtatatatcaatgacatgctcgtcaaattgttagcagcagcagaccacctcaatcatctcgaacagtcattccaggtacttgaaaaatataatatgaaactcaaccctgccaagtgttcttttagtgtttcctc

SEQ ID NO: 33969 - DNA, 1435 bp, Cannabis sativa
gtcctgatcatgtggaacaaacatgtctttaatcaactcaacatcccaagctctcctttccatctgtaacaagctatcaaccgatctaccagcaagattggggtgataagttgtgacaaacttattgtctatacctggtagccaaggatcttgaaggatagaggttgttttactatcacaaatggatcttcgaatgccagcctgtagtagttcttttgcctccaagatactacgccatatgaagcttggattcggacccaactcagcattcaagaaattgccttttggatagtatctggccttatacagcttagcaaccaatgactcctcattcgtaattaaacgccagccctgttttcccaagtacgccaagttatactctcgtaagctcctaaaacccaaccctccagcatctttatgtctgcataatttactccaactcacccacggaaccccttttgttgaacctttggattgtgacttccaccaaaaccttgccatcaaggcttctaagcttgagcagatttctttagtcaaaagaaatacactcattgcataacttggaagcgattgagcaacggatttcagtagcacttctttaccggctttagagaggaatttagactcccaaccttgaattcttttaatcatcttttccttcagaaaccccagaatagcattcttgttcctacccatagtgcacggtagtcccaagtaaaaactattgttattagcaaccaccataccaagcaaaccacacaaacgaaacctcatatcatcttggatgttattactgaagaaaacagccgactttgtatagttgattttctgacccgaagctttctcgtaaacttggagcaatcgtagcacattagccgcttcatactcattggccttgcaaaaaatgtaactgtcatcggcgaataacatgtgagaaacaatgggcgcatttcttgcaacacgacagcccgtcaaccactgtttttgcacaaacatcttgaccaaagaagtaaagccttcagcacaaatgagaaacaagtagggagataaaggatctccctgacgaattcctctactcggggtaattggtcccataacattcccaccatgagtaactttataaacaacagatgagacacagtacataatcagagaaatcatcttccaaggaaagcccatttgaatcatcatcttctcaagaaaaacccattccactctatcgtatgccttgctcatatcaagcttgagcgccatagtacccgtcttacccattcgtttcctcttcaggtaatgcattatctcaaaagctatcatgatgttgtccgaaattagcctcccttgtataaacgcactttgtgtttcagaaatgacataaggaagaacacctttaagtctattggccaacaccttagctatgatcttataagcaacatta

SEQ ID NO: 33970 - DNA, 2648 bp, Cannabis sativa
aagagtctgaaaaaactcataaatcgtgtgttgtctatcagcttcatcttttgtaatactacgagaatggagttaaataacagcactacatgtgaacaagtacatgtttattgccttagagttaaaagaatgggaacgggaacgggaacgggaacgggacattgaaacacttgttaaaagaatgggaatgggtatgcgaataaaatttaaaaaacatataaaaaattattaaattatttctaatcatgcattaaaatgttatttccttccatttcaaaatgttctctcaatgccatttgatcctggaaactccttgtacataaattttattattactgtttcttgaagaattggccgaatgtattaataccagaatgacactaatttgatattataattctcattaattggtacttgcccatggtatctaatgcccagacttatttatgtgtctgtgcatctcgtttttagggcatataatgaatctcttacaggtcatgcgacacagattgccttgttatccataggctttctgttactttttccctgtttatatttcttttttcaaataaaaataaccacaaaaaacctttttcttaccaaaaagctaatgatattaaagattgaattgaaattataacctgaatatgtttagttgcctaaatggagaagacaaggcccttgtagttatttgcattggctaaaaagaacattcagcagtggaagtaatgaacttagatttaaaatctattttaaggcctttccattggttaatccgaaaatattggaggatgaaagtagcagtggggctcatgtctcattgttcaagatttatacatagaggtgttttatccatgttaaattttattatttaactttgatccaattaattttagtcatctaattgatttaacattcaataaatatttctattaaaaaaaaaaaaacattcaataaatattttagacttaattatttttggatgggattgatttatgtacacggtaagtcaaattttctttatataaatgcctggatagaattatttacccaactcagtaagggtgggagggatagttaaggtgagactacaaggcctatatgactatgatcgaatgaaatgaatattccaacacaaatgggttttattatgaagtgttattctaagtactccttcgtggacaactgcaaaatatttttgcctccctcttacggtctgtcaaggaagctaggttttagtggacgtaggccaaaaattagtatacatttccaatcaatgagaagcaaatgataaacatacaaattcttgtaaaattgagaataagataagattttcattcggtatacatgccagaatcataattatttcaattttgttttttttttttttaattttggaatggaatttttggagattcccctcacaaattatctctattatttctaatcttatttagttcacagctaaagaggttggacgataattcatccagccagggacagattctgcagcaaactttagaaaatgaaatcttatatactctccctatagttttggaaaaaagaatcagttgatttaattattttaaaaatattaaatcacttctccaataagtaattttgtatgaaaaataaattaaatagaaggtatagttttaaagtaaaaataaaatatgataacactaaaaaacatcaatcatgtaacactttctaagatatcatctaagtagtgttaaggctagttccaatggtagtagatatttttcttttttagaaaaagaattgtacgtaggaattcaaataccagtaacttgtatatcctaaatcatatataaacaggaaaactattgtttttttttttttcattcatcaattacatttttccgaaggaagtaacaacaattccacaatataaaagaatgtaagggacttggaagcaattacatttctacgctaagttcttatggtttaagtttctctaccccggtaaaagcatcttctcttatgcccatttgtaaccaattaaaagaattcacatgtatttggaattgagaaaacctcttcttgcacaaagagactcggtattcatttcttgcatgcaagatagatacccgatataatggctgccccaacaactgcacaaccaaaagttttaagtacccgtccacctgaaacagtttcctttttcgtgggaagttccataagatccttcaactgcgaaatggggacagacaattgatcagtgcaacgtaaagtgaacacaacacaacacgtctcaaagttacaaacagataccaactatgttagatggcgtctgagaaagagatgaatctgtctactatttctactttctagtttctgaccaataatggatgacatgaccatgtattttatacatgaaaggtttcaatatattgtgacaatgatgactgatgagctaactaggaagatgaagggatcacttaccacaacaggctgctgccaatgctttttaattccttgcaggtgcccctttccaacaactgctactactgagctgcgctctctggcaattcctagtaattttaacgacatgtacctgaaataagcaaccatttaacaaatgaataaaacataagtagttctagaatatgatccaagaataaatg

SEQ ID NO: 33971 - DNA, 3346 bp, Cannabis sativa
tttttttgtacaattattgtttaatttatgtgtattttttcttgtgtatattcttagtttattccgcacaatttttgttgttgtatatatgtgcatttatattgttatttttatatagttttttagtggttttcggaatatttttgttcaatagttatttttttattcaagtatttttttgttatggcgtatatttttagtttcttcttgacaattttttttattgttgtatcgatgtgttgcattataatttaaatacatatatttaatttatttctttttttacatattttattgaaatacaatgataggatttttcattttttattaacacaatgtgtagtagtagattttaacgtattaattatatattactcattatattatataccctattttgaaatcgtaatattttattatttcaattattaatgtaattacttatttaacttttaaaaatacattattattttaattgtgactaacttaaaatgaaaaaagaaaaaaaaaagctgaaagtgttaagttgtaacaacaaatttcatgaaaaagaaataatgtagtagtacaaaaagataaatcaagttgtcaaaattatgtaaaaaaatcgtaatacaaaaatatattgaagagctgatatttttttgtatattgtaattaggtcaatattttttttacttttctattgttttgtaattattattttatttttttatagttgttttcatgttgtttaattattaagtcattttagagttattttttaactctttcaattgttcttaagttgattttttttttatttcactaaaatataatatttttacaattttgaaattttaacatagtattttaaaattttaatacaataaaaatataaaaaaaaattaacgaaggtaaaaaatacattaataatattaattataataataataaggctaattaggatttttattccctgaactttaacatataccaaatcatgttcctgaacttttcaggccgttaaaaaatctcgtgaactattgaaattgttagatttaaggacttctgtccaatttcattcaattttactaatatgacgattgtccatatactaattcttgccccttgaactttgatatctactatatcatgtcccccgatctttcaaaagtataaaattgtgccccctaaattttcatccacgtcacactttgtttagtaaaattagataaaagtccttaaatccaacaatttcaatacttcaaaagtattttttaatgacccgcaaaatttaaagaacatgatttggtacatattaaagttgagaggacgaaaatctaaattaacctaataataataataataataataatttttgtaagattcaaaaaaaaaaaatgatgacagtatgtatcatatgatgacgacgagcgcaattacgcagtatattactgatgatttgtagttttaaaattcctttttactttcaagtttcaactcagaggacaatcacatgttacgaactttcttaattactatttccctgccggcggccaacaaggagagctgtatatatatatatatgcgtgtggttgcgtttcaatgtaaaactcccactatatatatttatatgtatgtttaaatagtcaatattatataatagcaagattgaattggtacatacacaatatttaacatgcaatatgtgtgttcaaataactatagtaataatctttaatcttatatagtagtaatcttatcggttcacatcaccacgtatctatatttataaagaatatagtagtgatatgacattttaaattttctctcaatattattattattatttttaagcaatgaataacttcattgaaaaatgaaattataatgttatacaaacttaaagtctcaagaaaccctaataaaagaagaaatctcatcaaaccaaactagttctctatccatccaaagagcatgccgagctaatccatgtgcagcattattggctgaccgatgaacatggactagggatgctccatggaaactggacatcaaactagttaaatcctctaacaatgaaccaagttcattgaggaaagaagagcgtttagaaaacacatttacaaccgctaaacaatcagattcaacaaaatgtaaaaaaagacccacagtaagagctcaatccaatgctacaagtaaagccaaacactctgcttgaacaactgaaaaacaacctgcaaaataataccaataaaatgacattaactctcaaagaactaagaaaagataaattaacaagacaaacttattaactcatgctaataataataacactaataataaagatattaagattgtaataaattatatgtaaatataaatatatatatagtatatatattgaaggggagttcccctttaaaaatcacgaaataataattaaaattacccattaatagtttagacagataagcaactatagaaccattcgaatcccttataacggctcctattccaatggtttgggaaaggttatctattgctgcatcgacatttaatttcaaacaaatgtaatcactagaaaacattgatcttattattctcataagtcatcttaaggatgaaccaaaatactctttgaagagcaaattgttcaacatgcatgttgtttaaaaattgtaagtaactactaaataacatgacttattagaattttattattgacttgtggattattaatgattaattatggattctcaataaccattaaaattaaaggttattatgaatcataattaatctaatacttgaggtgtaagtttgagaaaataaatgatcttttctataaactaggttcctagatcgatcgcttccactgatcaagtcaattcttaataccacagtttagtattgtgagatggataataaaatatttaacccttagaccttatagcttttctgatgaaatgctcatttatggtatttgggcccaaatcttttctttgacaattgtactctagctgcatacaagtatttttaaattgtgtgcatgtcatgaaatcggattccagccttaacacaacttaaaatacgtttaagaaacaactttggttagaacacgattcgatatgtacactcctattgaagagtatcaattgacaaagatttagaaaagtttggagtttgctatggaaactccaccccatgtccaacaattcttagtttcttaaacctgtcacacaccataatttgggtgtatcaggcatacgtattaggaaatgaacctatagtttaaagaaactttgcaaatggactgggggttaatccatactcatgaattttaatgtagtattctccattt

SEQ ID NO: 33972 - DNA, 4224 bp, Cannabis sativa
  modified_base (244)..(252): a, c, t, g, unknown or other
attaaactgacattctaaaaataattcaaaaccagttaagaataacctcaaaataattcatccattaatgtcgtaacatttctaaccacatcgtcaagtttccatagtcgctgggcccaaaaaatatttttatttcaaaaatggtatcctcgatacccacatatcccaatataatctccgtaattaataaattatgcttaatataatcatttaataaaccctcactaattaccctaagtaagannnnnnnnntacttcattaccaaaataattacatatttaacaaaatatgtccaattaaatactatattaatttctgggatattataaacaccattgggtcgccctgatcgacaaggcctcccctacgagtttgtacaaccatcttatttacctctcaaaacttaagacaaaggacttgtgttttttctctcaatgaaagcaccaaaccttgcttctaaccaacgcagtgagtcaaagatgaagcgattagataaaataaataaaagaaagaaaaaacaataaaataaagctaacaccagatttcaaagaggtttggccctataagtgtggtaatagcttactccccttgtatttgtattgacttgagacaaagatacaaggtgttattcctctcgaaagctcttacaattgatctttgagtaagtttctctcttagatcactttttttctctatagaatgtatttctgaagcaattatttcgatcctcttcattgcgaggcgaggccactatttatagggacttagtacatgagggatggtttcccttttgcatataatgaataaaataggaaacaatattaattctataattacaacatgagaaataggaaactaggatgtgttgatgttattctttgactcaatcccgtgattataaggattgtctttgcgtctggacacaacgagattaatctctaatattccatctttcgtgcttcgctcgacataagcacatatgcatcttggtcggacatctacctcaccaacttgctcgggcatctaagcgcgacggatattgatcaatcataactgggttgctaggagtatgttcctccgccaggtatcgaaaatatgggacacatctcatttattcctattgccacgtcatggtgcaaaaaacaggataacaaagagaaatttgatatctctaggaactctagatgatgagggatatgaatacaagagtggtaaaggaaccatgagaattactagagaattagtacaagtttgagaggtatcaaaaggtatggtttgtattttttttagatggtaaaacaatgactctgcactagttgtagcagtcactaattgcaattatgattctaaactctggcatgtcagattgggtcacattagtaaacaaggattagtagagctttctaaacatggtttatttatgaattatactcatgtaatttcaccatcttctgagatttgtgtgcaggggaaataacacaagattaaatcatcaagcagcaacaatagagcaaagaaggtgttggaatagttgcatgataatctttggggtgcaagcacgataaagacccctggttgtaactaatattttctaactgttatagatgattatagttgaaaagtatgggtttatctattaaaacaaaaattattgtcttaacaaatttaaaaattggaaaatctttgttgaaaatcaaactgataaaagggtaaaatcattatgaacaaacaatggacatgagtttattaatgatgaatttgttgagttgtgtgtagaaacaggtattcaaagacataatacagatgtcaaaaaccctcaacagaatgaggttgttgaaagaatgaatagaacctcttaaataaagtaagatgtgtcttacttaactctgtattaccaaagaaatattggggagagtctttgaacacttcatgttatctaataaacagaagtcctagtagagttaataatctcaaaactctttagaaattgtggaatggtaaacctccctcattggtgcatctcagaacttttggttgtgcagcatatacacacagtgtagaagacaagttgggtaagagatctattaaatgtgtatttttgggttatcaagttggtgtcgaagattatagacacttatcagctgaaacaagcatgattttgattagaagagatgttatttttgataaaaatgattttccctttaatagaaatgagaaaggtattttgtttgatattttaggtaacaattcccaagctaataaagaggtgaaaattgaggtggaaccagtaaagactactctagacacacaacaacaaggtgaaattgatcaagaagtagaagaagaaagtcaagcaaaacacctaggagactaccaattagatagggacataattagaaggaaaatcagacctcctgctaagtatggtcaagttgatatcatcgcttatgatctatctatagccaaagaatcaaaggaagtggtgccaaggaactcttaggaatttattacgagcaagcactctaagaagtggaactctacaatgaatggagaaatcagttctttgaagaagaacaagacttgggtagtggttttaaagcctgaaagatagaagatcataaggtgtaaatggatttttagagtcaatgatgggataactaaagttgaactaaagatattcaaggctagattggttgctaagggattcactcaagttgaaggagtagactacttggaaatcctctctctccagtagtaaaaatgaagacaattagaatgatgattgttatagcagttcaacttgactgggacatacaacaaatggatgttaagacaacatttttatatggaaaacttgaagaaacaatctacatggaataacctaaaggattcaaggtggaatccaaggagggagaacttatttgtttactgaaaagatcttgatatggtctaaagcagtccccaagtcaatggtacaagatgattgattcagttgttaccaaggtaggctacatcaaatcaaagtatgacacatgtctatacttcacaaacttgtattcacaagttgtaacattcttactgatatatgtagatgacctgctcatcatgggaaaagaccaaaactaaataagcaagttgaagtatgtggtgaatagtgaatttgaaatgaaagatatgggagttgtaagaaagatactaggtattgagattctaagagacatcaaggttgttgttgatacaaaagacatacattgataaggttattaagaagtttaacatggcagatagaaagaaaactcatgtgcccctacattttgtgttcactacagaacaatccctaaaagatgatgaagcaaattggaagtattatgtatgcaatgattagtaccagaccaaatatttcatatgttgttagcactttgagcagatttatgtccaatcctagtgaagaacattagaaaggactgaagtggcttctaaggtacctgaaggcaactttgaactattctttaaagtttaaaaaggtgggcaacaaattagaattagaagggttcgtggatgttaattatgcttccaacagagacaccaaaatatctatcactagctattgtttttagtcgaattccttctgcataaattggaaatcgcatcttcaacatgtggttgcattatccactacagaagttgcatttatggctaccacagaagcctccaaggaagtaacatggattatggaaatcctacatgaaatcaacatgcagaaaggaaaagtaacaatatttttaaacaatcaatcagccattcacttgagcaaaaacccaatctaccatgaaagattcaaacacattgacataacgatgttttggatcagggacaagatagaagctagaaagatcgagctagaaaaggtacctatggaagagaaccctgttgatgtaggaactaaagtgttgtcagtgaacaagtttaaacattgtttggacttgctcaacatttgatctgttgaaaaactcaggttcactcccccaagagcaagctatctttaaatttttatggattaaggtgaaatttgtggtatgtaatccataaaaaattaagattgtaaacaaacttccattttagttaagaaattcagttaggaagttaattaaaaggttgttagtttgagtgagtgagaaggaagttagttagcttgatagcttaattaatgtatatatatatat

SEQ ID NO: 33973 - DNA, 2163 bp, Cannabis sativa
tgggtttaggttcgagtctaggtcctggtcctagtcctggtcttagtcctagtccggttcaagttccaattgtaatttcgactttgagtttgggttcgattttgggtcgaggttcgagtcctggtctgagtttgggattgggtcaggatctcaatctaggtccggatcgggctctgggtgtgggttagggtccgggtttgggtccatgttcttggccgagtccaaggtctcgttctcaatttgtgtccaagtttagttttgagtctaagtcgtacgtttcgatcccagtttgggttcgagttcgggtttgagtgcaggcgtaggtttagttctgattctgggtatgggtctgagtttgggtcccagattcgggtccaattttgggtttggggtaggttttgggtctgggtctgggtcttactactaatttctaggtccaagacaggtcctggttcgggtttgagtcccgaatttagatctaggtctaggttccatggcctaggtccaattttgagttcgagtttgggttcgggtttggtcctggtatgggttcgtgttcaggttcttgtcatggtttgggtttgggtaggttttgggtctttgtctgggtcttactactgattcctaggtccaagacagatcctggtttgggtttgagtcctgaatttagatctgggtctaggttccatggcgtaggtccctggtcttggtgctcaatccaagtctagttcctaagtcctggtctgggtccagattcaggttcgggtcctaagccttggtagtagtccaggtctgggtctaggttcgggtccaggtctccatcccagtcttggtctgagttcaggttcaggtccttgtcagggtctagatccttgtcttgctcgcgggtcttaggtcccggcgagagtttagcaccaggtcccacttcaggtctcggtctaggttcaggtcccaagtctcaagtcctagtcctagtcaaggtatcggtccaggttttggtccaagtttgggttagggtttgggttcggttctggtctcaagtccaatcctaatcacagttccagttcctattctgggtccaggtttggcttcgggtctgggtatgggtccatgttggggtcggggtctgagtcttcatctaagtttgggtacggagtttttggatccgggtctgggtctaagtctgagtctggggcaaggttcgggtcctcggtttgggtcataggttggggtctggtccgggtccaggtcccgtgtttcgatcctagttggggtctgggtcaattttcaggtccaggtcttggttcgtgtccatgtccacgtctgaatcccagtttaggtcagaggctttgtatgggtcagagatcgagtcccgagtttgggtttcggttcaggttagagtctcattcctagtcttggttctgcactgggtcaaggatcgggtctgagccctagttccaaagctgggttttggtctagttccgggttctggtccaggttcaggtcctcgtcacgatcccgatcctgttccagggtcctggtcatgttttggtttcaggtcccaagtctgggtctgggtccaggtcctggtccagcttttgctccttctccgagtctcagttcaagacaccgactatgggtcttgtccaagccccagtttcaagatcctgggacaagatctagatcccaatcacacgtcctactcttgttttggttcatgtaccaggtcccgatctgggtctcggtttagctccgggagtgagactttggtgcagttctcggtctcaatcccaattcttggtcacgagtcctattccatgttcgggtctgagttcaggtctgggttggggtcccgagtcccggttcgaatttggattcaggtttgggacccaatcccatggtgggtttatgtccgagtctgggtccttgtccaattacagttttgggtctaggtccaggtcctggtcttggtcctgttcttgagtcccgatccgcttcttatttcagttctagcttcaagtcatggggtacaggttcgggtcaagtttgtggccgagtctaggttcgtgtcctgattttggtccaggtcgaggtttaggctgttaggttttatgccctaaataaaactccatttcaatgtaatctattttattcaacatcaat

SEQ ID NO: 33974 - DNA, 2104 bp, Cannabis sativa
gaggaagaagcttccatcttgcctgctttgaagttaagctaccttcatctatcagtagagcagagacgatgcttctcttattgtgctatatttccaaaggattatgaaataaaaaagacacgattaattcatctttggatggcaaatgggctgatttcttcaaagccagaacttgaggtagaagacgttggaaatgagatgattaatgatttatgttggagatcatttttccaagacatcacgaaagatcgtgatgatggaagtatcatctatttcaaaatgcatgatttatttcatgatctagctcaatccataatgggtgataaatgtcataatgtggaggttaatggtgagacccgtactatcaatttgtcagaaagagttcgtcacttgatgtgtcaatttaatggagagggaccattttctaacataccaaccactaaatccttaaggactttcatggcattacaaaatcagacatcatattgtgataatgatgattggaattttcgctcattgcgagcatttgatagcagattgttttgtcttaatgctgcatccatgtcttcgttggtcagtaatttgaaacatgtacgctttttgaatctctctggtagtagtgttgaagtcctccctgactctatttgtttgctacaccatttgttgactttagacctaagctattgtcgttttcttcgtaagctacccaaacacatgattcgcttgaaaggtctccgccatctttacattgaaggctgtagcagattatcacacctacctccaaacattgggaagctaagttgcttaaagactttgacagatttcattgtggctaagagaaaaggttgtcaattggatgaattgaaagacctgaacataggaggcaatctactcatcagaaacttagaaaatgtgaagagtccaattgaagcaagatttgctaatctgtcagccaaaagaaacctcaaaggactgcatttgtcttggaataacaatgaagatgaatctgaagggaatacggaaggcgtacttgaagctcttgctcctcccacgagtctgaaacggttggagattgtcaattacaatggttcccatttcccgtcttggttccgtgatgacatccttggaagtgttattcgaatcactctgtataattgccgtaactgtagagaacttccgccttttgggaaactaacatctcttagacatcttcaggtatctggaatgaagttagtgcagtacatagacaatgagttatgtcatggggacttaagaagaagaagctttgaacgtttagaaagtcttcacattacaaatttaccgaatttggaaagattttcaaggcatgaagttggtaatgaaatgttcccatgtttgtcttccttgattgtggaaaaatgcccaaaattgaccttacctaaagtaggatcagttaaatccttaggggtggttgaagtgagacaagaatttctcaactccatctctaataatctccacggtcttactgatcttcgaattgctgataacaatgacatgaccttccttccccaaaatctgctaaataacatcactagtctacaaaaccttacaatctatggtttcaaaaagattcaagagatgccgactgatttcctcattggccttaatgcactagcgtctttagaaatcattttttggcctgaactggagttcttagccgaaggtatttttcaaaattgttccttgagttcaatcagcattagtggttgtaagaaattaagatctctatctgaaagttttctgaatcttactatgctcaaagatctaacacttaaggattgtccaatgttgaatggctttccaagtggtcttaatcaactcatatctctccaacgtctgcgtatgtctgggctaaccataacctcctctgatgggtttacttatagaggttcattacgtgattctttcaagttggttgtgctgcccgagggcttgcagcacctctcctcacttgaatatttggaaatatctaatttctcgaagcttgcgtcgttgcctgattggattggaaatcttacaactcttaaagagttaaggatcgaaggttgtccggatttggaatgta

SEQ ID NO: 33975 - DNA, 2104 bp, Cannabis sativa
  modified_base (2061)..(2078): a, c, t, g, unknown or other
aacacttctcccatgccacaaaatcaaaagtacaaagaggagaagtatacctacttcaccctcctggcggagaaacttgaagccatcttcatggccactcaaagaagagtcccctacagaaagccatttctcatcaaaagggagttgagcaagagggacatgttgaagttctgtcagtttcacgatgacttaagccatgacaccaatgagtgtcagaatctaaagagggagattgaatacctcataaggcagaacaatccccacctgcatcgttatgtgcaaagtgaccaaactcaagcacaaggtgcccagaacggagatccaatgccacctccaatggtaggacacttaaggttcatcattggtggaccccagattgtaagagagactagcaaagctagggagcgctatgctcggacactccgtcacaagcctaaaagtgacatcctggtagttgaagacaggggctctaagcaaccaaagcttggagagcctgtaatatctttcagagaagaagattgtgctcaagttagtttctcgcacaatgaccccttggtcattactgcacaaattgggaacatgactatagcaggatgcatggtggacgatggagcctccttgaacattcttctcaagtcaacgtatgaaatgatggggcttcaactcagcgacttggcaccctgcaatcaagggatgcatggattttttggcaaggcatcgcacccatcgggtatataagattacccctcactgttggagaaaatccaaccaccaaaactctaatggcatagtttgtcgtaattgttgttccttcggccttcaatggcatgataggtcgacaatcccttaatgacctgaaggcggtaacttccatctaccacctatgccttaaatttccaacatggcgtggagtaggatatgtgagaggagactaatagtctacgggtcacggttacaacttggccttgtccaaggccaagtaagagaagatgcctgctaagagctctgaagaggagcccaacaaagggcgatgaagtccagcctaaaaaagggacacactcatagatcctcgctttggggatcctgccggaagctttggagctgtaggacagttggaagaagtggaggttaatcccattctcccaacaagaagacttaagatcgggaaaggtttagcacaagaaataaaattattattgataaaatttgtaagggaaaatctagacctatttgcaaggtcatatggaggcatggtcgaaaatgacccctccgtgatgacccatgcactcaacatcgatctaaacatccgacctgttcaacaaaagaggaggttgctagatgaggagtgcacctaagtgctcaaagatgaggtcgagtggctacaagcccatgacttcatagcggaggaattctatccactatgggtatcaactaagtactggtgcccaaacccaacaaaaagtagagagtatgcatcaacttcaccaacctgaacaaagaatgtctaaaggactactttttgcttcttagaaccgactagcttgtagatgccatagctgaccatgaaatcttgagtttcatggatgcatattcaagttacaaccagataaagatgcatccacctgatcaggagcacagtagcttcatcacaaagttaggcctgtactgctaaaaaatcatgccctacaagttaaaaaaggtaggggttgcatatcaaaggcttgtaaacatgatgttcaaagatcttattggccacaacataaaggtgtatgtggacgacatgcttgttaagtcaaaaaaggatagggcacatgtggaggacctagacgaatgctttaaaatcttctacaactacaacataaagctcaaccccctcaaatgttctttagcaataggctctggaaaattcctttgcttcatagttaatgccaggggaatagaagaaaacctagacaagatccaagcccttttggatatgaaaatacccaaaattgtaaaaaaagtacaaagcctaacaaggcgcattgttacattaagtagattttgttggaaattattttnnnnnnnnnnnnnnnnnntaccatgtatgtttcattaacatcct

SEQ ID NO: 33976 - DNA, 1639 bp, Cannabis sativa
taggtaaaggaggtccttgaaaataggaaaaataattcaaaataggaaaaaaaaattggctaagtttgaccgtaaatgatgatataacagtcaaaattaacttctgagattgatagtcaattttttgagcctgggccgcagtgggacttgctctgggtaagttcgagcttatttttgtaactctattggagtaaaatttgaggttgatgacttcagaattgggattaaaatgtgagacatgacttaataaaagcattgaaattaaataacttcaaaactaaaattgaatcgtgttaatcagatcaatattgagtgagttatgaccattttactgaaggttgttcaaggcctagcatccaaattgacatcccaatgcagttgacatctaacgcccaggttaacatccagcgtgcatattgacatataacatcaacctggactttgggtgagtgaaaaaacgtcctagggatgtcttttttgatgcctaaattataatttgacatcacttagtttgttctgtgttctggaaaaattagtcaccagctcttggagatgttgctgatttgcggaaatgaaagactgtaaactcttcattaacaagtggtcttcccatgttaaaaatgagaaatgcaaagttttgaatttgacttctctgaattcatggatcttagttattgtgaaaaactatatggacattcgaagtagaatcagataagcagaacccaacgcaccaggccatttatcaacttgggcgatgggtgcttatttcagagcttcctggatgtcgttttgatacttataagattctagaacttgagattaaggtctccctcttcgtttttgaccatcctggaatgaatgctcagaccagatttgacatttggatcatcgaaaccagcacaccaggttgattgtcaacttgagcgctaggcccaacaccagctcaacttgggaactgtgctctgtttccaggccttcgggtttgtggtttgttccccgagtttgcttgaatcttcattacttctgataaaaaaaaatgccctgaacacttttttgagaatttgattagaaaaggctcaggttgacaacatgtaaacctgggcactgggtctcagtttttgccccttggaaattttgtttattcctagaaatagttgaatcttaatttttgctaaaaacagagaatatgctaagaagagttcttggaaaacatcatcggaattggcccaggttgacattgggcgctacgccttgcttttggcaccaaggaagtgttatttcttccccgaaattacctatttccccattttttatgaagatgaagatgatgcaaaagtcggatcattgatctgataaatggaagtcgcctagagtgataaattgtcaacctgagtgatgggtgcctgggcaccgggtactctgggtgctcaaaaatgaactttcgtcgaatctgattctgatgcctcaaatatgtctggtatctctagttcatgtccaaatgcaaagcttgacccatttgcactaagacggtcacgaaaactgaaaccctagttagggatgtcaacctaggcactgggtgaaacagtaggtgcccaagttgactttcggggtgtaagttcatgcaatttcagcttccgag

SEQ ID NO: 33977 - DNA, 1428 bp, Cannabis sativa
caccatggtagagtcgacgttcgcttcaagcttcgaataagattccatgtttggtgtcgattgcctctgttgggttcaccatacaacccagtaagtcgccagggagaagaggacgggttgataatttgaatgtcaataaagttgaaagagtaatgaagtaattgggcttcagcactatttctccaaagcattgcaattccaccactatgacctcttgcatcaaccgaatgcattccttcaaagcccaacttgacttttaatctttcaataataccactattactaattgtttcacaaaggaaaagaaaattgggtttcttttggatcacgagatccacaaggaattgaaaggcccatgggttcccaagcccacggcaattccagcttaaaatactcatggagagcggtgggcctgaacaccagagcccaccaataaatcgttttttgaacccaattcgaaactggctttctgaacaatgaccccactatcatcctcttccatagtttcacttgttagcccgtatacacttgcagaattaacttcagagtggcccacttcaattattgtggtagattgcattggtttcgtacggcgcctcttagggtcaactattacatcaccttccaattcttcactaaaaacatctccttgatacactccaccatttttggaattattccccattaaagtctccataatttcctcactccccataacaccttttgatttaccaaggttgacttggttttgaattgatacgtctggattccttgcgattggttccttgatcataggaacgtaattgattcgttgctgcccattcacactgctggatgtccctcctgtgtgagctgtatcatcatcttcaccatcacgcagccactgacttccgatgaggttgtgtcgacgacgaggctgtgccctcatccatactccatacggcttaacgatttgatctaccggagtatcaaaacgttttggacagaagttctcagagtgtccaagcaaaccacaaataaagcagaatgtgggaaggaattcatacttaaacatagcccaaaaaccttcatcactggtgtttcgtctcagtttcattctacgtttcaaaggtgcggtaacatccacggttactctcattcgcatatagtccctccatagacctcgaaagttcttcggatcggattcgatgaaagtaccgataaaattgcctgctctctgtagcacattttcagatttgaaaccatattgtaatccatgaacttgaacccagaaatcaagagagttgataggaactaatcggggattgtcagttggtttaagctttgtgaaaacaaattggattcgattgaaagtccacgggcttccttcgataactcgtttgagatccagttcgtggtagaattggaataagaatcgattaggctcta

SEQ ID NO: 33978 - DNA, 1388 bp, Cannabis sativa
gattctttagttgtattcatataattacaatatttttttttatgaatataaaatatttacttcaggaaatatttgccaaaatttatatcgatattagattatttttcattatcctcaaagaatacaagaacatatatatgaatatatattcatctcttttattatatttcagtcagttatatgatgaatattatgtctgcataatcttcaggatgtatgcaacattttattgaagacgcataatctttatgatatatgcaagattttactgatgatacataatcttttgaatatgtataatttatgtagattttctctatcatatcatagacacgcatatattgtaaatattataaacaataagaacataatatatatatatataaaattaataataaacatataagaataaaaacatatatatacacatatagtatatagatattaaataaaaaaaaagggttctaataattgtttcagttagaagagtatgtacataaatatatatttagtgtatcgttaccttaaaacaatattcaagaactttaacaaaatatttaccttgcagcttgaggagagactcgtgctgataacgtattataaaataatatagaataatataaaatagataagaagaagatgagagaaagagaaattgaatgagaactcagttgtttattctaaccaaatattaataatgataattaatttaatgatttggatatccataaataatatttcataacaaatacaatttaagaaaaaaaacaggaaaattccaaaaagggtaaaacattacaatattactatgggccggcccattcaacatttatacagcccacattgaaaaaattacaaaaataccacctggtctataccttaagccgcacgtcacaaacggagacgatgaagaaacctccatcaattcaatctgcaacgcaaccagaatgaaaccagaacaagggtagaacaaccataaattccggcgaaatttgattggaaaagacgaactcgaatgatctaaacagaaaattaagaaaaaaaccagaaaaaccgtgaagaaactgaaattaaacatttgatttcggttttaatcattaaaaatcactcaatccagaattgaaaatccagattcaagcaatgtaattctttattaaacagatctggagctccccctcaaatccaaaacaaggtatgataagaaaatttattcaaaaatgaatctacgtcatatacagttgcattctggttgattccctggtttacaacaggcaattcatattcttaaaaacaaaaaacaagatctgattctaattaaggaacgacatgttacgaataaggtcgtttctaattttttgtgttgccttatgttgacttcgcttttagcc

SEQ ID NO: 33979 - DNA, 2189 bp, Cannabis sativa
  modified_base (1484)..(1484): a, c, t, g, unknown or other
taagtatgacgaaaaaatgcaactgattctagtaccacggtattggaatgtggaacatttaagaaaatactacaaataaagtaccaggtaagatgaccactttaagtattgaatgaacatttacttttaagtaaatggcctgctgggcggactacgctcaaaggtttcgataaaagaaaaaaagtactcaggtcgggtgaccattttagagtacagtttcttatgtttgcaattttttttatctcatgttaagctaaaagatcagattggatcaaataactctgatgtaagttactacggtaacaaatacacttttcaatcaataaatgaataaagatagttatttcaaaattcagattgagtcgaaattattagcatgtttctaatttaccgtacagtgcgtacaaaaggtttggtcaaacctaaaatatcgaacaggtgaacaatatacttgtaaaagataagtgaccaagagtaatacgtctgctcggtcacttggggggcacctatacctgtacaaaacatttggaaaaaataaaacaatcacaattgcacgatgattataaacagagaataaaattcattaaggataacgaaagcatgtagtactgggatcaaaagctgcccggtccgcctgttacccgaaaaatgaaaaataattccaagtttaaagatcgcttggccggtcatgatgtcttagaaaaggccccaaggccgaataagatatataaaaataaaaagataaaagaagaagtatttaagcagttggagtcccaggctcttgattcgagtcttttgggccggcaggagctaggggatctgttgtttgaatgggaggtacatcagcagtctggccggaggtagaagcagcagcctcagtttcaccataggcaatttgggaagcgcagaactccagatacctgtccttagcatcacccaagtagtcgaagttggcctgaggattagccttccaaaaatcaaagaagagctcaagaccgaatgtgtccaaggcattaaccttctctttcagctttgtcacctcggccgtaagctcctcctccttcacccgatgaagaactgctcgaggagatgtcctttcatcctgaagactgttcacttcaacagataagggctcgatggtctcctcaagacggtcagaaacctcgagatccttagtcagctcagttatcttcttctgggcagcaaacaacttcttgttggcttcacccaactacaaccgaacagctctgacttctgccctggcgtcttcagcatccttcctggctaagtccacctccgccttcatggtgtcggacagagccgtgttcctagaactggcagacttagcctcggagtaagtgtaggccaacttcagaccggcctgcacaaagaaaaaactttagcattcgagctaagtatagaagattaaagggaattgtccagaaatacttaccctggtgaactccttcaagactccgcccacnagcaactccaaagaagagtcattgtcagcaccagcccattgctcactgacctcaggaaccagccggttcatgtagtgggccagcatctccttgtccttcttggcctttggaaccaccgacaaaggtggagtaggtgcccacacttgttcaggttcacttctgaccagctcaaacccaaccttcggtggtccagacctgtccaagcttcctccccgagactccttggacttgcagcttttggggtagaggggttcatagcagttagctcctcgaaaagatcaatgacctccccagcaggcttcttttccttagaagagcacccctcaccgcctttagacttcttggccggaggagaggcactagagctttcgcccattctcttcttcagagcgtcaagcatctaccgagacatgtctgtacaaaacaaaaaacaacatgtttagaaaaaacagacatcagaaacataaggcataaaagtcaagaagctcaaaaacaacgcaaagtagtatgcaaggtgactgcccaaacaagactcgaaagtccatcatcacttgacatcgatcttatttcagacataacaacttttcctttaccgaacacaacaggagatggctgagcaggtgaaatgggctcccttatgcgaattgcatgttcaacaggcatgggcggggccaaaagtttcttcttcctcttgagcggagtcac

SEQ ID NO: 33980 - DNA, 1348 bp, Cannabis sativa
  modified_base (47)..(59): a, c, t, g, unknown or other
gtaatatgtttacaacaatcatccctaaaatcgtgggatttgattannnnnnnnnnnnngtaaatgcggtttatgatttgaaagtcatatagctgtgatttttccgtgttttagggttaaaactaaagtgtattaaacacatctttagttgttctatcttgagatgcctcgatagaaactttgttctagtgatctcaatagcgagttggggccattcttcctttcgaggtcgacgatgtatgcctggtgtcgatcacggttcttatttacaaagaattctttgaggcttatttgaatgttatcttttggctctctaggattgtaagcgttgccgacgctaacaggatgtaattatatgaagtcttcccgtaacgagatggccacctcgcttacttattcttgagctgattcgacttttacacttagtttgtacattgtacgctaaggactttcacgattgatacgtgtcgctatctttagtgcctcgctatttgcattcaccgacatatggtttctcgctaatatactaagtgccagtttgtacagggattcctcgcctaagaccttacagtcagctggttacaaatatactctgatacttacgtgattaattagttattccataagaagcaattgcatcgattcacattccctttatcttgacacgtgtcctccattgagatggcagccaaagtttgggtataacactttccccttaaaaagagctttattagcaaaaagagctttttaataactacagagggtattttcgtcaagatcccttcttggaaaaaacgcgtccttcgattttggcagttgtgaagttttcagggtcattatgaatcgtctcatcatattcggcccaactcccaaccgttagattccctaatctttccctttcttgtcactggactttgtgtatctaagggcgcctcaagcttctcatttttcacaaacctttggctttttagtgagatcctttttcaaaatggatcatctttttctcgctagaatgtcccttcgtagttcagaagttcaccatcccaaattcataataccaggattgtaatatataaaaaaaattaatatagtatttaattagacatattttatgcaatacgtaattattttggtaatgaagtaagattatgatcttagttagggtatttagtgagaatttataaaatgattatattaagcgtaatttattaattacgaagattatattgggatatatggattctgaggataccatttttgaaataaaaatattttatcgggcccatcgactgtggaaatttgacgatgtggtcagaaatgtcacgacattaatggatggattattttg

SEQ ID NO: 33981 - DNA, 3432 bp, Cannabis sativa
catttgccccccaagtctgtacgggacttccaaagttgcttgtagacttcatccgagttgtctttgcattttaatgggtgacacgtgtcaggcacgtctgtttgcgtctcgatgtgaggctgactagtcatcccttcaagttttggctatgaaatgctctgacgcaattaatgcttcgaaatccgattttctctctccacgtttgacggttgcacttgtttgcttttaatttttgatattcgcttttgggggaaccgaggcatctgaggtttctcaaatgattacctctttttgctatttgcctataaatacaaccgagcatttattcacaaacacattttcaccaattttctttgctaagcaagttcagagcgaaaatagaggtttttagctttcagtttgctgaagaattttcacgggaactgtcgttcaacgttcgatccttgagtaagctctcgatttcttttacttgtactttgcacatttattttctgaatgcaattttaacgttgatgtagaagatatgtagaaaaccctaggtttataaactctacaattttcctttgtaacgattcatgcgacttcatcgttcataatgcttgctttttgaactgcgcaatgcctatctttcatcttgctcattctaagcttcatgaaatttattttttctaactcgcgaaaatttcaaacttctgagttttgacttttcgtcgaatatttttattcattaatctgctgagcactcgtagtcggcatatttgcctatttaatgtttgatatcccgaccaaacactcatcttgtgtgctgtcttttgtagatgaacctaggtgaattttggggaagcgaacaccgaatggaccgggacctactttaactcgtgcacgaggatcatcctcgtctttgttctagtctgccctcttcaagcgacggacatttttattcaaagttcttgtgcagccacgggatggtggctcgtattaaacagacaatgtgtaaagtcgacgtgtctgatcctcacatggcctagcacgccaccttgcccagagccgaacaggatccacctgtgcaggacgagggtgatcatgaaggggatgctgaggtccaagagatagaggaacatggtgatgtttgtcctggtagtccttccgaggaggtggaagaggaggaggctgcacccccaaactttaggggatacaatgaggctgcggagccaattgacgctgacggcgatgtctaggtcgaaggcgtggacttcgtcactgaggaacttactactgcggttcctaaaaggaggcagggtgctttaggcgctaggtgggtgagccctccatccaaggtcaccgaggcacgtttacgggatctcgaccagggtggctacttgggcaagttagactgttagattcctacctataacaatcgagccacaaaccctaagagggggatgtgcctggtcgggtgctaatgctagacaaggggcattgctgcctttgcacccgtactttaggaaggtggtagacttcttccgtctttgtccgacccaattcactcccaagggcatcaagtatctgtctgccctgttcattctctacgccatccagaaatgggatatgccttctccccatgaggttagctggttttttgatttgaagtgtactgccaagcaaggcaagtcgggatacttctacttctctcacccagactacaagtggttgacgggcaccgaggaaaaggtcgttagcaaaatttgacattttgttgacgagtatttcatggtttatggcatgggcaccacctacactcggttccagcagatccctatatatcactgctcacccttcacacttgctcttagggatagagctcaaaggcttgctcagctgtcgggtgctgcttggaatataactttgttgacttccgaggacaactttgtggagtacgggctctacccgaaggatttcattcctcagcctgtgaaggagaaaaagaggaaatccggtgctggtcggtctaagggagctcatcaggaggatgaactcattcaactcaagcgggaggctaagttgaagggaggtgtgggggaaaacagtatggtcaggaggattctgagaaggaagacgaggttgaagaggagcaggtgactccgctcaaaaggaggaagaagcttcctaccgagcaaaggcccgttgaacatgcaattcgaatcagggagcccagtctacctgctcgaccatccactcctgtagtaggaaaggggaaagccgtcctgaaggagataagagacttgtcaggtgatgatgaggcttcaagtcttcctcgggcaaacgcttcttccgaagcgcaagatattccgtcttgttttttaccttcttgattattatgctttcatacttctagtgcttttctctaaccatgttgcttttatttagtgcagacatgtctcagaagatgctcgattctttgaagaagagagttggggaaagcttaggctcatctcctccggccaagaagtctaggggcggtgagacaacaccgtccagggagaaggcaccagctgaagttgttatcgatctttctgaggagctaacaattgtggacccttctaccccgagagctgctaagtccaaagtctcttgagggggaagctcaaacaggtccgaattgtcgaaaggcgaatacgagctggccaaaagcgaatctgagcagatccgggctcctaccccacctccatcactgcattcaaagaccaagagaggcaaggagatgctcacccactacatgaatcgatcggtccctgaggtgaatgagtagctggccgaagctgacaacgagccttctctagagctgttcatgggaggagtcctgaaggagtttacgagggtgagtctttcttgacagtttcctttaatccttctttaatccgagctaaccaaggttttagaggcttctgaccaacttgaggctgccatgacctccttgtccaaagaagtgatcgacctccaagaagaaagggaggttctttgaactgttttctgcaggttggaagcagagaagaagtccaaggaggacgagcttaacggtgaagtagagaggctcaaagggaatgtgaatgccttagagagagtcggtcccgagattttctatgacttttggaaggctaaccctcaggtgaattttgattacgtgagcgataccaaagacatgtagcttgagtactgtgcttcccaggtggcctatggagagtccgaggcaaccacttctacttccggtctgaacgttgacatgcccccagcccagacaacaaacctccagctccttctggcctagaagacccgtacaaggagcctgggactccagccgtctaaacacttctccttttatctttttttttttatatctgtccggccataaggccttttttaagacaacatgac

SEQ ID NO: 33982 - DNA, 1641 bp, Cannabis sativa
ttatgctatgtcttgtttccgcctacctgtttctctctgcaaacactacagccgtcttatgtctaaattctggtggggatctcttggccaaaaccataaaattcattggaaaaagtgggacaacctttgttcctcaaaattcttcggagggttgggtttccgcaacattgtgcatcataaccaagccatgctggctaagcaagcttggcgtcttctaacttctccggattctctggttggtcaacttctaaaagccaaatattttaagcgaaacgatttcttacacgcggccattggccactccccatctttctgttggcgtagtattctttggggtagggagcttctcttgaaaggcctcacttggaaaattggggatggcaactcagttaagatttctgaatccagttggcttccatccaacgacaagcttatctttaaacctggtcttctccctccctcccagactgtctctttttttattaccccggatcggcattgggatcttaacaaacttcaacactattttgatgaggggatgtgtaactccattctatctgtgcctattgatccttctcaccctgatgctctcatttggaatcatcatccttctggttgttttactgtcaactctgcctatcatctggcaaattcctccatatctggccctggcccttccaaccctgctacctataaaagttggtgggtctctgtctggtcctccagcattccccctaaaattaagcattttgtttggaaagccttcaatcatatcctcccttccaaccttaacctctttcaccgtaaatccgttccctccccaatctgctccatttgtcactctcacccagattccaacacccatgcccttctccattgttccagagcaggtaaagtttggaagcactcttccttttttcatttttactccaataataaaaattgtgatattaaggaatttatgcttagaggttatgattttctttctaaagatcaatttgttacttttttgggtttgctttggtcgatttggaacaaccggaacaaagccattttttattctaacagggaccatgattactgtttggagaattctgttagttgttatttgcaggaatacagagaagctcaacactgcatctcccctcgttctgcaacatcccaatcttcctcaactcctcaggtgcctcctaacatgtaccaactgaatgtagatgccgccctattaccctcctcaaacaagcatggttacggagcagtaattaccaacagtcggggtgaagtagttgcttctttatcctccccctcaaagtcagggctcccgccgatttttgcagaagctgaagctctcctccgtgctttgagttggtgccaggcagtccgctttcctctagctatcattgtctcagactgccagaatttagttcatcgcatccagaagttcagccacgatcgttccgctctttcaggatacatttctaagatcgtctcctctttgcttccttttccaggtgcctcggttcattacatcccaaggacattgaattccatagcccatgatcttgctcgagcagcccttggaacggacgaagagaaaatttggaactactctagttctctcacttgaagatcctagtcttt

SEQ ID NO: 33983 - DNA, 1029 bp, Cannabis sativa
aaatatttttacgtggttttgtacttaaaatctacatacttcacgagtctttattattagtgatgataatctggatacaaagtacaattctctcaatcaatgcaaaatatagtctttttctctcaattttgtcgtctcctttacctagattctgcccctatttataggggagtagggtggcagttatttttccttgggatctaatcattcataactgctcatgaaacatggatattccccacgtttcatttttatgcatacatatggcataatatttaataaccacccaatcgctcttttgtctttaaccttaaacgattatgctgattatgaaagttgtttctcgctaagtatgtgttgtccttctttactgtctttgtatgaaaaatactctgtctatcccgagatggactcactatctcgccaatcttaacgaataatagttattattcttatctcgcatctactttttgtgatagcgagtttgaatatttctattgaaatgagttattttaattatatttaataacggaatttaataagtacatgtatcagcttctcgttgatagccaaattttgggtataacatttacatttatagaaatttagtccttcagttaggttacgtcccattattctatttaaatgttgacgtgtctttgtaaattaacaattttatcccctaaattttgacaactatcaaattgtacccccttaaaataaaaatgagaaagattcaacattttttttagtagatcttaaaaaattaatttagattttaagaaaaaaatcattttgaatgattaagaaaattaaaaaataaattaaaattttaaaactaattaagctatttcaaaaattatttattatttattaaaaaattcatttagatattaaaaaaatattaaaatttaatttttgtaaaaactaaattatacgggaaaaaattgagtatattttgtttttctcaaaaaaaatatagattttatttaagtaaacataatattttttttttttgctttaatttat

SEQ ID NO: 33984 - DNA, 1013 bp, Cannabis sativa
acgctcgctcctcccgccatggttgtcgttctcacgagaagatcgttgaggtatggcattcagattagcatcacgaacttgggttgttgttaacctagacctctcttgaccttcgagagggtaatgtgttgaaccactcccactgggtcgtccccttcttgttgtaccaggacgcttgcgggttcctcttctttgtggccttgtggcctcctgggctccataactctcttgccactcaatgttgagtctaagagtttcatctaaacgctagcgcaatacctcattttccatgaacacctcatcgacattagtagttcatcgcgcaccatgggatggtgatgatgagcttcccgcatcttggacctgaccttcgttgtcagctggcataggttgtttgtctggacatcaagaggtcctttcgccagtgggctcagcgtgttggtactcttcatggtgttccatggtgtttccttcgttcatggggtcatcatggtcctcctcctcatagttcgtccgtcttgtactccccgtgattgtaaggggtgattaacacttgtgttcactacactcaatgaaagcaccaaactgttgacgcagtttttcatcaacggatctaagaagatcgtaaaacgagtaagatgaacacaagcaatagttaatcaaagtaacccagtttgcaaaagtaaattcaccaaagacgaacacaagaattttatagtggttcacccacttttagcggtaataggctagcccacttggagtgttattgatcttaatgcttgaggagaattctctagagttatgttctccaagagttcattcctcaagtgagtttttagaatttgagagtgggagctcaagagtatgatctcgtgagtatcaatttgagacctttacaagtgatttcacccccttatatagatattcatataggatttaaaatcccttaaacataggtacaccttcccgtaactatagttgggttaggtttacaaaataataataataaaata

SEQ ID NO: 33985 - DNA, 2057 bp, Cannabis sativa
tctctctctctctctcgatctcactcactcgggtctctctctctcacggcgacacacctccgccaccaccagcgacgcacctccgctgcccctccactaccgagaaccactccgccgccctctctctcttagcttggtaataattttatttcttctctttgatgtactagttaattaaatctacacccttttggagtttagaatagcccatgtattgtatgtaaacttagatatctttaagcatttgtgttttcaaagattaaaacttttttctcttctaggtagacggcagttcgatttggctaacagtgaagcgttgggtgaatcgtctgagtggagggcgagatatgaggaagtagtgaagactgcccaacgtttgagtgaactcaaccaggtattttggatgtgtttatttaattcacaataattctgaacatcaattgtataacctcacatttatgtattatattatgaaatggagctgcgaattttcctttaccagatttgtttattaaatttaatttaccacttctataagataatataaccaaatgcaggaatcaaaagggacttgttccatttgaataaaagtgatgtgataatgagtttttgcgagttattatgttaggaattaatagcaaactcgggagcataaatttgtgggaactgccattgctgctaatttgatacaatgaagacagcgttctgaattttctttgtaagctctcaacaacccttttttaagctgaaggttactgattaagattcactaattgttttttatagcaagtatcaagagcactctttatactacattaaaggtaagttgcacaatttatgtaattatgcctaataatgattcaagtttgacctctctagtttgatatgttattcagattttacaggcaaatccagatcttatcccgtctatactaactttggcacttaacgatgcaatatcatatgacaaggttagatgttgattatataatttgtaaagaaattaacgaaatgcacaaaggagaaacatgctcacttgtagagtgttgctcacatataaccctcagattttgctttggacgtatggacttactatccaccacataatatagatagctatccctacagtctttttgcatctgtaatgatttaaagattatttttcatgttttttttccctactagttatactttttattgtcatatttaagtctgaatcaataactagtgttgtattgtcatttgttggctattttatattcaattccccttctttttaaatctgaatgagaatttagaggaaataatttatgaacaagctatgtgtctaattcaagtgtggtcttagtgcattgcatagggtttggttgatgattgcttaattaaaatgttacacaatttaaagagactttttatgctccagtcttggcatgattctagaaggttgcatgaaaagggtaaaagaggcatcttaaaattgtttttattgaaacagagttagtaaaattgacatcatagtgattaacctcatttttttgagctatctttgtttagtaatttcctattacctttcattttaactattccctcacttatatttttttgttgtcaattgtaattatagaaatatatatatatatatttatatatattcccattatgctagctagctaacagtgttgcccaacactctttacctataagcttgctttgttggaagaagactgtgtttggtggctaggttatcatctaaaatttgttattttttattcaataatttttttggtacttttttccctgttgaaatttttttttcttgaggttacaaaaattttctaaaaaaaattagttaattattactaattaatatataatttctttctattttgttttgcagggtaagagcaatccgtaatcaaatgacgagatgaatattctgcgtgatcagtggattgaatacattctagcacatgcagtgcaacaagggctattatgattagtttttgtttttatttatactttacactataattagttactttcatataactaaagat

SEQ ID NO: 33986 - DNA, 5271 bp, Cannabis sativa
  modified_base (34)..(42): a, c, t, g, unknown or other
ttatggtcaaagagcagttcttaaatttgctcannnnnnnnntgctcatgccattgctggaatataagtaaactaagttattcatctatgaacaaggaaagatacctctagcgagatacctttggaagggagttaccattcctgttagcgttgactgccttaaagacggtttaaatcacagctgtgtgattttctaatgatatctacacgtatttaaatgtaacataattatagcccacaatttcgggaatattgttacaggattggaatttaaatgtaattaactgcctacctatattactataaataggggtagatcatacataaaagggggatgaaaaatcttggagagaaaaagaagtttacaaatggtaaaaccctaattttgtatccagaaatatctgaataagatagactcgtggactatgcagagttaactacaaaaccatgtaaaaacctagtgtcatttttgtttttattagtcttctcaaatctcttatgatttctgtgcaaactctattacgaaaataggctcataatggttaacgaaaatctgtgttaatatatagtttggtattttcattgagagcctacgtgataaaagctcagagaaatccctcgtaaccaaagaattaattttttctccatagctgataatggtaaaaacgacaatagtcgtcctgaagagactaatcgtcgtcctggaaaagagccaacgggctcaagaaggccacctactttaacaactacacgctcagcatgaccaacacatttaagaagagaccaacaaaatgctgagttggagagagaggcagctgcagctagggcgactcaagaaaacgctacacaaaatcaacctaatcctagagtgagaaggccgcaaggtagacctctaggttcaagaaccaagaggcagaagacagctcaacaaaacccccagatcaacctggggaaactagggatgttccaatagatgaacaacaaaataattaggcaccttgttaagaagtgccttggaaaccctgaggattcacaacccaaggaatgaaaacaatgatttacgggagtcttctcgtaggaacgagaacaaaagacaaccagagactagggaatacgaaatccctcgtgttaacgagagagatcttgggactcaaccttggataagcgggttaccactgagacaccatcaatgtccttctcgcactgatagggaggaggcgtatacacaccccaacggggggcatgtatctaaccattaccaaaggagaagacttgtgcgtgacgaggcaagttttagctcaggaccttcacgatctcgagatcatagtagatctatgcgaggaggtgataggtctcaccacagtaatgatagagaaagtatgagcacaactaggagccatcaatctgagagttactcagacacaaggtcaataagaaactatgatcaatgacggcctgatcttcatgagcaattgaatcggaggaagcccaatttatgcaaacatttcaattcgaatgaaaagcaagatgatccaatccaattgcgaatcagtgagttagaaaacaaattcaagaaatatcaagatgggaaactgcctaattacaatttagatgaagagcttgaacctttccatcaaattattatgagctctgaatttccccaaggatttaaaaaccctcacgtctcgccgtacgatgggactacggatccagtcactcacctcaacaattcaaataccattatgtgagccagcagtgtcacgaataacttacgttgtattttattccccacctcgctgattggagcagcaaacagatggttcaataaattcacccatcactcaattacctcttgggaatagttgtataaatatttcaagaaacaatttcaggtagcgagagataggcaatttgaagtatcttccctcactaacgtgaagcaataaccaggcaagtcactcaaggcttacttgagtcgatttagtataggttctgctagaaatagaaacttgaacgatagtatacagcttactactcttcaagaagggattacgactgacctctcgacagttggaggcaagctgtgggatgacttacatggtctcccagtaaaaaacattactgagttaaatgaaagagctcaggtgttcgtacaaaaagaggaagcaatgaaagagatgaaactgataaagatggctcgggaaataaacccagcactatctcagcaagtaccatctcgatgaaggctgacagtccaggaggctctagcactaagagaaaagatgactctaaggaatcagccaacggttaaaaaaacaaagaagaagcgcaataagtacatgccaatttacactatttatatcgagcttaatgaaactcgcgaaaatatattcctcgcacatgagcacaaggttgcatttttcaagattaagcccatgaggcatgcgaggcacaaacaggatgcaacaaaattctatagatttcacaaggacatagggcatacaactgatgaatgtcgtcagttgaaagacgagatcgagagcctcatcttgtgtggttactttcaacagtatgtaaagcgacaaggtaatcgacaaaaccagccaaatccacccaataacctgggcaaccaaagattacaacctccaccagttgaaggagagcacattttggttatcttgggagggtcacttctcgctggagaaagtagtaatgcccagaagagatatgtcaaggaaatcaaaaacaagcagtcaattttcacattagaaccatcaaagaaagctaagactgaagaacctccaattgttttggaggaagacacagagcacgtgaggtatccacacgtcgacccacttaaaattataatccatcttgccaacaaaagaacaaaaagagtgttggtggataatggaagttcagtgaaaatcctttacaagatacactgaagaaaatgggattgcaaaatgcaaagttaaaaccttacatggtgaatttgtgcgaattcacttgggatagtgtcgtcagtcaaggaattatcgagctcccgtaaactttgggcgagccacctatatccacaacattcatgcaatattttctagttgttgacataccatcagcctacaacatattgttgggtcttcctgcactaatttgactagggaaagttagttcaattaaacacttgcctttaatcaaacaccggcaggtgtaggtgtaatgcgaggtgaccaactattggctcaggaatggtattgcatatagctacaaaataaaaaggccagccatcagttaatagcagtcataataaaggatagcgagaaacatgacgagaatctagatcctcaagttcaagatgaaaagaacttgttaaaaccaatcgaggaattggaagaagttattttagatccaaaaaatcccacaaagtgtgtattcatcgggataaatatgaagaaaaactaatatagcaactaataagttttctgaaggcaaaccaggatcagttcacctagagccgttcagatatgatagggattgaccctaaagttatttctcatcacttaaatatcgacccaaattactcagctaagagacagaaaagacggccattggaatctgaaagacaaggggcactcaaagaggaagtggataagttgttgactaacgactttatttgcgaggcattctacccctcgtggatacctaatcctgtccttgtcgtaaaaccaaatggaacttggagagcttgtattgacttttcagatttaaacaaagcatgtccaaaggattgctttccactacaaggattgacaagttagtggatgcaactgctggacacaagctaatgacattcatggacgcatattcttgatattaccagatcaaaatgcaagtcccttatcaagagcatacaagcttcataacaaacacgagactttattgttacaaagttattccttttggtttgaagaactccgtggcaacatatcaatgactagtaaatgagatgtttgaaaagtgaataggaaggaacatggaggtctacgtcgatgatatgttggtaaagtcagtaaaaagtaaagatcatacaaaagacctcgcagtgctttgagatactaaaaaagtacgatatgaaactcaacccaaagaagtgttccttttgagtcatcctcaggaaaatttttgggatttatagtcaacgtgaagggaattgaggcgattcttaaaaaaattaatgcattgatagaaatgccatcgcccataaaactgaaggaagtcaagtccttaacaagaagaatggaaactctaaacagattcatctcaaaattaactgacaagtgcctaccattcttcaatgtgttgcgatgcaacaaaaagtttgaatggacagacgagtgcgcggaagcctttacaaacataaagaaacatctatcaacaccttcgttattggccaaacgaaaaactggagagactttactcctctacttggctatctcagagaatgtgattagtgcaacattagtgttagtacagggaaagcaccagcaaccagtttactatgttagcaaaaggttactagcggtagaatcgagatatcgccctcttgaaaaacttaccctatgcctaatccatacatctgtcaaattaagactttacatccaagcacatccaacaaaggtgttaactaaccaacccctaagacaagttttgtctacgcttctggaagattgatagaatggtctattgaataggggcagttcgacataacatatcacccaccaacatccatcaagggccaagctttcgtagatttcttaatagaagggatagtttgagatgaaaatccactcgaccagtgagatgtggaaacttggaagttgtgcgtggatggagcatctaatgaaaatggctcgagtgcaggggtgatactgatctcaccagaaaactttaagtttcactatgcccttggattctaatttgacacttcagaaaacgaggttgagcatgaagccttggtagcttctttgaaaatagctaaagtgttaaagatcaagaatcttacgtgttacagtgactcgcagttaatagtaaactaagttctaggcgaatactaggcaaagggtttaaaaatgggaaaatagttggagaaggttcaaaaaaacttggaaaagtttgactattttaaaaacgaacaaattccaagagaacaaaaatctaatgccgacttaagatgagagtggaaaggttatgcagaggttttttatggggcac

SEQ ID NO: 33987 - DNA, 4091 bp, Cannabis sativa
  modified_base (1206)..(1216): a, c, t, g, unknown or other
  modified_base (4042)..(4044): a, c, t, g, unknown or other
gacaatgccaattttaacgaattttctggcattggcagcaactccgacgacttttcctacatcggcacctactcaagtgactttttcggtaccgacagcaaactcctagaaattcttcaaaattggcattgttgctggaaaaaatcaccaagacattagtttcaatttcttagtgatttttttgtgattttttcggcaataatgctagtttcttgatgaagaaaccagtttcttagtgatatttttgtgattttttcggcaatatagccaattttgatgacttttcggcacaggcagcaactccagtgactttcccgatgccgacaccaattctggcaactatgccaattctgatgacttgttttagttaactttattgtttagcatttatatttcgttatgattttttatagtgtcaaatctgatttcacaggatttataagtgtgaaactgattttacaggttttaagggttctgtaataaggttgctctattttatgatgctattgtttattttaagtttctttttattattttatttctaggtttgaaactagttttcacacttatattttgtttaagattattgttgtgcattgtgtgttgttttgtttatatttatgagtattttttttttgtgtttttttctccatttagatgattgatgaaacttgtttcaattattttcattgtatatcattttggttttgttttcgtattctttattattgttgtgtgacgaaactagttccttgatgaagaaactacgttcttggtgaagaaatcactttcttggtgatttttcgatgattttgctggcaacaatgccaattctgacaaattttttgtcgtccgcagtaactccgacaactttttgatactggtagctactccggtgacttttccggcaccgacaacaaactccaaaatagtcgtcaaaattggcattgtcgccgataaaatcaccgaaaaaaatgctaatttcatgtgaaaaccagtttcttggtaatttttcatgtaatttttccagcgacaatactaattttgacgacttttttggtgccagcggcaactctggtgactttttcagcaccgacagttactccgacgacttttccggtgctggtagcaaactgcggtgacttttttggcacgaatgacaactccgacgatcactgcaatttcatttgttttatttttttaaannnnnnnnnnngaagggaattttaatatttttatgttaatttaattaagtttttattttttataaatcttaaattcagattctttttttaatgttttatatgtttttttttttaaaaaaaaacaatatttttagcttgatcggttcgataatgtcatatttagtggcatttactttttatgtcatatttatcataaccttaataatttttccagtatttttaaaatagccctattttaattattagctaagttaagtgtaattaattgatacatagtgaaaagtttttttattaaaaaaattaatcataaacatacatagatattgaagtaattgcttgtgtcttattcatttgtaatagtaaaacttattataacaatataattataattcatgatactatttatcagaatattatagtaaaactgttatttttttatagtgcacaaattaaaatgttatattttaagttataccactcaatcagtatatgaaacactaaactataaaaatagggttaaaccagtacaaagcgcggttggttccctaattattaaataaataaaattaacatttaaataattaaaatagagaaataatttttttaagaaaagataaatttcattaaggaagcaataaaatggcaaaatttaaacttgtgagcctccatgtagggttcggccatttaataaagctattttttttaatctattttaattccaaacctaaccctagacctacactatatagatataacattatagatccatgtttttactctctctttctaagaaaaaagagccattaaattatatacacttagaatttttaaattctctatagatttattcttaaaaatttgtgctccttggtattgagtggttgcccacacatatcaaagcaatactcaggatagtacggaagactatgtagtcttttacaatccaaaggagaatctaggttcagttcttgatcacactttctgatagaaaggatcaagagtgagctaacagaacaaaaggagtcaattaattcatctgcaactattgtaaggatctactaatccctttatgtgtttatgttattgtttacttatccatattaggatgttagattagaattaatttaacatgcttgaatagtaaataagatcctagttaaagtttttccaacttgaacctaattggagatgaagggtttcgtgcgtgatcccttcttccctctacatctacctcaatgtccctaggagcaggaggtggttgaggaggtggaatagtgattgtgtctagctcctcattcctcatgagagcttggtcacagagatggggaaacattattttgaggacaaataggctcttgttttctcctccaagtcatgtgttacatgggaggaggaacattgttccacctattctcctagcctagggtagtaccacgaggctactattgtgaaggaggatactattttgaaggaggatgttcattctctctaacatggtctttgttctaacaagaaggttgttgtggtaaagtattaagtatggtgtctcaactttacgtcgttattgttcgcgacatggacctctcttggcttctaatcgattggtgagttgactgacttcctcaggtttgttcttttctacccgtactagggtgcctctcagcgcgggccccatttgttgtttcctagcagcctcttaatcctcatgcctctcataccactctctattaggtttaagagtttcttctaggtgctggcgcaacacatcattctctatcaacacctcatgaatagttgtggtatgtcactcaccatggaatggtgatgatgaattttcagcatctcgaacctaaccttggttgtcaggcttgggctacttgcatgaacgcgagaggtccctatactagcaggctcaacatgttgcaagtccatggggtgttccgcattgaatgggatctcaatatcctcttctttatagtttcactactacaagaaagggttttcacatcagtcaacgtttctggtcaaacttgttgaccgatgcaaaagtcaactcacaattttttactttgttggtcaccatagcaaataattattaattagcattagttataactctaacactaaaacaaaaactaaagcaaaagatgaattaaaaaaataaaaaaattattcacagacatttaggtctgttagaatttgaagcaaaaatcgtccgcttctatttatactcgacgctaaaggtcttagtttctatttataaatgaagctaaaggactcttattatacaaaatgcccatattcaaattaggtttcccatttctatcgtgtagtagagcctagggatgcacatttccctatggggatggggctcacggggacccacccctaatggggaagggattccccgtctaaatggggaatgggacgaggacggagattattttttgtcccctaatgttaaacagggtggggatggggatcacactccccaccccgacagggatccgtttagtattttatcttatatttctagtaatgtttgcatttttttagtatattagtatctttgtcatgaattttaagttgtgttttagataataattagtttattaaataataattaaatgtgtaataatttaatttttatttagtttattatttttgtatattaaagattttattataaactttattctcctattaagggatcccttgtccccacccccattaggggattccctgccctatccctgataaggaataagcggggatgtggattaaaatccttaacgatgatggggacgggggagcactctgttggaaatattttaccnnnatctagatttactatcaagtatgtttcattaacaacctaatatgaat

SEQ ID NO: 33988 - DNA, 2234 bp, Cannabis sativa
  modified_base (27)..(29): a, c, t, g, unknown or other
  modified_base (705)..(707): a, c, t, g, unknown or other
  modified_base (948)..(958): a, c, t, g, unknown or other
  modified_base (1683)..(1686): a, c, t, g, unknown or other
actaatcagattgtaaagagttttatnnngggcataaaacccaacaaaggtttacttgaagggaaaagataatattgttccaccttttcgttttggcgtggaagatgttgcatccaagtgtggttctataagcttgcatatcctggccaatgtttaacttattctgtaagtttattattttaattttttattacttttttggaaaattgtcagtagatagttttcttgattatattttttggttgttgatatatactttgtttttgaatttttaacatgtgtaattttttttattgtttagcatttagatattattttttactgtctacgtaaaaaaggaaagtatgcaaaggaaatgaaggttaagttcacaaccactgattgcttattgtacaaaaccattcatgcattgtatgaaaaagttgttgcaaagaaaaaagatcattctttgataactgctcaccatgccattgctgattatatcagaggtagaaaaattttatgtggttccccttggcacttgtgcgatcatattttgtttatcagccatatggagtctgaatcacattggattcttggtcgcttgaatattgaggaaaggtgtatgtacatgtacaactctttgttgactgctatgaaagatagtgccgctatcaaagcttgtcagccatttgcggtgttgttgccccacttttttgctttgtnnnatgagttcaaaaaggataacaaaccgatttgtttagaccctttcgaagttgttaaggttgatggtttacctcaacaaacctcgaagtaagttgtttatagtttatattttcaagtgttgttttgtttatttttaggtattttccttttgtttttgttatctgatgttaattttggattttttttccagtgaccgtggttgttttgtggcatcgtttgctgaatactttattgatatgaaannnnnnnnnnncatatttgatgttgagcaacaccgcgataggcttgttgtgttgttcttcaagtatgctcgcattaaaaagtggattttattgatagtgaagatgaggctcctccaaagggtccaaagaagaatttgttttagttatgtctttgttgtttttggcaatagtaatttttatttagattttgtttttttaatatcagattatgttgacaattatagacaagttgttgtttctatcaagtgttttttatggtaattggttttatgtttgtaactagtttttgatttttagtttatatattcattttaacccacgaaagcatctcattaacaacctaattacaaccatcatataaacaactaaccttgcattttaatcacttatgtaatattgtttgatacaaattaatttcaacttgcttttaattgatcatgcaaacattaattatttaactataatatttatgtcatttgtatattaatgatcataatattcattctctattaactatatgttcaaaaaactctcaccatataaaaagtttcagttaagattaacgaaacaaccaatagaaataatttgtatgtttatctaaatgtttcagaatagttgttttttagttgctgaatagttgtttgtacttctatgctgtaattcttctgtaggtctttttgttatgtcaattttctccacacttgccacattgttttgcttctttgtttcccaagcnnnngccattcttcttttcctcggccttctagacttgattctttcttttagaggcaacctattatgtgttcaaaaaaatttggtagttcccattctctaagatttccaactgggtatactgtttcttcatacgtttgcaagcatacttttgatgtgtagtagtgtgcacagtagttgtatgtatttttgttcaagtccttcatgacggcaactgcatggttacatggcatttcatctttttgaaatctgttgcatgtgcacgtcttgtccttcaaatttactattcttgtcctgtcttcatctatcacctcaaataggttttgatttgctggtttcacctgcatgttttttgaagcaactttaaaacaaccaaaaaattatggaaaaacaactctttcagtttactggatgtgaccaataatattaatttactgttaattgcaatgactgtacatagttacctatgagttttttctcagatgatggtgtcaaccttgttgtccatttttgtgcctcctttctattattgtatgtccactcttgcatttgtgc

SEQ ID NO: 33989 - DNA, 2192 bp, Cannabis sativa
  modified_base (1313)..(1313): a, c, t, g, unknown or other
aatggaatgaactttattattttttattttatgtccaaataaacatgtgggcccaaatgaataaacacactatacactattttttctctctttatttattttttaatttgtatgtttatttcttttaatgatacgaaaaaagttattattaaaataattattattcatattaataattatctttcattatttttaggtattttatttaataataaattatgtattttattaataattatgtatgttatttaataataaattaaataattatttttttaataatgaaaaataattcaaaatcatgtgtcacagcataattttttaggattagagtaatatatttttcgtcggaaaaaatattataataatttttttaatattatacaaatatagataaaaaaaagaagtttaatgttgtcagtacactaattatttgattcaattgtcatacaagtgaaataaaaaaaaattgattaccctatcactttcggtgtctaggggtcccgtgacacagagtatgtaatcaagttaggtgtagtgtatcagagttactagtttcgtaacgaaatcactaaccaataccgaaatagggttctacttagtggtatcgatgtacactcgcagtagtgaccctatcactctcggtgtctaggggtcccgtgacacagagtatgtaatcaagttaggcgtagtgtatcagagtcactagtttcgtaacaaaatcactaaccacagccaaaatagcgttctacttagcggtgccgatgtacactcatagtagtgacactatcactgtcggtgtctaggggtcccgtgacacaaagtatgtaatcaagttaagtgtagtgtatcggggtcactagtttcgtaacgaaatcactaaccgataccgaaatagggttctacttagtggtgccgatgtacactcgcagtagtgaccctatcactgtcggtgtctaggggtcccgtgacacagagtatgtaatcaagttaggtgtagtgtatcagagtcactagtttcataacgaaatcactaaccaataccgaaatagggttctacttagtggtgtcgatgtacactcgcagtagtggcactatcactatcggtgtctaggggtcccgtgacacagagtatgtaatcaagttaggtgtagtgtatcgtaatcactagttttgtaacgaaatcactaaccgataccgaaatagggttctacttagtggtgctgatgtacactcacagtagtgacactatcactatcagtgtctaggggtcccgtgacacagagtatgtaatcaagttaggtgtagtgtanggagtcactagtttcgtaatgaaatcactaaccgataacgaaatcacttgtttccattggccacatctgatgtgtaaaaaaaaaggtagtaaaatctctgaattccaaatttaatacacgtgtacacgtaggggtttttgttaaatatcatccttattcatcaatctatttttttttcaaaaacaaattaatagtactgcggtattgttgtaacgtacaagaatggttgaattcattaaaagatgttggtataggccctttaatatcagcccaatgaatttaaatgggaccaactaccatactactcaaaaatctaattatccttatttttcaaactttttttttcaaaaaacaaaaagtataatgtttcttttcggacatacgaaaatggttcaatttattctaaaaggttggtgaaggcccattaaaagaaggccaatgaatttaaatgcgaccaccaaccctttgaactcaataatattaggccttttacactcataaaataaccttattttagaattaattttggaataaaaaaaataattttgtactattgtactattctgacgtatgacaagagttgaattcagattctaatattataaaggcccataaatatcagcccaacatctattcaatgtgatcaccaacccatacaactctattatctatggcatttaaactcataaaatctaatttcactccccttagcagtctctttcccttattcttcatataaaattcttagacatcaataacaagccaacatgaatgacgaacaaagttatgaatgggaaatcataacaacagagctaaacatcacaaaaccagtgaatgagattgaaatacatgacatgctaggcaagagtctcgacaaac

SEQ ID NO: 33990 - DNA, 2829 bp, Cannabis sativa
  modified_base (1165)..(1169): a, c, t, g, unknown or other
  modified_base (2780)..(2785): a, c, t, g, unknown or other
gagccactcaaagacaaagtcaatgagtaggatgcgatctatgagtaagataagatctgccagcaattactccgaactagatctgcgagagcacttgaatcggaagaaaactgaccttctccaaaagcttggtccaaagaaagaggatccaatccaattgcggatagacgagctggacgataagtttaggagatatcaagtgggggaattagggaaattatctgcatacgactctcaagaggagcttgtgccgtatctcctagatattatgaatactcctttcccttcgggattcaaaaacccacgtgtttcgtcttatgacagaaacacagatctatctcgcatttgaataactttaacaccataatgcgagccagtaatgtgacgaacaatttacgtggtagtttgttcaccacctcgcttgttggagcagcaagtagctggtttaacaagtttacccgtcattcaattacttcctgggagcagctatccagggatttcaagaagcaattttaggccgctagggataggcgacccgaagcggcctcgctagccaatataaagcaacattctggtaaaacacttaaggcgtacttaagttattttagcacggctgccgctagggttagaaattttgatgacaacacgcaacttatagcccttcaagaggggatctctactgatccattaacctcagggggcgagttgtgggatgacttacaaggacgttcagtaagaagcatcactgagttcaacaaaatggctcaagtgtttttctggaaggaagaagctcaaaaggaaatgaacttgttgaaagcaagctcggaaggtaaacccaacaatgtttcaacaggtactgcttccacgagaattgataactcgggggcttctagtctgaagagaaaggacggaattaaggaattgtcaagaggatagaaagaaacaaaagaagcatgacaaatacgtgccagtgtatactatttatactgagcttaatgaaactcgggagaatatttagctcgcacatgagcagaaagtagcctttggcaaacccgaacctatgaggaattcgaggagcaaaagatatcctaacaaatagtgtaaattccataaggatattgcacatacgaccgacaaatgttgtcaattgaaagatgagatagannnnntcatcgctcgaggccattttaagcattacatgaaaagataggggatgggatacaaccagcccagtctgcccaataacccgaataaccagggcttacaacctattcctgtggagggagaggacatcctggttattttgggagggccacatatcacaagggaaagaaataatgcccagaaaagatatgtgaaagaaatgaagagtctttgcctccaaactttccaagaaggtgaaaatcaaggaacctcccattacattcacggaggaagatgagaaaaacgtgagatatcctcacgtcgatccattggtgataaccatttagctcacaaataaaaggatgaagagagtgttaatagacaatgggagctcggtaaatatcctttgcaaggagaccctaaagaaaatggggctcaaaaaagcaaaattaaggtcttgtatggtgaacctttgtggattcactagagacagtatcgccagcattggcataatcgagctcgccttaactttaggtgaggcgcctttatcttctactgttatgcaagactttttagtcattgacttgacttcagcttacaacatattgttgggtcgtccaatactgatcaaattaagggcagtcagttcgatcaagcacctatccttgaaattccaaacgccagatggcgtgggagtggtgcgtggcgaccaaatgttggctcgtgattgctatcgcatagaaaggccggtcatcagttgatgacgatcttggtaggagaaaacgagaagaaagacgaagatcttgatccctgagttcaagatgaaagaaacctgctctaaaaaactaaaatgaaaattttggaagaaggtcttttgacccaggaaatcccacaaaatatgtatacattgggaagaacctagacgggaagctcaaatagcaactaatatgctttttaaaggcgaactaggatcaatttgcctggagtcatggggatatgatagggatgaaccctaagattatcttccaacacttaaaggaggcccctggattccaaaaggcaaggggcacaaaaacaggtagttgactagttgttagtcaacaattttatacacaaggtgttttatccctcgtggatagccaatcctgctctcatcccaaaagttaacggaacttggagaacttgtattgacttctctgatatgaataaggcgtgtccaaaggattgtttgccagttccccagatcgaccagttagtggatgcaactactgggcacgagcttatgtcatttatggatgcatattctagatataaccagataaaaatttacgtccctgatcaagaacatacaatcttcataaccaacatgggattctattgttataaagtcatgccgttcgaactaaagaatgttggggtaacgtatcagtggttggtaaacgaaatgtttgccaaccaaatagggcgaaacatggaggtttacgtcgatgatatgttggtaaaattgataaaaagtaaggatcattcctcagacctcgcggaatgctttaaaatattaaaaaaaatataacatgaagctaaactcaaaaaaatattcattcggagtctcatcgggaaagtttttgggattcatagtnnnnnngaggggtattgaggcaaatcttgaaaaaatcaaggcattaatag

SEQ ID NO: 33991 - DNA, 2489 bp, Cannabis sativa
  modified_base (2311)..(2317): a, c, t, g, unknown or other
gttatgaccagcgggtcgacgtgagggtatctcacgttcttcttgtcttcctctgtgaacgtaataggggtataacaccctgcccaacagggacgccacatgtgtgcttttataaattctacttttactacataagtataattataccaaatagtgaggataatttaaacttttcgatttaaataaactcaaaaactttctttataagtaaatactaatcatcacggggaccccctgtttgtttcaaaatatttacaaccgatttaacagtgcttctacaacaaaattttatatttcaaaatacaatcaaaatggaacacccagatcactgggccgtaacaccgcggctggtatgtacattgctgctacgaccttcaaactcgtggctactcagctttggccttccctttccctgcaccatgtagcctgcaccatgtagcacccaccatgtagcacccgtgagtccgtgagtcacagagactcagcaagaaaagtgaataaaatgataataataataacatttatcgattacacttaaattaacattcttaaacttttacagaacgttgtaaccacaattctagtacttcataaagtacccttaccactcgttaactacgagttgaatatgtcactatagttgcccgataaagcaagcgataagtacgaaacctatccacagtttcatgagtaattactcgtaatggtaatgactatttccaaaacctcattcataaccgaggcttaataaacaaataatttgctcgatcataatcgagactatacaattcaattgttaatcacataatcctaggcgatacgtaacacttttcttacctcagtccagagcataagtgtgcgggccgacctgagtggaaacaagctgggcgatcccggtcctatttcacgacaaccaaaactcaataaaaaccttaatccaattttcggggataatccttaattctcgtaatcggacaaatcctatcccctcctagatcaagctaactcaaacatcaccaaattaccctatcttaagttcttagagacatcccaaggaaaaatcggtttcgaggctaaaacttgaatttttctctgctgacataaccggtttgcgggttttacagcaccagtaaaactagttaactggtttctctgctagcagaaacgggaaagactagttttcacccaaaaaccacacaaatctactccaaacctgcccaaacttcccagagcagatcaataccataaatacaatgtatcccaagcactaatttacaataattcatccattttctcaaaattacactctcaaatggaaattaaactcaatatacttcactaataatatccaatccaaacagccgttatatctaacccccataagtttaaacagactcagaaactaacctaaaagcatactctaatcctatcttaataccacagccccaaaacctcctaaaaccctaacttatactaatctaaaacttcaaaaaaataagggcaaagttttgaatggttaccttcattgtacacttgactccaacacataactaattcagctaagaagatgaagaattagcaagagaatccttaggatgcagttcccctagggttcggccaagaagaagaagcaaaccacgaatgcttctaacaaaactaataaccccccctttttactaacttaattttctaatttctttttattcattttttttaaaagcatccactcatttaatataaaatatccaaatcataaaggccattatacccgtttaatcttaaattaaacctagggcattttagtaattctagctaatccgccaaactgattttctaagaaaaaattctaaattagtcctgaatattcccagcataaccaatccctaaatgttgtgacatttcggatcacaccgtcctacttccacagtcaccaagcctagaaaaaatattttatttaagaaatggtatccatgatacccacatattctaaaataacctctgtaattaataaattacgctttacttaatcatttaataaatttactctaattacgctaagtaagatcatatcttactccattacaaaaataattacatatttaataaaatatgtccaattaaatactatattattttctaagatattacaagggggttcctcagttttcaccttcttggaaggttctggggcaaagaccgactgctcgttctttatttccttcacatatcacttcagagcgttattgcttgcccatgaaatatgcagccatcccaaaataaccaggatgtcctctccttccacaggaatagnnnnnnncccctggttgtttgggttattaggttgaataggctggttgtatccttcgccctatcttttcacatactgtttaaaatggcctccagcgatgagactctctatctcatcttttaattggcgacattcgtcggtcgtacgcccaatatacttatgaaatttacaatatttatta

SEQ ID NO: 33992 - DNA, 1452 bp, Cannabis sativa
ggttgtattttttatcggtttattcggtttggtttgggcggtttattcgggttgggcggtttgtaaattttattgaacacccctaattaggaccacagtattctagttataaattataatattaagtgatgatgtaggtgtccaaaaattaacagtgacattataatttttttaaaaaaaactaattacaattattattaagtgattattttttttataacagctataatatatattttactattataaaagtgatttattggtatcatatttatagattattttacttttacaagtttaattttattacaattctattttttttttgtccttaccatcacaattacaagttgaagtcaaatttctttcaaaactacaatactaatccttttctttagcccctacttttctaattacataaatgtccttccaggttgatattaaaattaaagatattgtgttggtattatcaatagccaataggattattcatttgttttttattttaaaaaaaaatgataataaaagccaaatattacatatcagtgaaaattagcaaaaaatattaaatttacttatttaaaaagttcaaatctttttttttttagagaagttgcttaaaggtaattattaaaattatactttttaaaaataaatatagtgatatacagcttaaaaaaatatgatggatcatactatttgtatgactagacttagatatattgttaactttgttcataataaataaatagatattaatggcacgacatttataataaaattttagatgaaaattagcatcataaaaaaaaaaaaaaactattaataaattaattatttaaaaattattaaatgggtttaccaaaaactcccaaaactctttaataattttcttcactttggtcacgcaaaatttatatttacacactaataactctgcaagcaattcaattttagtatcaaaagtctgggtagttttatttataattttgttagggaggttttatttgtacccgataaagttgtaagtgcactataatattaaaaattaacgaatttggtaatactattatttttaatatgttaatcataaaaataaaaataaaatttgtgttttaaaaaataaaaatatgttaactacttttatttttaattttaaaacagaaaataaaagtatgttctataattttcattttcatttttatttattgattttatttaagttggacccatgtctatgtctggggtcgaggacatagtacgagtacgggactagggtggggtcagaatttaaaatattaattaaaaaaaaaaagttgtttaaaaaattctgaaagtaaatttttttttagaaaaaattgaaaatttttattttcatttacaaaattgaaaagtgaaaatagttttataaaatgtatttttaaaaactattttttacttttttaattaaaa

SEQ ID NO: 33993 - DNA, 1581 bp, Cannabis sativa
ctcacttgaagaagatgtaacagttatgttcgttggtatatcttgacattttctcaaaattcaattataggaataaaccaatccaaagatcaattttgggcaagagtagaaactgagtaccacttacttgagatatttattactcaacgtagacctaaaagatctttgcagagccaaatgacaacaattcttgctgcagtttcaaaattcagaggatgcattaatcaaattgaaaatataaatatctgagtggttcttcatagcaagatattgtgagtgtttattatattagttaatttataattgcttgccttcaaattatattcatatcattaaaatattttaatttttatagttaaatcaagcaaaaatattattatcacaagatccaaaatacaaaagaggatttaaatacgatcatatgtggcccattcttagagattgtgagaaatttataaataataatgtcaatggagcaactagatttcaacaacaaggtggtagctttactggatcccaatcaggctctctcaattttgagtcatcgatattgaaatctcctggtatgaatttatttgatctcaatatgactgatgaacaaattgatgttaacttaacataaagatctattggtgtgaagaaagtaaaagaaaaattaaaagtgaataacaatataaaaaactaatggagcaaagtaaacaatttgttgaagcattaagaaagagtaactctgacagaaataaaattcaaagagaaaaaaaataggattcaaaagcaaaaaaaaaaaaaaatatggctacaaggagagaagaaaataaaattatacttatggatttgaactctatatccgatctagagagtcgtgagtatattcaaagtgaaaaaaaataataaaaaaaatgcacaaacatctcaacataaagaacaaggagaaggatctgaatatgaggattctcaaacaaatacatatttaaaagttttgattaatatatataattatttacttttttcttaaaagtattatttaattataaaaaactttaaaaaaaaatatatattgcagtctacagttcccactaaatttggtgagacactgtagacaatcccaattataagtttaattatagtgtcagattggattatatatactagtgtgaaactacactatttttggtattttacatgccggttagaaatagccttagtcaattaaaagacaaaccactttgcgtgcggttgcattctatttagtaataattaaattaatgaaattaaaatatatattaaaaaaatactgaaaaaataagtattttttttactaaaaataaaataatttattattttattaaatctaaattatatgtgttatttaatttatttatttttaaaatttctataaggatcgatacaatatatattgttttaccgatactgagtagtcatttacgagttgctagggatatttacctccactcacgtatcaaaaattgttggactttgtgccctaaataaaactctattttaatgtaatctttatcattcaattatcaataaagagagagaagtattttcatcacttat

SEQ ID NO: 33994 - DNA, 1906 bp, Cannabis sativa
taagaaatctctattcctagggcgttaagtcaaatatcacatactcctaattatcccagtttctacattattaacttatcacaatatttcgttcaattttatggattaaacttgttatgacatttttagcccccgatcgagtctccaaagttgccacacctgaaaatatttttatttgacatatagctcagattacattcacatatgctatataaatctccttacttcattaattacgcttatttagcaacttatatcaaatttaaaattgatgttgaactagattagtaggatcataatcccacttatttacctaattaacccaaaatataaatatacaccgtaattatttaccattaggcttatcaggatattataaccatcccctccttataaaaattttatcctcgaaatttacctgaataatttggggatacaactcttgcatttatgactctaattcctatgtcgcttcctaataaaataagttgtttggagttcaatatcatcctaactcaaaatacgtgtcgaatctgacacatactttctcaacatagaaatgtgaaagacattatgcaacctgaacaacgagggtggtaaaactaactaatatgccacctggtctatccactccaatatctaaaaaggaaagatgtatctaaggcttaatcttccattattttcaaatctatgcacctcttttataggtgatactcaaagaaatactgagtctccctcttgaaatttaatatccctatgccttaaatcagcatagcttttctttgtacgcaatgaagcgagtatatatcttgaactcactctatgattttataagttcctttgaaatttttggtccatcatgttcttctatacctgtgttactccagtgaacagatgtccaatctctctctcgtaccacacttattaaagtacctaaccaatcgtaaatttaatcatcacttttagacaaacactttgccaagagaaaagattattccaattaatctaacttttatcaaatatgtccacgacatgtttttaatattccatagatcctcccagattacccatctctgaagaataaaatattatgctattttcactttaatccccatagttctcgataaccatcattaatccttaacatcataaccaaagacatcagctttgggatttcacaaaagtagactattttttgtatgaattctatatcctcatttatcgtataaattttctacactgatagacagcatactacctcagtatgtccaactgttattactcggtcaaaaccataagattccacagtacatagttcataattacgtctttctattcctcctattggacctcctaagctggtctactgagttaactgaataactagttaagtatttatttctgatagatattcaattagagcacttcttatttcaactcactaacatatacccatctcgataccttgtaaatctttacttgttaatacatcccttcctcttgataatctcggaaacaacaattaattttgcattctaatatgaatctttctagcgtactttgtcctcactcgtacgctttctgagataaatcactagaagatttcccatcttgagatttacccaagttaagtatgcttaactacaaggtaagctcatggtgggttatcaaaaactagaagcttctttattgttcctacttgtatttcttattttcgtcctttcgttatgtaaatccaatttccatcactgtcatcattatcctcttacaattcctcgtcgattttgttcacttatgattgaggaatttccatcttaggggttgtttggtacacaactttccttactcgagaataggaatactaaatctaacatgtgttttgtaacgtccccgcttcaagcctcca

SEQ ID NO: 33995 - DNA, 1841 bp, Cannabis sativa
ttttttttttttttttctctcttacaatatataaacaattaaaacgtaaaaaaccaaaacattgaatttataatcaatctttttggtttttgcattaagtgacattcactatatatagcctcccttaattaatcatatgatagtatatatatacagtcgactgtacaattatagggcatgcacagtcttgcccaattgttatatccttccataataaatttaattgtgtttttatttttatttttaaaaaaaagactttacattggttaaaattggagtcaataataacagtaaaaattaacatatatatatagccatagactcaaaattgactactcttgctgtctttcattactccattcctaacactttttattagaaactcaactactcctctgcaactcattaaatttggacagagaacccaataacccaacttccactttctgtgttttcaatctttttgaggtttctttttttctttttcttttttttttaggttttatttaattatcatcaccagctttttcctctttacatatgttatggtttatctatctacactctttatgttatggtttgaccagtttcctttgcctatctaatatacatatatataaagctggaaaataaatatatattaatgagtgaaccctcaagcaacaaaaaaaaaaaaaaacagtacacgtaaaatactttattataaacatcatcacgtgaatttttattcataatatcttatatataaatatatatccaactacaaataactaaaacaattaaaaaccattcatgatcatatataatgcgctagctatataatgagctgatattttattaaggctgataggtgatcttattgtgtgtcccattaatattataggggataaataattcaaaatcacaattaaacttaatatctatgcatgtttttcatgatatataatggtacttaggttttaattatgtgaccttttttctttcacggccgggttaataaaattgaaaaatacccatatagtactactcaattatcatctaaatctgattttggaaaatttgtgagagattccttacacaacattataacaatattttttccaagtctatccctttcgatatatatatatatataccaaatttttttaagaaaatatgaattaaaaacagtcagtactgcccaaaaaaaattctccatatatattcttgtttaattggggaccaaagtatagtccgagtccatacaccatatatatggccggtatgataaatacaaatatatttatatatatggatttattcatgtaacatagaatattttatatattttgacagcaatattggactgatatgatgatcagattcaggctgtgtttacctttgttaccatacaaaggtcagattggtcattatgggaatcattttgcagcacaagcacacacacacatatatatatacacctgctgtgtgtgtgcatgtcaatatcaacaacctagctatggtaattttgttgactcttatggtcaatattattccaccttaaattaatatataaatacttacattttttttttaaaaaaaaaaactatatcatgtcaaacttaattagctttattaatatattagtgagatcttattattaatgttggtataattacatgtattttgacgtaattgatgttcaactttgaatgagtagttgttataaaagaactagatcgagatatgttttttttttctttttcttttttaatttattttatggaaaaaaattatgatgacaaaattatacgccagctcatgaaataagaatcgatcgatccatgccagaataattaaat

SEQ ID NO: 33996 - DNA, 1204 bp, Cannabis sativa
ttttaattttataaaaacgacatgtcgttttatattaaacagttacgtgtttgacgaaattagtcaaaatcatacaaaactgttcaaacacaaatcgtggccgcaatgtccacaaaattagttggttttgtttgttatttttcatttttcatttcaagtaatttcaacaaaagtttaggggtatatttgccacaaaaaaaagttaaaaaattttataatacaccccttttaaaaaagtccaccgatccctaaaagttttttatctattttttttcatagtcatttacgttgtacttatttaaatatcctgcaatattttaataaatttaaaaaaattaacacgccaaaaatagagttcaaacagtcaatttcactaaagtcggtcccaagattaagtagactttaggggaaaaaaaattattagatcttttatttaaaaaaaaaaaatatgtggtattttcgaaactatgtataattttaattgaaaaatatttttttgagggtcactagcctgggttggccttaggcatgggcttagtccactttagtttagacccgaccttaaatttcacacgcgtataaaataaaagaggctcatacacaaaatagactgtttaaatcttattttcagtgtgttaaatttttcaaaaacaaaattttaaacgatgtcttaaataactataaaattaaactaaaaaattttagggattatttcacaaatagtcaaaaaaattataaaaatacagttgtacgaaattttaaatattttttcgattattatgattttatttacagaaaatacagttattttatgttttactcttggtcatttgttgttgattttttattatttgtatgttatttttttgttgttatttagaagttatttcctattacttttatattattttcgtgttatttttataaataatcataataattgtaaaaaaaatctttaaacgtaaaaatgtaattttttttataaaaaataatgtcgtacgtaattattctaaaataaaataaaggttaatttcacaaatgcacaaaagcaacaaaaatacggtttcatagaattttaaacatttttaagatttttttgattttatttacataaaaaatagttttttatgttgaaattttattcatttgttgttaattttttgttatatatatgttattttttgttgtttttttgttgttattt

SEQ ID NO: 33997 - DNA, 2164 bp, Cannabis sativa
aagttgagtacgtgtaggcaaacagcctgaaagggctttctaagcaaaatgtaaaaccttaggagatttactaattagtagcactgtttttaatactgtaaacaatttatattttgtaaaaaatttactaattataataaatataactataataaaaaattgaaaaacaaaatattttgtcatataatttagggagtgtggagattgtaagtgggccaggcccaaaaacaagcctagcccaacaaaaggcccacatacacactgtctcaaatggaatggtgatattcccacgcaccactcaaactctgtcctctcatgaatctcaaaaccccaactccttctcttctcttcttctcctccttccctcgatctcggaccacctcactacactctccaatggcttccacactcgctctacctctctcccactcatcggatccgactacttcttcttccgccgacttagacgaccttgtttgctgcgacggacagaaacgagttcagccactggaaacgccgtcgttttgctctgaatctccttcccggagtctaaacggaggggaatcgcgaattgagagggcttgggatcactggaagagactcggtaggcctaagctgattgttgctccaatggtggataattctgaacttccttttcgtttgctttgtcgtaagtacggagctgaagctgcgtatactcctatgttgcactctcggatatttactgagactgagaaatatcgaaatttggagtttactacttgcaaggtttggattttcttttgtttttagtcttttggacaagctttttgattttatttgataaattcaagctgattttgatgaacttaattggtttagtaaatgtataacctgaaagatcagttctttttgtttttgttattttgtgaagtataagctttgaattagagtcttagtgtgtgccatgccaatataccaaaaaaaaaaacaaagttttttcgaaattttttaggctaattaggatttttattccttgatctttcacacgtattgaatcatggcccctgaatttttggacttttgtcaaattttactaacaacatggacaattgtcacgatagttataaaattgaagagaagtccttgagtccaacaattcaatagtttgagagaatttttaataacctaaaaagttcagggcaaaaatcatagttagttaaaattgtattattaaaataactttccaaataaaattatttgcaaaataatcaccttttgagaccaataattacactttgcgaccataatggctgtaatgtgttaattctatgtggttattttgcaaatttgacaagttgttaatttggcaaattttcctgatatgtgcttatcatgattgcaggaggacaggccgctatttgttcaattttgtgctaatgatccagacattttactggaagctgcaaagagagtggagccgtattgtgattatgtcgatattaatttggggtaagaatgacttaagtcaatcaatttctataatatactcttaatttttaaagaaagattatcttatcttagtttacatatttgtgctgttgtatcattgaaatgctatggtgtatttggttttctatgattagagaaagctaatgagttattcttcgattaatgaatatcgagaaaagtagtagcctaagtcattttaaattcttatggaccgttttatagaagtttttcgtgctgatgggttttcgaactaatctcttaagtgtatgaatttttgtgcagttgtcctcaacgcattgctaaacgtgggaactatggggcctttctaatggataatcttcctcttgtgaaatctttagtagaaaagttggctctcaaccttgaggttcccgtgtcatgcaaaatccgtctctttccaaatttacaagatacaattaactatgctaggatgctagaggaagctggttgctctcttttagccgtccatggacgaacaagagatgaaaaagatggaaggaaaattagagctaactggagttcaatcaaggctgttaaagaatcggtcaggatccccgtccttgcaaatgggaacataaggcacatggatgacgttcataggtgtttggcagagacaggtgttgaaggggtcctttctgctgagactcttcttgaa

SEQ ID NO: 33998 - DNA, 1178 bp, Cannabis sativa
ttaagcgtttatatattataatgcataatctgggactcgaacccaagacctccaacacacacccctcctatggccacttgagctaaataagtgtttcaattcctttcaagttctccaatggtggaagggtcacgagtgttgttatccctttcctctctctccaatcaaacacctttgattcacactaaatagcatttttggcatgaaacatttaccataatccaaaagcatagtaatagtatttttgatttgcatgttttaataaaggcactgattaattaagtcaaccaaaatagtatttataatcagaaattaaaattgtctgaatatacaaaagaaactagagagaagcacaacaaatttctagccatagaaaacaccaaaatactttgtcaactcctgtccttttcatcagagtcaaatcaagtcaacctcaccttctaaaatgttcttcatatcagcaaactatcagaactacagcccataatctaaaagtaccaagtattatccaaaagcataacatatagactatagtaacagtaattttgttttgcacgccttaaaaaaacactgatcataataagtcaaaatcacaaattaagccaaacaaattcaaaattgcttgaagaggtcttaactagattattttacaaaagaaactactacattaatcagtaatatattattgggtccgcctcttttagttgggcttggaccaataaggggctaaaacccattttggttgaaacaattaaaagaaaaaaaaaggaggtttttacacaaatattggatttttggtaaaaatttacaattttactgtcacatggaaatttttacaagaatactgtatttttataaaacaaccgtaaaacactaaatagaacaattaaaaacaatagtggaacaattaaaaaaataacagtagtttaacagatgaaacttaacacagtacacagtataaaaaatacatagtatttttgaaaaaaaagcacaacagttttgaaaaaaatttcaccccacagtacaaagggaaaaaattaaaaattttagtatgtattgtaaaaatcccaaaaaaaaaaagagaaagaagctgagataaaagaaaaaaaaaaaagaaaggggaagaagagaaagaaagctagagagaaagaggtttttgtcattttgcattgaagatc

SEQ ID NO: 33999 - DNA, 2137 bp, Cannabis sativa
  modified_base (1310)..(1311): a, c, t, g, unknown or other
  modified_base (1904)..(1907): a, c, t, g, unknown or other
caaggaatagtgaaagttccaggatccttacactttggaggaagcttcttttggaggactgctgacacattctcccccacacttactttttcattaccccttcacttgtgcttattggtgcaaagatccttcgaaaacttggcatatcgtggtacttgtttaattgcatcaagaagaggaatgttcacttccacctagcggaatgtttgaagaatttccttgtcagcttcttccttcttagtattcttgaatctacttgtgaagggtggctgtatgacaatggtagggctggactgtttggcttaggtgcctccttttcatctttagactatcatcttgtggtttgggtggcactggttttagttttgggatgataggtgggtcgtattgtttctcacttcttaaggtcactacactggcattctccttaggatttttctcaggttgggatggtagttgattgcacaattgagattgcatccgattacaagattatgataagtaacccacttgatgaagaaaccaatttcttagtgattttttcggtaatttttctagcgacaatgccaatttcgatgactttttcaacgccggcagcaactctggtgacttttccgacactgtcagcttcttcggtgacttttttggcgccaacagcaaactccggcgaattttccaacaccagtgacaactccgcgcaatccctatagtttcatttgttttatttttttttaaaaaaaataagatatatgaagggaattttaatattttttatggtagtttcaagtggcatatctcatgtatgttaagtttttattttaaatgccatattttttcctattaatatgttttcttaccatatttatgtaaactagttttattttccccatatttatgtaaatacccctattttattttagcaacatagtccatttaattaattaaacttaaattggcttcctgtatgcatctaagcccaaaagcaaacatataagctcacataggtcaaataattcggatgggtcctatcatgtttctaggtctacacagatgaaagaaattgcaaaatttacttgttataaattatttataagatctactgacaattggattatgattaaaattagatcattggatctgtcaacaacaagttaatcataacaatttagatcaaataaataatatgtttgtaaaaatatttgaataaataaatacacaaacataacaaacatgtaacatatatctggaaagtaggttaagatatttctattttataattaaatatttaaaatatatcttaactagaattnnaaatttaggttgttagaaaatattaaaaaaaaaaataaaatctaacaaatccccttcatatttaaaattctaacaaaaattcaaatatctaactaattttaaaattttcagtttatttaaataatttaaattaattaaatatctaataagataatataatataatatcttaattaaaaaaaattagatatctctaatattaaatttctaatcttataatttaataaatcaaatataacaaaataaatcaaattggaaaataagatattttgatggttaggatattatcaattttatttaataattaaataaaacaaaatatcctaagtttaaaaattttatggttaccaaaccctaaaatttctattcaaaacaaaattaacaaacttttcaaaatttcatgttattttgccaaacataaaattttatttaaaataaatatcttataagataaaatgttaaaactaatatttttctaatcttataatttaatttaataaaatatatttaaaaaataacaaattttaaaaatctgatatggttggcaaatttgaaactttaattagattatttctaaattttattaatattttnnnntcaaaataagatcatttcaaatttaaaaataaaataagtaatatctaatcttataattaaaataaataaaatagacaaaaataatcaaaaatttcaaaattaaccataaggctagtctgtggaaaaattaaattttctaattcaaaggctacaaacatctaaaactaatttttaaaggattttgtccgagcgagctgcatgagacaaggtcctgtcccccacccccccac

SEQ ID NO: 34000 - DNA, 3755 bp, Cannabis sativa
  modified_base (2843)..(2847): a, c, t, g, unknown or other
  modified_base (3303)..(3305): a, c, t, g, unknown or other
  modified_base (3727)..(3730): a, c, t, g, unknown or other
tgcaatttattgaaagctctaatgagataaggtttctcttgaggaagagatgttcgtcaactgaatgaacattaaagaattgttagaggctgattgggatgatggaatgcaggtgacttttcttccctttctttttttctttactattattgttgtattatttttcattagtgctgcattatacaaattaaattaaaaatattgaaaaaaattgattgtaggaatacaaagttactataagggcaaaaattttttggaattgataccacttttggttggtattatatgtcttgcaaaacatgtttgagaaagcttgtactcaaagatggtgtttatacctgtgatcgttgtgacaaaatatgtgtctatcctcttttaatgtaaggcaaatagttttgtggttttttctttaaaattaaaaatattatgttattgtaacatatttattctgattttgttgtctaatataggtacaaaattcatataaaagtcagagatgaaagtgcaaagacgacttttgtcttattcattttgtggctgagaaactacttgatacatcagtaaagaagattttacctacaaataacaatgatgttataggagtgattcaagcgctttgtagaaaggattttgtttacaaattaagattgaatcattttaatttaaaagacggatatgagaactttactgtatctaaaatttttgtgccagatgatatattggaacaagctcatgaatccaaaaagaggaaggtaatatttcaatgcaaattctaattttgaatttaaacaaaaactcaatacagtacatgttatatatgtaatttgagaaaataaattgctaattgtttttgttggaaacaaatattgagaggaatgaaaataactttgataaagtaattctattcacacttactatcttatatttattattaaaaaaagttatagggagattagttcaactaataattttctctttcattattaacatattacaggatttggaagttgaacatgggactgtcgctgtgaaagtagaaagataaaatttcaaattgttgatgatgaagaggaagtcgacgatgatgcaaaaaattagttcacatgtatttagtgtttattttggccttttggctatttttcatttgtgtggtttgaaagattttatttcttttaagttggttttggtctaagtttttagtacaaacaagtgtttgtgtggtggttgggcatctatgccattttcgttgaatattggggtttttggctatgtgttttatagttgaatattgggcttttggttatttgtttctgtctattattaatgtggatgttaaacctctagatcatttggatttcccacttttggttggtattaaaaaatttttattttacctcaaatcaattcgtatttattgtaaggacacatgtaattttatttcatatgttaattttaccacctttctacatatttaaaataacaatttaatttactaatataaaaattttactttaattataatagaaatatcaaaaatattatattgtacatcaaatcacttcatttgtaaaataaaatttagaaaactaaggtcgaactcgtgcgaagcgcgactttgttacctagttgtatagtaatacaaattaatattattagtgatgggaatacaaaaaagaatattataattataatcataatgataaaatagtattgaaatggtagttataaaattgaaaagacattcataattaatatgtaacttgtgtatgtatattttttcttggacaaaatatgaaagtctcaaaaaataagaaaaatggaaagaaaaaaaattataaaatgccacacaaactaatacaaattaatatcattagtgatgggaatacaaaaagaatgttataattataatcataataataaactggtattgaaatagaaattatgaaaattaaaagacactcataattaatatgtaacttgtgtatgtgtagtttttttcttggacaaagtatgaaagcctcaaaaaataagaaaaataaaaagttataaaatgtcacacaaagttatttgtgcttttccttatttatatatatagatatagattataattaatattaatcaataattaatatagtaaatgataaaagaaatagaattgtggtattattttataaataaaaacataactgataaagaattagagctttcattttagttgagtatagcattattactatatttaatattagttaattgttaataacttgttacagttttattgctttacttaaaaataaataaataacagaggtacatatagtaatgttcatataaaccgaaaaattgcggtttaaactcggaccgcgacaatctaaaccactatagaccgtaactggagaaactgtttttgatggtttggttaatccagaccatttacggcgtaatggttcagttgcagtttgtaataaataattaacagttaaaccagactggtttataataaataattgatttatatatattttatacatgattatatgtataattttaattttttttttgtgtgtcaagttttttattccatcaattttagatttttatgttatgtttgacttttgagaatatttttatattgttatttatatattatagatctattacttattatgtttaatatatattttgaaaaataaattaagaatttagtaaaaatagtacaattacttaaaaaatatgaataattataaattccacttaaaccgtggtttcgaaccaaaccaaatcgttcttaatggtttggtttgagaaatttattggtctggtttggtttctaatattcaaannnnngttatactggtttggttcaaaaattatgataatccagaccaaaccaatccgtgaacacccctagatacataaagaatacaaatttaaaatattggtttttcaaatatctattaaatatgtttatgtgttaataaattatgatatgatgatgaataaaaatgttcatacattaaatattggtttttcaataaatatttattatatgtaaatatatattataaatgacttataataatttatggtaatgagccattgttatgatttttttccttacaaaaattgaataaaaatttaactaaattagaaaaattgagtgaaaaaaattaagaaaaaaaatcatatattctaccacatcaccttgtttaattttaggattatatatacaattaaatatagattaaatattagtataagtaaatagataagggtgactattcaatagttacatttttattnnnaccatcatggttacatttttctttgacctataatagcaggttactaataggtaaacattcctttttttagaattaattaattataatgatctaatttcttaaagtaattaattaaatatttaacaagacttcttttagcaattaatatataaaaataatttttttatatatatttaaatccttacattaattattttaacaattaagtcatttaattataatatttacaataaaattagtaaacttctttttacacaaattaaaattctcttcttataataaatttttaaataattacttattttgttacaattagatgaactaaatatgagacttcaggctaggcaatcgataaccagtgtggccatttttttttctaaaaaattcttcaacttattttactttttactttttaaatattnnnntaaaaaaaattaaataattaagtgt

SEQ ID NO: 34001 - DNA, 1434 bp, Cannabis sativa
tatggcacaggtcacctaaggcgaaacctaggccaaaagtgacttttctcacttgtcccttgctctttgatgtcgagagaacccgttcggacacttttcctcccatgattcgcgaggagtgacctgtgccattctaccatggcagaggtctccaaaattggagagcactgccatttccttatggcacaggtcacctaaggcgactcctaggttagaaattacttttgtcacttatcccgtggtccttgatgtcgagggaacccgttcgaatacatttccttccatggtttttgcgaaggagtgagtgagacctgtgccatccattctcttatgtatggcacacacaggtctccaaaactggagagcactaccatttccttgtggcaatggtcacttattgctcctttcttgtggttttagtgctattttgactttatacataaactcgagtcattttcatgcccaaaccagtcaattccttattggtttctttggcagattgaggtccctagggcgaaaacactcactcgggtccatgaaccctagtttgggcacacttgggtgtgtgagccctggtgccgaatggttggttgacgttttggagccctctagaagtgccatggggccctcaagaagtatgtcttgatttatttgacatttatgagtcttggtcaaagtcgcaagattaactttagtggcttcatggtactcttggcatgtgggtccttgtgcaagagtagccattttaattttttttgcaaaaattgggtataacacaataatatcgaacaactttcgagaacatgtcgaaaaaccatcgaaagaaatgacaaaccagaacataccaaaaaattagatctcgtgatttcatgccaaaaaaaaaacagaaaaacaatacaatacaatacaaatcacaaccacatagatttactagaaactagaaagagagagcattgacgtttagtgcgaaggtggatgtgcgcaatagccgatgtgagtaggcaaatcagccacagtggatgtgcaatgaccatgtggaacaacaaatgttcgacgacagaaaagttactggtggttctggcaacttcgtggtggtggtgttttggagtttggttgatgagagagagagaattaattgatgggtttgttgttagagaggtaaaatttgtataacatataaacttaactatacacacgtacatatataatattaagtgtacatttttttcttctacatttaaaacacgatgttagctctaccccaaaatgcatttttgtatgtcctcatatctttatatatgtaaaaattaaatttatattaacatatttccactcgtcatcaattaattttgtgatataactccatcataaataaacaaacttatatagtgtaaaaacatataggtctcactgttggattaaaaatcttttgtg

SEQ ID NO: 34002 - DNA, 2213 bp, Cannabis sativa
ccccctagttaaaaaattaaagatattcttcttctcatggtaaattttaacaatttttgttttttacttttacactcgttagtgttctcttaaaatctaaccctacacatattgaaaaatcataaaatttcactgggacggagcccagaccgttgtgcatcacttttttattggacacgttgagagaaaaaatagttttcaagcactaacaatcaatttaatcaaaatagtgaatacctcacatttctgatagtggtacccctttttgaaatgtggcctgaagccatcttagaatatttttcacccctagtcttaatgaatttgtactactaagacatgaatattaagataaggttcacgttaaatttaattaaaatgacctcataattcaaaatttaaaaatattcttcttttcagggtaaattttaaaaagttctttccttacgcttacactcgttagtgttctcttaaatcctcacgctacagatgttaaaaaattgtgaaatttcacagggtcgaagccaagaccatcgtgcatcacttttctattagttacgttgagagaaaaagtagttttcaaacactaataatcattttaatcaaaatagtgaaaatctcatatttttgatagtggtttccctttatgaaatttggcttggacctatctcggaatattttttcccactagtcccaatgaatttgtactactaaaacgtgaatataaaaattagtttcatgttaaatttggttgaaatggctgcctaattcaaaaattgtaagtattcttcttctcatggtaaattttaacaattttttttctttatcttacattcgttagtgttctcttgaaatctcaccctacacatctcgaagagttgtgatttttcattgcaaagaagccaagaccattgtgcactacttttctattggacacattgagagaaaaagtagttctcaagcactaacaaacaatttagtcgaaataacaaaaatcttacatttttgatagtggtacccctttgtgaaatgtgactcggatccatctcggattatttttccccactagtcacaatgaattcgtactaccactactacaaaatgggtctttagctttctttttattcaacccatgccattttataaaaagggaagctaaagggtgtaaaaatacccgcttattaaaaattgacctttaaaggtagtttttttttttatataaaaaccgtaggtgtagaattgtattataccatttagagtcggttaagaattaaatgactttgggtcatataaaataaccctatcgcatctttttccttcttcctcacgaaccaaaaccagagcccagccaccagagaaagcgaaaacccttcgccaaccaccacctccgccaccctctttctccaccatttctcaaccatttgagcctattttttttttgtttttttttaatcttctattttgatacttaatcccatacacccaaaaagttttaattttttccctatttaagtgtcatccgaacccattagaaaatagtaggtataactccaaccaccattatttattgagaatatgaagattgttttccccactattcacaacgatttcatatactactaacacgtgaatatgaagattgttttcacgttaaatttggttaaaatgaacccctgattaaaaagttgaaaacattctatttttcaggataaattttaacaagtttttctttactcttaaacttgttagtaatctcttaaaatctcaccctacacatctcaaataatcgttaaatttgataaagacgaagccaagaccgttgtgcataacttttctattagacacattgagtgaaaaagaagttttcaagcactaacaatcattttaattgaaatagtgaaaattttacatttctgatagtggtaccgctttgtgaaatgtggcccgaaactatctcgaaatattttttcccactagtcacaaagatttcatactactaagacgtgaatatgaagatcgttttcatgttaaatttttttaatgacccctaattaaaaaactaaaaatgttctatttttcatggttaattttacaaatttttccttacttttacactcgttagaaatctcttaaaatctcaccctacacatctcaaataatcgttaaatttgatagagacgaagccaagacctttgtgaataacttttctactggac

SEQ ID NO: 34003 - DNA, 6003 bp, Cannabis sativa
  modified_base (5970)..(5976): a, c, t, g, unknown or other
cgaggccccgacaattccacgaaaagcacttcatggggctgggggggcttgataagggccgcctcctcgcctgggataaaattttgagagcaatcaacatgaacttctaccaaatttagggaatcaatcaaatttttactagactcattcaaggacatacccgaattctccagtgagcttttctttgctgaagttcctttagtgcgagacccttttcttcttcttttgtcattcttcacagaagaagatgaggcacccgaacccatcctaataggagtgtctaaagattgacaaaaacttggtagatcaggaatctcctgagaaaattccatggtgttttcaggtgtgtgttggacgaatggcactaaggtcagactagctttcctctttcttggttgtggacattgatgaattaaattagaaacatcaatagggtcatggaaaatagtgggctgaggttcaaacttgtctataggtgcagggcccattagttcctctaccagcccaatctcttcaacatagatgggccaaggaaagtgagtgggctcaggatgtttgtggggctgtctagaaacacaaacctcagcatgagttttctccaccatttgttcgtaagtgggcccaatttgggccataatggtagtgagaataccattatatgcaggattaggtggaggtctagaagagaaattatttataatatccttctcagatatagtactcgaaataccttgtttatgtatcctccttagacctggtgatactgaacgtgtttgcctccctctgaaattactccttatagattgagaggaagacaccccatactccttgcgattatcctttggaccaagagcctttccctccactactttcaaattcttccccaaaatggcacctgggctattatcattgactctgattaccttccttctaggcttgctaacggttggctgctgtaccacaggttctttgtctccttctccgatcggtcgctttcctttctccttggttgaagagtcatgaatctgaggtcctcttgccggcaacggagatcgacggtcatcctctctgaagtattctagctggtttcgagtgttgatacaactaaaaaccgccgattccgccttcatccatggaccataagcaggaaccgctggcccttggggagggtacgcatacgcggttgatcgaaagcaggcctttttttaatgaccaagatatccacacttatagcacagcttaggaagcttgagataacggaattgaatccattcctttcttcccctcttaatatccaagaagaaaccagaagagagttggtgagaagtatcaatttctacctggaatttaaggaagcctcttctgactaccgtcttattgttggctaaatcactttgcacaaatctcccagccttggcagcaatggttcgaatattaactccattgagataaggagtaggcaaaccaaaagcaagaacccagaacaaagcctttcccatgttgacattgtaccaatccccatcctctggccattcacgaatgatgagtaatttcccattaataatccaaggtctgttgcgaagaatagcaatacagtcctctggtttatcaaagaagataccccaaactccgggtttcatagttttgaacttccaatgcccttttaacttccatatctgattgagtatttccttgagccgtgttttagagactcctttaccgtctaagaaactaacgagaaccccaatgctaacaatctcagtagttagttcaaagtcaggttccaaatccaaagtcatagactcgagaaaattagaatgcaagacttcaatgtcattgtttggtacttcatctgcatctgaaggatgggcttccaccaacccctccttgttaccatccttaacgttgtgttgactctccaccaacccttccccactgtcagccatattaatgtcgccattgatgataggaggttgaggtggttgagaggaatttgaagttatattaaaatcatcagggaccccatccgaagacaaaacatcaatattcccctgttcacgtgtattttccatattatctccaatagtaataaccctcaggaaacagaactatcctttaatgattacaatcgtagaaagaaaagaacaaatcttaactaagtctaatcttttaagagcactcgaacagtcgacataaagtcaagttggaattccaacactctcaaaccagagagaaaagtcgagtctaaattactttcaaaagacataacattttactttcatagcaccaaatttctaccaaaaagacagaaagtaaaattttatcttcttttttagtaactttttttcaggaaaaaatgttggggaagttttgctcaatggaacttaattgaataagttttatacattattgccaagagaagacaaaatggtggtaattaattcaagaacacaaattcttatacataataacaagttcaatttcaactccattgtaaattcatgatcaaaatgcaataaacaataacaattacgaatataaacaatcaaatcaaaaccataagtaattgatatcaatcctaaatcaactattaattatactgcaacacaaattaagtctcccctttcatacactgaatcccattgtgcacatttcaacaatgtaaaattaaaacacaaagatcagttggttactgttgaagacctcatcatcatagctatatttagtactcattatagttgttgaatatcatcataaatacacatgttaatagcataaaaactcacaaagtttgttcttccttgtagctcgatgctgcaggatcctgattaggtggatgtggagaagatcttgatccttagactttaggaggtagcttcgccgcgagctcctccaaggcttttatgcgctccatcatcttcttgagctctgcatgagtaatctgaggtggaggaaatacagtttctgttgaatattttgccccactcgagcaagaggtgatgtcctcctctacagctgtgtgatttgccaaatactgtgaccgtgtctcaagcaaacacatcaaaatttcctgtatcatacaattagcaatatcaatagtaagaactaaccaatgatcaaattaaaaaagactcaaaaatataaaactttacttacataattatcttttgcgtctttcatcacccctttgtcgtccatgcgatgagttgtaagccatgtttgcgggatcctagcagggcctagtgtactcagcaacatcttcgcctcacgatatgacttaggcaacttatttggagctggaaatgcatcttgtaacaattctaataattcatcaaaaatcgtagtaggaattttccccaacactttgaaatgcatcaacttaatcaagaaattaaaagatgtgtatttttcacacccggggaataatggagcctccatctcagcaaacaaattggtataatatcgttcaacttcatcattacactcgttttcttcacctgtatacctatcccaacacgaatcatcataactgtcgtagtcttcatatgtaggcatatcatcatcacactcgttttcatcatctttatttattttgggttgttctatatcattaagaccctccattatctcatccccctgacattgttgcactgctttatttgttggtattttttcctcttctccatgccaataccaattagtataagtcagtagaaaaccattattgaaaagatgatgttctaatacgtcaatcttctgcaattggatattaacacacttgttacaaggacacttcactagtcctgtttcatccacaaaaagtctagctctctcaacaaatgccaacactccagttgcatactcatcagacaatttatttggattgttaatccaagtcttatcgatcgacatcttatgtgtgtagaactgcacaatggttaagaaaagagttattcatctaacttacatatattttgtatatgttctacttttcacattattttatttctatagggacaaataatctattccatttaagtttttgaataaagaaagtgtttgatgtaagagttttacttggtgagttttaattgtaagaggttaaggttaaaaaaaatctcaaactcaatgtttaaagagttaaagattaccttaacattaaacttaaaaatagaactcacacaaacataagtctttaactaaaataataacaaacttaagtttagttttaaattcccccctaacaaacaccccatagtctaatctacctatacttgtatacttaattagagcacattaacgagaataaagtagggtgataattcaggccacgacacaagttagacacaaacacaactcgagattttacgggtttgacacgacaagaaaattttgtaggttgtgttcgtgttctattaatttttcgtgtcacgagtcgtgttcgtgtcaactatctaaaataaatttaagaactcaacacgatacgatgacactacactcaacaatttaacttgcgaccctccaatacgataaaaaatttattcgaatcgtgatcatgttcgtatcttataaatttttcgtgtcacggctcgttcatgtcagtattttttttagtaaatttaaaacatcaacataacacgaacacaacacaccaacacaaattaccaccaaaagagatacatactgaaatctttatgtatgaaacaataaataagttataaataattccaaactatctatccagcaaaaacaaaatctttaaaaatttagagaaacatatttgtatactaataataaaaaaattactataataacatttcatcttattaaatctaaataaaaaattcatcttatctttgactacaatttcatattataaaaataattaagaaaaaaactaattagaattttttgtcttccgaactttgacatataccaaatcgtactcttaaacttttcaggttgttaaaattttttcccaaactattgagattattagattcaagaacttttgtcctattttactaacagtagcctgacatggatgaaagttcaagaaatacgatttgatacggggtacaatttgatacatatcaaaattcgatggacacgatttagtatatggataatcgtcacgttagtaaaattgaacggaattaaaaaaaaaagtccttgaatccaacaatctcaagagttcagaacaacttttaatggcttgaaaattttagagacatgatttagtacatatcaaaatttaaaggacaaaaatatgttattttattaaatcgtatacatatatataagaaattttaaaaatttaaaaaaaaattacaaaaatacttcaacatagaaatttttttaattatactctttgaacttttttatttaaaaaaatatatcgttagtcaaaataataaacaattttttctagttgttttataatttatttatagtcgtcatgaaattatttttttagttgttttatagttgatgtcgattgttttttaattatttcttaccttttgttgagcaaattgtatttctgtaatcataaaactttgaaagtgtattcttctaaataaaaactttagttagaaaaattgtaagtaaaacataaaaaaatgatatttttttgaaaattttcttatttttaaagtatagttaattttttttttttaaactatggtaaataggtagcttttggtaacacttttgtttttaaatattttaatcacaaaaataaaaagtattttttttttaaattttatttttgaaaaataaaaatgtgttttacaattacttttatttttcaattttaaaaacaaaaaacaaaagtgtgttttgtaaatttccttattattttcagttgttgattttattaaaaaggtattaccaaacgtacactttatttatttagaggtaatgaaatagaatagaataggaataaaacaatttttattctattctttnnnnnnnttgcattttaaagtattagaatatcat

SEQ ID NO: 34004 - DNA, 2378 bp, Cannabis sativa
ttgtccattcgcctgaggcctggatactgacaagaagctattaattataatgttcctctcgcagaactcagtgaataagtcaccatcgaactgaattctgttatcggatacgatcttcattggaattccgaacctgtagacaatgtttttgacaacaaagtcgagaaatttcttccatgttatggagacaagtggttctgcctcggtccatttagtgaagaaatcaactgccaccactgcatacttagctcctcctcaccctatgggaagtgccgcaattaggtcaatcccccatatagaaaatgggtaaggcgaggtcattattcttagtttcgtcagtggtacgcgaggtatatgagagaatctctgacacttatcacattttttgacaaattcatgggtgtccttgttgatggttggtcagtaatatccttatctaattatcttttttgatagactttgccaacctgcatgatccccacaaaagccttcatggatttccttgatgatttcgtttgcttctgcaggaagaacacaccaaaggagaggcatcgaatatccccttctatacaacttgccttctactatcgtgtagcgaggcactgactacaagagtttttgtgcctcgtttttgtcaattggaagttattcgtcgagtggatagttgattataggagtcatccatgtgggtgagctatctatcatctcgatgtcttccttttcacatatacttggctcatttagcatttccactagaacaaagtttagttcatccaagttatcctgcgaggccagttttgctaaggcatcaacgttagagttttgttctcttgggatttgctcaattttaaaataatcaaacctttccaagttcttctaaactctctctagatacttagccattttcaggcccttagcctggtattccctgagaacttgatttacgatcatttgtgaattactatgacatatgagattcttgaccttcaacgcttctactattctcaaaccagcgatcaaattttaatacttagcctcgttgtttgaggcgtcaaattgacatctcaaagaatattgaaacttaaagccttctaacaaaattaatatcacccctgcacccgagccttgctcgttggatgcaccatccacgaataacctctaagtgtctgcgtcttgctggataaggggattttcctatggagttattctttctattatgaaatctgacaaaacttgacccttgatgaatgttcgagggtgataagttatgtcaaactgccacagttcaattgaccattttatcaatcttccagaagcgtctggttttgataaaacttgtctcaatggttgaccagttaacactttaattgggtgtgcctagaagtaaggccgtaacttgcgagatgcgtggattaggcgtaagacaagtttttccagagggggatatcttgattctacccttagtaaccttttactgacatagtagacaggttgatggtgctttccctcttctcgcactattgctacattaatcgcgtcttccgagatagctaaataaagaagtaatctctctcatgttactagttttgcaaaactggaggtgtcgccaagtgctttttaatcctcttcaaagcctccttgcattcctctgtccattcaaatttcttgttgccttgaaatacattgaaaaatggtatacgcttattagttggcttcgaaatgaatctgtaaagtacaaccatccttcctgttaaggcctcgacttcctttggcttgcttggtgatggcatatctatcaaagccttgattttctcagggtttgcttcaatgtccctcgcatttactatgcatcccaaaaactttcctgaggaaactctaaaggaacactctttcgggttaagcttcatactgtacttccttaatattttgtagcattcagcgaggtctgtagtatgacttccactctttaccgatttcaccaacatgtcatcgacgtaaacgtctatgttctgcccaatctgattcgcaaacatttcattcactagtcgttgttatgttgccccatcgttcttcaaccgaaatggcatgaccttatagcaataaagtcccatgttggttatgaagcttgtatgttcctgatccgggaaatgcatttttgtttggatctatgcagagtatgcatccatgaatgacataatctcatgcccagtagttgcatccaccaactggtcaatccttggtagtggaaagcaatcctttgggcacgacttattcagattagagaaatcaatacaagttctccaagttctgttgggttttggaatgaaaataggattggctatccacgagggataaaataccttgtgtataaagtcgtt

SEQ ID NO: 34005 - DNA, 2013 bp, Cannabis sativa
  modified_base (536)..(536): a, c, t, g, unknown or other
aataaattacataaatgacaatttcatttgataaataattataattattaaataaatagtattggcatttataggattaaataggaaaatatgctattattgaaagaaaaataaatggttgaaataaagtggcaaaattgtaactagagatttgtcctattattggccgaccttagagtgatttttggccaatattttattcttttttaatccatatatttcatccctaagccatagttaaaacactatataaggaacttgatactctcatctcatccaactatttattcaacctaccaaacctagttttctctatcaaacaactagtagatgagagacacctcctatagtgattcaaaccctcctttattgttcttcatacttgagccttagtgaaatagtgtcatgctcacacatagtaagtcaagtactaaatcatagtgagtaagacgatggtaaccaaacccaaatgagagaaagagattcagactcagatcttgataatactccaccacagaaaggaacaagggttaganatctgagcggaatgagtcattatattccgctgcaaccaatgtaagatattctaaactactatgtatttaatttcattgttttagtaatattcatatttaagatgttaattcaacatacttgttagtaaatctaaatcttggtaaaatattcccaataggaagatggcttccacatttcaagatatgtttgacatatgataatgattaatctagcatctggaaggaagctacaagctccttccagtcaagagtcccgttagcttggggataaattttatctgtattctttgatgcctactacgtggaaatcacggaagggtgccaccttggactatccgcaactagtaagtattttctacttaaggacactaaggagactattatatttcaaaacatagtcaatggctcccgatggtagcgagtgaggatagggctttaggaactctttctgtgcatccacgattggggaagattatattcacctagagtcacaggttttgcaaaaaggtagtgggtcagtgtgatccgggaaggacttggcttaatgatcctgaagcttattttatagtatcctattcgaagcttgaagtgacagttactcatcctctaatattgaatcagatcttgtcccctgcatcagaccatggtagtgtgcatacatgcctttgaagccccctttacttccaatagcttgtctaggcaccaacttttcaaggttaaacctttgagtgacacgtgtcctcgttaatgtgaaatcctttactgcaatcgtacaccacacaatggggaagttttttaccaaccaacggtcagatcataaagttgtagtacatgcccttgttgcatgttgagtacgaaactctaggtgagtaaatggaatatttttacctgcatgtaagcctataaatactctcatttttcatgtactaagggtgaacaatttgacactagccaaacctcagctaaaattcctactagcttttttctttgtcaagagagacaaaaggagtgcagagctcgggtttatactgtaaacatttgtattattcaaacactcggctgcaaggtcaatacaacagactcgtagactaggaattattaacgcatgaaccatgtaaaaatcatttgtttattatttactatttaatatctttcttaagctctattttattagttatcgaaaatgtcagtaaaaaggtttcaaaagtgtaaaattgttatgaaattattgtgcagatactataagttaatttataatttgttgagtaagaaaattataaatacccaaaactctacttataaataggtcgtgattttcaagaaatactagcgttcttatattctctcctttctcgtcagaaaaaaatacatgaaaaaaatggtgtattcttgaaaattataacattttgatcaatctctaacaatagctttaggttaatatttatgcttatttgtattgattttgtttttatttaat

SEQ ID NO: 34006 - DNA, 2797 bp, Cannabis sativa
cctcacaatccttgccaatgccaagcttccctgtctcaatgcaaaagatggtttggtacgttctcgattggggctcacttcagtcaggtaggagtattgattcttgagtcttgactagctagttttccaccatcacaaagtaaaaatggaatatatacatcacaatggtaaaaatgaaaatattaagactgttagtataaataaatgaaaataggtacacaaatgcccttctcgctgatgtggcagtaacgagtaacgactactttataccattatcttcttctgtctgtgtatgtgtttcagtggccatatcatcatcatcatctaattcttcatgcatggcttctcttcctcttcctcccaatgccaaccttcaaactcaattatctttttccaaacccacccaaaccctttccccgaattttcatgaaaatcacaaaagctttcagctttcttacaaatctcactgccaccaaatctcttcgctctgcaaacaaggccaaattcaagaagctgtggacttgttcactaaaatggagctcgagaatcttcaagtccagcctgaaatttatggagagcttcttcagggctgcgtctacgctcgagatctttccactggtcagcaaatccacgctcggatcatcaaaaacggtgagtttctggctgggaacgagtatatcgaaactaagcttgtgatattttactctaaatgtgatgcttatagtgttgcgagtcgtatgttccgaatggtgagctcaaagaacgttttttcttgggctgccattattggaatgaattgtaggatgggtttctgtgaagaagctttgttgggtcttcttgaaatgctagattctgggtatgttccggataattttgttgttcccaatgcattgaaggcatgtggagctcttcagtggattggggtggggaaagggattcatggatatgctataaagatgggttatggcacgtgtgtgtttgttagtagtagtcttgtggatatgtatggtaaatgtggagctatggaggatgcacggatggttttcgatggaattcctgagaagaatgtagtaacttggaattcattgatggttgggtatgtgctaaatggggagaatgaggaagccattaagttgttttataatttgagaatggaaagcgtcaaacccactcaagtcactatatctagctatctttctgcttcagctaatataggtgctccagacgagggcaagcaagggcattcgatagcagttgttgaagggttagtattgactgccattttgggcagctctatcataaatttttattctaaggttggactgatagaggatgctgagttggttttcagtcagatggctgagaaagacgcggtcacgtggaatttgatcatatcaggttatgtgcaagttggaaagattgacaaagctctcagtatgtgcaggcggatgagatcagagaaactgcgctttgactctgtgacgcttgcatctttaatgtctgcttctgcagatacaagtaatttgaaacttggcaaagaagggcattgttattgcattagaaataaccttgactctgatgtggttgttgcaagtagtatagtagatatgtacgccaaatgtaagaggattgattgtgcaagaggagtttttgactctgtaaccaaggcagatcttgtactctggaacacaatgctggctgcatatgcagagttgggtcaaagtggtgagaccttgaaactcttctataaaatgcagttagaaagtgtgccaccaagtgttatatcatggaactcgattattttaggatttcttaagaatggccagattgatgaggccaaagacatgtttttgcagatgcagtctcttggtattcagcctaacctggttacttggactactctcatctctggtttggctgagaatggcttcggctttgaagcgatttttgcattccagaaaatgcaagaggccggaattaggccaaattcactaaccattgtctctgtgctctcatcttgcatagatatggcactgctgcaatatgggaaggcaattcatggatatgtaacaagacatgtcctttcctgctcggttccacttgcgacttctttagtggacatgtatgctaagtgtggtaatatagataaagcaaagagactttttgatatgattgaagaaaaggcggttcccatctacaatgcaatgatctccggttatgcattacatggtcaagcagtggaagctcttgcattgtataaacgtttggaggaagaaggtaagaaaccagattccataacctttactaacgccttatatgcctgcagccattcaggcctggttaatgaaggtttggagctttttgctgatatggtatcggaacatcatctgaagccaagtatggttcattatggctgcatggttaatttactttctaggtgtgggaatcttgatgaagcctttaggcttatcaactctatgccttttgagccagatgcacatatttttggatcattactagctgcctgtagagaacacaacaatactgatttaacaaaatatttgtctgaaaagctattagagttggagccagataattcaggaaactatgtggcactttcaaatgcatatgcagctgttggacagtgggatgaggtagaaaatgtgaggcatttgatgaaaacaaagggcctgatgaaggttcctggctgtagttggattcaaattggagaagaatctcatgtctttcttgcaggtgatcaatcacaccccaaaattgaggaaatcaatttgacatt

SEQ ID NO: 34007 - DNA, 2871 bp, Cannabis sativa
  modified_base (1336)..(1339): a, c, t, g, unknown or other
  modified_base (1976)..(1988): a, c, t, g, unknown or other
tcttacaagaagtttccatacaaaaaaagtctaactgaaaatgcaagtttcctaagatagaaaagagcaataaaaccgaatattaaaggtgagaaaatcgattatgtaagccaagaaatctcaccataaaataaaaaatattttggcatctaacttgccaaaaaaggactttacaatctccccctttgtcactttagatgaataaaatattttttaagaaagaagtacctgtaaatcaaagttagcaagagcaaacagaaactccccttatgaaacacaatcaaaaaccgaagtaacaaaacaacaagctaacttttaatccaaaatgaaccacaagtaccaaacacaactccctctggaaaaagggtccagggttgagaaacaagaaattaaaaaaaaatctattactccccctttttgtttatcgaagggccaaagatgacaatcatgaaaatatgaaatatgtccaacaaaaacataaaaaagaaagagaaacttatgccccatagagcttgatcaaagaggacagctgcttggacatctcttgctgaacctcctccatgtcaacaaaacgattgttcacttgttggacctcatgcttgacctcctggacatgtgaaagagcagaactcgagcttgcaccagcagcagcagcagcagcaccagtttcaggacgcttgggaaaagctccatcaaaatactctgagggttggaatatggtgccagttactcagattcgaattgatactagtcttttggggaggctcaagtgtttcatgagagtaggccacatctttctgagaggattaaattttatagattaagttaggaaacacaagcttgtgaatttgctttttacctcttcgaaatgacacaatctgatccaagatataggaagccaaattgatggattcttttgaggtgatacgatagagaaaagaggccacatcttgagacaccacagttttattggaattgggaacccaattactaagtttaaacctcatgagtgatgcatgagcaaaagtgagatgtgtaatacgaagactctgtccaaatttccactcaacccgtacactagtgagtttagttagcatcagaaggcgatccatggacattatagcatttgtcacatcttctggcagttgcaaagctttggaaatgtctttttcagcaaaggaaaaccaatgtcctctaacatacacttttcgaaaaaaattcaaaatcctcatcaagaaaatcatcagagaagttagcataaaattctttgacaattccatcaatatatccttcaaaactagtaagagtaatttcccaatgatggtattgaacaaannnnacaataccatacaccctatgagcatgcaaatcataatttccctcactttcaaattttcgggtagcataaagattccaatcacgctgattatcacggtaataaaatctggaattgacagcttgagaaggagagatattaccaggagatgaactctgtataggctgcttgcttttggctggagcagaagctttggtcaaaggtggctcgggttcgagtttagtttcctcactatcagaggagactccaaagtcttctcgaatctctttttcagaatggagagactcaaatttggtctcggaatcatcagaggggacctccattggttcttcttcttcagaacttgaagaaaccaaaggggggtttaatttcagcttcttggcagaatgaatgggtctgtcatggcttcatttagagcgaagttccttctcgagagatgcctgctggccacgagtgcgagtggaagggcctattggagttgaggcaccaactcccttacttgaggcagcaggaggagatgaagtagcatgaggaggaagcgatttcctagcaacttgtggggacgtagagatttcctagcaacttgtttgtgaatacgtttcggcttgggcttcacgggctgagattcacgctgaggaannnnnnnnnnnnntgggtttgatgcagttgcagcagcaggcaacaagatttgagcagtaggaggagcattcgagggggcttatttggattccaccatcttgcttggatgccctaggttcttagtcttagccatgaatttctgaaagaagaatgagaaacaaagtacaagaacacaaagaaggaatcaggtaggtggtgagaataaatgacaagtgaaaattggtttaaataaacatgggagagcggagcaaaaaaggaaaccaatttcaaaatttgagtaaccaccagcccacaaacaccaaagaaaaccaccccactgtttttccaaaattattttttttaaaaaaataataaaaggaaactagaataaccaagatactttccaaaaatagccaatttaagaaaatccttcaagatcaaagacaaaatacaatgaatatgatatcaaacttgaaaaagaaacatatcaaaataaatcactttagaataaatgttgaaacttaccaatcaaagcacaaaattttcttagcccacgagccaagtcaccaatgcctccctctcttttacttttttttttttttatttttttttaatttttgaaagctcaaaattaatacaaaataaaatatgcgcaataaatataaggtattctaaagcaagaaactaatcaaaattcatcataaataacaaatatacatgttatgcttttaaaagagaataactaattagtatctgaagaacaaaccatacttagtagatgttgaggaaaaagatatgcatgttactaaaaaatatgaaccataattttttttattttagtagaggagacttacaaacttgaacacacttgtcagacattagtgtgtgtagtgaaaataggatcattgtccttggca

SEQ ID NO: 34008 - DNA, 1230 bp, Cannabis sativa
ccatgttttgtttcgggcaagagccagaatttcatctcccattgcattgttccaatgttcttgttgaagagcctccttgagtgttgctggttctctcatagctaagtagatttttggcttgaatacaccagatttggatctggttgtcaccaagtgtttgttgtattttcctggtgcattaagacaaccagcaacaagaggaatagaagcaggagatgagcatcgaggaagagaaatgggatcaagagatgtaccagcagcttgagatgaagaacttgagctgtgcactgcaggagcagctgtggggatcagttcaggtgctgcttgtgtaacagcatcgacagcagcttctggtgcaactgctgcatcatctattccagcacctgtttgtgtgtctgcaacaagatcagcaggctggcttgaacaccagcggttagatggaacatgacagggtgtatttgcaggcatattattgtcaaatgaagcatattggtcatgaggagtaatggaaggaacattatttaactcaacagcagtagcagatgcagatgttggttcagtagcagcaggagcaactaagtcagttgctgaatagtgagttttatggtgaatgcacacaggtattaaggcagagacatatgagggaatggaatgatgactcttaggaacttgctgatcctgaacttgctcataagggaaagaaaattcatcaaaaatgacatcacgagagatgtataaccttcccttagagtcaaggcacttgtaacctttgtgattcaaactatatcccaaaaacgtgcagggtgcagacctaaactccaatttatgtttgttgtaaggttgaatattgggataacatttgcatccaaaggtcctaaaggtagtgtaatcaggtttagtgtgaaataatgtttccaaaggagaacattgttgcagcaagggagtaggaagtctgttgtgtaaataaacaacagtcctaaaagcttcatcccaaaattttagaggtaatgaggcttgtgcaagaagggcaagtccattttcaacgatgtgcctatgctttctttcagcaaggccattttgttgatgagtttttggacaaggatgtctatgatgaatgccacaatcagctagtaatgaagtaaatgacctgtactcacctccccaatcagtttggagagttttaatggatttaccaagttgtaactcagcttcagctttgaagtgttggaa

SEQ ID NO: 34009 - DNA, 2976 bp, Cannabis sativa
gtcaactttgtaattaactatccattatgtaattataaatagtgacaaacaagatcaaaaaagggacaaaaaaactcttacgagagagttcctaaaaagaacaattagaaatctgaatgagattgactcatggactatgcagaattttaactgcaaaaccacgtaaaaaaaccatgtgttcatatctttattgctatagcttttattttttctgtgtgaaattactactgtgaggctcaaattcagttaacgaaaatttgtgttaacagtttagtactttcattgagagcctctgtgaaaactctcagaaaaaaccctcccttcttttgaagaaaaaccacctccttcatggctgaaaatccaaaaaatgttaacaccccacgtgaggaaaccaatcatcgttttgggaaagagcccatgggctccagaaggtctaccaatccgcaatccagaagcacattccgttccaggagggctcaacctaagggtgtccccaatgcgcgtaccacacgttcccggagaactcgacccgatgttggtcctagtacgcaaacaacacgctcgaggagaactcagcatgggaatggtcagaaccccgagacgagggatgaagacctctatcgtggaggtgcccagtctgtgggaggaggagcttatgaaacaaaaaaccgtcgcctgagaagttgtttgaaagagacgcagcgtcgaaatgctgagttagagcataatgcagcctgggccagggcggcacaggggacgaatgctcaaaataaacctgaacctagagtaagaagaccacgaggcagacctcgtggctcacgaaccaagagacaagaaaaggccggggaagaaaaacccagggaaaatgggacaccccctgaaaatctgaacgaccagccagatgggagacaacaggaaattgatgaacgagaaatcactcatgggaatgagaaggatcttgggactcaaccggggaaacggaggtcacttgctagaaatcaccaacgttcttcccaaacccatagagcgaggactcgtacagaccctgatgggggaaatacgaaaaaccgctctcgggaggaaagaacagagagtgaagaagaaagtgtgacttcgaggcggtcaagaacccatagtcgatcaactcaaagaggagaaagtactcaacaagctaatcatcgagaaagtatggaaactagtaagtccacgagccactaaaagacaaagtctatgagtaggacgcaatcgatgagtaagacaagattttccagtaattactcccaaccggatctgtgagaacacttgaattggaagaaacttgaccttcgccaacagcttggtccaaagcaagaggatccaatccaattacggataaacgagctggaggacaagttcaggagatatcaagtgggggaattagagaaattatttggacacaattctgacgaggagcttgagctgtatcatccagacataatgaataccccttttccttcgagattcaagaacccgtatgtctcgttatatgacggaaccactgatctggtctcgcatttgaataactttaacacaataatgcgagcgagtaatttgacaaataatctacgttgtattttgttccccacctcacttgttaaagtagcaagtagctggtttaacaagtttactcatcattcaataacttcctgggagcagctgtctagggatttcaagaaacaatttcaggttgctagagataggcgacccgaagcagcctcgctaaccaatataaagcagcagcccggcaaaacacttaaggcgtacttaagtcattttagcatggctgcggctagggttaggaatttagctgcagggatctctactgatccattgaccgcaaggggcgagttgcgggatgacttacaaggatgcccagtgagaagcatcacttagttcaacgaaatggctcagtgttcgttcggaaggaagaagcccaaaaggaaatgaatctgttgaaaacaagcttgggagggaaacccaacaatgtttcaacaggaactgtttccacgagtattgataactcgggggcttctggttcgaagagaaaggacggagttaaggaatcgtcgaaggatcaaaagaaatagaagaaacatgataagtacatgccagtgtatactatttataccgagcttaatgaaactcgagagaatatttacctcgctaatgagcagaaggtggccttcgggaagcccgagcccatgagggattcgaggagtaagagggatcctaacaagtattgtaaattccataaggatattaggcatacaactgacggatgtcgccaattgaaagatgagatagaaaatctcatcgctcgaggccattttaagcagtacgtgaagagatagggccatggatacacccagcccggtctgcccaataacccaaataactaagggttacaacctcttcccgttgagggagaggacatcttggttattttgggagggccacataatttggaagaaagcaataatgcctagaaaagatatgtgaaagaaataacgaacaagtagtcggcctttgccccaaaaccttcgaagaagctgaaaaccgaggagcctcccattacattcacgaaggaagatgagaaaaacgtgagatatcgtcacgtcaatccattggtaataaccattcaactcgctaataaaaggatcaagagagtattaatagacaatgggaggtcgataaatatcttttataaatagactctaaagaaaatggggctcgaaaaagccaaattaaggccttgtatggtgaacctttatggattcactggagatagcatcgctagccttggcgtaatcaaactcgtattaactttaagcaaggcacctttatctgctactattatgcaagacttcttagttgtcgacctgccctcggcttacaacatattgttgggtcgttcaacactgatcagactaggggcag

SEQ ID NO: 34010 - DNA, 1125 bp, Cannabis sativa
ttgagacgaagattgaagctgacgaaggatgatgggacatggttttgggtgaatttcaaatatgagagagcgccaacgttctgcttcatatgcggtattattgggcatacagagagattttgtagcaagctttttcatcagtcaattgatacgattgcgaaaccatatggcgaattcatgagagcacaaccgcagcgtagccataagaatattggagctagatggcttcgaacaaggggctggactccaccagtggcggtcggaggtgtaccgggaagcatggctggacagcggaatccgaatatggaaggttctggaggtgttgactcagccagcaatcaagaggggagtgatttgctcaatggtgcaatagtttcgggtgtaatgagagctaatcaaggaggtggtaaatatggaaataatgttatgggaaatcaaggagagaatcagggaacctataaggggaaggatatcatgagtgatcaagaagatatattggtcatttatgatagcaaaaaaaggaaagtgggtgaaggtgctagtgtgggtcacgtggggggagaagagcatgctggcgaaatttcaaaaaactcaagcttggcgggccttggaaatggggctcgcccacaattatgaaaattctgagttggaactgtcgtgggcttgggccttcacgaaatattcagttccttaaagagcttgttgctcaaaaaaggcccattgttatttttctatgcgaaactttgagtaataaaaaaaagattgattacgtgtgcactagtttgaagtttgaaggatcttttacaattgaggcttagggacatagtggtggggttgctttgatttggaaaaacaatgaagaagttgcaatagactctttctctaagaatcatattgattgtttggtcacttttgaagggcaccaaccttttcggtttactggaatttatggtgagccgaaccggagtttaagacaacaaacttggaccctcattcgtactcttcatgctcggtcaatggcaccatggtgtattatgggggatttcaataatgttcttcatcagagtgagaagcttggtggcaatccttacccaacatggttaattgatggattccaggaggttg

SEQ ID NO: 34011 - DNA, 1351 bp, Cannabis sativa
tttattaaaatgagagaattaaggaaaaaaagaaaaaaaaaagctttgaagagattttatagtgtcatgtcaccgctttattcttctcatttatatatattgatgattgatgattgatacgtatatatataaacaatttaataattatttaatttaatattattaatttagtttatatttattattgtgtttttttttttaaaaaaagacaataattaatttatgttagatatttttataaaaaaattattaaaataatagtaaatattaatttgtaaatttatgtttgataaaatattaaaaaatgagagaattaaggagaaaaaagaaaaatagctttggagaaattttagagtgtcatgtcaccgtttcattcttatatatatattgatgattgattgatgattgatgaatgatgatagtaaatattaatttaattcttaaaatattaaaaataaaaaaattaaggagaaaaaaaataactttgaagagattttagggtgtaatgccaccgcttcattcttctcctttatatatattgatgattaatgattgatacgtatatatataaataatttaatattattaatttagtttatatttattattgtgttttttttttaaaaaaacaataattaatttataatagacatttttatagaaaaattattaaaataatagtaaatattaatttataaatttatattttaataaaatattaaaaatgagagaattaaggagaaaaaaaaatagctttggagaaattttaagagtgtcatatcgccgtttcatttatcttatttatatatattgattgattattttttttttccatttcaaaaaaataataataataataataaaattactttcacataaaatttgcataattctcacatctttaatgttcaatctatatttttattttattttgtttaagatttagcatcacttaaactaggtattagtaacatacaatgcatgtttaaaatgcaagttattggtatatatattttttttatacaatatatttctttttagttgtatgatatttattatttttagatgttattttcttactttgttatgaataatagtaatatatattttacaatatatttctttcttatatatattttaatgtaagtatataatattattgctatgttatatatatatatttaattttatatatatattttaattatatgatatatcatttattttagataatatttagtttctatttaattatatacaatggtagtatataattttgttaccatgatatatatattttaattgcagtatataatttggttaacatggtatgtatatatatatatattta

SEQ ID NO: 34012 - DNA, 3406 bp, Cannabis sativa
tggaggttactcatagtaacaagtaactctcctatatgttacatattattagtttattacacatatttaatctacatattatattatttaataactttgtaacatatacttaaccaataaaaatattatatcaaaatataacagctacatgacctaaagctcgatagtcagattctgtacttgaacgagacaccatagcttgtctctttgaggaccaagacacaagtgtatctacaagataaatgcaataactagccacactctttctatcatttggatggcatgcccaatctgcgtccaaataaccagtgatgttaagctgattagaaaacttgatgtggaggttgtgatttatagagccctttaagtaccttagtatccttttaactgctgatcaccaaggtgttgttatggggccctacaagtattgacttggtttgtttactgcgaaagataaatctggctgagtatgagttaaatactgcaggccttttatgatacttttgtagttggtaggttgcagctgcaataatttaccgtcagctttggaaagggctctgccaatcgtcataggtgttgaacacaattttagatgaagcattcttgatctatcaagtaactctttgatatattttgcttggctaagataaaggccaatttcaactctatgtaattcttgttggaattttatgccctaaataaaatttaattttactgtaatcttatatacttccaataaagataaaaaatcatatcttgacattaccatatgcttcgttcaaatgttaattacgtgattataagtgtaatgtataagttatattaaatcccaaatatattattatttacaattataatgatgtcatcacattagaaagtaattgtgcttatatactttaaattatttaatcccataatttcttagtgcacagaatttacactgacgtgataatcaacgatgagttttacctacacttagttaagtgaaatatattttccaaggcattattaaagtaaactagcatcaaatgtattagctatacatcagactagatcgatattgacagttgaaaagatatcataaattactgttatatcatttctaattactgttatatcatttctaagtcaatctgttatatcatttctaagtcaatgtcacttagttgatcatagatcatttgatctcaagagataattaaataaatatgttgatattaaaatatataaataaataaataggaaaaataatacttaacttgtacattaattttaattaattttagaaccacttaagttaataattttttatgtgtttattttgataggaaattagtacttaagtattgaaagctaatttagataattaaatttaagatactaaagtaataattttattgaaaattttattatttgggtataaaattaatttattaattttgaacctgcccaaaattaagtaattttcatagaaatttattttaaattgaaaatttacacttaaggttggaaaataaatttatttactttcacaactacttaagttaataattttcattaatatagattaaaatttatactttggatataaaattaattttataattattttatttctaagttagtaattttaataaatatattaaaataaattgtcaaactaaatagttgaataaaaatactactttctttaaataatgagctttattttataggacattagatctccattgttggtcttacattgttattatttttaatgggaccttgtggcccttgacgtccccctaaaagatggtcatccattagaaaatttaacgcacggttaaattatctcaaaagataagtatttaatagatttattttctagtagacttatccctaaagatgactgcttagaattgggtttatgaatatgaaataatagtagaaagtcataaaataagaataattttgactctctcctaaacgagacactctctcctaaacgagacaacgtcgctaaacgagacaacgtcggattcttatacaacgtcggattcttatttaacgtcggattcttattttgatcgaataaaaggttgctaaaatgtgttcatagaagagctcattacactgtttaactgatgatatatttgactctcgccataaatagggcactgcatataatttggttgttaaccttggagagttttagatatgctgatttttttgtatttttcccatatgtttcatacttgattacgtgtctataatttttcgaatatgtgattagaatttgtattggacatagcattgatttctgctattgattgtgtagtatcaattttgacctttcattgttgatctaacttagcttgttatttttaatgagaccatccccaatagattgttatctgttaaaaaacataatagtgttagatctcgtaagataagtattttgtaagtgcaaaatttagttgactcatccctaattaatagatgacactttagactagtatttatagtaccgaaacaatgaaaaagctcataaaataagaataactttgactctctcctaaacgggacatcgttggatttttattttaattgaaattactccttagacttcctccataacttttttgtgaagaaatttctaaagatatacatcattggaaaagaaagaatataaacttttatgacgatgttgttctattttcttctaagaaatgagtgacgcagatgaatatattctagatattctatccaagaaatgataactattttcaatttttagaaaatgagattgaatctcattcttacattgctactaaacatcgattggacataaacttaagattataattttgaaatcaatattaagcattttgtatggttgacttagagttataatatcatttagtgacagcccaagctagaatgatattttagtttctaaattacacaaatattgtgtttaactttcacaagttttaatatccacttcaatggatcaaactacatgttgatgtatgaaaatgaatttgaactattctaagaccaagtaaccattaatattacatgaaaactatttgttgtaacgagatctaggaatcatatacatcaaaagactaacaacgataatagattatctatggcactatatcttgctcatagtggttttgacaaaatccttctttgcaaagagaacacgtgttaaataaccacttggatggtatgtttatccttggacatagggatgtacaagctaggagtggttatgagtaatttgtcagattcttagacgattactataggtatttaccttatgctggaagtttgaaatgtttgaaaatttttatgaatttctagaaaataaatgtaaacagaaagttgttaaaaatcttgcgaactgataggagtg

SEQ ID NO: 34013 - DNA, 2449 bp, Cannabis sativa
ttaaatctagaatatatagttattcatgattatagtgttgtctacacagtaaaaaataatcatgattatatgtttcaaactatttagtcccacgatttatcaagggactggatttaccctaacgtgatatcagcgatgtgatttactaacacttttataagtagaatatttccagggcattagcaaagaaaactagtacagatgtatcgactatacattggactggatcgatattgatagtggaaaagatatctaacttacagttatgttttttctaagtcaatgtcacttagttgatcttaggccaattgatctcaatcttgagatgattaagttctagcttaattgtattatacatgttcttttatttattcgttacaactaaccaataggatcgcccaatacttgcatcttgggaattcggtagttcaattaagtaggagtgttaatcataaatatggaatccatagcttctataacttctagaagtgaaacgatggtttccatagagcttggcttagtgtgataaattatggagtgcttatttcaataactatattagtttactaaaatatcatttacaagtaggtaagtattttaaggataaaatacatcgaagggtaaaatggtaaatatgtccctactcaatgcaaaccgtctatagaggatcattgattgtttagattgtaacaatggataattcataatgtatatttggtagatagagcattttatgtaatcaagagggtaattctaaatctatactggagtcaggaggaattaataagctaggaaatttacatggtaaattttggatccacttattaggagcttggttacataggcccatggtcctcgcactaactaagataaaattgttttgtagtctaaattagttgatttatttaattaattagaattttaaataatgactatgtatttatgaattttactaagggagaacataattgagaagaaaagagaattcaagatttaattattaaataagagaccttggaaggtctaattaataaatatatttaaatagtaatatttttttaataattaattataattattaaatagataaagttagcttttaaataactagaatagataaatgatatttctgaagatagaaaagattgtttcacttttagaagtaaaagtatcaaaattcaaactcataagccttaacattgagttcagccaaaggggtgaatttaaacacaattttattctttaattcagtccatttaaatataaccctaaacataatgtctctctataaatataatgtaaagacagtttaattttagtatgataaattagcagataattagggtttaattcaggaattagacttttagttatgatttatgaatttatggagatatatttaaattctaggtgtgttatttacgttatatatgaaatttcatatttttcatattttatgctggtaacattggaacacgacgtttggccaatagactcacaatttcatatagattgtattttagtttagtagggcaatatagctagacatttggaatgtcgaaattaggtggggtattggtaatagaccattttactcctaggccactttactagttaagctttacgagaggggaattttagtctttttgacttggagtttaagtggttggtttttagtgtagcagccggccattattagataaaataatttaaatttatcatttcatttagtggaataatgagaaaatagaatttgaagaaaatacaaactccacctcctgaacccccttcttcttattcggctgttgcaaaccataaaagctcagggtggttcaagaaggaatcacaagataaaaactataaaaactacctctatcccttgcacaatcaagcctcaagcttccaacacactttcccaacaaccaagcatcaattcaagctagtttctcacaaattcaaatttgaaaatcaagagagggttttaagagagagagagagcgagagagagagagagaggtcgggtgagggagagattaacccagaattttctaactcaatactccaaaattccatttcacactcaatattcataaagccaaattacaaaaatgcccttagggccaaagcacacatattcaccatatacaagggcatagttgtcatttcatacacatttaatttcaaataaaattcagattatctcatatcaaataaaatgccacataaacaatccaatttgcatttcggggcctaaccgggttcggcccgaacaacccgattgtgactataccgcgccaacctatcagaacacacttataaagacaacacaggtataccatataataatatagttctattaagcacgtaattaaattaatttcatcactttacttctcgggtcataattactaaaatgcccctggcctaccaacgtggtcttaccatgtaa

SEQ ID NO: 34014 - DNA, 1606 bp, Cannabis sativa
aaaataatttccaacacaaactcctctattctttcccctgcggctgatccctcttctcaaccaagtcaagatcctggtactattgatgatgtttccagtccgttcttcctcagctccggcgatcatcctggcctcgtcttggtgtcctccatcctcaatggtacaaattaccaatcctggaaaagaggcataacaatggcactttctgctaaaaacaagaccgaattcatcgatggatcattgcctcgaccagctacttgtaatcttcttaactcttagactcgttgcaataacatggtcatgtcttggcttgttaattttgtctctgctgaaatcgcccaaagcataatgcactttgatcttgccacgggtatgtggcaagatcttggtgaaagattcaatgaggccaatggccctcgcatctttcaattgcgaacacaattgactcgtttgtatcaaggtgatcaatctgtcacctcctatttcactaaactaaaatccctatgtgatgaattgaaggaatttcaacccatcacaacctgcatttgtggggctatgaaggcatttcttgactactatagccaaaaccaggtcctccaatttctcactggtttaaacgagtcatatgccttggtttgtgctcagatccttactcaatgagcctattccgaacctctcacatgtcttttccatgatagttcaagaagaacatcaaagaaccttaggcaactctgatgtaccctcctttgcatcatcggttaagccctcaacctccattaatcccccaattgaaacaagaaacctagaccttcatgttcaaactgtggaaaactaggacatttggtcgaaaaatgttacttcatgtatggctttcctcttggttatgggggcaaaaagaaaaaaaaaagggaaggcaacatctaatcaagctactgctagtttaagcacaaatgatgcaccccacacctcggtttcagttgatctgtccacttagtgttagcaactaatctcactactcagtcaacaactcaaccagcatgcttctagaacagaccctactgttcctgcaacagcttcaaacatggctggtaaccattcttttaatttatctgattattgggtaatcgattatggtgctactcatcacatgtgtttcaacaaaaacatgtttcattctttttctcatcatcaatttcctaaacaggttactttgcctaataaccatcatacacagttcatggtattcggaatattaaaattaattctgcaataacattgcataatgctctttatgtcccacaatttaacatcaacctcttttttgataacactactaattcaaatcttttccaacctgaaatatgtgttatttaacagtattctcagaatcgggtggttgggacagctaaaagacatggcaaactttacttcgtacaacatgaggctactgttatggccaatacaagtcaatcttctatttttttttctttacaaagtaatgtagaccaatggcataatcgccttggtcacccttcaatgtacatttccaatgtttttaataaaaagattgactcttctttttctgcaaattctgatcagcattgct

SEQ ID NO: 34015 - DNA, 1461 bp, Cannabis sativa
agcactccccgctaatttcctgccccatgtgcatccctaccaatgatattaaacactaatataagaaaattctaaattattagcataaataaaattctattaccgtacattttaatagaaaaatatgtaatgtcaataaagatggtaaaatgatggagtttttataaaaatattgaatttttggtaaaagtttacaattttactatctcacgaattttttataaaacaataaaatagaataattaaaacatcaatagaacaattaaaaaatagtcatgaaaacttaacacagtatatagtataaaacttacacagtatttttgaaaaaaattccgctccacaataaaaaataaaaaaattagaaatttcaatatgtggtgtaaaaaattctaaaataattcatattataatatcaagactgagatctaaaaaataatttattgaatccatgagtacaaaataaaacatttctcttacctaatataataatgaccatgactaacaaaacaattttccatgaatttgacaactatatctatattctctaagttttcttccaacaaaaaatatatgttcagtttttctctgtgttgttctactgttgatttttagttgttttgcttcttttcatttttgatgtcttttcatgtatgttttcttattgtgccctagctctctacattttgatgcatttattatgttgtttcttttctcaaccaacttccatcctttttttttagtagttggtttaacttatgtaatttgaaaccaacatttgttaaacatacaaaataacattaaaaaaaccatgacagcgccaacattaatggttttaatatttttgcttcacctcggtagaattaatggttattttctggctgttctggtattactgtggcagttatgttcgtgagtgtggaagatgaatgcctctttttttggtgttaacagtataaagaaaaaaaaaaaaaaaaaaagaggacagtataaatggaatttttgtcgtgtagtaataaaattgtaaatatttacccaaaatctaatatttttataagttaccctaattattatctataaatctataaatggttaaatgggtactatataaaatattttgttgagatcaaactttttaccacataattttattttattttcaaaattcccactctataaatcatttttcatttttgccctacatgctccttacgaataccatcatctctaacattgtggcccaatttaggattttgttggttcataaatcactacttattgtattccacaaaacctagacacattttgattgctcttccaatatttgcaagtgactaattttaatatggattcactacaaaaaatgttacttttagtcacaacaaaatttgtgactaaatgcagaggcggagggaagaggaggacatgtggggtcattttccctcctcaattttttatttatat

SEQ ID NO: 34016 - DNA, 2220 bp, Cannabis sativa
cgaattgatcctggttcacctttaagaaacttattagctgctattttagctgcttgtccaggttcttcccaatgtaaacacactttgtgggatttcctaggtcaagaataacttcttccattcttcaatcagttttaataagtttctttcatcttgaacttgggggtcaagatcctcgtccttcttttcactttcttttgccaagatcaccattaactgatgatcaactttcctatgctgcaactctatgcaatagtaatttcgagccagcatctggttgccccgcaccactacaccctctggtgtttggaacttcaaggataggtgcttgattgaactaacttcccctagtccgatcaatgttggacgacccaacaatatgttgtaagtcgatggtaggtcgacaactaggaagtcttgcataacaatggcggatagggttgcctcgcctaaggttaatgtgagctcgattatgcccagtctagcaatggtgtctccagtgaagccgcaaagatttaccatacgaggcctcaatttggctttttcgagccccatcttcctcagtgtttccttataaaggatatttactgagcttctgttgtctattaacaccatctttatccttttattggcgagttgaatggtaatcaccaatggatcgacgtgaggatatctcacatttttctcgtcttcctccgtgaatatgataggaagttcctcagttttcaccttcttggaaggttctggggcgaatgttaactgctcgttctttatctctttcacatatctcttttgggcgttattgttctcccctgcgatatgtggccctcccgaaataaccaagaggttgtaacccctggttatttaggctattgggcagactgggctggttgtgtccatggccctgtctcttcacgtactgtttaaagtggcctcgagcgatgagactttctatctcatccctcaactggcgacattcgtcggtcatgtgcccaatatccttatggaatttacaatacttgttaggatctcgcttgttcctcccgtgcctcatgggctcgggcttgccgaaggcaaccttttgctcatgtgcgaggtatatattctcccgagtttcattaagctcgatataaatagtatacactggcacatacttatcgtgcttcttctttttcttttttatcctttgacggttccttagagtcatcctttctcttcgaactagaaacccccgagttatcgattctcgttgagacaatacttgtcgaaacgttgttgggtttgcctcccgagcctattttcaacaaattcatctcttttcgaatgagtacgtgagccctttcattgaactcagtgatgtttcttactagacgaccttataagtcgtcccacagctcgcccccagctcgactgtgggtccttgaccgtcctgaggtcactgcttcttcacgctctattctttctccctgagtgtggtttgtcgtatttcccccatttgggttagtacgagccctctctctataggttttggaagaacactggtgatttctcgcaggtgagctatgttctccaggctgagtcccaagatcctcctcattttcatgaggaatttctcgttcatcagtttctggttgtctcccattctcatttctgtgagagggttctggctgatcattttgattttcaggatgtatctcattttccctaggttgttcttcctgggcattttcctatctcctagttcgtgagccatgaggtctacctcgtggtcttctcactccaggttcaaattgattttgagtgttagttccctgcgtcgccctagctgcggctgcatcacgttctaactcagcgttctgccgctgtgcctcctctaggcggcgtctaaggcggcggttttccgtttcataagtgccttctcccataggctgagtatctccacgagtgggctcctcatctgtagttcttagattttggccattctcatgctaagttctcctcgagcgtgttgttcgtgtactaggaccaacgtcaagttgggtcctctgagaatgtgtggtccgagtgctagggccaccctcaggttgagtcctcctggagcgggtggcccgtctagactgtggatcggaagaccttttggtgcccatgggctctttcccagaacggtgatgagtttcctcatgtggtgtattaacatcttctgggttttcagccatgaag

SEQ ID NO: 34017 - DNA, 2673 bp, Cannabis sativa
agttacttttataccttgatgaggtctgagggtctaaacccgcccatccaaaggaagcagcgctcggccggggtggtccacattccagtaatgaggtggaagacatcagacttggctgccacggctttcagccgaaatatctcatcataatgtgagatgtaaccgtcaatgatcatacgaagatcgccttcaggcaaatgtgcctgaaggcttgttcttaactcagtcatatgacgttggtcatcttctagccaccttccatactccatatcaaatattgcagcacctaaattaatttaatttaaataaattaatatataaatatatatttcataatagctagtactatatacattgtaataaaaaaaattgttacacattaaaatgaaaattaaattaatatagacatttgaattttataacctttgaacaaatatttttaggattatttatttcatattattaaaatgaaaataaaaaatgaaagcataaaattttgaacccataaaacatggctcttttcacgtttgcaaaaggacaccaaaattttgtcgttttatatataaattaaataaatatatatatatcaaaatatttttgtaaatgtgtttggtcaaaattctgaaatgtctgccaaacccatttatttatttttttaaaaaaattcaaaatttgactacacacataaaaaaaaattcacgatcatcaaccgttaaatttacgaaatgtaattatattttaatacctataaataaatatatttatataaaacaaagactaatttggataacaacataaaaaaaataataataataatttggaatttataagttgatttattctaagtacggaatctatgtagatatcaaagttaatatttttattttttgacaaaatgaaattaataatatttttagtcaacctatatataagaaaataaaaataaaaatagagtttagatatataataaataatatttgtagcagctgaactaatttcctctaccaaaacacattaatgttacacaattaccaaaatacccatcatgagtttaaaacaaaatgtataagtaagggtattttcgtaattccacacctggactgatattgccggaagcaccaccgcaagcacccaaaaataatccctaaaattaaatacaaaataattttagaaattaatataattttttttatttttaaaaaataataacaataataataattgaaattaaattaaaatttaaaacctgtgctcgagctctttgaagatcttgttcaagttgagtaagcttaattctacttgactctaattgttgtacataagcctgaaaaaattatcatatttttattgtataattattaaaaaaatatttttttaaatttaatttatttttggattgagtgaaaaatgagttaccttttttctcagacggcttttccttgcagcctctctattttgagctaagcgtctcaaagtctgaagcccaaaaaaaataataataataaataaaatttcagaaatttttaatataaataaataaataagttatgaaaaaaatggtggaataaataataaataaataaatatttgtattaatttaaaaaataataaaaataaaaccttggcatcaagtggcttctctgaagttgaaccagctccctttctctgcaacattatttttcaaatattaattaaaaaacgtatatatataaatatttatatataaaaatatttagctgattttgagaaaccccatttgaaaaaaaaataggattttatatgaaaataatgaattttaagtagagtgcttgttgttcttgagacaagtgtttgaaaatgtagttacacttgtaaataaaggaaaataaaaacaagatttttaattaaagttatgaacttttgagaaattaaagaaaaaaaagaaaaataagaaaaacaatgaaaagattggaacttggaaaattctcacttggataatattccttggaagaatattttctggattttgattgtaaaaatcatgataatcatcaacatcattatcattattattattatcatcaagaacaacattgtatggataacaaaacacatcattttctgtcattgttttttttgagaagagaaagagaatagaagagagaaagacaatactttgaactgtgtgtgtatatatatatatgaatatgtgtgtatatatatatacaaaaaacaaagagggaattggtgaagttatggggattgagtaaagtgggtcattattaattattataaattttaataataataataaacagtagtatgtaagcaaaaaactatactgtgaagattctcaatttaccttttcttattatgagtacaattttttactactttttgtcagacatttttatcagaaaatcgttcagaaatcaggaaaactctgtctttcatttgattttctgagagttgttgggatctgtgttcttaaaaaaatttcaaagatataatttttctttttttttttaataataaagataccaactttttcctaagttatggggatttagccttaaaaagaagagagattattatcactattattattattgttattattaccttttcttgtgtgtgtttggaatttgatgactgaagttttgatgagttattttcttggagttgttgttgttg

SEQ ID NO: 34018 - DNA, 1836 bp, Cannabis sativa
  modified_base (80)..(91): a, c, t, g, unknown or other
cagtaagctatttggacatttttttgaaaaatatggaaggaacttttgaaaactacaactaaataataataataataatnnnnnnnnnnnnaataataataataataattacagatttttctgtaggattctttttttttcttttttttatgcagtaaatatacatgctaaatattttcaaaatgtcacacttctatatctaatcttttgcaaaatatctcaagaaagtgtatttaatcactactattatctaatattttaaggtctcgtttggtatacagtattgtattgtattatatagtattgtcttgggttgtattgtattgtattgtttatgattatttattaatacaatactatatttagtattaacatgaattaataggttgtatagaattatgctatcttacaatactaaaaaattggatttttctgtacttttaaacagctgactaacgtataaccgtcgcttatttgactgttgcaaaactaagtagaataggcgatgtgagattgcacaacttgcttgatatttcctcttacagatcatgggactactgactatcacaatcatccctattacggggtctgacgtcctcgatcgtcgatcacaatttcggctagattaagactttgataccatttgtaatgtccccatttcaagcctccattaggccttccccaatggatttatgactcttatacacgagtacatcactctggctacttcctggactgacgactggctttacagaccaacacgagtatttctagcatactttgtcctcactggcacgcttcctgagaaaatttctcaagaggtcacccatcttgaaattaacccaggtcaaacacacttaaatgtggagttctttcgttatgggctaccaaaaaaacaagatgcaccttgttgatgtaggtagtaccaatcaatccatttaagtcctcttcaactgtgtagtcccatacccacacagtctcaatatcattatacacttgacctttcctaggcgatgtggggttacacagtttcctagtatttctccttacggatcatgggattactgattgtcataggagcaaggcatgcggaagggaatttccaacgacacctagcaaactaggatcttcgaggaaagaggagggagagagagggaggtgaactcagagttggctgctgggcaccagagaagaggagcagtagctctgattagaagggagagaggtagatttggagttgggttgctggttgccgaagaagaggagcaccagctctgatcgagagaaaggaagagagagcagtgggagacctgttaattttttttaaatgttaattaaaatgagagagaccacatatttaaattgttgagattgtgaaaatgtggtttatttgaacacaagcatcgtcgatggtttaaattgtcgagattccctttgaaatccagttttgtttttttggcttgtaactcttttaagctgttgggaaaagtatatgagtgtttaaaacctttggaaatagtccactattgccgaaagttttaaacactcacttaattttattagcgacgttcctaaaaaaaaaatattttgaggacggtcgagagaatagtggttttagttgtagtgttaccataaactcgaacctggaccctgaccccagccccaggcttgaccctacctggacttggacctagactcgcacccacacttggccttggaccaaagatccagacccagaactggacttcactacaagaaatgtcacttttgccaacacatttttgtgctggcaaaagttggtattgcgctggtaaaatagaatttacttgtgatgtg

SEQ ID NO: 34019 - DNA, 1668 bp, Cannabis sativa
acttgcgtgagatactacttgatacgtacacttgcgtaataaacaaaattttcgtaacacctatttttcgtgttttctcaatatttagaatatttccatgctatctatcgataggtaaacttttggttatgaatttaagacctaaaataggtcatgtcaaattgtttactaatttaccattgttatgaaaagtaagtacgggtcgaacccacgaggattatgtttattcagttattcaaaaattaatgacaagagttagaaaagagggttttgagattgagattaaaatagcagaaataaaaataaaacaaacaaattaaaattgacattatgatatgacaaactagttaaaggttattcgccaccctcaataatcattcttaattcctattaaagaatgtaatttttagtttccaatcaaactattaatcccgcagataacgttgaagcagtcaattatcctaatctccttattgtatataattaaggcgaagcgctcaataattaactcttttacctaagcaataaatccacaaagcatgatatttatttaacttagataaaactttgagttttatggagatagactaatctaggcaacaaatcaatgaagcatataattcatttaacctaggttctattcttcatcacaattaaaattgcaatttgtcacaaacacttagagtcctagactattagttgaatagaaaatgacggtagattaaagtaaaacctaatttagtggccatctaaacaagattaaaacaataatcataacattgacacagaataatagaagcaatttgatataaaggaaactaaaaattaacattcaataatgaaattaagaattcatatttcgggtgttgaaataatccttaactataagaaaactactgcgaactagacattataacaaaaatcataatatttacgaaaagcagaaggagaagaaaagacaagaatgaagaacacttcgaagacgatctccgtttcttccttcctctctctctaatttgtagctttagaatgattaaattcgtagcctaagaagtcctatttatagtactagaaaatatctcactaaaagaaaagatagctcatctttttttttttaaaaaaaaaaaatcgtatgtaggaatcgggctctcgccgcggcaacagggtgcttgaaactgaaaatgtaaaggaaaaactaaagggtataagtcttgaaactgaaatcaagtttctagagaaacttggtacataaaaagtcttttctaactttaaaataaaacccctgcttaaaattgaattgcatgttccaatagcttccactcgtgagcccatcttgtttccaaataagatgctttggtcacttgccactagcttccttagattttgaatatcctgcaaggaatttgttatgtgaattattgaatcggaatcaatccaccatgtgttaagattaacattagccatattaaattcataacatactaaaaaaattggattacctttgtcgtccatctatttcttgaactggctgcactcctttttcgcatctcccttttgtttacaaaagaaattgatggaatctttctttatggcagccttgggagccatgggcttttttcctttgttcttcttgaatggtttgcgtttcttgggttgagtggtcaggtg

SEQ ID NO: 34020 - DNA, 2463 bp, Cannabis sativa
  modified_base (636)..(641): a, c, t, g, unknown or other
attaagttaccttgaaaagaatctttcttggggttctgggcatgagatactatggtgaagggctttaaagaattgagattggttgaatatgaagaagaagagagagtgaaggacttagtaaacagtggtgaaattgaagcgagtgccattagagaagagagagagagatagtgagatttgaggcagaggacgtggagaaaggaaggtttgggacttagaatggatcagattacttctgtctacccataacaactgttttttgttcgcacgtgcgtgcgcctcggtcccagctaggatatgcttaacttttttttagctcattaattacttaaatttattataaaattgaataatttacgtttaactatctaaataaatacttaagtttaatttttggtggtaataatatctaagttataattttagagcttctgtaaatacctgaatattaagtgttaagtaaaatgtcacgtgacaattcttaattagtctaggtcattaaattgtatttttataaaaaaagttaacttaaatgtacctataagaaaatgacacgtagataatgacttgatatttaacattcgggtatctacatagttttaaaaatataatttaagtattattaccgctaaaaannnnnnttaggtatttatttacaactgagagttaaacttaggtatttatactgcaaattactctataaaatattataatttaaagaaaataatagagataaaaaatttcttaggatgttattcgaatagataattttatatttatacacatatgagagtcaaagattaggaaactaagaaaagaaaatattaattacaattaatggtgataaataaaagatttggacatccatatatttattaatatttataacattctcccttggatgtctaaaataacagtctcattaaaaacttcgccgataaaatacactggcacaatactcggttaaggaaaaaaagagtcttgtttactgaaatttttagaaactaataaatagagcttcaaaattaaataaaacaataaatagtagacaagtaatttttacgtagttcaggcattaataatccctagtctacaagttagttgtgttggcaccttaggtaactattttgataatacagtgtatttacagtataaaccctaactctgcacttcttctgtttctcttgaagaagaagaaagcttgtaagaattttggtagaggttcagctcgtagaaattttgttcaccatttgtacctaaaaaaatggggtatttataggcttaagtgtgggtaagggaattccctttacccacctagggttttgtaccacaatccattgcaagggaaggaaaatacaacttcaaattatttgatcgtgcagtgtgcagggatggtgggtagtaccgtctggatcagggacatgtgtcgcccaaaggtttctcctttataaattaccctatagaagagctgtcaggaaaaaatgtgtgtccaggggtacgtacgagcactaccatggcctagcacaagggacacgatctgattttgtgtcagaaaaaggtgtaaccatctgcaggttgattttccatgtaaatctgaggtggccatccgcattcgcgtaggagtcgtcatctgcgatcagttcagagagtccttatccggatgtcaagtattcaaaccgttgttccaggacttcttagagtccagggacgagcatgatccttccgcatcccaaagatgttatacggccagcgataagctttcattaagcccttcccagattgacgggacttctcttcggatagaaggaactctctcagctactagttgtcagagaatgaaaactagatttggtaggttgaaaagtcaagttgtcaagtggatgagatgacaatacaagaaaattaccctatctcggcggttaagaacccacgacatagacctatcagcgtttaacaaccgtcgagaatttgaccatcgacatagagttgttgacctatctcgacggttgagaaccgccgagatatagggtactctatctcgacggttattaaccgtcgagataggtgtgccacatgctctcatatatgtgcaatgtcgatgctatgataccctatctcggtggttaagaaccccacgagataggttaatgacggcagtttgttaagaaccgccgtaattgatttcagaagaaaaatatatattaaattttctcctgcatcggtagtcaagatatatttaatattatatatctaatcaaattcaaaatatatcaattttacatataaattttgtcaatagttatatgtgtgagaactctatatgttctaactttataaatctagtatatatatgtatgacaactaaataaaatattgggtaaaactatgctagtaaaaaaacaaaagtaaaactatgctggaaaatatttcttttatagtgtttcaactagggcttagtgttga

SEQ ID NO: 34021 - DNA, 1123 bp, Cannabis sativa
ttttattttctataatttttgtgcaaattaattgcgaaatatgccttattatccttaacaaaaatcttcattaacagaaagaataacaggctcatcttgtgtctactcttgtactaccaacacttattattgtaccactagatgtgggggaatgtataaagctaactgaatagtagattaggaagcaaaaactaaatgaaccaccaattatggggaagaataaaaaggatccaaggtgaccagaatagcggtcaaggtgagaatatgaaatggcaaccttattcttagtgttaaagatgcaaaaaggcgccgtttgagccaatgcagagccaaatcttgttttattgtggaggagggtgtcatttgaaaagtacataccaacagttaaaaaagactgatgtgcaaggagaaaagtgtatgggtcttgcacaagtgctggttatgactcaaggggcggactcgggtattggtccttcgagaaagtcaaattagaaatttatgggaaatattacaattatcatttcaattgatatcgatatgaaacattatataattagttagagacatcaagaattccgaatggactatgcatgtatgttatttagtggtaatccatttgacgggatacacaaataagagaaattacaatatgagttaaatttcgtagtattcctaagtggaatataggacatgagtacttaatggaagcatcgatctaattgattcaaatcacaaatcttttgtgtaggagtgatctagcattagcaaatgttggacaatttatgagtattgtctggaatcctaagtgaattgatggtgatgattgtgtactaattttgagattacgtaggcatgggactacctatgttagcaacaagcatcttgttttggtagctcaccatgagggaactccatggttgagtgtccttgacttggggtgattttatttaggaaatttccccatgacacgtgcgagtcggagcaaggcacgttgaaaatacttggatttgtccatgggggccagtcgtcagtctgggaagtagctagagtgatgcactcatgtataagagccatcattctgtgggaataagggcccaatagaggcttaaagcggggacgttac

SEQ ID NO: 34022 - DNA, 3398 bp, Cannabis sativa
taaaacaactgtaaaataactaaacagaacaattaaaacaacaatagaacaactaaaaaataaccgtaaaaacttaacacaatataaaacttacacagtattttttaaaaaaaaatctaccccgcaatagaaaagaaaaaaaaatttaaaaatttcatggtgtaaaaattcatttatttttcaaactctacatttatattgtgataagcaattctttacatttatgctaatcctacataatcttattttcttttttactattttttgtttattaatactattttttaaactttacatttatagtataataagaaattgtttatcctatctaattttttttttccctaataacactatcttcaattttttatttttttttttttcaattttgacttttttttcttttctctcttcattttttcctctttcctctttttctaatcttttttctcacactattttattttatttttatatatataataagtatacatttttatatattttttaatactttttcactctcccacagaattttattttattattatttttttaaaaaaaaaaatacaaacacttattctatttatttttctctcttttacattttcttattgttgatactcaagctacttcatactattttttttttaattattcacattttataaaaaaaatcttaattaatttattttaacctttactaaaataaaattcttttactttcacattttgtgaaatatttttttaacactttttctctcttagaaaaaaaaaaagaataagattagtgctcttcctatatctttttctctaatacatgattaacaaaactagtttttttttttttttatgtatattatgtagtttattcgaagttaaatatttatgaatgatttgcatatttcaacaaagttgatgtcttgttattaatctgtttatttataaccgtccttttgttattttatagttattttatacttattttttatgttcttgtttatgtgttctataattgttctatagttgattttatgtgtgtattttttctgtacaattgttgtttagtttggtggtgctaggaacccctgttttttttttttttttatgttttctcgatgtttagggtattagtaccctagtgatcaataggggaaattacagtgatgaattgaagacatagaacgggttaggtaaagtgattaatcgttttgtttttattattgtgacataggatccaagatcgttgatctttctctattttaggtaggttgacatacctgaattgaaacttgaggttattatagtacttcacgttgaacaattcttggaattcttgccaagttattctcatgacgtcccgggtgagggataccacgtccaaccagatcaaggcatccttctagaataggaaagttgcacaagccactctatcattaccagtaactcacataaaattcaaaattctattaataatggttagccattgcttggctttcataacgtctggacctgttcatcttgttcattaatcctagcttcatttcagtaaacctacgttcccattcttgggcagcctgcgatgggttagcatcaccccaaccatgtgccctacctcttaggcctctacctggaccatgaatatattagggcaaatctgcactccctgattgccattggatccgaccaaatcagttcgggtcctaaaccccggactcggacctagacccgaacttggaatcgaacccatatttgggaccagacccagactcggacctgaacccgggacccacacccaagacaagactagtctcaggaccggacccaaacttgggcccgagacttgactgaacctagaccaaaactcaggaccagaccagacccatacccgagacctaggacctagacctagggagagactcggatccaaaaccagactccagacccagacccggacccaactcgcaccatgacacggacccggactcggacccggaccttagacctgacccgcaccaggacctaaatccatacccgagactcgaactcatcagactcaagcccaagactgggtcctggtccggtctaggtccaagaccgaacccggacccggacttgggcctcagacccaaactcgaacccagagccgagtcctgaaccggactcagacctagaatccaggactcggacctcgatctggacccagactcggactcgagacccagtttagatcaggaaaaaaagattaaaaaaataaataatactaatacaaaattaaaatggatacaaagttatcagtttagatataatttttattttttaaaaggataagtcaggtcggattagatctgatccgaataagtcgagtcagatctgatctgattcgattatttaatctagtagggcgaggcggggtggatcattatatgatcaagatcaggttggatcataatcgaattagatccaacccgatccatttatactttatgcttttacttttccatattattttacaattaataaattaattactaaactatatcaaatactataattaattaaattgactttcattaaaagttgaattaaataaaagacgaggatgttcttgtattactctctcgaatcaactttgattgtatatgatcatgagtcatgataaatcaaagcgaccagcttcaacattatttatctatttatctatttatttataattttttaggaacatttacggtgaaatctctctttaatttaattttgtacacttaattttcttatatatttttgaggcaaatttttttttgtttacatttctttgtaaatttgagatatgagttagatatcacccttaaatactaattaaagtaatactgttttggctacgaaattttactgacgcttcaaatttatgaagaaaaataaacctaaaatattttgctaaacaataaaaaaaattaaatgtataaaaaaattaaaatatatatatataaaaaaataaaatcacagctaattactctattttttaataaatgccgagcattatttaaataaagaaaaatgctaaataacaccaataaagtaaaaaacattcagcactaaaattctaaaagagaaaattaaagtcgaggcagactttcattattccaagaacatggattatggacttaataggtctcctctcaccaaaatgtcaaaaattgtgtgttcttgcgttaatagcgttatacacgccaaacctaataataaaatgtgatgaggattgaaaagaaattaataatttaatatattaaggattaattgcagtcaaatctccaataattttactttatttgtaactagggaagtaagccgcgcttcgcgcggtgttgcctaacttttataatttttatatataaata

SEQ ID NO: 34023 - DNA, 3305 bp, Cannabis sativa
ttctgtgttgaattatcatcgtgaggctaaagcttggttaacgaaaatctgcgttaacagtttggtgctttcattgagagcctctatgaaaaagctcagaaaaaaatcgtcccttcttttaaagaaaaaccttttccttcatggcttaaaatacagagaatattaacacgccacatgaggaaactaactaacgttctggaaaagaacccattggctccagaagatctaccaatccgcagtccagaaggaccacccgttccaggagggctcaacctgagggtggccccattgctcaaaccacacgtccccagagaactcaacccgacattggtcctagtacggggaaaacccgctcgaggagaacttagtgtgggattggttagatcccaggacgagggatgaagagctaaaccctggaggtgcccaatctgtgggagaaagaacttatggaatggaaagccttaccctttcgcaaatttaagatgccggtatggaaaatgtataccggatgagaagactcgttggtgcacatcaaatacttcaagatgaaacaactcaacaatggtacttcaaactcaacccaagaagattcaactcttacgatgagttctctcgagaattttacacacaattctcgttctcgaggcttgtaccattgcagctagaagaccttatcaaagtcaaacaatggcaaagagaacctttgaaggattaaatctagaggttcatggaaaaccttatcaaagtcaaacaatgacaacaagaacctttgaaggattaaatctagaggttcatggaaaaggcaacaaaattcaaaggcattaaagaagaaggctgatatacaaccatactagggggcatactccctttggtgacttctggaaacacatttgaaggatctcaaccagcaacatgaaggagttccttgataaagctgattgctttatcaaacttgaagaagccatacgatagtcttagatagggcatgtccacgttagaaagtcacgagacatcctgcagtcgcatgacctaccagaagcgcaggcaaacaccaacaactctagtaaacctctagtggcaaaaacactaaaaacaagaacaacaccaactgctttggagaaacagtggaaaaaggggaagtttaacacttctcccatgccacaaaagaacaaggaggagaagtatacctacttcaccctcctgagggagaaacttgaggccatcttcatggcaacttagggaacaatcccctatagaaagccctttcccatcaaaagggagttgaggaagagggacatgtcaaagttctaccagttttacaatgacttcggccatgacaccaatgagtgtcaaaatttgaagagggaaattgaataccttaatagcaaaacaatccccacttgtgttgctatgtgcacaatgaccaaattcaggcaaaagttgccaagaacgaagatccaatgagaccacgagtggcaggacatttaagggtaattattggcagaccccacattataggtaagactataaaaggtagggagagttattcttggacactccttcacgagcctgatagcgacatcctagtagttgaagataggggctttaagcaaccaatgcttcaagagccaacaatttctttcacaaaagaagacgatgctcaagtcatcttcttgcacaactacctccttgtcattactgcacaaatcaggaatatgatcgtagcaagatgcatgatggatgatggagccacctccaacattatttttaagttaacatataaaaagatggggctctaaatcaccgacttggcaccctggaatcaagtgatgtatggcttttttggcaaagcatcacactagtcgggtatatcagattacccctcatagttggagaaaatccaaccacaaaaactttgatggcgcactttgtcgtaattaacattcgatcggccttcaacaccatgataggccgaccaaccctcaataacctgaaggcagtaacatccatctaccacctatgcctcaaatttccaacaaggcatggggtacgatgcgtgaggggagaccaacactctgccaattactgttacaacgtggctctagccagtgctaagaaagagaagatgctcgctaagagctctgaagaagagcccaataaaaagcaatgaagtccagcccaaagtgaggccataaacatagatcctcgatttgaggatcctgcaggaagctttggacatgtagaagagtttgaagaagtgtaggttgatcccactttctaaacaagaagactaaagattaaaaaaggtttagtcctaaagattaaatcaatactgacaagatttcttatggtgaacctagacctttttgcatggtcacatgtagacattgttagaattgacccatccattatgacccatgcactcaacatcgatcaaaatatttgatctattcaacaaaaaaggaggttgttggaaaaggagcacgcccaagctctcaaagatgaggtcgagaggctacaagccaacaacttaacacagaggcattatatccactctgggtgtccaacccagtactggtgcctaaacccaagaaaaagtggagagtatgcactgaattcatcaagctgaaaaaagcatgtcaaaaggactgctttccacttaccagattgaccaacttgtagatgccacagttggccatgaaatcctaagtttcatggacacgtattcatgttacaatcaaataaagatgcaagatgcatccaccagattagtagcaaactaccttcatgacaaacttaggcatgtactgctagaaagtcatgcccttcgggctaaaaaaatgcaggggccacgtattagaggctagtgaacatgatgttcaaaaatctcattagccataatatggaggtgtatgtggacaacatgcttgtcatgtccaaaaaggttgggggtatgtggaggacctagacgaatgctttaaaatccttcacagatacaacatgaagcttaaactccttaaatactcttctggtgtagactttgcaaaattccttggcttcatagtcaatgccagggaaatagaagcaaacccagacaagatccaagtctttttggaaatgaagcggcccacaattatgaaggaagtacaaagcctaacaggacacgttgttgtattaagtagatttgtgaacaagtatacagacaaatgtgtacccttctttaacattctcagaggcaatagaaaattcgagtggatagaggaatgtgaaacacattctaggagctgaataaacaattggctcaa

SEQ ID NO: 34024 - DNA, 1762 bp, Cannabis sativa
  modified_base (1530)..(1543): a, c, t, g, unknown or other
aattaccaaaatacctcttacacaatcagacgatggttgcagggtggttggccgaaggttgcatcaaacgaaggtttcaatcagacgaaggttgttgggtggttggccgatggttgcatcaaacaatggtttcaattagacgaaggttgctgagtggttgaccgaaggttctatcagatgaaggttgctaggtcgttgaacgaaggttgcatcagacgaaggttttaatcccaagaagcatggatcgtgggttgctgttaaaactataatgcaatagttatatgttgcgaccaactaacgtgtaacttaattgcaactaaaaaatgtaaaaatgtgaatgtgtatgtgtaagaaactatttgtcagtaattttttatcactgatcgataattacttgtaccttaatactaatatgtggagaaatatctgttagcaaaatatttatgcaattgttctggaacaattaaaaattagaacactgtttccacgtacataactctatctacatgtctcttcgtgatttaatatgaacaaattcaccattagaaatttagaaaacaacgaaaatacacaagggtaaatattttactatagtattgatgtaattttttttttttggattatacttgagttggattttttgggaactccagttcaactttttgagatctgcatttcatggatctgaaaattaaagtcaggacattagttttatgcaaaataaataagatttctaattgaattttaatttcgtaatagtttttctgcatttttttttttcatgaattcgaaacagtcattgttttgattgattctggtcgtcttctcaggtgaagtcaccggaattaatggtggttctctttctgattggattttcgtttcggttgtgttggattgctgggtggttgcccaagattcatggatcctgggttgaaggtgtgtataagtggtatttgtgtcattttttttttatttgagttatatatttgtttatttggctaggtggaagtatttttgtaatattgttatattttttggaataaaactgaaaaaagtctaattttttatgcacaaattggtaagaaaaaaaaaaaaacttaagaaaaaaaaaatcaaatgcaacatcacggaatcatatacatatatagtagataatatcctatttatatattattttgtttattattccaattattagataaaaagttgggttaataaaacgaatttatgcattaaattgaaattaaattacctcaaactaagtttgttgtaagctttcgtcaaactatattaaaacaaaaattgtactatataattaatggagtacattttatttattttttatcaaaaaagggattaaatttattgcctagagttatatacgtatataaacactacaaaatttttactttttagtcacaacaaaacttgtgactagaagtaaaaaaattatgactaattataaattattattgttatgttgtgatgcaaaattccttagttaaatgtattagtcacaaaaattacaannnnnnnnnnnnnnatgtatttttagtcacaatacatgctatgactaaaactaaatgtgtgcactcttaatgggtattacctataaatggggtatattagaaaaattcaagtttttatgcttaatttttgtatttaattaaaaacaactctcttttttacatcatatagatagagattgttccatcggttgaaaaaaaaaataataaaatgaatttttggcaaaaaaaaaaaa

SEQ ID NO: 34025 - DNA, 1845 bp, Cannabis sativa
  modified_base (332)..(332): a, c, t, g, unknown or other
gtaaaataaattccaacacaatgggacaggggattttggcctatggagagaaagctcaaagggaattcttgttcatcaaaaggttgccaaagctttgaaacccaagaaagaacttactgacaagttacagaaagaagaacttgaagatatggaggaattggcatactacactatcataatgtacttgtccaatacagtgggaaggaaggttcaaaacatgaagacagctcgagaattatggagcaagcttgaagagatttacatgaaaccctctttagctaacaagatcaagttgttagaatctttatatggttttaaaatgtcttctcatntgtctttagatgataaccttgatgcattttaccaaattattataggattggctaacttgaagtacaatgttgatgaagaaagccaagctgtcattcttctcagatcattgccacctgcataccaataattgaaagttgtgatcaagtatggagtagatactctcacccttgatgatgttcttggagccttgaagtccaaagaacaagaaatggctaaggagaaagacaatgtcaaggatgaagcttacctagccagaggaagagacaacaacatgagcagagatcactacaggaaggatcatttcaaaggccaacatagatctcagtcaagatcaaaatccagggggaaatatcataaggacagaaaatgttatttctgtgggaaagtaggtcacatcaagaggttctgcattgagttcaagaataaactcaaagaagacagagcaaagaagcatgattctgcttcaaatgtagaagaatcagatcattgctcttcagatggtgatgtacatggtttcagatcaaagaatcacaaatgaatggattcttgattctggatgcacataacatatgtgtcctactcttgaaaactttattgactatagaaaagtgaattctggttctgtaataatagggaatgacaattcttccagggtaattggcattggaaaggttgctattaagcactttgatggcactgttcgaatgctgcatgaagtgaggcatataccagaactgagaagaaacctgatatcacttggaacacttgaggatgaaggctacaattataagtctagcgatggtcagatgagaattgcaaaggggtctcttaccatcatgaaaggtgaaaagaagaatggcttatacattctgcaaggaaacacagtaatggcttgtgaagccagtgttgtgcaacaccaagaaactgagatggaaatgtggcataaaaggatgggtcacatgagtgaacaagggatcaaagaactgaccaagcaagggctcctaggcaatttcaaacctatctcactacccttctatgaagcatgtgtgttgggaaagcatcacagattgaagttcatggcagggaattattgttttaaaaggcctttggaatatgtccttgctgatttatggggatctcacaaggttggaactcactcaggtaaacacttttttttttgtctattatagatgatttcagtaggcatgcgtgggtttatctacttaaaactaaaaatgaatgcctggaaaaattcagagaatggaaaactaaagtagaaaaccagtatgaaaagaaattgaaagtgcttaggacagataatggtttagaattcattaatattgaatttggcttgctgtgttctaagtttggaattgtgaggcataggacagttatgcatactcctcaacaaaatggtgttgttgagagaatgaatatgactttgttgaataaagtgaggtgtttgttgattagttctggtctaagaagaatctattggggagaggctttgat

SEQ ID NO: 34026 - DNA, 2983 bp, Cannabis sativa
atggcttaaaaaaaatgtaaccacgatggttacaataaaaatgtaaccattgaaacctcttccttatatttatataatgtatcatacacttcaactaacaaaattgtagacattatattgtttacaatacacttaattttacttaaataaaaacttaataaagtatttcaatttttatttagggctcttgaaaagtgtagaccctaagcataggcgtctaggcacgggcctagctagcccacctttgcttaggatcggtcctatattttaggtagaggcataattttactttatataatagcatgtattttctatttagatagttaaattttataaaaaattctaaatttattatggtattgaaaataagattcaaataattacacacgtaacattattagggtttctttttattttctctagggtttctctctagaagttcttagtcgccttttttttttcttttgcatgaccagggctcgtccgtccatttctcggccttacggcgtggctttggtcggatcttgttaatattcacactatttgctgggttgttgccaatagcagatcaaacatagactagaaattaattttaatattaattttttttatttataatttagtccattttttaattcgtattacatttatatttttattttataaatatttttatatttatactttcttttttttttacttctatatttgaaatggcttaagttcacaaaatgttaatatgagcgtaaggccaaccccaagtgtcaacttgacgttgggccctattttttgtactataaggaagtgttgtttttcctccaaaaggacacattttcctgtttttgatgaagacgaagaagatgtaaaagtcagatctccgattggctactaggagggcgtgcgctcagattggcagattgtcaacctgggcactgggtgctcaggccccgagtgctcaaaaatcaacttgctctgattcatattctgatgcctcatatatgtcagtggtatgtctagttgatgtctcaatgcaagttttgaccattttgcactacaacggtctcggaaactgaaaccctaattgaggatgtcaatttgggcttgtctttcgggttgcaggttcgtgtgatttcagctgccggaccttggattaggttgtcccggcccatgtcttcatagtacaaaatactaaaagatagtgggttggattcaagttattaaagtctaaacttctatcccgaagtcaacctgggcgtaaggctagagtcccctcccaagtcgactgctataacttgaatctactaaacttcatgacatcatcctttatgccacgtataaaatatttatgttcacgtcacaaaaaaattagagattgaaatgcaatttatcaaaatgtcgataacagaaaacatcttacttaaatattttcatatatattaacaaattgacactattataataatctcattagaagaggaaagttcaaaagcgcccataagagtgtttttattacaggtttgttttgttctcttaaatgcaagtgagaaagaactaactagaatcacttgaactacagtattttaattacaaaaggcaacattcctaaagttttcgcttatttcaaaatttgacgtatgacattattataataaacagagttaatatatatatatatttttttttgaatattgtgttttgtcatttgtaaaaattattaattgaattatttcgttaactaataaaataaattttatattgtctaaaataatataaatagaactctaaataaattttgaaaaatataaaattcaatttatcatttaataaaataaaagatgtaatcaacaacttttacaaaatataaaatctaaaataatatttactcataactatatcatgttagatacatgaaaataaaaataaataaatgaatcaataatgatattaaaggagatgaattaaaataaaatgacagtggtggatgactttggtagcttggtattaatttattaattaatatatatatctttgttgatggacagttaaataatgaagaattgttaggttaagctacactacactacactacacaccacacctagctaaatcacactactgaataggctattcactctatacttaaatgcataaaaataaaaatgtaactatgggtaataaaggcccattaataataaatatctgcaacacagattgaactttaaagataataattgaagaaagacaaattaaaaatataactagataatagatatggccatgtttattacttttaatttattaatgtacttttttactcttcaaggaaaggcaaaggcccaagaattttttcttttttttttggggacttaacgcctaagaagatttacttgtgtgtttctttcaaaaaaaaaaaagatttacttgtgtgaaagtctatatgaaaagtttgtggcttgcttgcttgggccgaaatttttgggccccaacaatctaaggcccaacaagatttacttgtgggaaagtataagtttgtggtttgttttggggatagttagataaagtactatttttatgtgtaaattttacatttttatgtttaataattttcttttatatttttaagatattctatagaaacaacataaaaaataacattctcttcaaaaaaacataaaaataacattaaaattatataaaattaatagaaaaataatatataaaatatacataaataacaaaaaatcaacaataaattaattagagtataacatcaaagtatatcaaaagactatattttttgtaaataaaatcataaaaattgtaaaaatatttaaaattttataaatttttttattatttttatatatttgtgaaataatcctattattttttgatagaattttgtgggcctccaacaatctattttagaggaacacctcatttactaaaaaaatcaaaaattcaaataatagagaaaattaca

SEQ ID NO: 34027 - DNA, 1942 bp, Cannabis sativa
ataagtggttcaaaaggctaggattaggaacaatcacatactggaagcaattatttgaggaattccttcaacaacattaggcaatgagtgattgcgatatgcttataacgagtgccaccaatgtgaagcaaagagaacagaaagcttgcaaagatacatccaaagtagggcggatgtttgaagataaactcaagtttgccataacccctggactatgccttggaagtagattatgtgggaatatgctaaaaagagaattggatggcatagaagacttctatgagagagtaaagaagtacatccatatggaggagggtaatagagtcttggaaatggatacaagtgagtgttctttgagaagctcattagatccctacaggatctattagacgatatccccaacactcataagttgatacattcaaatgaagtcgccgctcttaacccatacaaattaaatatcaaagatgttaattaaagtgaagttccactatgtgggaaagcgttcctagcaatgtcaattttgcctttagcacattatactaaatcaaagagggcaccaaggttggcctccgaacatagcatatatattcgagcaatcacatattttcttaatcaataaaattttgtgttttcactttatatatggcattcatcactctccacgcatcttttgactttctcacaatactagtaaatcaaaattttcaaagtgaaagaagtaataaaaagaaagaaaagaaaagaggaatcagatacaactctgagagggacgccttcctaaaacgagtacaaattttctagcatttaaaacactctttaagtgtcactgatgcaatgtaagaggtcgagtgctgcctaagggccacaagctcccccaataaaatcttaaatcttaaaaaaagtccagcacagtctgagggccataagctctcttatatctgataagtgaccaataagaggtcaagactagtcaaagagttaagagaattcttatagaatgaaaaggaaatgtcaatccaaaaaattatcaaggagaacccttgagattagccaaaaactaatcgagagattagagaagacacgctcaatgagctaccctgaatgtgtgatcttgcataatcacatatgagtctcagcaagcatgctcaaggtggagtcactcaacatgcctgaaggaaaggcactcgaaatgctccatggaaggccactcgaccatagcatgagaaaggtcattcgaccatggattgaggaaggtcactcagccatggcttgaggaaggttgcttggccatggcatgaggaaggccactcggccttggcttgacctcacccttggcgtgaggaatgtcgctcgaccatggcatgacaaagtcactcgaccttggcatgaggaagaccccttaaccatagcatgaggaaggtcactcggtcgtggcttgaggaaggtcactttgccatggcatgacgaaggccactcgcccatggcttgaggaatgtcactcggccatggcattaggaaagtcacttggccatgcaccaagcttccaagtcacttagccatgcactatgcaagtcactcagccatgcaccatacaagtcactcggccatgcagaaagtttgcaagtcactcagccatccaccatgaaactcactcggccatgcaccaagcttgaaagtcacttagccatcgaccatgcaccaagcttgaaattcactcgaccatgcaccaagcttccaagttaataggacatgcacaatacaagtcactcagctatgataagcatacaagtcactcagccaagactttaatgcatgtcgctcagcagagatagcatgaaagtcacacaacaaagacttgcatgcatgtcactcggcaatgctcttctcgacgatacaactatgcttattaaatttctccaaagtgttgaggatgaatgta

SEQ ID NO: 34028 - DNA, 1107 bp, Cannabis sativa
agcaaggtggaggaagccacctgggagatagaatctgacatgagggttcaatatccagagttgttcaggttaaattttgaggacaaaatcttttcaacggcgggataattataaagaccgcttaactttaatttgtaaattatcaattaaatagtgtttaattatgaaagttgaatattagatatgaattatcattttatggagatttatttgaattcagagtccattatatatgtcatatatgaaattttatgtttttacttgttttgtgcccgacaacgtcggaacgtggtgtttcgccattagaattatattttagtatttttaatgtagcggagaaatatagttatacattgggaatgttgggaatagtcgagattttagatggaccaaattacccctaggtggttttgtgactttttggttaagtgagtggaaaaatggtgttttcgcccaattggagttttgtctttagtggattaatttaagttatcaatctgattttttatgctgatatttatgaaataaaacacttggttttcattttattttaatggaaataagaaattagaaaagtgcactctctctctctctctctctctctctctctcttgctccatggaaaccagctaaggtttgagctttttcaactcaataattgaaggaatttcagcaggttgttaagtgatccaatcaaaggtaatagctttagcccttctccctttaattttcttatagttttagttgaatatttggatgaatagcttgagttagggttatgtggttctatatagtgctagtagtaattttctaaagtgtaattacgatttaatatgttgaattgaagaggatttaagggctgttgtggtgtttgagcaagctttgggtttaagaactcaagcttcgctctttaatggtagatttttattctgagcttgtttagttgttttgttgcttggaatatgtttattatggtatatatagcaggtctggagagtttggtagagtttggggttgaattgagtgagtgtgaaattttgaaattttctgaaccggtcgatcggttcaatgggacctgtaggacggttggtccccaagaaaccccac

SEQ ID NO: 34029 - DNA, 2655 bp, Cannabis sativa
aaaatttttacttttcaattaggacacttgtacggtttgccccaaaattattattcattttataagaattaattttcatcgaattatgaaagtaattgtaaatttcttaatttagttacatttaatttattttctgagataatttattaatgtgtcatgagctatgcgtataattatagtacaagactctactttattaacttaagctactttgaacaaagtataataactttaaacattcaaatattaattagctctaaaattatagatgcataatcctaaattttatcattaaaaatttagaatagttttggtgcaattattttttgtttagattagctctagatcaatcttacatgaaaaatatttacaaaaatgaaaaaatgtaattaaaagggcaaatttgtgatatattcataatttgagggcactttttttttttttttaatagtttatatcggtaaaactataattttgagaagtatttattctctctaaaaaaaatttaaaacctcaaacaattagatttggattcgacattcaattcacacctattattcataacaataacctataataataatttgtcgatcgttttatgctgacctgaattgctaccatattccttagcaatatatttttgtatggtgaatatttgacacaagacaaaagagaacatccttattatttatgattaagttgttgtcgtatatatgtggtccccggatgagggatcatgtggttgagtttcaagtagccaccaaacttagaaaatgttgaaaaagttttgtttactagaatgatgtacttggaccaggaagcatcttatactattccccactccccaccattaccaacacataaatgaatgaatatatatatatatatatatatatgtacatttacatacatagacacacttatataataattaataagtaataaattgtcgatcggggtcttttcttcttgtgaagtaccatgttgaaatttcgcagtccatttgggcgacccacacatagatttttaaatttatataaataaataagaaaatctcaaccgttttgttttactacatctacatgtcatatacaaatccaatttttattgtttctataataaaatggatgccatcaaaatcgtgcaaaaatttgcactacgagcaacaaaaaaataatctaaattaagccatgcatataaatatattgaggtagctcagaagtggaggggcccaaatgagattaatttaggaaattagtgagagggaatcatcgacaacgacgggccgccacttgagaattgatcgatattattagctgactgcgacgtggacagtttctattggctaaaacttttttctattgggcggccaagtcagcaacaacccttcttactgcttcctcgaaggtagattcttcccattcacttccctacaaaacaaacaaaccaatttaattcctaattagtaaatttattaattagggactctttttcacttctgactaagactctttccttaattattttaagagcattgggcaccacccagtacttttataggcctttattattgagtaaggatatttcttaaaaattattttaaatgatacgagacctaataattatttaaatagataacacaattctaaaattttctcacctaagttacctttcacatatgattatcataaaataaaggagatttttatatatttatatatatattcaattagtgcttattgcaataaacttaaaaaaataataataacaacatgtaataataaattatatacctcaattcttaatctcaaggttaagcgatggagagaagaagtggtggaatttgattgagttaattgagtatttgcttccatagacatcaagcttacatgattaacactcttcaagaattccataatcctaagtacaaaatcctcaacttgaacatttatggaattattagctctctgctgtgtaatcatcaattgcagatcaacaatttgagcttcttcagaagtcgattcggacacgtgtcgtatccgaacattcactcttcgtgtttgatcatcaccatcatgatcagcagtagtggtagttgatgaagaatcaataataagcaggggcacatttttattattattaataatattattatcatcagaggttgatcttataatggctgctgaaagaacttgtgcctccaactctttgtttctcttactaagctcttccacttgagctttcaatgaatttaagtaatccgttgtactatttagtaccgaagctttatctttctgtatgtaaatattatcgacataaaatcataaggaattttttatttttataataataagactctttatttttatccaattttacttgcttatactctcattttagaatcatatataatatttaattattcaaaaaaatttaaaaagtgtgttgaattataacgtgttagcaaaaatgtgctgaatatataattcgctaccttaattattccttctaatatatcataacgctaaccttcgtttggaatattaaatttgatgaaattttataaaattagaatagtttataaatatatataataagataatttattaaaaaaataaaaaaaacttgttgtaaaattttaggattataatgaat

SEQ ID NO: 34030 - DNA, 1086 bp, Cannabis sativa
agaccatagcattggtcaaaatactatggaggaacagtaaggtggaggaagccacctgggaatcagagtccaacatgagggctcaatatctagagttgttcaagctaaaatcctcttaacgaggggataattgtaatgaccgcatgattataatttggattagtaaaggcaattagcattaattattgatgttttatgattatgcatgattttatttgttgtgggacctatttttaaaaaatggacattagagttataatttctcaattccgaaaatttaattaaactctaagggtattatttatgttatatgcaaaatttacaaattttatgattttcgctcaataacggtggaaaatacgacaaatggctagtagagtcacatgggtaagtttagaaccttttatttagcgggatattcatatattgatatttggagtattggggttaggcggggttatggttttggaccactttaccccagacttataagttgcttaagtttaaagcaatgggcgaaattggaatttgtcatttcattgagattttgtcttgtagtggagttagtggaaactcccaggttttgtttatgctggtggtatgatctagtttattaaggaaatagaaaaagagaaagtaggaaaaaaactaaaagttatctctctctctctccttcacctttgtccctagaagaaccatggaaaactaaggttaggcttccatattcaagtcattttcagcaagaatttgaggagaaaccttaagccaagatcaaaggtaagccctagatactttattccttattgtttttgaagttttaagcttggttctctcttgtgagtttaagaatttgggggtttagtttatttgaggttgtattgtgtgagagactattttaaagtttaattttagttatttatagcttgtttttggaagtagtagcagttgtactagatttgaagaagtttgggttttgagaactcaagctttgctcaaccatagtaaatttcattgcatgttgttttagatgcttttaaggtgtgggttatgtttagattgttaactcaaacttttcgatctccttgt

SEQ ID NO: 34031 - DNA, 2566 bp, Cannabis sativa
atctcttctagtctcatatttttatatcttagttttgtgagaagagtgttttttcataaaaacttagagtgttcaactaggttttgattttcttgtaatgatctcttcatgttcatagaatagatttgtaacaccctatcccatagggatgccacgtgtgtgattttataaactagtttaatactaatagattgattgattactaaaaaccgtgatgatattaaaaatttgactaaaataaaacactaaaaacgggcatcatgacgatattataaatgtgttccaggaagtcctgttataaaaagtttataaaagactatatatcacaacgattcaaaatacaaaaaccaaaatacacagcagaaacagcctaaaacaactcttggcaactcggcacgtaagccggtaaggtcaatatgtatattgttggaaaagattgccaccttatggttgatctagcttttctttgcctttacctgcactacatagcacccgggagtcacaaggactcaacaagaacagtaataataataatcatatagtttatcattcaaatattattatttatactcaaacaatcagaatcacacaatcacgcattacttataagacgaaatccaaatcactactagcatctgccacgaataaatatcagtatatagatatttagtaatacaaaattattataccaataatagaaattatattcatttaataatataaattatatatgttacctcataaagtaaccatcttcattacatcacattgcctaatcaagcaagtcgatgttttaatctgataatcctgtattgcattgcctaatcaggcaagctcgtcccatagcttagcacccatatatcgtatatccgcaccacctaattaagcgagctcgtgcaaaaacttggcaccaatatatcacataattgcatcacctaataaggtgagctcatgccacaacctgtcaccaatatatcgcatcgcctaatcagatgagcccgtaccatagcttggtattcacatatcactgctgatcgtacctaataaagtactctgccaggaagaaacccaacaacagtttctatctatgccatagcctgacattctcatatcactaccgcccgtacctaataaggtacgccgccaggtatatcgcatcacttaataaggtgagcccgtgtatcacattcatggtatcatcacattatcattgcttaattaatcaatcttttcagtaccatatcttaatctcaaaattaataaattcacaacaatattaattgtattgtgataaaatgttatgcagtataatatactttttttttacctataatctagattcatccatgtcggctaacccaagtgaagaaatattcctcacgatctcggtcctatgtcacaacaacggtaaaccaataagtgtttatcccaaaaaacactgcttaacagttgcaaaagacaacctagagtttttttaccaaatgctaagtacaaatacactaaataaaacttattggctataaaatatacaccatattgtagagctcgacgcaagcttcaaaatagtatataaaacgtccgaaatagacactcgggtgaaaagttatgataaaaatacgatttttgatctcctaagaatttttaaaaacagtagaacacggaaattctaaattttgtactcaccgaaacgctacggaaatctatccttcacagggcacatatatatatatcataaattcaaccttacgtcacagtaattaaaatcaagtccttaaaaggaaaacgccatcaaggccgtctcaagcttttgagggacctagtgcaaatttcaaaattaggccttttgtctaaaaaaaaaaactttttttataagaaaatatttaacatgccaaactttcaaaaatttatataattataatattaaactcaaatttcatatattctatatgtaattataataataattaaaaaacttaaaaacaatattcaaatatatagatttattcatttaacaagcgactttcttctccataattcctgcaatgaacaatcttcaagccgtaaaacttaataagaacataaatttaaatgcaatgattaaaatagaagagataacaataaatgaatcattaataagaacataaatttaaatgcaatgattaatatagaagaaataacaataaatgaatcattttaaaatgtatctttcttgctttttgagatacaaatttgctaatcaagtcatcgtaataaagtttatttagtaatttatttttgatagataaaatagctaactcactcaatcgttcttgtaacatagtggatcttaaatacgagtttattaattttaattttgaaaaattactctgtaatgactgcatctcttaatatggattagtaaaagtaattagcactaattattggtatttttataattatttgtgaatttaaattatttatgggtctcattgctagatatgggcattagagttataatttctcaattccggagattttattaaactctaggagtattatttgaattatatgtgaattatgtaatttt

SEQ ID NO: 34032 - DNA, 1399 bp, Cannabis sativa
agctcgccttgttgctaaaggctagagccaaaaatcaggtgttgattacattcaaacatatgcccccatggctaaattcaacactctcaaaatcatgttggtattagcagccatcaactaatggacccttcaccaaattgacatcaataacgccttcctctatggtgacctccatgaagaggtatacatgaagcttcctcctggatacaaaccaactcaaccccttccccccaatcctgtatgcaaactacaaaagagtctttatggcctcaagcaggtctctagacaatggtatgataaattcagctctacccttttaactgatggtttcatttaatcactatctgataactcactcttcacaaaaagattcccactgaatttattgcactcctcatatatgtggatgatatactagttcctagcaacaataatcatgccatatctaaattcaaacaaaagctagacaacaaattcaaacttaaagatattggctcattacgtttcttcctcggtttggaaatttgtcaaaccactttaggcatatcggtgtctcaaaggcccttcactttgcaattactttctgagaccggcttccttggctgtaaaccagcccctactcccatggaatccaatctcaaactaagcaaagaccaaggaggtctcctttctgacccttcctcctaccaaagtctcattggtgaacttgtttatctcacaatttctcggcatgatatctcctatgtcgtcaatcgtctaagtcaatatctaacatctccaagattaacacatttgaacgccactcgtagaatattataatacttaagaggtaccccaagacagggtttgttcttcccatcctccagtatccataccatctctgcatatgctgaaactaacttatccccatctgcaatacaattgaaacttttttctgatattgattgggaaagttgtcaagataccaggtgctccattactagttactgtgtgtttttaggttcctctctcatctcgtggaaatcaaaaaaacaacaaacagtctctcggtcctctgcagaagctgaatatcgcgccatggcacacgccacttgtgaagtcacctggatcatggccatactcaaagatttttgaatcactcccaccagtcatgtacttctatattgtgacaacgatgtagtcattcacatctccgaggaccccgtttaccacgagcgaaccaaacatgtggagatagattgccacatcattcgggagaaagttaaccaaggcacactcaagatgatacatgttccttccaagcacaacctcgcaaatgtttttaccaaagctttgtatccctctcagtttctaaatattatctccaagatgggtgtacaaaacttatacactccacctt

SEQ ID NO: 34033 - DNA, 1969 bp, Cannabis sativa
gcggtactgatattagtacgatcagcaattttttcttctcgaaggcaattgttcaaatccattatgcctaaaataaatttcacatattatttccatttcctattgttggagcattcaaaatttcgatggaaacgtttatttttcttcacaaaaaggagaacgaaaaattaaaataaaaaaaaaaaaacctgattaagctatatgaaccaaataattaaaaaatattgtagagtcaactggtcattataaactcccctttgggtgagaatataacacacacatgatctaccttcataaagttaacaataaagaaaaaatacatatcaattaagaatttattacctttaggaaaataaatttcttatgaatatatattaattcaagccaaaaaaatgataataaatatatatattaaaattattatctttgggcaaataactaaaatatacacatttaatattaactcacttcatggaatgtaaaagaatatatataactactacctctgggcaagtaattacacatatagtcaaccaaaataaataatattttcttcaacatataaaatttggtcataaaacaatcattcaaaattaataattttcagccaaatttccaaaatagatatatttattgcttataatatattgataatcaaaaaataaagtgtccatcataacacattatttgtgcatcaaacaatcaattttacaattttagaacatcgcaaatgaaagatgtgaaagtaagaacattggtggagattacataatcatgataaatcaaaataagagagtgactatgtctaacaggttaagaagaaatccgaatttttttctataatttatagatttcgaaaaatcatcaaaaattatttttaattatttttaactacataagaattattaaagtaataataattattaaatggagtcaaaaaattaattaaaaatcaccaaaaaataaaaaaattaaattctaatacctccgaaaaaaatcctaaaaatggaatccggaaattaccgcactatccctcactctccaaatgctgcaagcgggcttcatcccagtacgttgtcttcaacttccagccggtgctccaggtgggtcgtgcgactcggttcgacgtcaatcgggtcttaacgaattttgaccaaagaataggacaaagacattagaaatttgagggattttattcgagattgagtttctactctatatatgggttccatttgggataaaacaagtaaaataattagatcttattgaaaccaaactgaaaacataagaacaaaaaagaacctgtttctcctatatattttatccaattcgaaatgtaaattgtatagaatattgttgattactcagtaatgaggtttacaccatcaattttaatcaataatcaatataatgaaaaaaaatcaaatttaatctcataattaaaaaaaaaacataaatcctaaaagtgtaatcataaaattcttccaactcacttaacgatttatggcatataatatatcaacgaacagagaatttcataatgaataaatgaataaaaccgctaaacttttgagattgaaagattgaaaaaacaaaaaattcaacataaaataataaaaaataaacatataatttgagaaaattaacatatatcaattgtaaaataaaaaataggtcctaaagtatatacaattgacaatctgataccacatgttatagataaagtataaacaacccaagatacaaaattgcatataatatagaacacaataataatagacaataattaggtatgcgtacctgattgatctatagtaattaccgtaatttgatagtgtaatactatcaactaagtctttatccctaggtctctaaattagaagtagttttaatttctatctgcttatcaaaagtatacaattgttatgaaacaatatgtatttatagagttagggaggggacttagcta

SEQ ID NO: 34034 - DNA, 1473 bp, Cannabis sativa
tatgtatagtactagtattatcacatgctgtatgacaagtaaaattagtaggacgtttagatttatttttcttaacccaaatcttcttgaatcttgatctctttttcctaacaggttgttttccataatgattgcaatctttatttttcaagagatttatcacggtaaattacttaggtcaaatgtgacatttaacgccacagaagtgacatgtgggaatgaattttttccttcttttatgaaaattttcattcttacttgattgctccctttctttaggaacataaggtttagctgtagaaatagattcctgcagtgttagatcagaagaaccagaaggcatatttttagatttaacaaatttagtgttcaatttagattgatattcaacacatcccaacccaacatgatttgtttgcgacataaatcttgaacctcttcaaaaattgaagaacttgaatttagcattgtagcattcttctcaatatgctcaagtttattggacaatcgtttaatttctttatttttctcaacaatctcaatttcaaattttttaacatttagttcaagctttacatttcgttaagaaagagatttaatatcttttgtcaataaatgatacttcgaacataatttcaaccactcaccatacatacttttatatgcttctttcaaggaatcctcatccaaatctgattcatcacaatcagtccctaaaaaacatcgtcaacatcattatttaccaaaacagtgttgtcaagacaaataaagttcttatttttctacaaatgacatggaacactaggaaacacagattttagtgcaatattatttaattactcttcatcactactttcagagtaagtaattcataacctttttggttctttttaaagtatttacacatcccgattgtatgtgtccaaaaccacgacattttctacattgtacaccttttttttttattgttggatgtaaaaggtttctaatatatactatctctcgaggacttagacatgcctttcttgttgccaacctttgaagaatgagatatagagccactttttgcaaagaacgacatattgcacagaaaatacaagaaaacgttaaagaatcacaccaagagttatgtgtcccgctctgatatcaattgaaaaactgtatttttacaaatgccaataattttctttaataacaataaagaaaaaaaaataacagtgcagaatttaaaaacttgacacaagagaattgtacgtggtatcagctactattccacggagccacgcctagagaatgaattcaattagtaaagtatcaaagattacaaaagtaattgacttaaacaaatgtagactccctatagtgatttaccgcaatcctttgtaatccaccttgttaatctgatctctgaaacacaccaagtagtgaactccctttagcaattgatgtgtgcttattttctcttgaagtaag

SEQ ID NO: 34035 - DNA, 1761 bp, Cannabis sativa
  modified_base (858)..(862): a, c, t, g, unknown or other
  modified_base (902)..(910): a, c, t, g, unknown or other
  modified_base (1028)..(1036): a, c, t, g, unknown or other
  modified_base (1186)..(1188): a, c, t, g, unknown or other
caagtagtgcatttcaatcaatcagttgtcttgatatccagatcaagtgtagtgtattttactaaacccaaattactggaattgtaagtttgtggtaagctactattttttccaccattacttcctttgtgtttataaaacattatgcaacatcattttctatatgcattactcatctagggatactgaattctttactgcttatcaagtgcatctgaatatacagaagacatgtctctaattctatcgaaaatggaatagagataacacagtaaagagctttcttcagttgaataactttccaatcctttttgaaagcagcaaagttatttatcttcactaatggagcttaaattattatagatgggtttttacatcctgctagaataattcctccacccccagagtaaccaccatctcaaattgattatgggttggtgtagatataaggattctaatatacacccctatcatcttacatataggtcactttcagagatctttcttaactgtctcttaatattccttgttatattacatcttagatggttcccattcaacagtaggagtctggttaaattcgtacacaagtgtacacttagccttttactattgattctcaaggacatcttattgtgacatattgtcttagtctgaatctataagttctttctagactaagtcatcaacaaagcaatctattattaacattaatgtaaaatacttgcttaagaataagtaatcattaaagataccataaaatatttcatggggactagggattctgcccaagtcattcgaatagactttgtaaagttctcctgtcttatcctcaaattctgataagttatttctatnnnnntgaatggttagatttactttctcaattgaattctaaagtnnnnnnnnngatcataacatagtaagctatcacaagtgtcatccaaacaaagatgggcttggaattttaaaattctcccactgagataaggtactgtgatactatgtccaagaactttattggtatnnnnnnnnnttacaacagtaatatattaattggaacaattacaggatcaagaataagttctaatgatttgctaatttgttcattatattacatccatgtctatcaaaatatgtgtgttatagagatactgtggtttattgagtatagtctagagttcannntgaactacatatgtcaatagctttttccaccgctaagtgttatagagatcctgtggagttatgaatataatctagagttcaataggtataaaaagatcattgaactgcatatattacttcttaacttcttcaacccctatcagatcaaaagatctttttattaaacaaaatcttaataattgtttaagaatttaacaattattcataaacattgaaattaaaactttaagtgtttatgtggtatgacctctttgcagagatgaataactatagattttgtatcataataaaatacaaacacatacaaacattataaacatacaaatataattagtattggcatagacaatataaagaaaacataaagctcaattcataatgaaaatttcttaaagagaaaattttataaataatctcaaaattgtcataatggattgtgtgcaataatataaaaaagggaataaaatcccgaaccaataattgaaactaaattgttcataaattaaaacaattaattcaaaaattaagaagattcgagcttcatcttcacttggagaatctccacccttctgt

SEQ ID NO: 34036 - DNA, 1601 bp, Cannabis sativa
ttcagataattcttttctttaacaaagatttcatataatttaatttaataaataatataataaactcctaactaattttatggtgtcacgtttgtgtagtattagagacaccaatatcaaataatatgtaaaatctaaatagtaaaataaattagaacattaatgcttttaggcactttaagatttctaagatgggacacattataaatgttggataataaaaaattttttggagagaatacttgaatgaaataagctatattttatatctcaacatgtgtgatttgtgacttggtacaaaatgatggaattatatctctatttattggactctatagactaatctagaaacattattaaatggggagcttctacattgttctacataattctctctactaacataagtaaaaaattattctagaaagttcaagagtacttaaacaaacaagaagactctaaacactttagtaaatataaaaatagtctagaaatttagtagcaacaagaaaattctagaaattaactatattaaatcaagtttaatatttcaacaccctcgttaagcttcatctgtgactccaataatacttcgtagtttgatgaatgtttaactcttgagtggcttcgtaaaaatatctactgcttgatcttgagagttgacatattccactcttacttcttttcttccaatgcattctcttatgtaatgatagtggatgtcaatctgtttgcttctttcatgaaagactggattctttgctagtgcaattgctgatttgctatcaacacgaatctcagttggctcctcttgttgcacgttcgaatcctttcgtacttttcttagccaaagagcatgacaaacgcatgtagttgtagcaacgtattcagcttcacaacttgatagtgtaacaattggttgcttttttgacatccatgtaaatgctgtgtttcccatgaagaacacaaatcaagtagtgctctttctatcgtccaagtctccactccaatcgctatcactatatccaactatctcaaaattagtagaaaatgaataaaatagcccataattggtcgtacctttgatgtaccgaagtattctgtttgtagtttttaaatgagttgttgttggggcttctataaaggggctaacgattgtaatatcatagagaatatctggctttgtacaagttaggtagcgcaaacttccaacaaggcttttgaaaagagttggatccacttttcctccttcgtcaggccttgaaaattttgttccacattctaatggtgtgctaactggattagaatcatccatcttgaacttcttaagtacttccttagcatagcgttcttgagtgatgaaaatgacttcgtcttcttgctttacctcaatgtcgaggtaataagacatgagcccaatatctgtcatctcaaactctttggccatatctttctttaactcctcaaacatacttgagttgcttccagtgaagatcaagtcatccacatacaagcatacactcaaaatatcttcattcttaattttgataaagagtgcatgctcctatggacacttagtgaaattcttgtcttgaaagtgc

SEQ ID NO: 34037 - DNA, 2054 bp, Cannabis sativa
atatggatgagggggcttaaggttacgcaccattgtccaatcaatattccgttgtggttgtacttgattatcataaggatattgtggcacaccattggcaatacacaactccgttatcaatcctgcgaagccaattcccgcatgtgtagatcctgcgaccatgttatctaagctttccagaattatacccccaactggcacagtaatccccttcataattgcataaacaacactgagtatatccagtggaaaatccgataaatgcttactaggcataagcctagcacttacaaaaaacatccaagcacgagcaacttggttcaattcacagcgataaagcatttgaggttccttatccacttcatgcaatctcaaccccagaaaaccaactgtctctgccaagtccacagggtcaatcgttaatttcagaaaccttttgtaatatgcgctattcaccatttctaaaccaaacagtctatggatggcgtcaatgtttagaagcacatttgttttgcggactctcacccttgcgttttcctcctcaggcaaatttgctagaaattcaagagccaaagtttgattaatcctctctggaacattcacaaacttttcccattggcgggtcggaatttgttgcctcatagtttcgaataatgggctattcggggtgggattctcataatacctcgatccataatgaaagctctcttttgcaattcaaagtatcttttttgctctttcaaactaacaaatctctctttttcataattggactttgacgccggtgttggtggtttcgacgatgaagcacctgatttccctgttctagtacgcttggaacccatgacacactttaaaattaccacacaaaaattttgaaaaaattcggcagcacctccccttaatttcttcactacccaaaaatcaaaataacgccgtaataatccaacaacaataatatttcacaaatattcaacaatttctccaaataaatccacaaattcccaaatgttcttgaaaattattcaaactttcggaaaactcgcttagctaatcaacgttttgacaagaaagagacttactaagcgggaatgtcgttcatccaccaccattgttgcatatccatggaaaactcaaggttgaagatgatgaatagtggtaattttggatttgggtgaaaaaggataatttgtggtgtgatttttgaaggaaaaggaagatttatgagagaaatttgtgtttttggtgatatagatggaagatttgaagagattttgaagaaatttgatgattaatggtggaatgagggtgtggggctgagaaaaggggaaagaatcaggtggcttttgatatttaggttaaatgggagttctatgcgattttggggtatttatgttgctgaagggggtcccgtcgcgacgggaattggcagagatttttcgaaattttgcttgctcttcccagtcgcgacgggcaatgccccagtcacgactactgtagtttgccattttttttcgtaggaggccaagtcgcgactggaatcactcccgtcgcgactactgtagcaatggcccttttttttctatacttcttttttttctttttttcttcatgattttcacggttttactttacaactaaagaaacgcaaatctaacctaaatgcaatgaaacaaattaaaatgatacaaagcacttgtaattgtcttctaaaaattcaaaagaaaaataaagtaaaattaaaattaaataaaagattgggttgtctcccaatagcgctgtctttatcgtcgctcagctagacgttgaccgagatcttcataggggcaccagaatcatggtggacttggcttggtcaaattgacctcccagtagagctttaaccgcagccctttgactttgaaagtctcgaggctttcacctttcagatccaccgctccattaggaaacactttgaccactgtaaatggccctgaccaccttgacttaagcttaccaggaaataatttcaaccttgaattaaaaagtaaaacttgttgtccaggttgaaactc

SEQ ID NO: 34038 - DNA, 1437 bp, Cannabis sativa
gggaggcgatggcaaaatcttagtagcgtggggagtcaatgactgattcatatgggagacttacttaaaaggtaatggtatattcagtattggacttataaatgtgggtatgtttcaatggaatctaaaatggaggtatttttggtttgttcataaaaaaatcgggcacttttcaatttatcccaaaaaaaacttgtggaagcaaacaatagaacaaatcgaaaaaaatggagttgagcttcatctatacaaccaagggcattttaggtattaacatttataaaaggcgatttacttcatttttttaaaaaaaaaatggacattaaccttcattagtgtgagatttaaggccatttattaaaattatcctatatataaagcttttttttttgagacaagacctgtaaccaacgaagaacaacaagaaagcaccagttacaaggatctaaaagtgactagaaacataattgttctaaacatgctcattgtcagttcctaatgcaatttgtgttagcttatgcacaagagaattattacattagggagtgtaaatgattgttgcattaggaaaggaggacaaagagagactgatcttccaaatcagactggaaagggcattaagatccttttgcccgtttcaaaattttagaaaaaagaacttgacagcctgtggacacaatttcgatagggaaatgaacttcttggctcaattgcaatgctctaagaagagcctctgcttctggatagataggaggaagtcttgagtttgttgaggataagaaacatgcagttattttgttttgtgagtcttggattatggctccatatcaatgcctgtaatcctggctcttaaccgcaacatcaacactcaatttatacttccccggagaaggagacaagattttgtgacccactgatcagagttgatatcttgaatagtgctatttagtgatgatataactttatcttgagcttctttgtactactgcaaataagaggttatagaaacttttatatctataaagaccgcttaactttaatttggaaattagcagataattaggatttaattatgaaacttgcatgatatttatgatttatcgttttatggagatttttttttaaattcagaatgcattagttatgtcatacatgaaattttatgtttttacatgtttcgtgctcgacaacattggaacgcggcgtttggccattagaattacattttagtattttattagtagcggggcattatagttggacattgggaatgtcaggattagtcgagattttagaattgataaaattacctctaggtggtttactgactttttagcttaagtgagggcaaaatggtctttttccctaaataaaaattgtcttttgtgggtttattctaggttagtaatttgtatatatatcttattactaattaga

SEQ ID NO: 34039 - DNA, 2261 bp, Cannabis sativa
  modified_base (288)..(297): a, c, t, g, unknown or other
tttcccctctcgttacaatgcgtacaaataaaaagatcgtgggatcaatgctgaatacaaggatcgtgggattgaggatgaatacactggtagtgggatgtgtgtatgccatatccacgtaaattgctccctaagttatagaaattgtgttgatgactcagatgcgaaagctgaattcgctaagtgttggtcactctacgtggattgctgaatactttactctgggcatgctagcgagatatcttgctcgaactatgcttcctgagcagatgttccaagtggattccnnnnnnnnnnattcatgtgatgccacgtcagagtgcaaaaattgggataacaaaatgcaaaatacaatttcacttatgccaaatttttagcataagagtttattaattttaagttccacctatccatgattataagaataatctctttgattacaatccttttgtttaaaagaaacaccctttgactccaattacgataatattaaactttgaggtaaattttgggagaattggaatgaatttagaattgtagctgaacttagtcaaattaattaactgagctgcctacataccttctttgtgaaagatcaagctacttgtagtttagaatacattgtttttaaatttgaatataagaattctggtagatgactctccacagtgatgtattaaataatatcccaaaaatcacactaatttcacaagattctccaaaaatcaaaattatatattaacaattgcatagataactataagaaattgtttacctcaatgagaatctccttcactctacctccattgaagaaaaccttgaagttcttgaggtagatgatgatgaatagtgaaatttttgaatttgggtgaagtttagggatttggatatggttttggaaaggaaaagagtgtttgatgagagaaaaagtgttttagagtgattggggatgaatgattatgaaaagaatggaagaaaaagggttttggtgagatgagattgaagaaatttggttatggtggatgaggtttcggaggagtagtttagggttgagaaagggggttttgatttttaaagaaatcgtaatgccccttttaaacccgtctgggcattctcgccgctgcgagacgaggttaaaaaaaactgctctctgccattcgacttatggccgcggctgaggttgggcttgccgcggcgaggaagtctttaaaaaacctgtctctgccattcgacttatggccgcggttgaggttgggctcaccgcggccactgggcagttgcccagaaaaattattttattttattttctatacaaacataaaaccaatatccagtttacaaatttaatgaacacaaatcaacaaaaaaaaacaagaaatataatgaatcatttcaactaaaaacaccattaagtcttcggttgccttcaaatagtgctgtctttttagtcatatagccggacgttgactgatttcttcaaagaggcgccagaatcatggcggacttggcttggtcaaaatgacctccaaagtaaagctttaaccgctgcccattaaccttaaaagtgtctgggctttcacctttgagttccacagctccatatgggaatgctttgaccaccgtgaatggacccgaccatcttgactttagcttactcggaaatagtttcaacctggaattaaagagtaagacttgttgctcgggttgaaagtcttttctgattaagcctcggtcatgccatttcttagttatctctttataaatcttggcattttcataagcctcgttgcgaaactcatccatctcattaagttgtagcagcctcttttctcctgctgttgccaagtccatattcaatgttttcatagcccagaatgccttgtgctctaattcgactggtagatgacaagctttaccatatactaacctatagggagacattcctattggtgttttgaatgctgtcctgtaggcccataatgcatcatccagctttttagcccatttttctcttgaacgctgaaccgtcttctccagaatcaacttaatctccttgttggaaatttttgcttggccattactctgaggatgataaggaagtgttgttctgtgacgaactccatatcatgcaagtaaagcttcaaattgcttgttgcagaaatgacttccttcatcgcttataattgctcttggtgttccaaattgggtgaaaatattcttctgaagaaagtttagcacagttttaccatcattcagatgtg

SEQ ID NO: 34040 - DNA, 2130 bp, Cannabis sativa
  modified_base (1260)..(1265): a, c, t, g, unknown or other
cattattccgtgggtgtaaaggcccaatggaggcttgaagcggagacgttacaattcacttaagattaaatgttcttttattacctgaaaaaactctttcgcattcctccgtccattaaaattgcttatttcctcgcaagatgtttaagaatgggacccacttgtctattgatttggcaacaaatttgctgagtgcggcaatccgactagtcaaactttgaacttccttagttttttatggcgatttcatatcgaggagggcttgaatcttctttggattggcttcaattcctggggcattgacgataaagcctagatacctaccagagctgactctaaaggagcactttaggggattgagtttcatgttgtacttccagaggactttgaagcactcgtccaagtcacctatatgccccccaaccttcttggatttgacgagcatgtcatccacgtacacttccatatttcgttcgatctggtctttgaacatcttgtttactaatctttggtatgtagctccatcattcttgaggccaaatggcataaccttatagtagtacaaacccatatctttttggaaacttgtatgttcttggtccggtggatgcatcttgattttattatacaccaaataggcatccatgaagcttaatatttcgtgtcctgctgttgtgtccacaagttgatctattcgtggaagtggaaagcagtctttttggcacgccttgttgaggtcggtgaagttaatacatactcgccatttttcttcagcttgggcactagtaagtgattggcgacccaggccaggtagaaagctttgattatgaagttatttttgcgcagcttttctaccacttcttttagcgctagggcttgtcgtccaaccaatcatcttctttttttttattgttgaacaggaggccgaaaattaggatcaatatttaggacgtgtgaaattatagaagggtagattatgaccatgtccttatgtgaccatgcaaaaatgtctaggtttgctcctagaaattttgtcaatgctgattttactttgagcaacagaccttttccaattttgagtttcctaggcagaacatttgggtggattccgatttcttcgaattcttccatttgaccaacattggtatttggttccccaagttggggatacacatcttcatcgccgccttgggcagttctctatttggcaatgtcttttcccttatccaaactctaactagaggatacttcctttttagnnnnnnttagggcaaggttgtaacattcccgtcaacctgttgatttcctctcatgcacccaacccaattttttgttggaaacttaagcgaagaatgaaatatcgacgtgacaaattgtaggtcatataaggctggtcgacccaacatgacattaaaggctgatggaacgtcctatatcaaatattgtgccattatatttatgctcttcgaagcttgcccaatagtgaggggtaggtgaatttgcactagaggtgcagcactctggccggagaaaccatacatgggctgaagacaggggttaagtctttgagttggagccccatcttttcatatggtgtttaaaacaagatatttgcataggctccattatctatcatagttcgggccaccattttgttggctatttggaacggatcgttgtatgggaaattaatcttgacagcatcttcatcattaaacattatggggggctcccattcccgtggtatttttggcttcctttcttcgatgaccaagacatcttcctcttgctcgtgctgtagtgttcgggcatacctctcccgggctttgcctgaatctccaggacaacttcttacttgtatatgcccatccaccggtggcggctataaatcttgattattatctgtctgagcgaccctctgatttttatttgtcttaacatatttttgcacgtgtgggttattctttctaattaaaaattccatttcctgctttaaattgttgcatttgttggagtcatggccataatctccatgaaaacgacaaaacttggtcacgtctctcttacttacgtccttttcatgggagcgggtttcttgtatggagttaatgattgagtagccatgtaaat

SEQ ID NO: 34041 - DNA, 1394 bp, Cannabis sativa
  modified_base (568)..(569): a, c, t, g, unknown or other
tagtataggcctcttcggtagtatcaatacaacagaggttgtgggactatcttatacagtataagatgatggaacacttttggatatgaatcaaatagtatctccacttgtttgctactttagttttgagattacatctacatagtcatagtatttttgaaaacaaacactaactagtcttgatgaccatagtgtagtccacccctagtcactttagaatagctatcaaacatgcaaaccttagttagcagttctagtttttcttaaggacataatcaagggatccctagaattaattagaggtgttcgcgatgcgggttgtaaccttttttttcaaaccaaaccgcatatgcaatttttgtaatttctcaaaccgcaaccgcaccacaagatcttaaaactgcaaaaactacaccgcaaaaatacagtgtggtgtggtgcggtttgagcagtttgcactataatcattatcaaatattataatgaaaatttaaaaatcaatctaataaagttttaacaatacaaaaaacaaatatcttattaaagttttaatatcataacatatatnntaatcatcaagtcattatattgaattgtctctaaaaaataatgtaatatatacatatatttatttttttatgaaaataaaataaaaatcatattgtaaaaattagtaactttgtaatgtatagtgcggtgcggtttgaactgtaattattaaattcataactgcaaattacaccatgcagtttgacaaaaatacaaaccacaaccgcaccagaaaggatttcaaactgtattttttaggcagtgtggtatggtgcgggtggtttatgcgatatgagcggtttaatgaacacccctaaaattaatcattgcgtacactaagtatatgaccattatatcattctaaggttttcttggggcctagtcttagatgggacaatctttgaaaatattgtttggtgtctctaagacatatccctagaaggactttgtcaattgctagtaactaatcataaacctgatcatttcaacaatatgcaactctagaattctgatgaagtaagttcaattacaattcgaagttcatttaaatgaggaagtaagttatcattctagcttggactgtcactaagatattattacagcactaagttcaacttgtaaaatacttgatatcgatttcaaaattatattcttaagtttctgttcaatcaatatttagtagtagtttaagaaggatattcaatgccttgaggatagtcatcattcattggatagaatcagggccgtcttacacattttggaggccctgttccaatcttaaattttaggcccttaataaaaaaaaaattattttattataataattgttatttatttcattacaa

SEQ ID NO: 34042 - DNA, 1058 bp, Cannabis sativa
tatattattataataaaactaactaaaacacataacatgtacattctacttctattaacaagtttaatgtgataattaatcactatttttgttatccataaaatactaccactaccacttagaattttttagagcacaatatttacatactaatacgcagatatatttttatgcactaaattaaattattttatattgtttgtaattgtaacataaatattaaagcctaaaatattagtcccaactccttgaactcaacctaacccaaatccaatctaactcaactcaaccccttatcttatatactaagtagagttagattgtacaataataaaaataaattgaatgatttataatttttctaaaaggcaataattgaattgactcattaaaatacctttaatatagtcaatccaacccaacctaaaccatctgcacccctaacaagaatggtggagcagagcaaaatgagaaaaatagaaaaacaacattttacatcgaagtcttcatagaattaataagactcttttatactattttttaataaaaattttaatagtttaaaatattaaaaataaaatttaaatatcaatatatatataaaggaatctttttaagagatgatgtggcagcctcattatgatccttttctaatctctcatttcctaattttttgatttattcttattttttctaatttatttgtttaaactcattaattgatcttaatgatcttaaatgttttttgcaaatttattttagagtaatgaccctattctcttttccattattttcttctagagttttatccctttccattcaattttaaaaaaaaaaaaacaccatttttcatggcctctcttttccattattttcttttagagttttatccctttccattcaatttaaaaaaaaaaaaaccactatttttcatggcctcttctgctacgcttggacgaaattgttcttggcaaaattacatccttcaggcgagatttctgtggtgtgtgtattttggttgaatgagttttttgctattttcaaatcatcaatcatca

SEQ ID NO: 34043 - DNA, 2670 bp, Cannabis sativa
gttattcttttcatgaaagatattgcaactatgttaagtgggcgttcgcgtgaagaaaaatgagactataaagtcaaagaaagaggccaagtggacagataacatataataataaattagttctgtaatcatatcaatcactcactcactcactacttgattcagacattttgttaaataaattcttatttactacaattactattcttctatactccttatcccatctcatacccactaaatctattccctatataaacaattggccaaaaccatatagacaacaccataatatattaaagtgaaatatgggctcaaataggctctactgctcttccttaaccttcataatattgctcctttccatttccatacaatgtcattcaggtacatattacatgtatatacatatacatatttatacacacaatcttctgtatattttttcttgattcaatttgtgtgtacatgtgttatatatagggaaaagtgaagtactcaaagtaaattactataatgaaagttgcccaaaagcagaagaaatcataaggcaagaggttatcaaattgtacaatgaacatggtaacacagctgtttcttgggttagaaatctcttccacgattgcatggtcaaggtgctatatttggtttctctttatttatcatatatatataaatgaatattattagaaattaataacaataatataattactaattatgtatatacatatatacttgtgtatatatgcagtcatgtgatgcatctgtattgctagagacatggaatgggattgaatcagagaagaaatcaggaaggagttttgggatgagaaactttaagtatgtaaacaccatcaaagctgcagttgaaaatgaatgccctcttactgtttcatgtgctgatattgttgctctttctgctagagatggcattgtcatggtatatatacatacatctaatacatattaattaatttattttagactaatatataattaacattacctatatatatagatacatatataattgtgggatgatatgatgaatatataaataagtgcagttaggaggaccaagaatagaaatgaaaacgggaagaaaggacagtaaagaaagccatttgacattagtggaagattccattcctaatcataacgattccatttctttggtgctttcacgatttcagtcagttggtattgatattcaagccactgttgcccttttaggtattattatttttatttgagaactgattgatctcataataatatatggacttttgagggaaaaaatattaccgcgtaaagttataactccaatattaatttattctaaaaaaaaacttcaatattaaaaaataattaatttaaattaatttttaaaaattacttttaatattttttttaaaattttatttttcacattattttcttttaatattttttttttttgaaaattttcttttaatattagtagttagttttacttcattttcttataatattttatttaaatttttatttttcacattattttattttaatattttttttaaaataatatttcatataattgttattttttgctttattatttaaaatatattttatttttattttagaagtattttcttaaaaatatgacaagaaagaagaaaattttaaaaaaactagcatcaattaaaaatatatattttatataaaataaaaatgattaaaataaagtatacttataatttataattgcaaataaaactttctttacaaaacagagaactaaaattaattactaattagcgttgaataattcataaaatttacatttataggaaaaaaattatgaataaagttctgtgtgaaaacgaaaattaggaataaatgggttattggaaagaaatgacaaaaaagaagaattattagttgaagaactacttattgacaaatataataaataattagttgaaagattttattaatgattttgttattattaatttttaatacaggggctcattcagtgggccgagtccactgcgtgaatcttgtggatagattatacccaacagtggacccaagtttagatccaacatatgcggagtacttgaaacgtcgttgcccaagcccaaacccggatccgaatgcagtgttatacgcaagaaacgaccgtgaaactccgatgatccttgacaacaattacttcaagaatattctaaagcacaagggtcttctccttgtggacgaacagctcacttctgatccttctactctgcctttcgtccagaaaatggctgccgataacgactacttccatgaccagttctctcgcgccatacaactcttgtccgagaataacccactttctgaagaccttggccagattagaaaagattgccgttttgttaataagtgaattaataaattaaataatctgtaacaataatcattataattaataaatgttacccctttctatccggttaaaagcttctgtccaattttttattccgttaaaaaacaaaaatattagccaacaacttgttatttaaaatagagtaatttaaggcataaatatttaagtttaaatgtccgtaataatcctaatgtgatcaatgatcctcgaatgatctatactgtaaatggattagattaccgtaacaccct

SEQ ID NO: 34044 - DNA, 1943 bp, Cannabis sativa
agtagttagtactagagaaaaatagtagttgtaagagatatgttttgttggatcattttcacatcaaggaggcttccgacttctttgtctacaagatggaagagttaaatggaacaatgaggtatggaatagatttaatagtcctaaacatgctgcgattgtttggttttgttgttcaaaacatgaaatgttaaccatttattttttaattgtcatgtgaatttgaaattcataaaggcaactaaggattggatggattggcacactagtgctagctctctagtctctttatacagatgcatagcctcaaacaaagtgaaataatgtatagcttttttaggcttatttaaatgaggtgttgttaagatgtaaggttggttttcatgaaattcgctttctgatttctcaaaaaaaaaaaaaaattaaagaaaagttgatatcgtatttaaaagtattagttataaaattaattttgtggtcattaaatatatattactttaacttaagtcatgtactttaaaattggaatactttataacacataattattttatttattttttcttttttttttaaaaaaaaaacaaaatgaaaaagaaaatgcatggtgatcaaattagcagtagaggaattttttttgaataattgactctttctctattctcttcaaacattccgagtaatattattaataataataatatttggacttattctcttcaattaactacataaatatatatattatttttgtattttaaaagaaaatactattttaaatattttttagaaaagttattaattaaactctttattttattaaataaaaaattaggtcttatattttttaaaataatacaaaataataatctaaactgattttttatcaaaatattagtaaatagtactatcttgatctagaattgttatgaagaaatctggtacattttctatatcgtcgtaaaaattatcttcaagttagttatattaaaaaaaaatcaaaaattgagttcagagtactattttgtaacatttagaaaatacaaggtaaaaattgtcttcaagttaattatattaaaaaaaaaatatcgaaaactaaattcaaggtactattttgtatcatttaaaaaatatagggttcaatttattattttacaaaatagaaaatttaatcgataacttttataaaacacagtgtccaaaataacattaatactcaaaaaaaaatgtatttatatataaatatatattttttttggttttattatacaaaagaaaagttggtcttttaataaacaataatattaattctcgttcaaaataaataaataaataataatatgaacaatattttgtggtcaagtgaagtgaaacacgcacagtctctctaattaattaattaaccaaaatactttcaattcaattaataataattagtaaatacaagtaccatatacgtttagtttaacaaatcaagctcatcttttataccaaaattttaaataaataaataaaaataaaaaaaacaagtatagtaagaaattcaaagtcaagatcctacatatataaaatgacttttattttttcaaaaggaaaaaaagtatatatactagtacttaattttggaaaattattcaggtatactaaatgtttttatatataaaaatatatatattgggaaaataataaaggaaattaagtttggcttaaaaagtttatacctttgggtgaaaaaaaaaaacaaagtatataagaaaaaaaaattatatatatatatttgattaatgaatgtaaaagaaataatagaataattttcttttctttttatcattttgattaatttcttaaaatagttcttaaatcctaattatatatggatcaaaatcaaaatgaacaaattatttatcatttgatatattttgatttcttaaatcttaattatt

SEQ ID NO: 34045 - DNA, 1293 bp, Cannabis sativa
tctaaaaagtgagtattgagaatgctctaaatgaatagacataggttttgatgtgaaacgagagtattcacgtagtttatgtgacttttagattattgcttattgtgaatcgtatgttgttctatctcagagatgcagtagttggcatgcaatttaggacctttatgatttgaaaagagtttaggttaatttataatctgtcatcacataagagaaaaaagaatggttaattagtgttaacaattgggtaatcaaagcaattgaaatctccctaagtttacatccattgttaaacattttatttatttgttttatttaattttgcttagtttatttagttcaaaattaatttattcgattgccaaataaaaacaagaatttaattgattggtacttaactgcagtccccgtgggaacgatctcacttacttgagtattacttattaaaacggtacgtatacttgcgtgttggatttatcacaacaatttcctcaaccagagctttgctgaaattttctacgaaaaatgtgtgctcgttttgattgatgtcttgatgttggggatgactttattttgtgtatatattgtttatgtatttttctttattggtgtgtcgtagaaccaaagctgattttgtgcatttgttatttgtcgagccatgattctcctacaataattacaggaatagtactgaaatacaccctctttctagcgttaaatgttattagaggaatttagacaacaccaaaaatagagagtactcactatataattatatgagtatgtaaataatatagaataaacggaaaaaaatataataattcaagaaagtttggtgtgcctagtctattgttgttgaaagtgatctattgctctgtattgtaattgaatgcaaagggaagtccatacttataagtattagatagcggttacaatagttcggtcataatgagaccgttacaagttacaataataatttacatattaattgtattgattacaacaattaaaaaataaatataacgttcgctttaatgacccttaaatatatttgactgttaatttccattgatcgatttgttcaaatcttttcctattgatactgcagttttatcaaatatgtgaggtgtgttttccttgatatagcgagatctctttcagtcaatactgcgaagttctttcgatactgcaagtcctatctatatataaatataaaggaaagcacaaaggagtctaggtggcatcttacatttttttttattgtatttttaaaattttgtgacattttcatat

SEQ ID NO: 34046 - DNA, 3205 bp, Cannabis sativa
aaattataaaggctctctctcgaaaaactatttgaaaggggattccctcaccctatcccatagtctgaattcttcaaatttagccttaatcttcgggtagtaataaaaccaagaattaaatcaacaaaaaataaaacaattattaataaaacaataaaaaataaaacaataattaataaaccaataaaaaataaaacaattattaataaaacaataattaataaatcaataaaacaataaataataaataataaaacaataattaataataaaaccataaccaataattaataaaataataattcataattaataattaaacaataattaattattaattaaaaaaccataattaataattaataaaataataaaaattaaaacaataattaataattaaattaataacaaaacaatagttaataattaattaaaaaccataactaataattaataaaacaataaaaaataaaataataattaataattaaaaaaacaataattaataaaacaatataaagtaatacaataattaataattaataataaaacaataattaattaataataaaataataataaaaataataattaataaaacaataaaaaaataataaaaaataatacaataattaataataaaacaataattaataaaacaataaaaaattaataattaataaaacaataattaataattaatagtaaaaaaataattattaattattaattaaacaatacttaataaatcaataaaaaataaaataattcataaaacaataactaaataattaataattaataaaaccaaaaaaaagacacctcgggtccgatgggtccgattggcccgatatggtagccattagaccctatcggtccaatccaaccttcacaatttgggagaatcggtcttgctctatgggtctgattggtccgattggtagccaatcggacccatatggctatcatattggcaccatcggacccatggcatcgggaccatcggacccacaccgtcgcacccatcagacccatgcatcgggaccatcagacccaaaccatcggaccctcttcttccccaatggtttctcctttcacagatccgaaccacccaatttccattccacaaaaattttcttaaatctaacaaataataggtttcacaaacaattccaaacaaaatcacaaaacaaataaatctttaacactttctaaaaaaaaaacaaaaaaatcacaacataccttcgacattttagcttcggcgtggatccaccgtgggtcgaactcctcctctacgccgtcgattgggtcagtcaccaccgtgggtcgttgggtcgagcgtgggtcgaagtcggctgtgccatcaccgtcagttggggttttcgggtgggttgagcgagagtgagttgagagagaggaagagagaggctgagtttagagatttcaaatgtgaagggtattttggggaaattagtaatgtggtcatatatgaccaattttaataactatggatttagggaaaaaaatttaaggtattgtaagtatgagatttcaaatttccctatgaaaactttaaccctaggggtattttggtcaacaccgaacaccccgaaataaattggtaattttaaaatcaacttatctttcaacttttaccaatcccgcaaataaatatcgttgtgacatttctgaccccaaattgggtctctatggttgccggacctaagaatattttatttcataaatagcatgcatgttacctacatattttaataaaattttcaaaattaataaattacgccttttaaattattcatgacaaaattttttaatttccataaaattagattagtaagatcataatcttacccattatacatttattaatctattttttttttatataaaatattacagactataaactgctatagccaactttctaacactttaagacacaaaattaatacaaaggtaaaattgttgtttttttttttccgaaaaacttcttctattatgagtccacaatagaaaaatggtatttttaaacacacacattcaaagttgccccaataataccttagaccaacccaacaacaagaagacacactcacaaaaccctaaccctagcactcacaagaacggtaatagactcaaaaatttctcttcatatcttctccttcttctattatcagctagggttatctaaggatctagggtttctcacacaaacacaattgcacaaacttagctagggttcttaggttttcatctctttcaggttccaaatctcctcacacccgattcttacaaccccaagccaacaaataataactcaaaaaactagatctgtcactacagatctaaccctcatggcttaaacacactattgtacacacaaattcacttgcagatattcaatcccagaaatcacacacactcaagaatgaacacacaaatatgaaatccaaacataaacacaagaacacaaagaaaaaaaaacaaaaaaaaaattgcaaaaaatacggttgtacggaattttaaatatttttacgatgttatttacagattatacggtcttttgatatatttttatgttgtactcttgttaatttcttattatttatatgttactttttgttgttgttttcatgttacttttacataattttttttattgttttcatatttttaagaacaccgtaaaaatgtaaaaaaaaaaatctttaaatataaaaatataaaaaatatacaaaataatactttatgtaattatcccaacaaatgaaaaaaggaatccaccatcaaattttttttcattggcaaaaggttgtacatgggttataggaccatccctgaatataaaagggtctacttttttttttttgtttttgtgtatgctgtatttaaagttaagtaggagcactattaagtctatttcacaaaattttacaaaattactatttttctcactacatataaatatattatgtataatttttggactcttatttggatggccttatgtacaggtctagcccatcttaatacagaactaaacttaataggtttggttcttgagagggtcacatattattttgagaaatgatagtaaatgactccaaatcataggactatgttagtttatgtcctcattttaaaaaaatatagcaaatgaccctaaatcataagattatgttagtaa

SEQ ID NO: 34047 - DNA, 2153 bp, Cannabis sativa
  modified_base (789)..(791): a, c, t, g, unknown or other
ccggagtaccgctagctacttgcaattgttattttttgcactcgcttcaggtatgttttttactttatcatactagtagtttttgtttttagttaatatgtttatgcatgttagtgaagtaggttctgtgataaaattgactgtggttggctgggtggattattttttttgttcatatattgttgtgaaatgtttgtttgtgttatttatagattttagaaattttggatttacaatttttaagctattatgctgccaaaattttagtagagataattttatatataaaattaattaattgtttgaatgaaataaaattgatttactgttaagaataaaataataaattaattgttgataaaagaaaacaaataaggtaaaacataaaattgaaacatgtaattaaaaatttagtaaagtaatacttttttaaaaaaaataaaaaataaagcatttccaattataataataaattattagaaaaatatttaattataacatgtaatataatatttaaaatataataaagtgatattataaaatttaataagttagtaattttaatttaaataaaaaattattaacagtttgatgatttcattgtcgatgatgacattgagggtctaaataccgaagacgataactccttagaattagagagtgacagtgatgataatgttgtatatataactgatgatgatgaattgtaattgtaacagtgttttaacaggaataaaaattataacttttcttgtttaatatgttttgaatatggttgtttattttaannnaaaaaatatgtgttgtatatgtagtatgtctacaccaggtggcagcagttcaaaaaaaaggggtcagaggtaaatacaaagggaaaaatattgaagaagagctctccaaaacaccagctgccaagttacacattgaattgcatgaagagacgggcaccccagtcggcaaaaacaaaaaaaaaatcaacaatatgtgtaaatggatggtttgcatgtccatccccatgaataaattaaaatgggaagatgttagtagaactaaaattaatgcattgtgggacagacttgaggtattttgtaataaattttttaattttaaatttattatagtcttattaaattttaattaatgtattaatatgaatgtctaactttttacaaaccaagtttatcctcctacgagataactctacatttgtagactatggtgagtacgagatgtgaaagagtttacgtgactggaggtcagactataagaaaaagtagatacaaaatattgaggagcttggacaggagagggtcgacatgttacctcatgacggagtaacttaggaggtgtggagtgattgcattgcttactggagcacaaacaaacaaaaggtatttaataaatttctaattttagtaatgtttcatgttatatagtcaataataaataattaattattagaaaaattattaatttcaggcgagagcaacaaaaaatagagaaagtcgtggtaagatgaaacttcaaggaggctggggatcaaagcctattgtttcacatgttgccgagggggtaagtttatataataaatcatcattgatttaatttttttttttttggtaaaataacaataaaaatattttttttcttaaaaataagctaaccccgacacaggagaactgccaactgcggtggaaacttttcaaaagtttcaccataaaggcaacaagtatgcgcaacaagcttacgtaagtttacattttaatttatttctatttatttctttttaatttattttgtattaaaattaaccatttaatttatttgtttgttttaggagcaaatagttgatatagctgcaactcaaccagcgcccactgaagatcagcctgatgagactgctatagatcctacacagtacccccgagactttcctgttatgacgcaagtactcggggagcaatctcgacatctaagaggcttcggtcatctccccaggctgaaggcagttggggccaaaagggcacctgccatgaattcttcggccccatcgattgttacaatggaacagtatgaggccttacagaaaaaagtggaggaggaagagcagataactcaatatacgaggcagcaatatgaaacacaacaactct

SEQ ID NO: 34048 - DNA, 965 bp, Cannabis sativa
aaaataatatgtaaataataaaaaatcaacaacaaaataataatacatcaaaaaaatatattttttctgtaataaaatcataaaaatcgtaaaattatttaaaagttcgtacaaccgtaattttagatatttagaaattatcccacgaaaaaaaaaatctaaaaaattgaagaaatttttacagaaaatataaaatgataattttttatagattatttatttgatatgaattttttaattatattttttagagttgcataagacaataataaaaatattaaataacctattgtgatgttgttagggatgtagtactcttcccatcttatccccgttaaaaatctaaatcctcattcttatttattttccattaaggatggagtgagaaatcccctaatgggggcggggatgggcaagagaatccctaatgggagcgggaatgggtagggaaatctctttatagggacaggaatggggcaggaaatctcctaatatgagggacagaatgcggaattctctaataaaaaataaagtttataataaaaatttaaatatataaaaatattaaactacatgaaaattaaaatattatacattaattattaattaataaactaattattatccaaaatacaacttagaattcataaaaagatattgacatattaaaaatacaaacataaattataaaatattattaaaactataaaataaaatactataatctcgtccccgtcacgtttaatattcaaaaacaaaaaaaataatctccatcgccatcttgttctctatttagatggagaatcccgtcccattaggggcaggtccttatagggccccattcccattaaaaaatgtgcattctttaaggaaaacttacaaaaatactgcttttttaccaaatattttcaaaaatactgagacacggcaaactttacatttttactgtccaagcccatttttat

SEQ ID NO: 34049 - DNA, 2226 bp, Cannabis sativa
aaataaaaaaagtaacaataaatacataaatatgttccattttcgcattgctgtctgctttcattgaacctgctgctctgtagttaatattataccttagttgatttccaggcccctctaggatctagctctcttacatcatcgaaaaagtacaaactagtaaaaatgaatttacaaattataatcatataaaaatatgtagtctcaactcaactctagaatattgatgtaaggaccaattaaagcaaataaataaataaatagaggaaaataaaaggtctcaaataattcttaattattgatgcctattcctataattcattaataactcattaacttgtgagtattattattatttatttatctttggattaaatattgtaagtattttaattcccaacgaaataatttcttgtatgttatacttatatgtatagcagcattattggtgttcattattttttataagtggtactttatgattatttagtgatattttttaaaaattattttttaagttatatgagatataatacttaattacactaataacagtatgacaccgaaaaaaatactaaccaacattaaattattttattttataatgatcaaaatgataatccactacaagaatgaatggtggtattactattaattaggtgtgaattatgcaaaagtggtaatcaactttttctttttatcatacatcactaccatactttaaacgtaattattcctccaatatagcacaaaagttagttttaaaaggagtacccttactttagaatgactttgttttatatatgctcttaacattcatctaatctatttctacccatcatcaatgatggagctagggccggggagggtgtcgtggcctcccataatttaatttatttttatatatatgtattggcctcaacaaattttttggttggcttaattcgtttaaatttgtattctcactgtattttttattgtattatttattagtgcattattttgctaaaaaaatactaaattattttaactttaaagattttttctattatgtctcgtgtgctagcattgttataaggtattatagttatcacagtaaaatcttacaaataattaataattttttataattattattaaattaaaataaattgaacctatgttatagtatttttcttatatttcttattatttattttttacaaatatttattatagtttaatgagagaattactataaaaacttactgtgtaacaccgttttctaatgccaaaaataacacatcactaatcagttaattaaaatggtattttcttttggcaaagtaaaatgacattttcttttattaaaagagaaaattttattgtcaaaacgaacaaatgctacaaagatcaacatcaacaaaataatcacctatcgacttatttacatattacaaacaaaatcaacattcgctttaagatcatctctaattaatttattcacataagaaattaattatgaaaatattttgctcaaaaatattttgattccaccaaatagttttttgtgagtgaatgaatgagttaattattgtttgagttgtcctttcgaaaaaaaaaagaagaagaagaaaaagagagaagagtttcgatttgaggtgtaagaaaatgcttcacggagtagaatagattcatagaaggtcggtttgacttatgagaaccaaatctaattttatagactttatatttaggataaaaatcaccttatcataatctctaatcttcttataatatatacactattttcatttttttcttttctttttagatccgagtacttctatttttaatatatttgataggccatatgagaccatttccttttaaacattaacgaagcatattgaaaacaaaaaaacaatattagagaccgaagatttcatctctgaagttgatcgatactatactctagctatgatttttatttacacgactcccttaataaataaactattaatacaaatctctaatcaaggttagaagaggtaattagtataactaaatattgattgtagttttgttttttatgttaattacatatctttctatgtgcattggcattgtcaaataatatatatatattttaactaactttggaaatgttttgaaaaattgatatttttgttttaatttattaaacatcatatcatttatattataataaattgatatttttaaaataaa

SEQ ID NO: 34050 - DNA, 1423 bp, Cannabis sativa
aagccccctaaaaatcaaaaacaaaaccccaaatgaaatgctaaaatggaaaaccttgaatagcacaaacaaaaaacacaaaaccgagaaaatgaaaaatacaacaaaatctagaaaaagggggaaactaaaaagaaacagaaaacaaacctcagatcgaagaccaccacaaacattatcatttttttcaacaacatcttgagccatttttttcttgggcacccaccttcgatttcttctttggaggagctggcccacgcttagataatggaggagcaaaataagagtcatcctcctccttaacaggtcgtttacccttgctcttattagctaaggatttcaaacccattttagagtttttcttttgaatagaggaaggagatgatgaagaatgggttacaaccatataaatacggattgagaaaaaatagaaatatgaaaaacggttacgggattcgttactgggagttgaaaaaaaaattgaagaacaaaaagaggagggaaaatggaggtgggattgtggagagggaaggttcagcaatggaggttactaattttttttttaaaaaaaaataaaaacaaatcgaaaataaaaggaaaaagaagaaaaaaagagagagaaataatagatggttgattgataggggtcataggtcacgcacgtgtactcatgcatggaatgagtgtgcatgtggtaaaatagtaataattgaaggatactattttgctataataaatatgtcctacaagcattaagcaaaaaatggcatttgagctcgtttataattattgttttttatttccatttcatatttcaaaagagtataaaataaatgtcaatgttttgaactcttttttgatttttctaatatccatcaatctataatttatttgactaatatacttaattataatgataacttatcttcattactttaacattagttagaaaaatataataaatgaatcacatatatgatcatttgatttctttatgaaccacatcattttattattgttctaaccattctatatttaattttatttgatagataaaataacttgatcttaacatattattattttgtacttatatacgatttacaaacttttagaaggattaagcttaaccaactttttgaatcgcgatgcatcccaaagctaaatttgaaagaagtgatcgacattcaaaagcaacatgtcaccattcaaaagcttcatgcagtcgagaaggaggagcactactgggttgtaacacttattaagtttgttgacgaggagaaagaagagaaagaaagtcttcgcaaaatcaatcattgaaggatattattttgctataataaatatatcctacaagcattaagcaaaaaaatgtcatttgagctcgtttataattaagcaaaaaaatatcatttgagctcgt

SEQ ID NO: 34051 - DNA, 1909 bp, Cannabis sativa
  modified_base (26)..(51): a, c, t, g, unknown or other
aagttcttatttaggatgttaataannnnnnnnnnnnnnnnnnnnnnnnnnctggtaaaataattccaacagaggcaacctcgaactagggtacatgatatccctcatggcaacgagggagatcttgggactcaacctagggcaggtgggttgctcccgagacatcgtcaacgtccttctcgcactgatagggaaggggcacatacaaattccaatagggggcatgtatcaatccattctcagaagagaaggcgacgaggccagttctagttcttaacgtacaaggactcgtagtcgatcaacgtgaggaggagatagaacccgttgcagtactgatcgagaaagtatgggcacaagtagaacagagagttactcaaggatgaggtccgtgagtaactatgatccacaatagccagatcttcgtaatcaattgaaccaaaaaaaacctcaccttcatcaacaactcaatcaaaagcaaaggatcatatccaattgcgaatcaacaagttggaggacaagttcaggaggtaccaagatggggaatttggaaaactgcctggctacgactcggacgaggagcccaagcctttccatccaaatattatgagtgttgaattcccccagggattcaagaaccctcacgtcttgtcatacgatgggaatatagatccgctcacgcacttgaataatttcaacacgatcatgcgagccagcaatgtaacgaataatttatgctatattttattcccttccttgctagtcggggcagcgagcagatggttcaacaaatttacccatcattcaatcacctcttcggaacagctgtctaaggacttcaagaaatatttctaggcagtaagagataggcaacccgaagtgtcttctcttactaatataaaacagtagtcgggcgagacacttaaggcttacttgagatgtttcagtacagctactgcaagagtgagaaattttaacgacagtatccaactcattgcccaccaagcagggatcacggctgatctctcaactgctcgaggcgagctatgggatgacttgcttggtcgcccagtgaagaacatcagtgagttcaatgaaagggctcaagtgtttgttcaaaaagaggaagtaaacctagcactgtctcgaaaagtaccgtctcgatgaaggttgacaatccaggatgctctaagagaaaagataactctaaggattcagtcaaggacaagaaaaaactgaaaaagcatagcaagtacgtgcaatctacaccatttataccgagcttaatgaaactctggaaaacatctatctcgcacatgagcacagggtcgcatttcgtaaacctaagcccatgaggcatgcgagacataaaagaaatgcaaccaaattttgcaagtatcacaaggacattgggcatacgatagaggaatgtcgttagctgaaagacgagatagaaagtcttatcgcgtgaggccacttccggaaatatgtgaaaagataaggcaatggacaaaaatagccatatccgcccaataacccaggcaaccaaggattacaacctccttctcttaaaggagaggatattttggttatctcgggagggccacatactatcggggaaagtaacaatgcccaaaaagagatatgtaaaggaagttaagaatgagcagtctacttttgctccagaatcttctaagaaagcaatgactgaggaacctccgattgtgttctcggaggaggatgtgaagcacgtgaggtgtcgtcacgtcgaccctctggtaaataccatctagctcaccaacaaaaggatgaaaagggtgatgatggacaatggaagttcagtgaatatcctttataaggatacagtgaagaaaatgggacttgaaaaagtaaagttaaaaccttgcatggt

SEQ ID NO: 34052 - DNA, 3811 bp, Cannabis sativa
tcttcattccaacaccatgtttatctaatcctaatgccatctgtgcttagtgttgagctcctgtattcccttgtctacgaacatgatggagggaaacattggaaagcgaagataacacctatcgaatagcgtgaattatagctccatagcttgagagaatgtcttcgtttgattttaaatcagtgacaaggtttttgcaatccacctcaacatggtgaatgttaattccgttatcagagcaccatcggagtccttctaataatgtccatccttcagctgcttttggttgcatctggcccgcacgacttgaggcccttgctgctataacttttcccatcgagtcccgtactagagccccacctcctgtcttactccagcggctagaaattgcaccatagacattaagtttgagagagccaatagatggcggttcccatgtcattacattatagtctgtggtatgttgagacggcgtcttgtgctgtttctgagatgcttgataaaaatccaaataatcttgggcctcttattgaatttgcattgagtttgaaacctgattcctgaaaacagccgcattcctgctattccaacacttccataacatacaaagaaataggttaaaataatcaattgagaaattttgctgcatgtataagataatatccaacatatgcaagtgttttaaatcctttaaagcagagctaaaagacgtacctgaccaagccttcttcatgttcttacattcaaacaaagcatgttgtacagactcatagtaaaggtgacactggggacaaatgggagagttaagacacttcctatgatagagattttcaacagtaggaatagatttctgagtaagcctataaatgaagtgcctaatcttaggaggaatttgaagactctagagggatttccaccaacgcgtgagggtaggcgtgtttgaggatgaaggttgtgtcaaacttagggacattttagccacatggtaacccgttttgacagaatagtgacctgagggagtgtgctgccagaaatatgagtccctttgagtgatatcaggtgggggaagggatagaatgtcgtctataatgtcctgttggaaatggttttgcagcaaagggatattccaatccccattaggaaggagaagatcagagacatttacaaggtgacttgggagatgggcaggaagaaatcggtagttcgggatccaagtgtcatgaagaatctttgtagtggtcccatttccaatcctcttgcagagacccattttgagaagagatttaccccaatgaatactttgccagacataggacgaagagtgccccaaagaagagtcaaggaaggttgttctagggaaatactttgcttgaaagaggttggtgagcaagggtgactggtttgtttggattctccatgcttgccttgctaacattgctttattaaaaggctttaaggatctaaaccccagacctccaacactctttgagttgcacatggatttcacatttttccagtgaagtttacgttgaccattggttgcaccccaccagaagtttgtcatttccttctcgacaaagctgcagaaagaatcagggagtttaaagaccgacatggcataagtgggaatatctttgatcacagccttaagtaggacttccttgcctccttttgagagaagttttccttgccattttgacaagtaggaccaaatcctgtctttaagagaattgaaagaggaacttttggtccttccaaaaaactgaggcaggcccaggtacttgtccatgtgattgggaatgggaacctgtaggtagtcctggataagggtctgataagtaaggcttgtattcggagaaaaaaatagagaagattattggaaattaacaagttgcccggaaattttctgatagtggtccagagcttcttttatgacattgcatgcctcgatgttggaccgatagaatagaatgctatcatcaacaaaaagaagatgagagattttaggagcatacgagtaattttgataccaaaatcctcctcttgatgttcagcttgtttgagaatggatgagaggcgctcaacacacataaggaaaagatatgcggagagaggatcaccttgcctaataccacaggtaggagtgacaagccccagagcttggccattgacgttgaatttgaaggtggccgtggtgatatatgccatgatcaaattggtaaaccgaggggggaacccaaacttttccataatttttttgagaaacttccattcaactatatcaaaagctttggccatatcaacttgacagccatccaactcaatcttccctgtttcctgttttttatagagtgcaagatttcctgagccatgaggatgttatcagagatgaagtggcctttgagaaaggcactctgatttggagaaatcaggggattgaggacaagcttgagcctattagcaaggaccttcgagataattttgtagatcgtagtgcaaaggctaatagggcgatagtccttcagagtagttggcttctttaccttaggaatcaaagaaacaagagtagtgttaaagtgatattgttgcccactacactccagttttttttggtagaattggttattgaagccatcaatacccgaggctttatcagaacccatttgtaaaagagccttcttcacctcagaaggagagaaagcttcatcaagaatttgataatgcatagggtcaatcctaggaagagcattagagagaccagcttcgatatcagaatcctgagggtgttgagaagtaaacaggtttgagtaatacgattggatgagagagaggattgagtctgagtcataaaacacagttccatcctcagaggtaagggaatcaatcctataactccgcttcctgtttgaagcaaatttatggaaaaaacaggtattcttgtcccccaagttaagccattggacacgagaacacttcctccagtacgtttctcccttgaacaggagagaatcaagattctcttggagtgctttttgtcgagaataagactcaggagaggtgtcctcagagttcctagcctgctcaagatcatgttgggcttttttaattcggctctggaaaccaaaaaaagctttgttcttccagctggaaagaaattttgcacaagtggattgttttgacagaaggctactggaaggatcatcactgagaacattggaagaccaggcttctagaaggacatcattccatcgtggctcagagagccaaacattttcaaagaggaatcttttgtctttcttttgtgaatgtgggagtgttggatctgatcaaacaagatttgaatgtatctatggccagaaccaaaaaaatcaaggttgttgaggccactgttggggtggtgggaatgccaaatgctattctctacagcccaatcgagacgctccagagtgtttctaatgccctggccattatttgtccaggtcaagcaaggaccatttggttgtaaagcctgaaggtgaaatttgttcataaaagtacggaaaagagtggaggggccatttctaagattaccacttgacttatcatcccaagttaagaaatcattaaaatcacctatcacaaaccagggtattaaaatgcaagacaaaccaatcctggataaaatttcccaagtgtgaactctatttccaggattaggggcaccataaaaagcagtgaaattaaaactagaaaaaacagcagacgaaacaaaacagtgaatgtgattagccgaataattaggaatagttacatcaatgtttgagttccagaa

SEQ ID NO: 34053 - DNA, 2712 bp, Cannabis sativa
  modified_base (598)..(609): a, c, t, g, unknown or other
tctataataggaagcaaatttaaaggtttcatttttggtattgtatttcacgggttgttcaaattaggacccatcaatctcgtaattagaggaagaatgcgacgcattcatggagcgagatggcaagttttctttttggattctggtatgtgatttttgttagtattatggtaagaataataatgtgttacgttaccaaaagcctattaaattaatcaatattatttattgttaaaataaatccccacatgcactgttcagattagcaaaattcatttacaagaatttaaatctacaagtggccttcggcctctaacaacctagtcagacaaaacctgaagttagttgcaaagtttgttaaaactgttgcaactaacttccagctctctcttctatcctaaagctataaatacatgcatactcaattgaaaaaaaaaaaaaaaaggaacagaacaaaaaaggttagagaggaggagacttacagaggtaagccttagagccctaggattagggcttggagatccaatgcaagggaaaatcatacacagaaaggaagaagaagaagaaggagttagtacatataagagagagagagagnnnnnnnnnnnnagagagagagagagagacagaaaataaacactgtaaacacttgaaaattataaagaggtttaccaatcttacctgtgatttggaatccaatcttgtaactctttgatcttgaagatcttatagtggaattgagccatttttgaggcgagctcgaaagaggaagtacccatctgaatttttgggcaatctctataaaacctggtgcaatctctcttattttcttgcttttactaatttcttataactgtgtgtatagatctagggttctgttttgtgatttgggaagggattaagcttggttttgggttgatagcagtcttcgagtttcttctcaagaaacttgaagctcaactagggtttcgactgatttgtgagtgaaagtgtgaatgacctaggtttagagagggatatgagggtaattagggttaatcaaaatgacattgcgttttgggagagtcatctgtcgtatgactcattgaacaaaactttgtatttgactcagggtaaaaggtcagttttgaccttgggtattacttgatttattttttattgtgtgtggattaaattggtaaaattcatatatttatgttagtatgtattttaggtatactaataaaaattttcctttatttatttaggtggttcctttttaaaaaaaaaaaagtaaaataagtccatatatttggtataattcattaaaagaaattcatcaagtaatgatgatgaagatcatttatatatgaaaaagtagtagcaacactaaatcatggtttgatctacataatcaaacactgtttgcatatgtattataaattcaagcacgacacataatgtacttaagataatatttcttgtaattgacttttggatggtggagccatatttgaaatcaattatagggttctgtttcaaaaaaggaaaaaaaaaaagaaacctatagggtttgtttgttcaaattatgttttgcctttttttgacgacttctctattactaataaatgacttgttcttacctactttcttaatacattagtctcttcaactcaaagaaaccaaacaaggtgttgtacattgactacctctactacctcatacattattattagctaggactaattaaaacccagctttatttactctaatcgtatcacatatatatttgtatactaggttagcttaatttattattaataatattcaagctcttaagtcagaatccatcaatccaattcacctaatattggtctcaatgaaagattgaagaagaagaatttgcagtccttacataaaaataaaaaagattagattaatatttaaacaacgatagccatgccatttggaatattaaagttagggtaggattaaatcaaagcaacgtgaaactacgacttggtagatatttatgtcattcttcataacttgttcttccaccaactatataataaattgaatcataaaatattcaatcacttgctataaaatattgatatccaacttttataattaagtcacgtaatgtcattttggatagataatgctcacggatcaaatatcaattatcatgttggaaatgaagaacacttcatcgactaatccaactaaagtaatattaatttggtgattaataaaatttatcgaaataaaaattaattaaggtaatattatgttataatttatcaatttgagtaaacatttgatttaatttgattttttttcttttttatctttggaacactccatttattctcaaagagttaatggctaaaacaattcttaagattcatggcctaagtatattcatattcatgaaagctaccttgtttatttctttgtcattaagaaacaagcaaaaaggaaaaaagaaaaagttacacctttacttaattctttttatacttaaataataaaagatagtactgactataactttctgtttcaacatacatgttaaagtatttttgcaatctatttttttaaatgaggatgttcattgttaaaaaatcgtttttaaatattagaaaatttactatcagtaaactattcagataatttaagaaaattaaatttacaaaacatattctaactaaaaaaaaaaaaaaaaaa

SEQ ID NO: 34054 - DNA, 2781 bp, Cannabis sativa
gtattttcagaagaatctttgaaagcatcccataattcctttcttgtggcatataagagaaaatttctcctatatcattgttcatagaactcatcagccatgatttaatcatgtgattataagatttccaagcttagaatgtaggaacatcttgttttggaccaaaaatttcacgtgtgagatactccttcttaccttttccactaatatacatcaccaaagattgagaccattgaagataattatgcccattaaatttgtgactagtaacaaggatatagcttcattactgtgagagagagttggagtagagaggggctgatctggtgaggaggtcttggaggttacgtttgatatggagttgtctttttcggtagccatggtagtccaaaaaaacacagatggacacagagaagaggaggagaaaaaattcgagagctaggctacagaaccttactctgataacatgtgaatttttaatatttttttgtgttttattatctcaaagagagggaatatatatacaacttagaatctgacctaataaatataaatagctaattctagaaagtacaccattaaaatctcctaattttaggaagaataaatatataatatatttggtattaatacaaaattgattcctatatatagttgtggtcaacttcctaattactgaaacaaatccacacgtgatattatatgtatggtcagattttgatattcattacccgatttgatttcccaattaattgtaagaatattctgacaattaatatgatgcaaatactgatggagtatctcacctataaaatatagggtctcggtccctgagctcttcactcattctgtacaaacagcaaattccatctaatgatagttgagcgagcgaggaaccccaaatttgcttaccgaagctattgtagggattgaagttcaaatatcaatggccagaggtatttcgatcatttcatcgcatatacggtttcgatatgtctatagttatttttgctttacatatcgtttatatatgctatattttcatattatattatagcctagaaacatatgctaagacatttgcttaattatatttagaaacttcaatattttatttttattaaaaaaattattacaaaataaattttaaataataatactttaagaaaaatttatataatagacaaaagttttgaaaaaaaaaattacaaaaatacatccacacgaattttttttttttttgctctttgaacttttatatttataatagtatctctacagtagaaataataaacgattttatttttgttattttatagtttattaatagttgttataaggtttcttttcttattatttttagttattttacaatatatttatagttgatttatagttatcgtgaggttgatctctcgttacttttttagttgttttttactttttgctgagaaagatgtatttttgtaattttaaaaatttacaagtatattttggtaattaaaaattttagtccttaaatttgtaaaggaaacataaaaaagggtattttagaaaatcataatccaccaaaagtttgaaaaatattccaaaaatacatcaacatgaaatttttttatttttactctttaaaattttatttacaaaaatatctcttcagtaaaaataataaatatatttttaaattattttgtagtttatttatagttgtattatagttgtcatgagactgtgtttctgattaattttggttttttatagtttatttatagttatcgtgatatcgatttctcattacttttttgttattttttacgttaagctgagcaaagtgtattttgaaattttaaaactttacaagcttatttttctagttaaaaattttaggacgtaaaattataaataaaatataaaagaatggtatttttaaaaattcccctttcaataaagccaattttatcttttttttattctatttaattaaaaacctaaccctaatagctatcatataaatagaatgttgtagcttttattttcataacctaattgactgtctttgtcaaacaaatagaaaataaaaagaggtatctctaatttttgaattcctcttccttttcctcttctccagtcaatactcaacatagtgtagaagattgtggagtgttttctcacctgaaggagaaactagattcagatctttatcatactctgcaacagaaaggccattaagggttaaagatctaaacggaaggagtcattttttttgctgctgtcaatgtaatgttttctataactttatgtgtttagttccatgtttttagataattcatattttggatgttaaattatagatttataatcaaacatacatgttagtaaatctaaatcctcataaaatattgctaacaatatatataaaaaattatacctgactaattgatggaaggatgaaaataggaggatttctcggagatggtggtggtgctctaaatagaagttaaaaatattaagatttttttaggcggagggtcatcagaccatgagattaaacaagagaaagggaagaaccaagggtcgtcatccatgattaagatatgatagagaaacctaggggtttttcaagtggaggtggtggacgacgaacggagagaaattacaatggctctggatggaaatggagaatgacacatggatctggttcgaaatggagagaactcaagggtaaacccaatttcaaattgggattttataaaataatacgcctttagtatcaattagtaa

SEQ ID NO: 34055 - DNA, 1529 bp, Cannabis sativa
  modified_base (1280)..(1285): a, c, t, g, unknown or other
ggttaagaataacctagaagaagtaatcaattttcccatacctcattctccctttctttctttcgtttctcctagaaccaacaagaaaaggggattagtttgctgcaattggagtgatttcagtaagatgaaggtatcttgattaaggtataattctttagccttcttcccttttcttttccttagcttaggttatgtggtagttttattttctgtaagtttaggggctgtgaattgtttagctttctagcttatgaattctgatgttaagatagagttatttaagtggttagaactgttttgatgggttgttgtggtgtttggttgaaattggagttttggagctcaagctttgggctccaatggtaatttgtttttctgagtttgttatgagagttattgcttggttttggttcattatggtatgagcaggtgttctggaggttattggaaagtttgggcttgttttgaattaaagggatcgattttttgttcccagctcagaaccggtcaaccggttctgggagacctcttgcaaccggtcgaccggttggtacccaggaaccagggttctggttgggaaccggtctgccagttggggtttttttcctgaaccctagttttccctgttttgtgttatttaaggtgttaggatcctatttatcgatagggttatccttagtttcatttctaaatccccgataagtgttttagcgtgtctctcattaagttttgaacgttatggtttagggccctgtaaaacgtcgagctgcacttccactcaggatgaccggcacacttgagcacggaacgaggtaagatagcatgattattatatatatgtgaatgaatgcatgttttggatgttgcactactaacactaatttgtatgccttttaaagagtgttagtacagtgtaggttatttgtagggttacggtgttaccaacacgagtacctaagggtacgtcgtgcatgaggtacaacacttagtgattcctgggagtacaataatgactctaccaacacaagtacaaaggtggtactgtagtgcatttggtacagaggtcgtacttcccttaagaacgttcttatccatatggcgagctcaactactgagctcagggcggcttaagcataaagccgaacttgcatcacctatgtttatgacttgcttatcttactgagtctgtggactcatcagtttgctaccttgtgtaggtaaaggaaaagcgaagctagaggaacagcgagatggagctcggcagtgattgtacatannnnnncagtgcaacctggagggtttcagtcttttactattttgagtctgtattttgatgttgcctgttcgcgtgtttaatacaaaaaaatattatatgtatattctagtaagatacttttaaatcatattttgataattgggatcccgacctatattttataaggttataatatataaacatcatcttttgaatttagtaaattaaaatacgggcgttacaaaatctatagattccatatctatattta

SEQ ID NO: 34056 - DNA, 1214 bp, Cannabis sativa
gccaattctgacgaattttccggcgccgacagcaactccgacgacttttctggtgccgaccactactccggcgacttttccggcaccagcagcaaccttcggtgacttttccgacatcaatgataaataaaacttcctaaacaaataaaaacgttaaatataggatttgaaaacctaattataaatatatggcatatcaaataccataaaaaaaacctaaaaacaaaaaaataccatataaattggtcaaacttaaatgtgctatatttatcataaaaacttttaaaatcccatagtaagtgtaatttcacttcatttaaatgatgcaccaagatatgtatatatgttatcccttggacctcacaaaatttccaccatcaccagatgaccttgtttgctttcctttttctataatttcttctcatttaatttgttgcacatgaaataattttcttctcattatttgacccatttaaattccacactttaaaaaaatttcacactttgcaactaaaccacctacaaaatcacacataattaaattgaactaattataaaatggaaaactaaataaattgataaaacaatacaaaagttaactaaaactaatctataaatactaaaattaatatttatgcaaaattaagtaaaactaaataaaagtcactaaaataaattaaaaaatacaaactaatttaatggacaaaaaaagctaaataactttattttcatagagttatcaaggtggcagccagttggccgaacgtgttggtctgacaaccatgttcaggttagtcatagaaaatgacacttggacattaggatctgtggccatagagtgtcgtggttaagtagaatttccaagccttgtgatagccatgcagaatagaaattaagaaaaaacttagagcttttcgaatgagaattttgggctctcaatgaaagaaccgaaatgttgattgtaaatttggccaagtgacccagagcctgactaagatcattttgcttatgactgtcacgtgtggaatgataataattatgaaatacacaaggatttatagaggttcaacccctttgatcaggtaatgacctactctccttttagttgtattcactcttgatataatgccaagtagattacaggctaaaaccttgtaatttttagctatgactctcttcagtttacaatgatgagaatgtgaaaagtaatgcga

SEQ ID NO: 34057 - DNA, 1622 bp, Cannabis sativa
tggtcacgggactactgactgtgacatcatatagggtacaagcgggtttacagttaaagtaattatattttcttagaatcttctcaatgtagtgagattaatctagaaaaattcccttatctcagacctagtaatctttattctaaggattacacttgcttctccgaggtctttcatattaaagttggaacacaatattgatttcatagtgttcacgacatgaatgttagaaccaaaaataagcaagacatccacatatagacatatgattgtgcatatgttgtttttagatttgtaataaatgcacttaccactttgattcactttaaagctatttgaaatgactaaagtgtcaaatttttcatgccactgcttagtccctgttttagaccatacagagatttatccaacttgtagaccttatgctcctagctagggatcacaaacccttcaggtcgatccatgtagattttctcttctaattcaccattgaggtcttaacatccatttggtgcacgactaagttatgtatggtagctagtgaaattaaaactttaattgatgttattctctagtgattggtgaaaaggtgttacagaaatctacattctctctttgtctataacccttggctactaaacgaaccttgtatttgtcaacagttccatcaggtttcaatttctttttcaaaatccacttacaacctatagccttgtagctaggtggtaagtttacaatgtgccaagttttgttggtcacaagagtgtctatctcatcatctatggcatgtggccacttctctacatctaaagaagacaatttcttggaggttaccaggatcctcctctaaggtataaacatagaaatcataaccaaagtctttcgtcactctattacttattctaggtccagtctctacatcctcagcatgttcattactcctaatcactagaatattgctagtttatgcgccccactatttcacaatataaatggaaatctatcttcaaaaaaatcagcgtcattagattccactatcacatgcgcattaagatcatagaacctataggattagcaattaataacacaccctaaaaatacgcattcataggctctaattgctagcagcttaattctcttaagataaggggaatacgaacataagctaaacaaccccaagttctgaaataggaaatgtttggttgtttatttttcaaaatctcataaggagaaattttgcctttcgatttcggtaccctattcagcacatagcatacagttaaaagaatttttccccaccaatgagaagcagcacatgaattaagtaaaatagcaaaaatagattcggtaaaagttctattctttctttcaactttacaattcattttaagtgaatacagtgcagccttatcatgtataatttcacgtgagttataaaaatcaacaaaagtggaatcatattcagtgtctctatcactacgtagcttcttgatctttttactaagttgattctcaatttcatccataaataacataaacatatcaagatcttcactgttatttttttattaaatgcgcataggcaaaattagaacaatcatcaataaaagtgataaagtaac

SEQ ID NO: 34058 - DNA, 1216 bp, Cannabis sativa
tccaacttagctttacctttacctacacaatgtaacaaacttatgagtcgacagacttaataagatatgcataattatatacaaacaatgcaataccggctttatgcctaagtcgtcctgagctcaaatgctaagctcacaaaatagctaagaacgttcccaacagaagtacgaccactgtaccatatgcactagagtaccaactccgtacttgtattgttagggccattattgtacttctgggagttactaagtgttgtaccacatgcatgacgtaccctctagtactcgttttggtaacactgtaactaccctaaaaccctacattgtactaacacccttacaactatatttttgttagtgttagtagtgtaaacaattaataacatgcatacattcacataaatatactttatgctatcttacctcattttcgtgctcaggtgtgcgggtcagtgtgagtgaaactgcagctcgacgctttataggatcctaaactacaatattcgaaattctgatgagagacacgttaaaacacatcccagggactttaaaattaaactagaaataaccctatcgatgaatgacatggcaataatctaaataacacaaaaacgaaaaaaaaaactaaggttctaaaattgtcccaactggtagaccggttcctcaatcgaaattccagttcgatggggtttcctagggaccaaccagtcaaccgattgttacaggttcccctgaaccggtcgatcgattaagtgtaggaaccaccataaatgtccccaacaacaaaattcaaccccaaactttccaataatctccagaatacatgtatgcaccataataaactcatttcaagaaacaaaacctaacaatttacacagaatcctaaatcgccattagagagcaaggtttgagttcttaaactcaaaccttgctcaaacatcaacacaaccaacaattccaactaaaatttaacttaaacaattccaaataaacttcagagcaccaaaacaaacaccaattcataacataacaacctagaactaaaattcaaacatttagacttaacttgagcttaaagaaatcaaaggaggagaagcgaaatgaattttaccttgaattagaacactcaaggcctgctagaatcacacaattgcaactgaaaaaaaaaaataccaaatcctagctggttccttagagagagagagagagagag

SEQ ID NO: 34059 - DNA, 1526 bp, Cannabis sativa
ttaatttttaattatataactttcaaataacatagaaaaaaattagcataaaatttagtatacgtgtctcgcacgtagttttttgctagtatatatatataagaaaacaacaagaaaattaacatcatgacaactataaataaattatagaacaacaaaaaaagaatgtcgaacaatactttattattttttactgaagaacgtatttttgtaaataaaaaagttcaaaccataaaaataaaatttctccatgttaacgtatttttgtattttttttcttcaaatttttggtgtattatgtaaaaaaaattctaatttttataaaatattgattcaataattaatttgaaaaaaatatatttatatacaattaaaaaaaggtcattcgtatatgccaaaaaaaaaaaactttctccaaatatttattttctcattattaataataaattattttggtatatttcctttataattttttttacaaatttacttatgcataaaagtgaataggtaactcaatgtttgatttgtttatgtatagagaaaacttattagatgtgaaagtaatgattacaagtgagatactgtgatgacagtagttttggatgtagtgacggctagaagtgagattcggtgatgacaacggttttgaaatcatatgatgagtttttttttttcaaaaatttattaattgttatacagaactaattaatttaatttattcaaacgataatatattcaactaatcaatatctaataaataaattaattaaatattataatttatcaggttgaaaataatttgtataatataattttttttgctattaagattgaaaaattaaaagtttactagaatacttacatatattactaaatatatataaaaaatataaatatgtgaaatttaatatatttttatgatttaattatcatttaatagaatacaatataatacaatcgcacgcgaagcgcgacctatttcctagttataagtaggtgaacattttagtacgagtattgctattagttactagtggtatttagtatttttagataaatcgttttgcgatttgttagcgatattttctaaagttattacattaaactatatgagactcgatacttaattgggccaatagcgataacacatagagaattgctaaagggcaccactggtgcctagcactctccttagtgtctcataccgttattggtataattaaataggcagtcttatataacttaagaaaataagttttaggaaatattgctaatcaatcatagggtgacacctatagaaggtgttgggcaccactagtgtccaataacaatgctctaaaatataagagagtgttaggtacaatacaactatagtactttttagtattagtatttgtatctctgccatctatatacattttctttacaatttcttggaatacgatgacaaagagcgtaggtaatcaaaattgaatattatacgtaagatgacctttactatccaatctatcattattgatgtt

SEQ ID NO: 34060 - DNA, 2030 bp, Cannabis sativa
agtactttgtgccgctataaggtacttacaatacatacttaaattagtttgtttcttaagatgaataaattaaaaaacaaatctattgtttttaggcaatgaacaaaattattcatgaattaacgatgtatcaatacacaattggcggtagaacttctcgaattaaaatagtttatcgtctaatcgaagggcatgatttgttaaaccatgagctgtatataattcttattgcgagccacatgacacaaaattacctcaaaaatttagacaataaaacaattacatcctcaaataacacaccaaaattatttagtgtattattataggtaacaaaaaaaaaataaaaaaatagaggaattactttatatattaatttttattatttttttttaaatttacagtttgggttactcaggtagtttctccggtgatttctatgtggcttgctatttggattttgcaatttaagttgtttcgttatttattatagggtttttgtgtaaaatttcgtaaaaatgcaacaaaaaaaaactattttgaattgtaacaataaaaaaaatcccaaaaaaacatttgtatttgcttattgaaaaaaaaagggtaaatcttttggtttatccatgaataacgacagtgatattatgaacagaagtgtacatgaatcatggagtcaaaaaggaattaaattggctataatatggtaaattaaaaaggaatttaatagatattatcattaaaacctaataatataattaaggaaatcaacaaatcatgataagtgttgaccgcatataattataattatgaaatatataagtgtaaaggaaaatataaatgtaaatttccttattgtattcctttctcatatgaattgaaatgaccaaatttgggctgggctctgttgcgcatgtattacggcttcaatccttttgcctcatatttttgtttttatttgacaaactgattagaataacttatgaatttacgacacagacatccgtcattgacgcttgaacctcttcgaatcaggatagctcatcgtctaacagcagagcatgctttgccaagccataggccactaaattcttagagcgagtcacatgggacaaaactgcccccaaaaatatagacaataaaactataacatcttcaaacaacgctcctaacttgttgaaatacatcttcccgttgttgatagttgtcaccaaggctaacgaatctaaatatattgcatgaattggaagaccacacgtatgagcccaattaagaccaaccaacagggctaaagtttcagtttgtaacactaaaattccacctgaaaacaacatcagaaaaccagaaaattttaattagaaaattatcaatccgatcaaaatcaatcaaaacccaaaaaactaaataactagatccccacataaaatactttcctttggctagtagcaacttaacccttgtatattttacttcataatcatcttaagattactatcccttactaagaccctaagacctaaaaaagattttgatatgtaatctagtattaacaaaaaagccttgcaatgctcccctacctaggatatcaaacgtttcctttggaaattatcacaacaaagaaataagcaacgaataatgtttttaatgtatccactatgactaacctttgaggggtttacttaacgcagcgtggactatattatcttctgacaatataacaacacctaatccaactagactcgtggtgtgctcaatactgttgcatccaccataagtttagagtgtaaactctcttcttgggcacctctagaatttctagccaaagctcctctattcttttcattagtttagagactttttttttggggccatccttcattgaaatgatcaaatcataatgactaattatccatttatcataaaatattatttttttaaaaaaaaaaaattacattcacgtttaaagatttattttattgtgttttataaaaataacaaaaaaaaaaaaaaacatataaacaacatcaaaacaataa

SEQ ID NO: 34061 - DNA, 4342 bp, Cannabis sativa
  modified_base (3189)..(3200): a, c, t, g, unknown or other
aaagaataacaactttaagaagttaatttgtgatgaggaagtggtttagacataataaacagaatataaacattatcatttattcattaattggtcattgctgctgtgaaacttatataaattgaatctacaagcctatattacaagatgttaattggctacccctgcttgcctagtaaaccagaggccactattgaagaatagtgggagaccacgcccaaaagggtcgtgagtgctagcgctttttgtactctaatgttgagtaggtagaatcgctactttggagtagagttctataagttggttagatagtatttgtgaaggtgctctccattccagtatcttggtagaagaacaagtttcatgttctcgttgtaccttccagcttgtaggctcccttactaattatctctgtaacttgacaagggcattcccagttaggtccaaacactcctgctactgagtctttagtgttcaggaacacccttcagagcaccaggtctcctataaagaattttctactcctgacttgtttgttgaagtgccttgctaccttttgctagtaggcttgcagctttaggttggcttgttctcttctttcttctatttcatcgaggaactctgtcagtagggtgttgattatttgttggtcgtaggttgttttcttttgagacggtggcactagctctacaggcaacaacgcctcatagcaagctagagcaaatggagtttgcccagtagccgtcttctcggtagtcctatgcgaccataggacctttgggaccaatttagaccaatttcctttttcttcctcaaggcatttctttagagtgtccttgagggttttgttgatagcttccacctgcccattttcttgaggatgggccacagttgagaagctcttgatgataccatgtctgttgtagaaattagtgaacatgtcactatcaaactactcgtcgttgtctgatataatcttctggtgaaggctgaactggcatatgatgttcttaacaataaagtcaaagacctatttagaggtgattatcgataggggttcagcttctgtccatttggtgaagtagtcttacgacgacaacaaactgcacccctctttttccctttaggagttaaaggattaggtctattccccatagtgtgaagggccaaggagactggatcatcttgagcttgttgggcagagctcttgggatctttgaaaagtcctggaacttgtcacattttctaacgtagtccatcaagtctttaatcatcgttggccaaaagtacccctattggagtatctttttggataggctttgcccctagcatggctaccgcagaagccttcatggacttctatcattagctattcaactttggccttggtgacacacctcaagagaggcatggagaaactccgtctgtacattatcccgtctaggatcaggtacctagtagcttttcttcttagtttgcttgcttcatttttgtcttctggcaaggctccaacttggaggtaagctgcgatgataggtgtcattcatcatgttgttggagtatcatccaacatgtcgacttcttctaaaacaataatgcagggttcctctaggaactgtatgggcaccaagttgtctatgtcagcaacggtgttgcttgctagatgggcaagtgcatctgttgtagcattctgctctctatggatctacctgattgtgtagcctttgagctaacttaggaagtctttgattttgctcaagtaggccaccatttttcacctcgagttgtatattcacctaggacttgattcacaactagttgagaatcgttgaatatgtctaggtggttagctcgtacttcatgtgctagtttgaggctaactatcaaggctttgtattcagcctcattgttcaaggctttgaagccaattttgattactcaatccagttgttgcccccaggtgttgcaaaggcaatacatgcacgagcaatcagttagtgctgctttcgtcaacattccatgttagttctttgatattttgttgctgctcttgctcttgcttcttctttggctcttgcttttctcccgagtcttgaaggatctcaagagttgagttggtgcactcagccacaaagtctataaaggcttgaccctttatggctattcttggttggtatgtaatctcaaactagccaagctcaatgacccatttgagtagtcagcctgatgctttaggtttctacaaaacctgtcacagcagctgattggtgtacacttttatagggtgtgcctggaagtaaggcctcaagtttttagaagccaagagcaagctgtaggtcaacttttccatgagtgggtatcgactttctacgttggttagccttttattgatgtagtatacaaagtgatgtacactatattcttctcttgggaggatagcattcaacatgttctgtgactgctaggtacacacctagctcttcattgactaggggttttgacaattaccgtggttgggccaattgtttctttagcacctagaatgcgttttcacattcgtctgtccactcaaattttttggttcctctgacaatgttgaagaaggatacgcatttgtctatagacttggacaaaaatctccttaatgcagcaatgcatcctgttaggttttgtacttccttgacagttgtgggtgacttcatgtccaaaagggcttggatcttgtttggatttgcttctattcccctggcgttgactatgaagccaaggaattttcttgagcctacgccaaaagagtatttaagggggttgagcttcatgttgtagctgtgaaggattttgaagcactagtataggtcctccacatgcccccaacctttttaaacttgacaagcatgtcgtccacatacacctccatgtcacgactgattggatccgtgaacatcatgttcaccagccttttatatgtgtcccctgcattctttagccctaagggcatgcctttgtagcagtaaaggcctaggtccgtcatgaagctaaagtgctccttatctggtggatgcatcttatctgattgtaacttgaatgcccatccatgaaactcaagatttaatggccagttgtggcatctactagctggtcgattttaggtattagaaagtagtcttttggacatgctttgttcaggtnnnnnnnnnnnntgcatactctccacttcttgttggattgaggcaccagcactgggttggatacccactgagggtagaacgcctctattatgaagtcattggattgcagcctttcaacttcatcattgagcactcggacacgttccttgtccagtaacttcctcttttgctgaacaagccggatgcttggatcaatgttgagtgcatgggtcatcacgaatgggtcaattttgaccatgtctccatgtgaccatgcgaaaaggtccatgtttgcccttagaaattctatcaagattgatttgatttcttgagccaaacctttaccaatctttagtcttcttgttgggaaagtgggatcaacctccacttcttccaacttttcttcaggtccgaagcttcatgtaggatccccaaaataaggatctatgaatgtgtgcccgccttggactagacttcattgccccttgttgggctcgttctctgggcttttagcgggcatcttctcttttttggccttggatagggccagggtttaacagtgatgggcagactgttggtctcccctcacatatgcaccccatgccttgcaggaaatttaaggcataggtggtagatagatgtcactaccttcaggtcattgagggtcggtcgacctattatggcattgaaagccgagggaacgtcaatcacgacgagttttgccatcaatgttctggtggttgaattttctccacctgtgaggggtaatctgatttacccaacaggtgcgatgccttggccaaagaagccatacatcacttggttgcaaggtgccaggtttgtaaggtggagccccatcttttcatattgttaatttgaaaagaattttggaggaggccccgtcgtccaccatacatcttcccactgaagccatacatcacttggttgcaaggtgccaggtctgtaagttcgagcccaatcttttcatattgttaatttgaaaagaacgttggaggagaccccgtcgtcccccatacatcttcccactgtcatgttcccaatttgtacagtaatgactagggggtcattatgtagcaaactgacctgagcaacattttcttcggtgaaggagatcatgggctctccatgcttttgttgcttagatctctagtctt

SEQ ID NO: 34062 - DNA, 2228 bp, Cannabis sativa
  modified_base (2171)..(2184): a, c, t, g, unknown or other
atttgtatttgtttccccaagtcaaggatccatatctttgtccccgccttgggcgacttcctattgggcaatgctcttccccttgtctgaactctagccggaggtttttccttcttcaccctagttagagcaaggttgtaacattcatgtgcaattctttgatttcttttgagacatcctaccccacttcttgttgggaatttaacgcacagatgaaaaactgatgtaacagcttttaagtcatatagagctgatcggcctaacatgacattaaaagttgaagggacatcaattattagaaattgtgccattacagttatgctcctcaaaacatatccaacagttaggggtaagcagatttgtcccaatggtgcaacgctttggccagagaaaccatatacgagttgggtgtaaaggatcaattctttaagttggagtcccatcttctcataagttgtcttaaataaaatgttcggagaagctccattatcaatcatggtccgtggcaccatcttatttgcaatttatacctctacgactagggggtcgttgtgtgggaagatgatgtagttggcatctacttcagtaaatgttatggctggctcccctgcacgtggtatcttaggtttcctctcttccacgaccaagattgcctcattttgttcatactgcaaggcttgggcatacctttttcgagctttgcttgagtctccatcaagatttggacccccaataatgacctgtaaatgctcgtccataggtggaggcattaattggttcttattgttgtcttcttgggtggccctttgatcttaattggccttgacatacttctgtaggtgcgggttattctttctgatctaaaactcaatttcccgcttcagattgttacattcgcttgtgttgttgctgtagtccgcatgaaagcgacaaaacttggatgtgtctctcttgcttacatcatttttcatgggagacggtttcttgtacaacaccatagactcagttgttgcatagattatctctatgtcatttgttaggaccgagaaggcaataaatttagaggcattctccctggggtgctgctcggcattgccattgaatttacctttatttccattgccatgcctattgccgttgttagacccttcccatttagttttgaactgctgggatactgtggattttggatggacatccctatcgaagtggcacactgttggtttttcttttgcccgatagtatccacacgtcgaacagcttcttcgagctaaataaacccatctacccgatctaggaattcagccattgatcccacagttagccttctatatccttccataattctctgagaggttcaatgccccccagtatggcagctagtcttccttctttagtcagtcccttaacttttgtggccttggtcataaacctgctaataaaactctgaggggttcccttggcatttgctttacttcgaccaggtcttcaaggtatgaaggaagttgaagagaagaggaaaattgtgcatggaattctgacaagaaggcattctgtgagttaaaccttcctagaggcagtttgaaataccattggtgggcagcctctacgagcgtggggagaaaaattatgcaccgtacatcaccttgtaccccctacaagtccatttacatctcaaaatacttcaggtgtgataagggatcttctttccctgtatacatcttctaggttggcattttgaactttgggggtagctcaagaccttcactttgaggggtgaaaggtgattctcatgcccggtcgagttcgatatcagtgagttttaggccgatcaagccttttaccatgattttaagttgttcgatttgtgcttgcacaagtggatgaacttgttcggcttgttgaccagcttgtgtcacattgggatcccttagaactggatcttaggtgcagattcatggttggacagttggcgaaacgtattgtttatccaagccccttctgtgatttagatcagttctgagatcatgtgcaatacccaacctatcaaacactaaggtacgaggtggccttggtgtctgacttgtttggctgataggttggcctgaaacttctgtagtagcgaagttattggtatgtgtaactgtttagttttatgccctaaataaaannnnnnnnnnnnnntcagatttacttattaataaaaatcagaaataacattttatgtt

SEQ ID NO: 34063 - DNA, 1878 bp, Cannabis sativa
gttttactgtatatgtttggttttgggcttaagtctattaactataaaaatcaataatttatttactactttgtcatatggtaaattttcttatttaatattgtttgccctttttcattttgacatgtacaaaaattgtaatttttttaatgatgctcattataattattttaggatattacattaatttttaaaaaataggagtttttaagtgtatcaaaattacagtttaaagaatttttcacaaatatacatcttaaattttatttcttacgcaacatattacataaactctcaatttttgatcaccatcttattcttataaaataaaattaaataagttataatattttcatgtactaaaatagataaaaatacatcaatatatatcactttttacaacttcccattaggttgggttaattatagtacatatattggtatgaatattgttctgtttttattacataataataaacaaattaattaatacccaatttttccaaaatggtagttataaataaaaggattaaaatccaaaaggacaatgatgaagatttagaaaatgaaatgatgattaagcatttttaaaggggaagaaatttcaaagcaaaaaagccttgacatgtgccataacttgattttagttagttttatatattgtcaaagtaagccctaataataaacttagtttgaatttattagaagtgttataccgtgtttggtattatcccatttagcctatatagtacatttgtaggaattaatctcactatattaatctaaatatatacataaatattatatcattttattgctttgggtaggtcaagccaaggtgtcattatgaggaaattattcttctccactatacaaaattctaatgtcataattattaaggttgtttatgaatcgatacaatctaattataattagagttggtaaaacagatcaaggatgataatacgattcgaaattcatacaaaaattaataaatttgagtttctcttaaatggatttgggtaataaacagtcttgtttgaagttaatacggttagcacgaacatgacttttaataacctatttaaaattatttaagtactttaatagatcataaatgtattgaatatatgtcataaacgtgttaaatatatcattaatgtattaataattagttgacatgtttaaataaaatccatttgtaaacaggttacatgtttgggtttcatatttggatacaatttaacgggccatgtttgggtttcatattttgatacaattattaaatgaggtgtgtttaggtcagcatatacttgtaatacatatgggttttgtcacgacccacaaacatgcctgaattgccacccctaattacaactgaccgatctaatgaaaattaactgacaattattagatctaattatgatcagattggatcgaatgatattttttaatatccaattggattgaattgagtattagatgtgttgtccaaaaatccaatacaatccaatattcagttgattattaattagtattttttatttagtttggataaataattagttagattttaaatttacttatttttatttatttatttattagattggatagatccaatccaatccaataaaattctaaaccaattgatgaatctgaattagatccaaaaaaaaaaaaaatagtgtttaaaacattagacaaactcgaactaatactataagtatacataaaatacatccaaaattgatcaaatccaacatcggttcaaatgttgaatgaaactaattaaatcataatgtttaactaaatttaacatctaatacataatttaatcgaacataaataattagcttaaaaatattgaatgtggtc

SEQ ID NO: 34064 - DNA, 1722 bp, Cannabis sativa
actactggtacctaataacagtactcttctatgtaagatatttgacaacacacggtaatgtacattaatgataaaccaatatagtctagaaatgctctactctgaaaattgaaattatgggactcctctagtttgagagcatactaaagatctagcgagatcgctccacattctaagaagattgccattcttttggatcggctcacggccttccgacccaactaatgttctgaaatagggttaatttgtctaagaagaattacacgttttaattttttttatttatttaagtacgataattttaagtttgatcatttttatagtaattttatatttttgaattattttatgatatttgctataccatgtatatgtaaatttaatttttaaaattcatatttaatctttaaataaattgttcatcaaaaaattgatttttttcatcaagaatatggttttttttttattaagaaactaatttcgttatcaagaaattggttttgattatataaaagtacaatttatataggaatttttaagttttttacccatctaggagcgatcggtcaaagcttaacttactaaagatctttcatcataaagtttctttatggtttcaacatcaaaaaattagatttaattatatataagtaaaatttatacacgagtttttaaattttttatgttattcatttttttttaaacaattcattgccagtaatttaagttaaatatatcatcattgaaaaaagatgagaaatcatccatctaaattagttcatcatcgtgtaggaactgttaattcatgtatacaacaaatatgaataagagatgtctcaaaaaaaattagataactaattaacaatatcatttaagaaacccaaataagaaaaaaataatctcttaaggaatgcaataggtagtccaattgcgagctacaactataaagtttgctttctaatctccatagtaaaacttgttctactgctatcaatatgtcactatagattgtataaatgacaatagcagctcttacaaaaataataataaaagaaataatgagaaatctttttaatcaataaagtaagtaaactaataaatcttaaaaattaatcgcattaaaagagaaagtttaaaaaatttatcttattaagaaaaactgaatcctcatggaatggaagtcaacaatcttttaacaaaaagcaaactcaaacaaatacataacaatataatatgtgtattaaatattaggattttaatttatttaattttaaaaagaagaaaaataatatacgtgtattagaatttagagttgtggtggaattttatattataactagtaatagtggagtcctctacttttttagagtaagataaataagataaatattaaaaagttttaatagtgtatattactcttttccgtgtcatatcactattgatatagttatatatttggtctcatataatttaagataataatttttaaaaaatattactaaccaattttagaatactacatttaaataatactaaataccactagtacttaatagcaatgctcgataaataatctcacacaacttgaattaatcctagtctcaatgtttaaataacatcaaataaggataaatgatcttaatcctagtttagtcccatgtaccgaaagagccttagaaataaatcatgattatcttatacacatccatatattttaataat

SEQ ID NO: 34065 - DNA, 2543 bp, Cannabis sativa
tattagctgtatattagttgtaaaagaattagggtaactgatatttagtagtttcctattttgttattggtagtttcccatttagtctcctagctttgtataaaaatatgtactagtatatgaaatatatacataattcgattcactattatctacataatttaatgaatgctctcattctgaccttccaacatggataatttaagtcattcaacaagattggttgagtaatagagcttccttctgcaaacaacgacatcgcacaaaagaaagttaacagaataataatcttaagatctcattaagagtttagtgacttcctctgattccaaataaaattctgtattttagtattaccaatttattatttaattaatcaattaattaaatgtgaaataataaatatagtattgaaacaattattctgtagctatagaacacaactctctaactttaaaataaaactagaaaacaaacagtgcaaagaaataaaaatagacaaggtttttgtatgtggtatcaacaatccttatagattgttagtagtcaacggggccacactcagagataagattcattcgatagatctcaaaaatacaaagtaattgacttatgtataaatagacttcctcttattgtatgccgcaagcttgatgtattctaccttctaatcgaatcttgttgaaatctcaagtgctcaaactaccttggatctccttaaagagtacttcctttctcctgaggcaagacttgaaaagctatctcccgaaaggctataaaatcttctcctgaaggtatcactgttgttcttcttcttttataaacttgattacagactcaagacaatacaaaatacataaacatagagaaagagacgagcacactcttctctaaaaatacaaagacactctttcttacaagatatgaatgaaatacaaagatgtgaaagagatacaaaacctagctactataaggtgtattaatacaccttattgacagttcatactctaaacaagaccataactcactagatactttcctaaaataaatcttcaatcagtacatgaatttttgtttctgtacttattgaatcatagaaaattttcttcacaagaaatctgatcaaactaaataggaaactcatctatgatctgatttacacgactagaaatgtagaaattaatttatttacaaaacttactctgataattttttcaactttagaaaaattaataacttttcatacgttatataaatcaatcaattaaatataaatatatagaaataaagaatatacttcagccaaaattaataattaaataataaaatatttttttcaatttaaagataaaaaaaataaaattaacagtgtgacttcaaacaagtgtcacattttaattaagtgagctatttatttattttaaaaaatgatttgttttaattataaaatattggtataataaatgacaaatttgtgtttcaaaaaaaaaaataaataaataaataatgacaaatttgaaacaaatgatccatctttttttcttcatttgaaattgaatgttctatgaaaacccttgttaccttttttccttctccactctttctcatctctgtctccgctttctctttggaagcagcccactgaaggctttgcacgaaaatttcgttcatcatctcaccacctccgagactctccgtcctagtccacactcacatccacgcgtaggtcgtcgcccctcaaatctctcattctcaggtatgttgtttccctacttgtttatcatttcggctactacaatttcctaccatctttcttcaaattattacagcttttggttgggtttcatacaaactacatgcttattctttccctctttgattgttgtggttgttgttgttgttgttggttttttttttttccgaaaagcgttcgtattgataaagtgtggctcacaaagagatattggtctataaattctatcatgtgaactacttttttaattcttgtcatcaaatagctattacataattattgcatatgaaatgtttgataatagttgcaaaagaaactactaatttgttgttctgcttctggttatgccctctgaataatcttgatctgaatagggtttctacaagatttaagtatttataaaactagagcatacacattgcctaacatttatgtgagaatgccatttatgtcagagagagagagagaatgtgaaccttcagctcataaccaacagttccctttccttgttcgcttgctacgtgtttgatacaagtccccaaagaatgtgaaccttcagctcataaccaacagtttccctttccttgttaaatcttctgtggtctgcacattatccggagttcacaacaaggacaataggtttcacttgttctacgcagtttgtttatatttcacttcaataattgggcttgtttctcaatattgtcatccatttcttaaatccacacccaccatataatgtgattctattttatgaattggtaagcatataatcaaacattaacaaaat

SEQ ID NO: 34066 - DNA, 2163 bp, Cannabis sativa
acttgttagtaaatctagatccttttaaaatatatccaacactcatatagtacaattaagctaaaatctaaccatcttaggatttagatcgacataagatcaactaagagacgtcgacttagaaaaggcatagtggtaagtttatgatatcttttctactgtcaatatcagtccagtcccatgtatagccgatacatctgatacaagtttactttctaataccctagacagaacattccacttatacgggtgtaagtaaaccacatcgttgattatgacgtcagtataaatccaatatactgataaattgtttgactaaatagtttgaaacacataatcatgattatttattactgtgtagacaatactataatcatgagtaactatatattcatgatttaatagaatttatatattaaacatataatcatgaaaataatcatgtgaatcatgcaacataaaatgattttgtatctctattaattagtaaataagattatattgaaatgagttttatttagggtataaaattttaacaattgcatgttactattacctaacatcaaatataaatgggtcaattaatgtcaattttgtgttacaaggattgattttaacccaaccaaattagttttgttcaaatataattcgtattaaattcgtgtagtgttcttacatgaatttccacctgagaatagagtttttttttttttcaaagatactaaggccatgtttgatggactagatatttcatgggattgaaaaaattaagccttgacccatatttggggccataattatactatgggtaaaacagtgaatataatatcccaccatgaacttgggttaaaataagtcttggacaagcaaaacttaaaattttaattttataatacattaaattatttattcaaattataatttaaaattatacataaataatttattctaatgttttgtgaattatatttcaattattttaaaattaaagtcaataattatgaaatttttacataaaaattaaaaaaaaaaagcaacttatttactaaaatacttactgttgacactaaaaattagtcaacattgactcactagattggagagataagtaatgagttaagtaagtaataaagggggacacacaaaatttatagcagttcactctctatgtcaaaatggtaatgaaacgtctaattcaagtttttatttctcacaagaattataagagaattgactaagaaaagagctcagatttctagagagaaaaattaatagagatgctttgaccttatgaatactattcagaatgagaaaaatgagctagtgaagctaccctttgatagggaaggatgtccattaaaatattaataaaataatacaaaaatgtgaaaaaatatttgtgggctcatcttggccattgatgatgatctaatggctaaaataactttggatgataatcgtcaactttcggagctcaaattgcatctgttggattgtttttcaggcattttgcgaataaatattgctcttgaaagagcttgaaatcttccaaattacgaaatgcgtgtgagatagttcttgaaagagcttgaaatgatctttaaaatacaagttgactcgtatcaatcagattaatattgaatgagttatgatcgttttactgaaggatgtttagcaaccagctcccaggttgacattctgatgttaacttggatgttgtatcaatgggaaacgtgcttgatttatattttttgatgtctaagtgatattttcacatcacttaatcaatttcttaattatggtgaagtcgtctgccagttctcagaaatgttactttccgtgaaatttggtagactcaaaacttcttgatttacaactaatttgttagtacttcgctttaccaaaaaggtgaaatatcaaagaataaatttgactcatcataatcattagttcttgttgaatacaaaaaaatatcagatgctcgagatggaactagaatttaataagccgaactcagcgcactaggctatacatcaacctaggcgctaagtgctccttagtgagcttctcgtgactcattttattaaagcattgaagattgtgaacaaggtctcataccccgtcttggatcaaaataaaaagaatgactggagtagaatatgt

SEQ ID NO: 34067 - DNA, 1544 bp, Cannabis sativa
aaaacaatgaaaatacaccaggataaacattttactatagtattgatgtagttttttttttattattattatacttgagttggattgttttggaattccagttcaacattttgagatatgcatttcaatgatctaaaaattgaagtcaggacaatagttttatgcgaattaaactagatttctggttgaattttagttttgtagtagtttttctgcactttttttcatgactacgaaacaactcctattttgattgattctggttgtcttctcaggtgaagtatggtggttctctttttggttgggtttcatttcgattgtgttggattgttgggtggttgactgaagattgcatcacacgaaggtttcaatcacaagaagtgtggaccgtgagttgatagtgtgtgtaagaggcatttgtgtattttttttttatctgagctgtatatttatttatttggccggctgaaattttttttgtgtaatattgttatattttttttttgttaaaactgaataaagctctaaaaaaataacaataataatgataaagttattattttattttatacttttaataaaaacgttaaattttacatcaagttttgcaattgtgtattagagcgcaatgctaaaaattgatgccaatatatcacaaagtttttttttttttttttttgtgaaatattgggaatatttatttgatccaatccgtactattttgttcatagtgtatccgatctgcactaagtacggatttcatattttgaattcaatccaattcgcacaagagctcaaatccaatccaatctgcaatagtgcagattggatcgattattttaaatttgttactttttttaatattaaattatttaatatttattaaattataaattatttttacataactaaaaacaaaatagagcaattatttccaacaaccaattaaaataaacaaataacaaattccaagaaagacaaaaaaaaaatgtatgtaaaaagaaattttttatttattttaaattatatttttatatatatatatatgtgatatattaaatttggtaacccatatgtacacatgtattaattttttaaattattagttttttttttaaatatgaattatacgtttataaaatttttaaaaatatataaataagcgtggatcaattacttttgcatgtaaatcaacatttgatccgcacaagtacaaattttagattggatattttgtatgaattgaattgaaccatacggattaaattaaattagaaattttatgaatatccctatcaaatatagcacaatttttacatctccaaagtcttacaactaaaagtttttaaaaaattgtactaaaatacaattattaaatatgaaagtatttaaaataaattattataataaaataaataaatttttatttttttattttttattctttaaagatatattttatatttattagataatttttattttatacttttatattaacaaaccacatcatcttgtctcttataggggtgtgcataaatcat

SEQ ID NO: 34068 - DNA, 1208 bp, Cannabis sativa
ttgtagatcgacctgctaaagttctctttcatattaattttcatgatgagctctactcaaggaataattagggatgaatgggataaacaagaaatttgcgtgtgtcaattagatgatattcaatcatgctttgatgacttgtataacttcaaatattagaatcattcaatttcttcttcttgttgtaccaaattgcttgatacttctaatttttagccctccgcctttgtcccgatctcatatcttattattgaaaccctttcgatttcttttgtgttcgacaacattgcatcgttgcaaatagtaacattccatcaaaatcatcacctttattgtcattatcaccatcagcgtacgacgatttattctgtattgtgtagaagaaccttgaataggtacatcaatgtttttttagtgatatcacagtctatacaacaacactataattgatgttacaaataagtgccttaaagatgttagatgagctcttataattttagaatgtttagattattgttagtgtcgtcgttcttgatcctaaatgtaaatgtgagttgtgttgatagtacaacataatcctaattttgaaaaaaaaaagtagtttcattttttttttgtaagtcttgttattataatagttttttttttgcattaattaaagttatttattttctatgtgattaaacatgcattatttagaggtttgacatattcttttgaataaatttaatgtttgtttgatatgattttattctattgtgtattttatttgaaatacctagttttttcttttgggtattttactcttaaaataatcttctttaaaaagccaactatatattgctgtatattttcatgataaaactattatagttagcaatagaaatcgattgcaatccactctaaaaaatacaactatttttattgacaactttttagttctaccatttaattacaaaaaattagttgcaactaaacataaaatttactaatttagtttagtttgtaacaacacacatttagtcacaaaaaactataatttttgtgattaatacttttaactaaggacattttaatcacaacaatgatattaatcacaatttttttttttttatcacattgtgactaattaaaaggaatgctatataaggtttaggcatgaatttatatattaggttgatgttacgtgcaatgcacgtataattagt

SEQ ID NO: 34069 - DNA, 2007 bp, Cannabis sativa
  modified_base (700)..(706): a, c, t, g, unknown or other
ttttttttttaaaaaaaacagattttatatatatatatatatatattaaatactattactctactatacacatttcatctttttttttttttttttttattattttggcttgattcattttcatttgtgagtttgattcttctatcaattgttaatatctatctttttctctaatcaattttggacaattttagaatttaaagcccataagacaccatactttacactactgtaaaacgtattatttacgtcagttaacgcgactattcatggcgttgacgatgaaatagagaaggttagaaatgtttcctcatttgataacaaacgacaataaaaaagggtacataagttgctaattagacgctaacgtcaaaatcgacgaaaacaaaagggaggtttcttaaaattttatttggtgtttgcatcagtttagaatagttgctaaccaatcttgacattgttaagaccatatacaaagttggttcgcgagtgggatctaccaacacaaaccccagacccaaccctttcttcctcttttgttatttacacccgaagagaaaaagggctcaggtggcttacccctccatccccctcctccaccctgctcttcttttgtcctcttcctcttaattggcgagccatccctccatccccctccttctccgtctacccctctatcatttctctctctctctctctnnnnnnntctctctctctctctctttgttctacccttctctcctctctcactctctctgtcctcttcattggaggtccgtctgcaaaggtcaaccggtaaatttcgcctctaagtttggaatatatattaatatatatttatttgtatgctttatttatatatatttatctagatttattgttatatatttatttattatatatatttatatgtgtattgtatttatagtataagtatatatatatttaaaattttaaattatggcaaagaaattatttatttcatattgagatgagtacatgtaagtgtatgttgtattaggttatatgtgtatgtatttatatacatgtaaactgattattgagaagtttaagctaaagaaagtgtgtttaaaaaataaacgagacaatattttttctgtggttgggacgttaataagccttagtccacaacacaatattattagctttgaagttgtgtttcttccttccaaggcttgccaaatttttctaatcctttgcatgaagaaaaatgccatatttataggccacatattcggttcatgggttgataaggactcgttaatgtttttctgtgttaaagtaagcccactgatagtgtaaatacatttgaatattgactattagacataataggtgaagcccacattcgaggacaaccatcgtccatacacgcaggtacgactgatattgacaactagggtccaagatgtttatttgttgaggattacaaaaatgtgatcttttttacgtgccccttcccattttttgacacaggggacaaacccctgattcttttggattcttgtgatgtgccacatacgactgatctcagacggttggtgctacctaacacccttttgactaccattgttagatgatccctgagggcatccatcttctttgccttgagtacttgttgaatttcaattagtgtcaatcttctagatctatacatccgacttacccatgaaggaggaggttgattacagacccactattctggcttagttcaggggtcgaggcatcagttctctaggctcagtgaatgggcccatagggctaattaggaacacatggaattacacgtgtcatatttatagaaacacagataatatttacccccaagccgtcatggctggagagtgacggagccttgcatcattcatccatatttgttatggtgtgaagggccatgaattgcttgaaccctttgaaattatgaagagaaatagttttctccaaaaaaaaaaaaatgaagagaaatatgttgggttttgtgcccta

SEQ ID NO: 34070 - DNA, 1270 bp, Cannabis sativa
  modified_base (1216)..(1240): a, c, t, g, unknown or other
aacataaatgacttctaatctttcattgataacaaataagattagattgaaatgggttttatttagggcataaaatcccaatagttttggtctctgatttggggcccaatccccgggtttgggtcccccatctacgtttaggtcctacgtctcggttcgggtccaatgtcgtgttttggttcgggttcaggtctcgagtcccagtttgagtccaggtccttatttgggtttgggtcccagtcctattataggtttcagttttgggtcccaggtccgagtttggttcttaggtcttgggtcgggccttggtttttgggtctggttctaagtctgggtctgggtcaaggtcccgatcttggttgaggtcccaagtcacaggtcctagttcgcgtccaagtcccagtatgggttctggtttgagtttgggtttaggttcgggtcttgttactgtcctaggtcttgtatctagtccaatttcaattttgggtccgggatcgagtatggatcccggtcttggttcgggcccaggtttggatacggatctaggtccgggtcctggattcaaacattgacaatgggtcaagtcgaagcctcaggtccagatttagatctcggtcttgttctagttcaggtcacgggtcttgggccacgtcctaagtttgggtttgggtccgggttcagggttgtgtctcagtaggcatgtccttggttttgggtccagggtcgggtctcgtgtcttaagtctagggttaagttttgggtaacagtcttagttttggggccccgttttgggtccaagtcccccatcaaggtctggatccttagttcaggtctaggtctaggtctgggtttggggcccaagtcacccatctaggtccaaatcctaggtcccgatctaggtccaagttcaagttttggtttggatcccatgtttgggtccgagtcttggtcccagtacgggttcaggtttgattctgggtcctagtctcagtttgagtccaagtccttgttcttgtctgggttggggtcttgatttgagtcccagtcaaggtctatgtcccggaccaggttctggtgggtttgggtttgggtctgggtttaggtcttaagaataggtctaggttcgtgtctgaatctgggtctgcgtatgggtcctgggttccaatctcggtacaggtatgggttgttgggttttgagccctaaataaaacccatnnnnnnnnnnnnnnnnnnnnnnnnnaataaagatcaaaaatcacattttatgttg

SEQ ID NO: 34071 - DNA, 1272 bp, Cannabis sativa
ccaacaataacattcaccgaagcagatgccagccatgttatcttcccatataatgaccctttggtagttgaagtacatattgcaaacaagatggtggcacggactatggtggacaatggagcttccttgaatattttattcaagacaacctatgagaagataaggctccatcttaaagacttaattccttacactcaacttgtctatgggttctccagttagagtgtggcaccacttggacaaattcgcctacctcttacagttggacaagctttgaggagcataactgtgatggcacaattcctggtgatcgacgtcctgtcagcttttaataagccctatattacttaaaagctatcgcatcggtattccatctgtgcgctaagttcccaactaaaagtggagtaagctgtctaaggggaaatcaaaggatcacacgggaatgcaacaaccttgctctatctaaggtcaagaaggataatacctctagccagagttcagataaggggaagagcattgcttaataagaatctgcccaagccagggacaaagacatggatcctgacatacaaaaataaatacaaatctcatgccaatagaagaattagaagaagtggaaatcgattcagctatcgcgaccaggaagctcaaaattgataaaggtttgttgcttaaaataaaattagccttaataaaatttctaagagcaaaccttgacgttttttcttggtcacatgaggatatggtccgtattgaccccacgatcatgtctcacgccctgaatttttatccaggcttccatctggtccaacagaagagagacttctggataaagaacatgcaaaacactaaaagaagaggtagaaaggctacacgcaaacaagttcatcattgaagctttctacccagcttgggtggctaaccctgtactagtacccaagctaaacaaaaaatagcgagtatgtattgactttaccgacctcaataaggcatgccccaaggactgttttctactctcaagaattgatcagctagtggacgtaacagtcaaacatgaaatcgtaagatttatggacgactatttggggtacaaccaaattagaatgcatccacctgactaagaacatacacgctttcgaacagatatggatctatactgctataaaataatgccattcggtctgacaaatattggggctacctatcaaaggttagtaaacaagattttcaaaaatcagatcggacatgtaacgtccccgcttcaagcctcca

SEQ ID NO: 34072 - DNA, 1411 bp, Cannabis sativa
cttgaaaagatcaaagggaaaagcatcacgaggggtaggatagacttcaagcagtccttccaattagggaacgagggttgaagacgtatcgtaccatcagtgatctttcctacacaaccgtgcatgcaagattcacgtggaatttttatgtaaaaagcttccacttccgagatagaaggctaaaactgtataaaaattcaagcttagactttacttgaaaagatcattgggtggaagagtttccgtgagtgaagctgacttcaagctaccctcctctttcgggatagacggttgaagacacgcgacaatcccaatgatcttccatgtctagagaacagtttgggggaggtttgggatgtgcatgggtacatcggtaaggtgcatgcttacaccttttgatatcctaggcaatctgtttcctttggcgaggcacagggcatttgagggtctctaaagcgaagactcggacttccaatgggacaagcatgtcgcaagggatccctaattagtttataatgtctcgagttgcttcccctgatataactatggggttgtagctacactaggttgcgggaacgacatggggcaaactttgccagaagttgtctgcttttacaaacagtaccataaccaggcctcaccggtaacccagtagccgtcgatggtactaatggtttcctctcagcagcctccattgctatatctgcttctgagcaactttaccacctgtggaaaaggcagagaaactagtggctggaagacatatctggccctcgcatcgatgccagcgctggagtctctagttggatagagtcattgcatctgatgaccctaactgagttagtcgtcgtaactgcatcgtgtcttcgctccttcgtctggccctagcacctcttgcgctactttatctgcacacagtgatgtggcagtggatctgagcctgaggataccggtggcagatcctacacctagatagttggctggccagatctgagcttttgaggataggtgtcagtgcagcacgtgttttgagactgcttgccttcactgcttcctttcttgagtaggttgaaacatcaagtctctttttgggcaacaccacttctatggccttcggccgtactttgacgtacggtcaggatgtcttccttcttttcttacacgggcttttttccaggtggtctcgcgccggtaaccgccatgcatgtttttttctttagctctcaatgaaagcaccaaaatatttaccaaatttttcggtaaccaaataattatagagcttaagaaagtaataaaagtataaatggcaagaatatagacaacaaatttttacgtggttcaggcgttaattatccttagtccacgagtccattttattgggctctttggccggtgaatgttgatacaaata

SEQ ID NO: 34073 - DNA, 1811 bp, Cannabis sativa
tactatcaaatcccatataactcagctccataatgagttttctctaaaggatttaggattgttagactacttccttggtattgaagtgttgtacactgaccaagggataatgctaactcaaactaaatacattagagatcttctctgtgaggcgaaaatgcatctcctatgacaagtggacaaaggctctctgtttatggaagtgatcccattgaagatgtccaacttgatagatctatatttggagcattgcaatacctaaccatcacaaggcctcagattgcttttagtttaaataaagtctgccagttcatgcataagccagtgcaaagtcactggttggcagtgaagagaattctaaggtatgttagtggcacacaatatcatgggttgcatctgaagcaatctgcttgccttgtctcaaagccttctgcgatgcagattgggctacggattgtaatgacaggcgaagtacctctggttttgcaatatttttgggatcaaatctcatcacttggcaaagcaaaaagcagcatacagtctcacggtctaatactgaagctgagtataggagtcttgcaagtgttgtagcagagatatcttggttccaatctctattttctaagcttcatcttaatctcacacgacctcatgaagtctggtgtgacaatttgagtaccataatgctcactcaaaaccctgttttgcatgcccaaaccgcacgcacattgagttacatctctactttgttagagaaaaggtttagcagggtctcattgaagttaaacatgttccttcctttgaccaattggcagatggtcttaccaaagctatctcaagtgctcgatttgctagcttcagaaacaatctcactattgaagactcttcaatgatgagattgagggaggatgttatgacagttaaaagttaggtatgttagtttgtattgctgtcagctagtttgttattttctgttgtatagttgttctggttatgagctgtcagtcattttttgtaactaatctttcattgtcttagcattgtataaattcttgctttgttttcagagctaatcaataaatcaatctttttctctgattcaatctttctcttccctcttttctctcttttctttcgttcttgatctttgttctgtttatccttttcttggttatcttttgcagtaatgtcaaagagatcagggataagggtaaacaaattatccaaatcttttagttgtacaaagcatcaacgtaggtttttgagttgttatctctttgaaacaacgtgcatgatctttttattataagctgcctcaatattttgtgatgagttttcaaggcaagaaataataattaagagcatctattcttgaaagacattcgccttacatttaaaaatataggataagaatcctttttcagtaccatccaaagatgagaaaacaacatcaagcaaatttgtgggtaaaatttttcaaataattttatagccttttggattatttattaattatgactttaattttaatagaaagaaaaaataattagtttggatatttaatttgaaatcacccaacaatgatcggttatataaattggtgaataatagatgataaaaaaatatgatttttttttgttaatggctttttagttgtaaagagttgagatcgtgtatctaaaaaaaagttacctttagtgataatttgtttttttttacaacataatttttttttgactaaatgtgattttagtcacaataaaaaattatttcggactaaaatataatattgaaatacatgttgtcactaa

SEQ ID NO: 34074 - DNA, 1400 bp, Cannabis sativa
  modified_base (1363)..(1370): a, c, t, g, unknown or other
ttgtcttgtatagtgtgtagtatcgttaattctccgtgatatgttatattgatattggtctcattattagttcattgtttctttaattttcttacttatgtttatgtttcttacttatgcttattgtgggaggccgtaatgtaatgtgggttcaaggccattgtttctggtttacatacatttgatgctgaatgaattaatgacagtagttgaccatggaatgaagaaaatctaaaataaaactaaacttacttgcaagaccgtaacatccatctagtacaaatatatatttcaaaacttaatagatcaaatgtatattttatttttgcatttaatttttttttacatataatgtaaaaaaaaaattaaacatttctttgtacatacaattatttttcttcatttgatttgttatttttcttttattcattttattcgttgttgaagacataaaacaataataatttattttactttgttgttagttatatgaaaaaatatatttttttaatagatattaaataatttaatattaaaaagtaactaatctaaaataatcgatctaatatgtattgaattgaattttagctattgtgtggattgaattagatctaaaatatgaaatctgcacttagtgcgattcaaatacactatgagcaaaataatgcaaattagattggatgaagaacgccaaagtacatgcatttcctcaaattgggataatgagctaaaatatttaacccttgaatagtaaaagcaaaagaattcactacatgcattcctaatctacgtaacataaagcaaaagaattccaagcagtctccaacccttgaaaatgtaaccacaaagacataaacatgaacaagatactgtcaaattattacactcaaaaccatattcttaaatatattttggcaaaacgcgcatcacttcaaaacaaataacagcttcaaaaccattactttcatcttcaaaatactcaaatacaagtacaaaatcgatataaataaataaaaaataagataataagaaaaattatacagcagaacattacaagaacatacatatgctcttttctttacagcttgatagctgttacagatctcactcagaaaactcaacagaaaaaaaacggttgaaaaagaagaaaatcgtgctaaaatttcccaaggtttatcaaactcataaggttgccataacgtattaaagaaagaacagaagactagaatcgcaaccacagcccaaatgatcaatgacaaggaataatattagagaacaacagtatacgcaatcggcaactgaaataagtattaactaccctccagagtgggaaacaggagtagtgtaaagcccgcttagttannnnnnnnattagcagttgtttatgtttaattatgaaa

SEQ ID NO: 34075 - DNA, 4535 bp, Cannabis sativa
aggatccacatcttcatcctcgctaaaaaaattaagtaactatttaaaatcgtagggaaaaatttagtattcccgacggtttaaagtcctagtaaacaaaatagacgacatttttttttaataaaatgcgattttttaatagacccttatagacgacgatttaaaactgtcgcctataaaattgtcacctataagggtccattaaaaattcgtcacctacttctcgccacatttcctacgtgcccacctactttttttctatttcccacatgcccacttattttttttcacctattttatttttttcattttccacactctaaaataaaaatcttaactctccaaaaccccacccacgcctccgcaccatctccctcctctcttgtcatcttcctccctctctcgatattcttttcttctcgtctctttcgtccatcgatctccacccacccctcctcccgtcggtctccctcttactctctgtcgcatacgtcagaccaccaccacctcccgttggtgtccctctcatcttcgtctcatacgtcagaccaccaccacctcccgtccgtctctctctctctctttctctctctccgagctcggtataaatacatttatttattttatacttttttgtttagtatatatatttattttgttattgtataaatttaatgtgttttaaagttagttgttattgtaacaacattaattagttattttattttaatttaggtaaaattataaaactaatgcaggtaaaaaaatgagggaaaatacagttttttcttccattaatggtagaaaaatctgtattttttctctctttttttttttttacattcccgacggtttaaaaccgtgtcctatactataggatagggcacggttataactcgttgcctatacccagttataggtgacgattttaaaccgtcgagaaattcacattagcgacggttttgaactgtcgcgtattctgcctgttttacgacggttatataggtgacggttataaaaaccaatgagaatactttaaacgactgtttaaaaaacgtcaagaaaactcattttttgtagtagtgttttcactgagtttggtagtgctagcggcaaaggtttgaatccttaagtgttgggttctctcggtggtgggctgcggtgatttcaagctggtttcgtagtggtggtggtgtcagtctaaactaattcactacaaaaaactgctatttttaatgacaacattttagttacaatataagtttttgtcactaaatgtgacttttagttacaaaaaaatattacttgtcactaatttagttttagtcgcaacaagtattgtgattaaaaatacatttagtcacaataaattgtaatttttatgaccaatacctttagctacagaccttttactcacaacataagaataatgatttataattagtcataaattttttacttttagtcgcaagttttgttgtgactaaaagtaaaaacttttgtatggtggtggtttccacaacaatatagcgcgagagagagactgaaagcaagagcgagatcaagagagatagattgaggaatgaggaagatgggattttaagcctttggatgggtttgtagtcgtttgggggtttcgtttgggttctcggtggtaagttttgctagttggattctcggtatggtggagagagagcatgaggaagagaaaaagtcaagaaggaaaaattaaatgaaaaaagtattttaaatatttagagaaaatattagcatcattttatataaattaacttattagtgtctaaattttaataatgaatgtacttttaagcatgtataatcaaattttactttgaaaactatctatatattactactgactttttcatgtaccgaattttatgctcaataatgaatgcttaatatcgatcatcttatatataaaaaatgtacaatatatttatatttgtacacaatcgaatatttgatgggaagaacgtatatagaatttatgttcaaataaaataataaagcatttagtcgatctggataagttcatgagttaattagcataaatataaattaaagaataataaaatagaagaaaaaagaaaactactattttgtccacttgcatgatatcgtaataaaattctagtatttaacacattatattatgcatgaatcaaaattttccagcattatgattaatgtttcgcaaagtagatgtgacctattattcttttatttctttcatttttttttttttttgaagagaatgacctattattcctttggtcacaatatatatacataaatacatattttcataaatatttatatactaataagtttgtaccgcacttattttcacgattggatagaaatataactattattaatgatcatggaaaactggcttaattataaatgtacaaattatgctaaattatggccatagatacatacactaaattatagagtgttatctacgagaagcatattaaatttagtgacacactattattaaatttagtgtcaaaactatttccactctaactacaacataaaaaataattatataaaaaaactattttttattattatattaattttttaataaaataaaacatttatagtattcacacttaaatttacacacaaaaaattaaaatatttacaatacacacacccctctaaataaaagagtcacgcgtgcaataaacagtttgaactttatttttgatgtattaaatttttttgaattttttaaaattttaccggatgtcttaaataactataatctaaacgaccatgaaaaaaaataaactaaaagtttacaatgcactaggagtccacagatgcaaccctatctatttcaccatatgagataattttttagtctaattttttcatggttatctacgttgttatttagaccatcctgcaaattttcaaaaatttagaaaaatttaacacgccgaaaatatagttcaaacagtctatttcacacacgtataaaataaaaaattttgcgtgcaacaaactgtttgaaccatgttgtcgacgtgttaaatttttttgaatttttcaaaatttttaatcttataaatacaaataataatatcactatatatataaatataaattaaacaataataattattaaaaaaagaaaaaagaggaatattatagttacagtgccacgacatatgtgacgtgcacggtaaagtatatagaggaaattacattgtatattcacttcactttatttgttttaaattttacttttatttttatattgtttaagatatatacttacttttataaatgatgtctacattatactcttaggttaatgtaaattacgtactctatttaagtggagaataatatattttaataagatataatatatatatatataagagtatttttgattaattgataaagaaaacaaatatttctcaatttatcctttgtatatatatatatatgctgtaaagtttagtgctatacattgtatcaattatatactaaatcaaaattttagtaacgttggagttacttttacatgtgacatgttactattttattcatagattgatccaagatactgtgattttttcttttaaaagaaaaaaatacaacgaaaagaaattgaaaatagtgaataccaaaaataaaagagataatgttggtacgtacgtaaagctgtatcttttgtagttttttcgttatagagagagagatagaaattaataaattcaattatatcgatcaagatcatccaaagtccaattacaaatttacaatgttattccacttccaaaacatagagtgatttcaaattcatattaaaatgatatttttcatatataatcttttaataccaagtcatgaaatatctattcatatataagatgaaatatatttaaattggaatatttgattttaaaatgaaacttaaataatatcataagaataaattttttaaaatttttattattagtatgtatatatctttattaattttaattagaattttaatcttttattattattatatataagtttacaagaatatttttaatgagatatgtaaaagttgtattatattttaagggtgttcatataatttgcaattcgtggttccaaaccccgactaatccagaccaaactatttgagactaaaccaaataaataaggtgtgaatgatttgatcaatccggaccgttataaattctctggttcattcacggttttaaaaatctcgatagaattcaaaacaaatcaatccgtacatataattattatatatatttaatatttttttttttgacaaaatattaatatttgggaactactttatttaaatagaatattgatattaagtttatattgttaagataacaattttttattgttacttatatattatatgttaggaatactgtaaaacttaatttagccctaattaattcaagagaatcaaacaataagattaaggaatagcggaagcgtaccggagtcca

SEQ ID NO: 34076 - DNA, 3400 bp, Cannabis sativa
  modified_base (189)..(191): a, c, t, g, unknown or other
  modified_base (458)..(461): a, c, t, g, unknown or other
cgttagctatgaaatgggccagcatgagtaagagaaacggttccactattcacattcatagatgggcttacccaacttgtgttttcctaagagacacaaaatcacaaaattatgaatacacattttattattattttggtagaattaataggcatactcttcttgctgcaaataataataataataatnnnaataataataataataaaaataggcgtactctgctttttcttcttctttttttttttcctttcttttaagtttaaaaaacagttttatcttcattttagttttaaagcaaacttgtagtaataagacaacaacataaagggtaaataccattttagacatagtgttttgcaaaagttaccaattggacccttagttttgttaaatgataaaattgaccctgtattttctaaaatggtacaaataggaccctgaactgattttttatnnnnataaaacttaataataatccgatccaaaggtgttatgacaaaattgtttatattttttgtatctgttcgtgttaagaattgtcagttggttatattaaaaaaaaaatttgtcaaaaattaagctcaggatcctatttttaccattttaaaaatacaggattcattttgtcatttaacaaaacagatggtccaattgctaatttttgcaaaatagagggtctaaaatagtatatacccaacataaataaataactaaaacaaatcatatcaatgtatattttgtaagaattaattttacatatctgtattgtataatttttttttttgatgtaatattgtataattattttagtatataactttacttttacaatgtttttcaatatttaagttaaaaaaaacgccatatttccaaaatttactcctcactcccaacttcttttaaccactatcataaatatttggctacacacatgtagagttgtagataaattatttcagctaaattgttcacaacatgccactcataataccttgaattttgcaaattttctttgtggttagtaataaccctcgatttctatattgaacatgaatttaaactttgacacatttaattaattcaacagacataaaaaataagatcatgagctccctccaatctagattgaatttgaagattgaagtgagacatgaaaaataatttccaaaaataataggtaggtgtataattttgaaaatgtaaaaacattaaaaaatttaataatagagggattaaaaatgaaaatagaaaggcagagtgtgatattggtatacctattgttcgtatatggaaagttaggtctgaatgtccgctgaacagaatacttgagagttgagtttatgtctcaactgtactctaaatctaagtcctttacccattaaaaattactactcatcatcatcatcatcatcatcatcttcctctctttctcttcaacacaatatataccagcaataccatggtaagtaataaacaaactcaccatttcaataacttatatcatgtatttattataattagatcagatagtatatagtgttatttatttattttattgggtattgcatgcagtctctaattatgccattgatgtttaagtcattggtgaggtttttaacaacgctaattgtggagccagcagcttcggtgtcgaccttgctattctacagtgagcttttaccacaaagcaacgtcttagaaagactggttcgtcatgaaatgcttcgtcaagataataattatctcttccatttcattgttaacttcttgaggtgtttttggtaataatcaatttttttatttaccctaaatttatataattgattaaaaattttaaaaaaattactaaagtacgtcaatattattttttttatttttatttttatgttttgaatttttgtatttataaaaattcctcattagtgaaagtcataaacccttatttagaagtgtattatagttgttatgatgtttttaattttatggttattttatagtttatttatagttatatatcgtgatattgatttctttattttttttagttattttttgcttaaaaagtacatttttataattttaaaaatttatatgtatatttttgttgcgaaaattacgaagtatgcaagtatatgtaatcgcttttgtagtttattagggtatgaccgatatcgttctcacggagattgattatcaaataccaatatataacctattttattttctatttgacaatcgaaattggaatagttgaaaataataaatagcaaaattaaatgaagaacaacaagaacaattaaattgatccaaatatatataaatgagaaattagagattctaatctactctactatactttattattcattattgcaatcataaaaataatttcttctcactaaatgaaagacatgcaaaagtgttaaatattcagattaagaaatataaaactcgaccttatgcaatctctctatattaatttctatgagaaatttaaataataggaagcaatgaactcagttctaaattacatagaccaatttgatactctcgttcgaaattgaaaactatgtctattcaactttagcatatttaaatcttacttttcaaattttgattcaaattcatagacagcatgtaaaaagtgcgttatcaatcacatacacaacaatcacaaactgaataaatcttatatgaagaagaaataaaaaatttacattaattcatcacaaagtttcaagagattcaattaaaaatctcaaataaaaattaattcataatcacaataaaaacatccatgataatatctctaaaagacattaaaaccacaaattaaaagaggatatagaatgaaaaaaaaaaactaaattagaattgtgttgctccaatcttcctctctaatcctctccttctcttctttgtgtcctccaatgttcttgttgaataaactactagcaaaataaaagaggaacgatattactgaatgaaaaacttctgggttgagtcgcggattaggtcgctttctttaagacgttcgtgacactgcccaggagtgtgcaagcagtcagaatttgccagtcgtccccaggataaaatagccaagtcgtattgtatcggaaccccattgcactgtagagcaccgtcgaatacacccaaatatatttgataccgcagatggaattttagtatttatgaaaactgtatttttttctgataagaaaagatgtattcttcccatcagttcaatcgcattatatagacaaatggattgaaaaatcataacgggaagaagaaggttaatagaatcgtggggtgagttggtttgaacgtgtcccattaactgatacgactaagtaaatcagtttaattaaacatgtttcttaattaaattaataaa

SEQ ID NO: 34077 - DNA, 1125 bp, Cannabis sativa
tgatttttatgataatatcctgctattttcgtgggttgacaactatctttgagcctttcatgggatttaaacatatgaaggagctactgatgacgagggtcacttatgggtgtgacatgatcgtcaaccacctttggggatgaaacccatacttgggggaaacacccccgggaccctcattgagtggggtgacaaccatcctcgttgggtgaccccccgagacccaacttgaggggggtgacaaccaccatcgttgggtgacctcgcaagacccgacaagttgggggtgacaaccaccatcgttgggtgagcccccccaagacccgacaagttggggggtgacaaccaccatcgttgggtgaacctaccaagacccgacttgaaggggtgacaaccaccatcgttgggtggccccccaagacccaacttgaggggggtgacaactaccatcattgtcagtagttatggtgtaatgtggatgtcctcatatacctttgagaatgtcattatatctaaaatgcatgacttgtatcatgagggtgtagggggtgacggtatacccctacaccaaccctttgggaggtaaggggtagtagtatataccccctagacaaacttggaatatgggtctgtggtgattgtttattccactcatgaaggtgttagtccatcgtttttccttctcaaagacgcccaccttactcaagctaggggtaagggtgattgtctgactttcattctaacggtcagaccacccttcatgattaacggtcatgactttacatatttttcattaatttagtcttggtatttttgtgccacgtgttgctactcttaacacgtcatcgtcgttaaaatttggataaacatttgcgccccaagtttctagcggtatgaccatactgtaggaactttcttgtgtagtctgggtcttgcccttattgttgacggcttggcaccaaaaatactacacctatactaaaattacattccaaaaatccaaaaatatttttcccaaccgttatttttttcacattttacaacatatcccagtgataatttttccctttacaagcaaaaattacaagaaaaataaattatttacaaaagaaataatctaaatat

SEQ ID NO: 34078 - DNA, 3230 bp, Cannabis sativa
  modified_base (809)..(814): a, c, t, g, unknown or other
  modified_base (2612)..(2615): a, c, t, g, unknown or other
atcgcattttctattgtcgccgaacaaaaattacatattcacatataagtcaaataatactcctagagtttaataaaatctctggaattgagaaattataacaataatgcccatttctaacattgagacccacaattaaattaaattcataaagaattataaaaatatcagtaattagtgccaattgcctttactaatccaaagtactaatgcggtcattacaattatcccctgttaaaaggatttcgccctccaaatctaacctgaatagctttgggtattgagttctcatgtcagactccaactctaaggtggctttctccacctttctatttctccaaagcaccttgaccaaagcgacggtcttgctttgaagaaccttctcctttctatcaaagatctgaattggttgttcttcgtaggataaatctgactgtacttcaagggcttcataactcaagacatgtgtcgggtctaaaacatatttcctcaacattgaaatatggaatacattatgaacaactgatagcgctgatcataaggctaggcgatacgctacctgcccgacctactcaagtatctaaactggcccaatgaacctaggacttaacttacccctcttcccgaagcgtctaatacccttcacaggtaaaacccgcaggaaaacatgttcccctgtctgaaatgtaacatctttgctcttcggattagcataacttttctacctgctttgggaagcaagcatctgagcctgaatcttgtctatagcttcattggtcctctgaactaactccagacctaagtacttnnnnnntccagtttcgtcccaatgaataggagagcgacattttctaccatacaacatatcatagggagccatccctattgtactctagtagctattgttgtaggagaattcaattagaggcaagtacttactctatgaaccctcaaagtctatgacacaggctcccaataaatcttctagtatctgaattgttctttttgaatggccattggtctgagggtgaaaagatgtgctaaacttcagctttgtacccatagctctctgaagactcaccaaaaactttgatgtaaactttggatctctgtctatagcaatgaatttaggagctccatggagacgaactatctcctttacatacaattcagcatactgatcaactgcataagtaactttcactggcagaaagtgagttgattttgtgaatctgtccactatgacccatactgaatcatacattcctgtggttctaggcaaaccagtcacgaaatccattgcaatgtcctcccacttccactccggaagggctaaaggttgcaataaccctggaagcctttgatgttcagctttgatttgctggcaggttaagcatttggacacgtaatctaccacatcacttttcatcccataccaccaaaagtagggttttaggtcctaatacattttggtggttctcggatgcagtgaataaggtgtggtgtgagcttcatcaaggatttctttcttgagttcaacaacactaggaacacaaactcgaactttacacagttacattcaattatttgagattgaaatgtctttaggtagactagccatcacctcatctcgaatcttgactagctcgggatcttttaactgtgcctttatgattctctctagcaaatcagattggagtgtcaagttgtgcaactttccaactaaaaactcaattcccacattaaccatctctgaagctagttgatgggctatcgtaacaatagtgaaaacatgcccgggacctcttctacttagtgcataagccaccacgttggctttcccgggatgatacagaatctcacaatcgtaatctttaaccgattccagccatcttctctacctcatatttagatctttctgggtgaaaaattttttgagactcttatgatcagtacaaatctcgcatcattcaccataaagatagtgtcaccatatttttagagcaaatactacagcaggaagctctaaatcatgtgttgggtaccatttctcataatcttttagttgacgagaggcataggctataactttgtcagcttgcatccgaacacatcccagaccctgtctagatgcatcacagtaaacaacgaacttttctcgatctgatggcaaagctaaaattggagctgttatcaaatgttgcttcaactcctgaaaacttgcttcacatttgtctgaccatacaaatcgctaatttttcttagttagcccggttagtggcatagagattttagagaatccctcgacgaaacattgataataccttcctaaaccgaggaaacttcgaacttctgtcactgattttggcctcggccaattcttcactaactcgatttttcttggatcaaccataattcaattattctcgacaatatgccctagaaaagatacctcaaacagcaaaaattcacactttttgaactttgcatacaacttatgatccataagtcattgcaataccatttgaagatgttgctcatgctcctcttctgactgagagtatacgaggatgtcatcgataaacactatgatgcagttatcgaggaaatcnnnnaatactctattcatgagatccataaaggatgcaggagcattagtcaatccgaatgacattaccaaaaactcgtagtgcccatatctggttcgaaatgcagtctttggtatatcttcttcccgaattttgagttgataataacttgatcgcaggtcaatctttgaaaacacaatctttccctggagctgatcgaataaattgtcaattctgggcaactgatacttgttcttgattgttagcttgttttgtaccaaataatcaatacacatccttagggaaccatctttctttttcacaaacagaaccggagctccctagggcgatacactgggttgggtaaaccgaatatcaagcaacccctaaagctgtaacttaagttccttgagttctgctggagccatcctatacagagatttagaaacaagttcggctccaggtgccaaatcaatcacaaagtcaatttcttgttgtggcggtaatcctagcaactcctcgagaaatacgtcgagaaaatctttaacaactctaactagttcaggcccaaatgtttttggtctgttggaatcaatcacaaccgctaaaaatcatacacatcaattgtgtagtagatccgta

SEQ ID NO: 34079 - DNA, 1489 bp, Cannabis sativa
ggctgttaggagtaaggagacactctaataggggaagaagaaaaagcgggtgatcatgtgtttataggtgagacgaggagagtgcgatgccttgccctaactaataattagggtgtcccatactttgaggtttgaaaacatagctttttatgttttatttttttaaataaaaaaatgcactaaattctatagactagggttgaaccctaaatatcctacacttcacaaatttctccactcacctaatttatataaatatatatttttatttttggctgcagaagacagataggggatctaccgaaacagatatttttatggggtttttgaaatttctaagttttttatttttttattatggggcagattttttctcaaaaatactgtattttctttttcaaaaatactatgtactgtgttaagtttccactgttgttccacggttattttttagttgttccactattgttgtaattattctgttttgttgttttacggttattttataaaaaaacagtatttttgtaaaaaattatgtgtgacagtaaaattgtaaacttttgtccaaaattcagtatttttgtaaaaactcctatttttattgggatatatattattgtaatatttttataaatatccaaaaatgaaaaaatgtttataaaaatatggatctataatattttttaatacttttgcatattttaactagatgattatttttttttttgttgttgttgttatgttattactatatgaaatcaacgtgaaaattataattttttctcaaaaaaagtgcaaagtaaaaacttgtaaaaattcaaaatccatataaaaaaaaaagtacgattttaggtagttagtgtaatttaatattttacttttttattttgggcccaaaaattattgggcattgggcctaccacacactctctttgggccaaccataccaactaattccatggtaagtaagaatgcatgtgcatctttagtaaaaaaattcaacaaagacttccaaatccaacatttaatgacttaagactttgtatacatgaagatgcttgtaacatgaattgataattcaatataagaaaacacatggatacaaaagttgaacatgttaatgttttgtttcctgtgtgttttatttttttggtaaatactattttgaattgtgttttattaaaattatgattagattttttattttgttaaatgacaaattagaccttatattctttaaaatagtattaaatagtaccataaactgatttttgtaaaataaaacttaataataaccaatctagaagtattatgataaatctgtcttgtatttgttcgtattatgaattatctatcttccttcaagttagttagttagttacattaattaaaaaaaattatcgaaaattaaactaatcgataatttttataaaataggattgaatatttaatatatgtgattagattaaacataaaagaataaatatag

SEQ ID NO: 34080 - DNA, 1551 bp, Cannabis sativa
tgacttgagaccttttcattcagatgaactataccacaaattccacataattcctttaaattaaaagtcatggtgatgaagaaagaatgcaaccatcatgattggtgttcgaggtatctcagtatactaatttttgagattgattaagttcaggcagtgctggaacttgttaactgttaggaccttagtcctaacatcagagatattatcttctactttgaccttctccaaatcaactagtcattcttctatcttttctctaatccaataaatacttatatttatatgcttgctcttttcatgataaaacgagttcttataaagatggattgatgattggctatccgagtacactattactcctccttttatttatttcatacaaaatccatcgaagccaaaatgcttctttgaaaacttttgtggtagccataaactctacttctgttgtggaaagggccgaccatggattgtaactgagctttctaggaaatatagttccagtttatcatgaacatgtaggtcatggttgattaattggtatctttgtttgatgtaaaattggcatccacgaaccctttcaattttagttccccatttgatttctcataggccagaccataattccatgtgcccttcaagtaccttaataaccatttgaggacctttcaatgtttaatgctcggattggatatgaactggtttaggatgcttagagcatgagcaatgttcgctctggtgctcactgtttggatttatgccctaaaaacaagtcattaatggataatatgttagagaacatataaaatacaattataagataaatgatataataattataatagtataattattaaatatctgaaaattccttatttacatagagaaagtataatcttgaaaggacgtacaaaagaattaagattatacgatatgaataaaataagtcagtagtatattaaagtatttagaatgtttaatacgaaactgctaagtacggtatactatacactataatttttattcgaatcacatatgtggatagacatgtagtaaatgtgttatgtataattcgattatgcatggttgggtcaatatataataaaaatctttcattaatgtgtcgtttaccatgaaagagttattcatattataatgatgacattagtagatcaacctgaatcctaagtatacatgaactcatgcttgtgttcattgagttctttgatttactcattaaagtttctcagagaagatgattcttacaacttctgtttttgagagcttaataacatgagtggttgggaacatgttatacagtaaaatgtaagctttcctaacagatcaaatattagttcccttatagtgttaattttaggagtgctaacagttggatccaaatctataatgagctatagattaactgtttacattgaattaatggcacataaggagtcaagatcgtaattataagggtaaaatagtaattttaaccaactctaattatgaactaataattggaggacaaactacttgtattaattatatcaa

SEQ ID NO: 34081 - DNA, 1672 bp, Cannabis sativa
  modified_base (94)..(95): a, c, t, g, unknown or other
ttttcatgtccctctatcccaagtaaataaaaatgctacactcaattaagaagttatctcccatttaagagtcaatatatatataaatatatanntatatatatatatatttaaaagagaagaataagacgctgatgtggcactctaaaattagtttacataagtttatgtattctctccttaatttttttattttttatatttttataatataaaatattacacttactctaattttttatttttattttaaaaattctacttaaaaaaatcactcctaaaaccttataaaatcaatacggctaaccattttttttaaacaatttattactagaaaatactttcaattttctaaacattcctcatatttttggaaatctatttttattaatgtagattattttcctttttgttttttttttaatagattgagatcacactcacaataaaacacaagaagccaataaatttgaaaagtggtaaggtaattaattgatttttcttatatatttatttattctcatatgcgctttcataaaagctttttagtatttttagttttttttttattttattttgtattttgtacatacaacatagaattatgctttatacatacatttagtaatttagggtatatacgattattcgtggtcctatcatttaggggttattaatttgtgagtgcatattttttatcatttaaacttttgttgtttacttgtactttatccatgtcaagcttttagctactggcaaagttgaaatatacaagtgacaatcactaaattttttagttattatatttaggctttattttaagtatactatcactctcaaacaaaatatagataatgtttggtggaatataactaataagtaacccatatatattaaaagatatgaaaatagtttttaggatagaattttagtgactggattaatgctacaaaaacataaaatagtcaaaattatgaggaagacttacacaaaatttgttttacatttatattttttttttccaaaagaaaaattaataataattaatgactatatatgttttgagaaagaaagttcatacttttttattaacagaacgtaagttagtatatttaacatacaagtagtatatttagtatttttttttgtgttgtttcatttactttaattattttatttaattctatagttttgattgttaattatttagcatagttttaggttagttaattagatgttacatagttattttaatttattaattattgttaatttgaaatatttacaaaaattaaaatatctataatataaaaatatcttaactaaatatatatctatctatttatctagatataagatggtgatatgtcactctactctaaatagtattatttgttcgttctttaattctcttattttttgaatttttaattagtcttataaatattaatctaaatacctctagatttttaattagccttaaaaatattaatttaaatatctttatctattctctatttaattttttttattttttaatttttaattaggcttaaaaatcttaatttagatacctcttaattctcttttttttttaaaaaaaataataattatatttataaatattaattaattgattgattaataaatatatatattactataaaacaat

SEQ ID NO: 34082 - DNA, 2273 bp, Cannabis sativa
attgtacaaaataactataccaaatacttaattattcaaggttataattataatttcattatcaaacttttatcagaatggatattttattaattttttttttttttaaaaaaagacatttatttgtcgggttgtttgagttttctcaagtgattctctctgttttgtatattgggatatgatttagttatattatctatctaattctctctttttttagtcagatttgtcctagtagttataagatttagaaattgtttgtattgttatatgaatatcagaatatgtattgtataggagattttttttttctttcatgtgaaatggtatttaagtactgtgtttaactttaggattattctatatgttggtgttgatgaagtatttggtgacatggagaaacttctctccaaataaaatcttgtaatttatgttgtgttgttgattttctagagatattttgttgttttaataggagaaaaagaaaaatagagaatgcttcattgaatagttaccaattcatttgcatctcttcagcatttttgttagtatttgaacatgtttatgtgaaaactaacacaacaaattctcttagatagacatttattttatgggtaagatatagtgatggatgcaaaatctttggcgaagtcgaaaagagctcattctcagcagcatagtaagaaacatcatcccaatcaaaagttgaaatctccatcaactgatgctgttggagcggcgaacaaaccgtctctcaaacaagttagagagaaaaaccttcagcctaaggctgcatctgcactaccttccaattgggatcggtacagtgaagagaatgattctggtttagaagacctatcaaagaaaaacccagatgttgttttaccaaaatccaaaggcgcagacttccgtaacctaatttttgaggcagagtctcaatctcaatcgactctttattcggattccttcctgtctgttgatgattttcttgctggtactttcttttttcgtatttgttcttgatattttctttaattattttctagggattgtatggtttttttttttctttttctaagagtttaatttttgataaatttaaaggcataattgatcattgactatgaatgtagaactggacatgaacaagaggacttaaaaattagtaattagggttgccatagatgtgggtgactacccaatattgcaatcaccatcatatttaaatgaaccgattttggaggcaaatataaaggcacatgaacttaattaagaacaaaattaaactttatattgaaaaagaaacagaacaaatttgattttgataatcactgatatttttctctatttattgtttaggagaagtattttgaatttatactaattgaactgcgatatcggaaatgtttttgcaacttctgataggtgaatttagagaagcagttgggtctttgctttcagtcaagggagagggcatcttggcaaggtctggagatgataattttgttgtggaggataaatcaaggatgcaacctgaggtaatatattttatgtattgtattctaactctcaagttgataatagctaattccatggtgatgtctttataaaacgattattatgcccaaagatctatcgagatgcacatggaagctctgtctacccactgactcaacattttttgatttgtttatttcaatgctgagaattaatagaaatttggttctctattcaggcatcatttatctcgttgaatctgcaccgtcttgatgaacagcttacgaaaattgacttatcgcagagacttttcatcgaaacagatctattaccatcggaactggtatgcttctttccaagttttattggttgtgaattttctttctttgctaatgtgtttcgataccaactgattcaatccatctgcctgtactaataagttcagcaaacatatacattttcccactgtttcttgctgagaaagatgtttcctttgctgcttatgttatccttgaaatagttttattgttcaaatctttaaatttcaaagtagggtgtaccatacttatcatagtttgttgtacagcgtgcaacggtgatatcagaagcaagcagctctcgggaaagtgaccaaattcctgcaaccaatgatcattcagcactgaaagaaatatctgaagatttaattgattctttggcgaatattgctgaggttaaagcatctgccagtcttcatccgtctctgggattttgtgattcatcaaaacagattgatg

SEQ ID NO: 34083 - DNA, 1502 bp, Cannabis sativa
aaatacccacacaaaaacaattttctttaattagcattgcaaaaatggtgtaatatcagatttttacaccattgtcgtcagtttataaaaatttacagatctagttcgatccagcaaatcttaccaccaaaattaaatctcatcatcacatttcaatccatatagtaagcaatagtgtatattcattccaaatataagatccttatatataatattatcgaagctcccgtgtgcgactgcaaaaaagaaattcaattgggacaaagatctcaccagagagagagagagagagtgcatgtgttaggacttgttgtcctttgtatattatatagttagttggtttttcttaactactttgtaactaattgtaaaagttgttttaactgcttttttggttagttttctaactaattttgccacatttttttttttttttgactattttgtataaataacagtctccctcatttaaggttgagcttgatttaaactttgcttctctcttcttatttttacttctctcaatttcttgattctctcaatctcaatatggtatcatcgatgggaaacgatcctggaaacttcgctcaaaatcaaattccaccccatcattaccctcaagctccagagcaaccacctacaatttcagatacccaacaatctgcttttgctcaacatgagactcgatcgaaacatgcaactatgcgtactggagatctctcattctcccctcaattcatgcccatggccacgaaggcatacttcttggtaccacacctcgcccatcaaccatcaatccagtcactcggactcctaatcctgcctttgattatcggattcactgtgatgctctcatcatgtcttggctcatgaaatctttgtctaaagccatgattagtcatgttctacattaccaatcttcatcatagctctggaacaccttctttggcctctttgccactcagtctaaagtcagagaggttcagccgaggtttgctattcaaacaccaagaaaggctcactcaacattgatgaatatatcctcaagatgaaaaatctagctgagtctcttactgcagcaggtcatcatctctccgatcaagaacttgccatgtacactcttggtggagttggtctagaatatgagactgttgttgttctactcactacccgtgtagatgctctaaccttggaagaagttcagtacatgttacaaaatcaaaaaattaggatagaacaaaatcaacatctcactcttgatctgcctcaagaaaatcttgctcaagtcaacaataggggtgttccaaatggaaggggttcaacatcttcacatggaaattgtcatggttgtggttaaatttttggttgaggaagctcatgtggcccttctcatggtgctgcaaatggtcgtggacgtggcaattgacctgtgtgtcaaatctgtggaaagatagggcatcttgcatacaagtgctatcacagatatgatcctgaacctgcta

SEQ ID NO: 34084 - DNA, 2019 bp, Cannabis sativa
  modified_base (623)..(649): a, c, t, g, unknown or other
tgcagaaaccctcccagcccacaagaacaaaaatacatattaacactctatttaatacataacaaaccctcccagtccattaattgcttctctctctctccgtttactgctaacgctagagatcgtactattcggtgacgaaacaccggctttgtcttcgacatccaccgttgacggcaaccagttcacgtcgattccacggagaaaagtccgagtctcaactcggcacgacttagaattcgaatctaaaccaaaacaccatgaattagctcaagcaaaaatttcagaacaattttaatgagatttgacttagtgatgttgtagtctaaaaagatctgtgttaatacaaaatatattatatacatgtatacacaaatcaaaaaataaagaaaaaaatgaaattttacaaaggcttagatacctatgcttttgtaaagaggaaaaggggaaaacaaaaaaatcaagaaaagagaaacaaatattatagtattaggcttgaaaaagaaaaagttaaaaggatgtttgttatgtattaaatggagtggtaatatgtatttttgttcttgagggctgggagggtttctgcagaaaaagaagaagaaaaaagaaagaagaagaagaannnnnnnnnnnnnnnnnnnnnnnnnnnaaaaaattaatttttttaaattaaaaaaagtaaaaaagaactaaattgcaagttaatgtgctctataaaattgatgatggattgcaacacctctcaagtgtgttgtataatgtcttaaggataagttataatacgttttttacttagctgtactccattggccacatctgatgtgtcaaaaaaaaaggtaataaaatctctgaattccaaatttaatacacgtgtacacgtagggggttttgttaaatatcatacttatccatcaatcactttttttcccaaaaacaaattaatagtgaagcggtatttttgtaacgtacaagaatggttgacttcattaaaagatgttggtataggcccattaatatcattccaatggatttaaatgggaccaactacccatactactcaaaaatctaagtactttaaactcattaattaattttccttattttccaaacttatttttttaaaaaaacaaaaagtacaatatttcatttcggacgtacaaaaatggttcaattcattctaaaacgtagatgaaggcccattaacaaatggccaatgaatttaaatgtgaccaccaaccctttgaactcaatcatattaggcatttacactcataaaataaccttatttcagaattaaatttggaataaaaaaaattttgtgctattgtactgttctgacgtacgagaggagttgaattcagattctaatattgtaaaaggccattaatatcagcccaacagctttaaatgggatcactaacccgtacaactctattatctcaggcctttaaactcataaaatctaattttgctcccctcagcactctctttcccttattcttcatctaaaattattaaacatcaataaccaaccaacatgaatgacgaacaaacttatgaatggaaaaccataacagcagagctaaacatcacaaaaccagttaatgagattgaaatacatgacgtgctaggcaagagtctcgacaaactggaaaaacgggaagcattctacgaaatgtacgcgaaacggatgggtttcggcacaagaaaagacaatatacgacgttctcatggggtcattgtaatgcggaggtgggtttgttgttctgagggttcgaaaaaaatcgcatcaccggacataccaaggaaaaaaagacctcatgatgtcactagaaccggatgtcaggcagcattgcgtattttactcacacaaccgtgtaacacttggaaatgcaaagagttcagcacaatatagaatcacgagctggcttcagcgagtgaggtacaatttttgagatcatatcgagttgtgtccgatgggttgcttgcctaagttaggtcgatgaactccgtaggaat

SEQ ID NO: 34085 - DNA, 2039 bp, Cannabis sativa
  modified_base (915)..(917): a, c, t, g, unknown or other
  modified_base (1238)..(1241): a, c, t, g, unknown or other
atgttagtgatatattaattgattgtgtgcgtgtctaagatcccatgtatgcggtcttaagtttattatgttgaccactgcctgattaaactaacttataggttcgtaggctagtatcatatcgatactacccgaaaccctgtattacttcaagaattgttagatttaataaaaaaaataatcacaagtccagctcaaaatgtaccaagaaaagatcgcccgacattttaactgaaaagtcaaaagctagaggtttgacgttggttaacttgtcctaagaagagtgttcctggcctctcaagaaccgagagtgagagtttttggacctaactgggaatgaccgtacgaaatacaacataaggtgcgtgatggaacgtaccagcataaaaagacatgacggatctgagattctacgagcatggaatgcggaccatctgcactgatactatcagtaaactaggggtgtctgaatccaatttatcttattgcattttattttttttccatatacgcctcagggtaggaaatagttgaataaaaatagaataaatttcgaagcaaaaatacagtattttataatttttagttgcattataacaagtgactaagagtccaaactctcaaataacttagggggtattgtgtattatgacttaaaaaaattagtgtgaaaattgatcaattaaggtgggagtagaaacataaatcgacgtctaaaaggttcaagtcattggaagcagagcctcatgaatctaggagtaagttattatgttaccatgcttatgattaataattcaccaagtcaattcaagttgttagatcacgaagaactaggaaaggcacacaacacaaaaagttacacacctttttgtccaatgtctactactctcacatttctattattattattattannnttattattattattattgtaaaaataatctttttgtactatgttttttttttggtagtcaattattttttatttttttatcgatgatttttttatgaatgatatttaattgtttaatatcatgaaaaatagatacattagcatttttcttattaatatgtacatactagtgcaccatccaccctaagtgcatccactgctaattcatgattatgaacatgaattagagatgccttaagaaaattagtaagtaaactagttaaattctctaacaaagatcttaaaaatttaatacaacaacagaaaataacatacaaataannnnaaatcaacaacaaattaacaagagtataatataaaaaaatacatcaaaatattatattttctgtaaataaaatcacaaaaattgtaaaaatatttaaaattctgtacaaccgtcttttgtattttttttcttttgttatttttatttatttgtgaaataattccttttaaatttttgtttaattatatataactttgtaattcaaattttttttaatttttttttatttttgtcttatttatactatctaaattaattatatttattagtatcgaggcccaaggaagataaaaagaatgagtttgaatagaaagagggaaataaaaagtaatactaaatataaatatatattttaaatctagtgtaaagagagagagagagagagattttttttaattaagtagtaaaattaagcatgaaaactctaatttttcttttataatcggtcattagattaaaatcttatttttaaaatttaacatttttaaaattaatatttacttataattattttgtaaaggttccattaatgagtaataactattgaaaaataattcatatatacatatctttgagatatgtgaattttataatgtaattattctttattattaaagtttgaattaaatttttacatcaaacatacaaaatgttaattttattactaaaataccactacatggttatccaaatatttataccattttcctttaattttttacatttgtaccacatgcacacacaataaatgctttgttgacacgtgagtgattgatgtattacatcaatctttctata

SEQ ID NO: 34086 - DNA, 1375 bp, Cannabis sativa
ctgtggttcgacctcagctgtgtgagtttactacttgattacgtacacttgcgtattgttcatatttttcgtaacagaacataaaaaacaatattaaaactttttacaattaaataaaataaaaaatcaatatatatatatatatattacctttcaaggtacatgcaacgataaattgatggtctaacaattctcgcctcatatgctaagtgtatcaccaaatgaaccattatatcaaaaaatgatgggggaaataatttttaagattgcaaagagtaattgatattttttgttcaagttgctcaaaatcttgtggtcgatcaacttttgaatacatcactcgaaaatagttgcttaaagtagttatatgttgacgaacatgcagacttgacatttccctcaatgctagtggtaataattaagtcataataatatgaaaatcatgacttttgactccatgaatttttcattactttacatcaacacagcttgaaatatgggcagcatatccatctagaacattaattgtctttagaaattgacagaggagattttttttttttttttgcttaatgtaaaacaagcaagtggtatgatagttctcttagattcgctctcctttggatgaagttcagatctaatactcataaactttaaatcaagatgtgaattcaaattatctttatttttgtgtctaaactcaataatgtcctaagtaaactttcacatacatttttttcaatatgcatcacatcgagactgtgtcataataaattatccttccagtaagacaattcaaaaaatatactccttttcttctaactatatgacaactgaggattaacaactgtctttccaaattttatttggtagccttctaacgtatctagtatcactgaaccactaaatggtattagagccaatcctttctcttttgtactgtcaaaagacttttcatcatttctaaatgagtggttattttctaaccaatgatgatgacccatataacaatgttttttgctatatatgcttcaaccacaaagaataagtgtcttgatgacaagacgggcatccatattttcctttagtgctctcttctgataaaattgcatatgctagaaaagagaaatttgaaaaattatgcataaaataaactaaatttttttctctaaatccatatgtattaaaattagccatatatgaccacatttccattttccccataataccctcaattttgaaatcccaaacccatcagcctcctctctcttcctctcgctcaacccacgctcaaaatcaaacctcaaacccacggtgacagtgcagcaccctattcgacccacggtggatgcaattgacgaccaaacccacgaca

SEQ ID NO: 34087 - DNA, 2439 bp, Cannabis sativa
  modified_base (2148)..(2151): a, c, t, g, unknown or other
gctctctaaatttcttcatattgtcatcgtttacattatcaaacggaagtttcaatattttatgctcgatgtgctctattacatacatcccgcaattaccgatgtatgagacagtaaaaaataattaaataaaagtatgcaaattaaattcaagttaattaaaaatcaattgtaattaagttaccttgattctgtctgtcgtacaatcctcccgtcgatgatttctgaactaagatttctaacttggctctctgagacggtcaattgaggcatgacaatcattttataattctcgaataggccggattgcagtaacaaagttaggaataactcttcccacaatgtcaagtgactcttcaattcatccggaaaatcaatccaaggctcgagtcaaatatgttcaacatccaacaatcaaggtctgcctctaaagtcacctgatgctttgcactgccgaagaagagggtcatatatattctctcattattcttccaactctccaagtattgggcatcatcccctcgaatcaaatccaatatgttgtcatcccactaaaagttagagtggtcattacacgcagcttgccaccgactaataacttctgatgggaaaatgtgaggtatgatgacacatctatttgggtacacttcaggataaaagtgttgtcgcctcctcatcaaatgaattaccgcatctaaatactaaaacataaaaataaaatatgtcagaaattaaataataaaagttagataaagtctttgaaaattaaaggcgtaaaaagtcttaaaaacttacatcgtctccaagccatgtcttcggagtatgtagttggaggaaccaagctgaatcgtgtctaccgaagtaacactccctcgggaacttgttcccaatctggccgagaacccaactgtgaaaagttgagagcagcttccgatcaacaactctaagtgggtccacattcacatgcgtattcgatgccttggacttcttctttatatcagtgtactcatcgaaccacctagaccgctttctttgtctccggttctccaccagttttggagctgtctttaacacatgtatctcagaatcgtgagtatccccaatactggtgatcttcatgctgtcaggtgtacaaaacatatcatcatcatctggtctataatcatttgggagaatgatttcattttccggtgattgaggctcttcttgtggttgtggctgtggctgtggctgtgtatctagtgtcgaccttccaagatcttacaggagtctcattatggtcttcaaatgacccataatctcgttttgtcctttcaaaagtgcaacttggcctttcttcagagctagttgttccctctccaaaatcgtcaatctttccatcatggtagaggatactgattctcaaggctttgaagtgctgggaatagatgcagatggggaaacaccagactcatcttagtgaagtgaagacggtgcacgtggtgtagaatctctaaagattaaggctgcatccgctcgttcttccaatgtcgaggcaagcttttgggcttgacttcgcaaatcatcctgtgttggttgcccatcgtcacccaacactagttcctccaagtcaataaataaaggcacctcaccgccagtgatccaactcacaaactcagcctcattcgcttggggacataacatagagtacaccgtcaactgaaaaataaaacaaatatattaatcgatgaaaattaacatgaaataaatgtaaggcgtaagaaacttacatttctagcaaataatcatatcacttcttccttgccgagtgtcgttttcggcttactctcccagttcaccattctcggaaagcgatgcaacttcttcactgcacactcgttgcccagctcctggatggcctcgtatgcccaataatgcaacacttcagtatagccataagatgagtatttagcctccttctgactaactcccttttcaatcttcttaagcatcctattcttcacatctatgtagtctttattacaagtttctatcaacttgttgtacgaaatctttctccacgggtactcgtagaagaatggaaggttgtcaaccattcttatgacaaaaggaggaacgtcagtcttctcctccttaccagtgaggacnnnnataacaaacaaggtcatccccaacttgtagacatcatcaatttcggtgcagctctcaaaaactctgcgcagttggccaaagttgatggaaggattaccgttgaaatactccataatcaatcgatctgaacttcctttctcttcaatttcttcttcagtaggtccaagaaacaagtttaacccagtgttaaatgccaaaatattacatattttatagtgtaaaaatacattataaaattaattctttataatattttcatgaaactaatgcaatatatttttatattga

SEQ ID NO: 34088 - DNA, 2004 bp, Cannabis sativa
  modified_base (27)..(33): a, c, t, g, unknown or other
taaacaacatacttgtgagtaaatctnnnnnnntggtaaaatatattccaacagttacgccatctgtcatatcgtttatggagatgtcaatacgtcttctcccatgtagcattaaatgcaaagtgtctgttcaagggatctctgtacctccgagaactgccttagcatgcctctggcctcccggagagtaaagatacttcttatgctctcctccgggagacaccttccctgagatactcctctttcatctaagacttagtcaatttccataagtgttggttcttacagatccacgtgtcagccttatccaggtccacgtattttgggaaaaatcaagggcaacatttaccccccaagtctcatttagtgaagggtaaatgaggcttgcttggtgcctccggttggcttattggtccaatggcacgtgcttcaagcgcgtgggctgcatttatgatggtcatcattaatatttatttcttttcgcaggcaacgatttgctttccgtccattgagaaaccagtgcatttaatcagtgtcagaaaagtactcaaacgttttcaaccgccctgatgcgcatttatctcaaccgttggattggtagagtacgaatcgattatgattcccactgtacgatggtgtctgatcacagctgccttgcaccctttctagtctataaaagccaacatttttcctttactgggctactttccccacttcgccatttcgtcccaagaactccgttgagaaaattttagaaaccatagatttcttactgttatttctccgtcgttgccaatctgcattctaccgtcgatcatcatcagcttccagttcacaacctttatgtaagttttctgggtaccttatacttttgttgttttcttgcatgttagggtagagcttttggtaaagtactggatttctatggagtgatttttggcgaagactgtcgtattgcgtatatctccctttttttatgttctactgctttctttctctttcgttgagtaatcaacctttctgctgagagactgctcagagcatggaatggttttcatactcatgttccctttctcttatttttcctttcttttttcctctgctttcactgcctttgagatatttgcatctgatgtttgcctagaagaatccctagattttccattttgggcaaacgtccggagggggcctctttccagcggttaggggacccccatttcacattagggttttgtttgggggattaactgctggattttcctttttcagaatcttactatattcaagaaatgtctgtctttaccttcggagctaaatcctccaacaaaggagcagttaccttagccaccttggaagaggtgatgaaggggcccgtaatccaggagaagtacacgtgtcgatccaacggttgggaggcagacaagctacactcaaccttaacctacgcccaccagttggagaagattgtaactgtggccgggatcaagccttccgcttctggagtctttcatcgcctgccccgggatgaggaaacgcccaaccgtaactacggtggttttggagcttggagccagactcatctcatgtttggggccatgctaccgcttcaagattacttcattaattttttggtttttgttccttttgggccgcgatctcagcttcatgatcagcagccttttgccttaagagtagcaactctgtataactgccttcgtcgtaggtgtcatactcgttaaaatttccctcgtactcatcgttgttggcctcatctcgttcctcggagtccacattcactcttgaggccacttcttcgtcctcgaggttctgagcatcctgaggaggacggggttgacgtgtattgttatgagtttccaccattggtgattcaacttcttagattgttgtctgtttaaagacgcttccttcagctctcaatgaaagcaccaaaatgtggaccgaggttttcggcaaccagttaaataatgtataagaagagctgta

SEQ ID NO: 34089 - DNA, 1145 bp, Cannabis sativa
ctaagaagtttgccatcatcttgatttttccacaacattgcaagacccccactatgtccacgggcctcaacaacaaaacttccatcatagcccaataaagctttaacacaatcaactttgtttttttttgcaaattgtctcacacaaaaatattaaattgagtgtcttttgaaaaactatttctttaaggaattgaacaacccgggggtttccaagcccacagcaattccaactcaacaaactcataactcgcaaaaaacacacaccactcaatagcaaaaatcaaaataccagacatgtcaaaacgacaagacaaatttaaaaaaagaaaaaagaaaaaagaagaagaaggcagaaaaataacagtagtaacccaaagctcgttcttctctatgattctcatgcaaggaaattcaaatcgtgtatggcttctcgcaatcgtatcattctcaagcaaggaaactgatcgcccatgttctcataaaaaatttcatctcctcgcatgaaactcttctccgggaattaattagccctaaatcacaacggtcgtacagtcttcatcgacgagaatcgttactacgaacaatctccatccaacgcttacgatgttcaatacacgacgaaaacgagcgagatcggagatctgatcaccacggcgagggaacagatcaagaacgaaaactgtccagttcaaagtttgctcttctccgattgtaaattagggttctaaaaaaactaaacgtgaacgcaacagtatataatatatgtatgtatatatgtatatacttttctataaaaaaacgtgatagtcactgccttaattgcttagtgaacaaccgtctagcgccgcttttcctcggaatctgactggactaacacccatggtggaacatgctatctttaaagaagattaataagcgtgattcaaatcgggttggttcttgaatcaaagaaatcccatgacactcggtaatattttcaatatttgtgaacaagaagacaaattttagagactaattcagaattcttattaagttttttaatgagaaatgatagtaaatggccccaaatcataggactatgttagtttatgtcctcatttcaaaaaaatatagcaaatgaccctaaatcataagattatgtta

SEQ ID NO: 34090 - DNA, 3395 bp, Cannabis sativa
aaaaaaaaaaaaaaacagtaattatctgaattgtccacatgtaaattaaactaacataagttagtgggtaccaataaaagtttgagataatcaagctttgagtattaatactgcaattttaaaaaattggatacttattagcaacaaaacaaacaaaataagtatttatgccgcaaatttccaataaatttaaatttaattgtatatttaaacatattggtcaatattatcccacatgaatcaaatgtaaaaatattgagtcatatataagaatatggactactccactcatcaccaattgattttgagatagagcctcatgattctcaacatggtatcagagccatatccctaacgggttttcgatccacacctatcaaagagttagccagtcgcaagcgagcaaaatggtactcccagccgcaaacaagaataagcgagcaaatggaactcccagccgcaaaataaacaaaaaaaaaagtgagtaaatggcactacttatgataaggtgattcaagattggctaacaaaaatagctatcatcttgagggaaaatattggacaatattgcctcacatggatcaaatgtaaaaatattgagtcatatatatgaacatgggctactccactcatcaccaattagttgtgaaatggaaccccatgattctcaacaaaacataattaagaaaacatattaatgaatttgatccaatatctataaaatgttaaagaaaatgttaaaattcaagatgaaatctttcgaaaaaggcagtagtagcgaccacaagtgagctacgatgatgacaacatatgaaatacagtgataataacgagcaagatatggtaatgataacaggtaagatatgatacccctaatgttttcctacactatcctatttatttatttttataacaatagtaaattgtaaatagactgagtttttcttatgatgttttattttttaataaataaaattactaataataatataaaattagataactataattttacttttattattattaaaattatttttttagttattttttgttattatgctaaaaaaaaattaaattagttgcgcaaagagcggctatattacctagttttatgttatataaacacaattataagtagtgttggggctccaataaaaaaaattaaatatcttcttttgaattaaataattatacaataaaatagtaaaaagaaaactctcacaaaaaaaaaaattataattttatctctagtaaatataaatattattataacaattaagctccaaaaataaaattttaagtcggtcagtttttgcaacttaagtatttttgctgcaaaattcagaattattattgttatgtaaaattttaaatttgcattcactgattcttaataaagaaaagggtagagtattcagctgaccacattgccatacaacaaatattaagaaccctaataattatttgcaccacctcttcatcaaaaaaaaataaaaaaaaataatattgcactgcaccctcttaaaaaaatccacaaaattaatgcgttacgctcaaacctcttacctaggcaggaatcctactgagagccttcattaggaaagcaaacgtgaaggcatcttcttggagcttctcaaatctgcaatccaacaaaacagtgcagaaagaaattcatcagaatagaagatattccttaattttggaaatgtaaaacaaagagaaggtttctctcgtgtttgttgatccatgaaaagtaaagatataaataaataaaagagagaatcaaaaaaacaaaataaactgagattagaagtttacctccctgacttggaaaaatgcccagcaccaagttcacatttaaacaacagtatgttatcatcagtcttcagttcccttagttttgccacgaacttagcaggttctgaatacataacccgtggatctgttgaaatagaccaaacctatgtcagttacatggatggaatcaacaacacacatctgatatgccaacctaggaatacctcctaatcatgagttaaactattttcatatgcatagttaagcgtacatgatatggtaagcaacgtcctttcgttttagaataccaattgtgccatgagagtgattagatacagttttatagcttattgataaaatagaactacatgaacggattaagaaagaaatgaaatttcttcagatcaaaacattaccatttagaccagctgtaacaagaatgtgtggatagttttgagccttaacctgtaaacaaaatgattacaagaaaatcaagctccaacattaaggatataagtttgatcagcatactcgtacaatgatggctgtcacaacccaatgttattggtcaatgttagtcctgggcaaactttagttgaacttacattatctacaggagagtatgacttcatgtaaaaatagaagtcctcctttcgagggtcaccccattcctgcagaaacataaacaaatcaaaatgaaacagcgtcaaatcgtctaaacccacaaactgctgtccctaagaaaacaagagcccacaagatgtggactaataagataaaccgtaaaactatattacacctaaacaacctgtaagctgtaaattcaaataaaataaaaataaataaataaataaaatccagtaaaagagaaagaaagcagcatcttaagatttttgtaatctaaaatttatggactagttcatgtaaacattgctttaataattggtgcttagcaaagaaaatgtgattattagggtggcgggccttgtgagaaccccaggagatcgagggaacaacttaaactatacttaccatgaaaaggaaaaaaaaatccgtggccctcgatgcaaatttttcacatacaagtatttcattcaatataaagttcctaattatatgttctaagaaaagagaattaaatgcataacttaaaaattgatcacaagacaaaaaatagtacctcccattcggcagttgtgagggggatagttggatcaagcattgtggtcacaacatctacaaaaggtactccagcaacagctgccttgaacaaatcaggcctcatgttaagaacagcaccgataagtaaccctcctgcgcttcttccttcgatacacaattgttcttttgagcagtatttttctgctattaaatgctcagcacaagcaatgaaatctgtgaaagtattttttttcttgaacaactttccattctcataccactgcctacccatttcaccacctccacgaatgtgagcaataacaaaaataaatcctcggtctagcaaagacaatcttgcagactggaaactgggatctacacatacctgtttataagaaggttatgaattttgagtagtataaatagcaaaatga

SEQ ID NO: 34091 - DNA, 1307 bp, Cannabis sativa
aaaaaaattgaaaatttcagtatatgtataattatcccaagtaataataagtgatattatcggattgcgtctcctttctttaatttttgtaagggtaatactttgttatcataaattaaagtgtaaagagcggtataagtacttgaaattttaagtttagaaatgacataaatttaatatttatttttagcggcataagtatctaatatttgtaaagctgtaatttttctctaatctcgtcagtgcagacttaattattgtcttaaacatgacataaataagatcgagattctagatcactagatctaaatagaaacatgtagtattaattacttctaatgttttttaaataaattcaaaacagaatttatactgacaaaactggtagaaaattacagttttataaacatttggtgcgtatgtcgctaaaaataaacattgggtttatgctgcttgcaaacttaaaactttaggtacttatgccgctatttatcctaaattaaaagtataagtgatttacaataacaataacagagcatatgggtggaggtataatccccaaccaggagcattattcttcatcaaactctagagtatactgagccaaactgtgtgcatctatattggcactacgtttgatatgagcaatggtaactctaagaaaaaagaataaaagacttgaaatgtctataattaaatcatgaaaatatgaaactaaagtgtgtgacttattcaaagcatttaaaactatcaatgcatccatattaatttgtccaatagacaaatgtaattgaagaatccaatttagactatgatagatggaatttgcctccatctcatgcgattctaagttttcgataatcagttttctatagagcaaccacaacacaactaggaacatttcgaataactgtactaacaccactgatacttcttctagcatttaaagcaccatccacgttcactttatagtatcgaattgcgtcttaaataagtggcgactttattttgagtgactagacttgattataaaattagtgatgaaataactttgatgtaacatttagcatgataaggtcttctttagtgatgtaatttagggcttcttaaagttgttgaatagaaccatgtcactaaagttggatccgagaaactagtcaccaaaaacaagtgatattaggacatctttaatgggatcaacaaaaatggttgtccaaataacctcacgtgacacacttttaaacttttaatcaattataaattttttgggtaaatactattttggactctgtattttacaaaagtta

SEQ ID NO: 34092 - DNA, 3130 bp, Cannabis sativa
  modified_base (1804)..(1809): a, c, t, g, unknown or other
ccctaaataggagtttagttcataaaatccataataacatccataatcaaatctaaaacagaaattaacatagaaattaagaatttaaagaagaactagttggtgattgcattccggatagccacaattgcttcctttgcctccttcttcatctctagggttttatttctacctcccttgcctctaaaatacacaatccttatgtagaaaataatgcagatatctttgaatggtgaaattacaaaactgctcaaaaatctcgtctttcgcccctgtcgcgactacataaagcctagtcgtgaccataggcaaattggaaagtccatgctctctgcctggcctcctagtcgcgaccatggaaaatggtggtcgcgactactgaagcaaatttgacagcttcagtatctttcagtaaaatatgcataactttcacatacaaactccaaatgagttgattcaagatgcgttggaaacaagaaaaaaaaatctaaaacttctatgttttgactttttccaaaatcggatcagaacatagtcaaatttaggcttgaagtttcagttttattttcttgcaaaattttctccattttatagattgttgttttctgaaatttgatcacctgatatattccaagtgtgaaacctgaaaccaaagaaaacaagcgtaattctattccaaatataataataaagaaggaaaacaactataaatttgacccaaaatgtaggctaaaaatagcctaacaactgctaaaacccaaagcatgtaatttttcaaatttaggttaagactaaaatacccttataatcatttaaaaaagatctttttaattgaaaaagaactttttaaggggccattgttatacccaaaattcagctgcacttcagaaattgacacgtgtcctacagcgggaatatgaatcacctaacataataaagtttatatcattaaatgcaaaataaaataactcgttataaaggttaaatagaaagtattcaaaactcactgcctatatagtcttaagctagataaggataaaaactattgaaccaatattgacgagacatacgtctgcctcaaagtacatggtcaaaaagaagaagatattcatccgttcgagtagaataaatataatcacatacaacaacctcagattacatatagcgagatggtcatcttgcaatcttaaatcaaataaagagatatgacgaggcgaatcacctgccaacacttagtattgtttcctcattaagatggacaaggaggacaactcatgatgaagcaagatacaactgtccaaatcagcattaaccatctaaaggataaacataaaaggcagttaagcagttatcaaatattatcccacgtgagataaaatgaaacctgtaagtgtccacgtttcatgaacagttacatttaaatttatcccaaaaaaataaatgccaaccattattcctataaataggggcagatcttacagaaaaaaggatggaaaaattgagagaaaaatacgattattctgatattgtattctatactcaaaaaaataccattaataaaaaggcttgtggagtatgtagattttaactacaaagccacgtaaaaatatctagagataaattatttattattattttctgtaaaatatttattacgtaaaggctcattagttttagttaacgaaaatctgcgttaacaaatactaaattaatactcaaaaaatatatatatcatgctaacaaaattatgtataccattaaaatatatatacatacaaaaaatttatatataatcattatatannnnnnaatagaaactaaatatcatcttaaataaatgatataacatagacaacaaaaatcatataccgtaaagcaaaatatatatacacatacaataaaaaataaaacaaaataatataatattattaaaaaaaaaattgtatataccatattaacaaaattatatacaaccataaaataaatacaatacttataaaattatatatcacctttatttataataaaataaaaaccaaacatgcatgatctaaaataaaatgatatgctatacaataaaatttgtgtaccatataacaaaaaatatataccttataataaaaatatatataataacaacaaataacaataaaaatatataggatgctaataaaattatatgtcatgtcaacaaaagtacaatagaaaataaacttaaatattattttaagaaaataatataccatataacaacaaatacatatatcattcaccaaaatatatatactaacaataataataataaaaatatatattgttaatatatatgtatactatagtaactaaattatataccacaattaaaatatatataccatgacaataaaattatatactactattgtatataataaaatagaaactaagtaaatattattaaaaataaataatatatcatataattaaaatacatgaaaataataattaaatatatgtaacaagccaataaattatatacatttattaaaatatttgtattatgctaacaaaattatataccactattatacacagtaaagtaaaaaataaatatcatctaataaaataataatataccatacaataaaatagaaatatactgtataacacaatttatataccaacaacctacaacaactcataaaaaaattaaaaaatcaacataactttaaaataaaaagattttaacagaactaatatagatatatcatattctttaagtagtttgcttctaattctaaaaaaaatatgaaaatagaattattaattatttatatgataaaagacaatataaataataaatagtgtaaaatgattatttctctacaaattttaaattgaagacatttacttacatagttatgatttagaatcatttggtatattttttctttcttttttttttgttacatttctaggacttgaaaatgcttggatttagataatatttgcataaaaggaaatgaaataaaggacaatgctatttgttatcactacaaaaaattttacttttagtcgcaataaaatttgtgactaaaaatgaaagattgtgactaattatgaattattattcgtatgttgtgactaaaag

SEQ ID NO: 34093 - DNA, 3180 bp, Cannabis sativa
ctcgtatcttgatttctacaacttatcttgatcgactatcaaactcttcactgactccaacaactcatttcgagcatcataaaaagagcgaggctgtgaagagggatgcaagtgctattgaggaattaaagtgaattggaaaaaatacacatcagtaattaaaagttcaaaatttgaagatggaaactccacattcgtagctgaaagttcaaaacttgaagatagaggcttcatatccaatgatagccctacattcgaagatggaggcaccacatgtgtcgcaacacactgttgtttacataaaatcacatcacccactaaaaatgaaaaaaattaatcaattatgtcattttcattatcctcataactaccaaacttttcataaaacaattttgtcttctcctttaaggttggagctaatgtaagtcacacaaaaaaattaatatacgaataaaagaaactaacataaattaccttaatcatatttttataatacaagacaataatttttttttcatgtgaataaatactttaatattattttctaatacttttgataatcttgtaattgtgatacttttatctttatttttaatttttccaaccaaacaatcgaggaatatggtttcctagaattatttctcctaccatttcactaactttagcattgtttcacaaattcatatctataaaagaaaaaatcatatcaaaattataactcaaaatataataaaaaaatatttaaaaaaatttattaccagaaatatccaaggacaactaaagatgtttcacttaatatcaggattactcttcatatctttttttgtgatatgctctataactttcttatatgtcaactttccttcagaataattgtcaaatattggtagattgtccactaattatagccattcaagatctattatcgaaggacttgacagtattagaaatacattgagcaaatagattaagcacaacttcactctatccctaatccttacttctctagatttgttatctagagtactgacaacatcttttattttaatagacatcgtgttcttgaagtattttttctttaacttgttcatagaagaaacaaggtccatttctttaagtgttgggccactattagtatacaatccagatactattgcaaactcttagagagaaaacttcacagattttccaataatcaaaaaccacaactcatacctcttttgacaatttaccctcctcaaaactatctggcttactaatgtgccaaaaaaaaagccctttagtgtcgaggtccaagagacaacccaattgggagtaatatttaaaaatagtatgatcaaactttgtgaagacaattctttatttagcctattacacatagtgggaatttgatggtaactttaaattttaaaactgtattagtagtaattagcacgaggtatacttaaaagttttattgttaatatagttttgggtatctacaataataatgtataaaatggacaaatagatataaacgataagaatataaatataaaaattattaaaagaattacaaatttgactaattgaacagggtcgcacatggaataaaatagactatgcaatcatatgtgacctttaaggtcgtcacacataatttaaaaaagaatcaaaattagactgtgcaaccatgtgcgaccttagtggtcgtttatgatcgtttaaaggaaattcaaattttttaaaattgattaaagaacataaaagaccatgatggtcatagtgtaaattcaagattgtttatgatcgtttagagcaaattaaagttctctaaaatcggtttgagaacataaaaaatcatgatggtcgcatagtgtaaattcaaagtcgtttatgatcgaacagagcacattcaagttttgaagtccataaaaacctgtgatggttgcataaaataaattcaaagttgtttatggtcgttcagagcaaattcaagttttttaaaattggttgaacataaaagatcgtgatgatcgcctagtgtaaatttaagatcatttatcattcagaacaaattcaaggtcttttatctacaaaattaaaaaaaattagaattataatgtaaaagactgtaattaaataaatatgttacttgttcgtgttcattaaatggtggtattgtggttgatgtatcaattgttgattccattataattttaaatgattagttgttagtaaataagagattgtgagaagaaaaatattaatagctacaagtgaaaaagattaaaaaaaagaaagaatgagaaaatatgaggaaattatttaaagtttatcattagtgaaatgattgccaaatttatttatctacagtgccaccacttgcgactatttatgaagaatattgatcttaaagaaaaatgaagaagagaaaaaaaaaagaattattcacttgtaaccgttatgaaaaatggtaaaatagtttatctttttggtcttaccagcaaaaagaacaaagaagggaagaaaaagaatcgttcttctatggttttaatttctattttattttattattttttggtttttgtcttatgaggttttaaaacttgttcaatattaatgaaatttttttaatttaattaagtatcacctatacataataaacaaaatgttattttataaatttcaattcgtgaaaaggtaattttgataaattttttcctaactaataaggattttagaatattaaatgagaaaatagaatgtgcaatgagagtaccttccgcatgaataaaacaacttctacacaggtcgacgatcacatcgacaatcctgtcgaaccagcgtccacacatcttagcgtttcagaaaactactgcacatccacggaggcattgtcggatccttaatctcaagagtcaactacttctctgtaaatatcaagaaccacatcatcaatggcgcaagtgaaccagagagagtgaggaatcatttactgatcctgattggagctgtggacagtgtcgacaatccttttcggctacattctggatagcagcgaagtttccattaggtttgatccacatagatcgcaaatgatttcggttcgatctgcgtcaatgatgacagcttgcgcagcactgaagtcggagacgacattcttggctcgaagaacagcaacatctgacactagcggcg

SEQ ID NO: 34094 - DNA, 2790 bp, Cannabis sativa
cacccaaaccagtgaatctgcactgctgggcattatttccacatattttcagactatctacagcagctctgggattgatactcatgcaattgactctatcttggatgtaattccaacaacaatcgatgatcagtctcgagaagcactttcagcaccttacacggcttctgatgttctcaatgcactaaactcaatgagtgatgataagagccctggatttgatggtatgtctgtcatgtttttcacaaattactggcacattgttggctctcttgttacaaaagcagttctggatgttcttaacaatggtgcggatcctactctcctaaacaagacgatcattacactcattccaaaggttaaaaaacctcaactcattacacagtaccggccaattagtttgtgcactgtcctctacaagttgatttccaagtcgattgtattgagaatccagcctttcttgccattggttatttcagagtatcaaagtgctttcatgtctcaacgattgattactgataatgttctcatagcttttgagttgctacattcacttaagaatcgaaagcgaggaaaacaaggttatgctgccattaagcttgacatgtctaaggcttttgaccgtgttgaatggcactatgttgctcaagttatgttgaaaatggggtttggttcaaccatagtgaatcttattctgcgatgtttgcagtctgtttcttattcttttttactgaatggaaaagtacttggagatctcacccctacacgtggaattcgacaaggtgatccactctcgccatatctttttctattttgtgctgaaggtctttcaaggttactgcaatcagaggagagtaatggatctttacaagggctgtgtgtctcaagaactgctccctcagtttcacatctctttttcgctgatgatagtgtgcttttttgtcgtgcaactcaacaatcagccaactctattcaaaatgtgttacatatttatcatcaggctagtggtcaagcaatcaatccggataaatgtgtgctctctttctctccgaatacaaggccttctcaccaacactatttccaacagcttcttaacatgcctatacaaccttgtcatgaggaatatcttggtcttccctcctttgctggtcgtgataaaactaaactcttcagtgggattacagataagatttggaagctcctcagtaaatggaaagagcaattgttttctgctggtggaaaggaagtacttctgaaagcagtggtgcaagcaatccctacatacgctatgagttgctttcgattgcctgtcactttgtgtaatcaaattgagagcatgatggctaatttctggtggggatccacatcaactggcaatgctattcattggaagaattggaattcactttgtaaagccaaggttcatggaggtttaggctttagaaacttcatccatttcaatcaagctttactagcaaagcaagcttggcgaatattggaatcaccaaactctcttcttggccgtattctgcatcatagatattttttgaatggaagctttcttactgctggtttaggtgcctgtccttcattaacatggcgaagcattgtatggggcaaagaacttcttgctaagggccttcgctggagagtaggcaatggaaatcgaatcatttgcaagactgatccgtggctgcctggtcatactgagttcacaccttttaacttcataggcagagataattcactccaagtagctgatctgatcacccagcatagacaatgggatttaactgctatctcggcaaactttggtcaagctgacatagatagaatactttccatccctcttgccatctatccctcagatgatatgttaatttggaatggcacaaactcgggcaattacatggttaaatctgggtactactttgcctcttccttggctgaacttaatgatcctggaagtactttctcaagtgaaaattggtggactaagttctggaagttgcatttaccttcgaaacttcgtatatttgtctggaaagtatatcacaatgtcctacccgtggctgctgaactaaaccgaaaacatattgcagaatcaccattctgtccattgtgtaaaatgcagagagagtcaataaatcatgccttgtttctctgctctcgagctaaggaggtttggagtctctttcctcatgatttgaattttaaactagctgctaccactacatcagaggagtttctgctatatgtctcagccaatttatctacaccagcgtttgaacagtttctcactctttgttggagcatttggtttgagagaaatgctgaatttcatggaaaactgcccaagcagcctgctgctcttttcatgtttgctactggctacaactcaaagtaccaatctgtgcataattcgcaccaggatgctgctggttcttccaacacaaagtctcaatctgtacaaaattcgcaccagcatactgctggttcttcagttgctgaccaaactccatcatttgtctcaacaaatgcaccctctcctactctttggattgcacctcctttgggcaaatggaagctcaatactgatgcagcctgcaatagatctcaaaattaattggtataggtgctgtattgagggattccaatggctatatcaaagctgctttctccaaatcgattatcgggtgtttcaaacctgaagagatggaagctactgctatggctttatctctgcaatggctcatcaacctcggtttaactgctgacttcattgaaact

SEQ ID NO: 34095 - DNA, 1063 bp, Cannabis sativa
  modified_base (29)..(48): a, c, t, g, unknown or other
gtaaggttttcttaaatccttatgtgttnnnnnnnnnnnnnnnnnnnnttcatatttaggatgttaatcgacatactttttagtaaatctagatcctggtaaaatattcccaacagcaacaaggtaccaaaaccactcgataacacagcactaggtctattcaaatttccaattactctacttgaaatataggaatgtgtcacactggaatcaaacaacagtcgaaaaaagtaccaccaatagaaagctgacctatcacagtggaaaggccagcatcggcctctgcctgggtcaaggcaaatacccgagtaggaacaagtgtatcatccttcttttattccgatcgcagtagctgtgggcaatttcttttcatatggcctactaccccacactgaaagcaggccctagcttgacactcgccctgatgacatctcttacaccttggacattctggataggtctgccaattctcgtttccaccacgacggagaccttggttactttgaaacctcttatttggtcctatagccaacggatcattgggccttttcttatggtcattaggtcagcatccttacccgaactagcactagacgtctgcttccatgaatctcttcttgcacaatttcttttctagatctaatcttctacaccctcagcagcaagggccaactcaaccacctaagcataggtttgaacaaacctaggttgtttggcagcaacaatcacatctctagcaatgtgttcttctgatccccggatgaatttagctttcctagcagcctcagtggccacttcatctgaggcaaactttgccagtcgatcaaacttggtggcatactctgtcaccgtcatattacccaggatcaatcgtataaattcttctgcctttgcagctcggatggatttgttgtagtatttctcgtaaaatagggtacgaaaagcatcccaagtcatgttattcaagtcacgaccctgtgatacaatttcaccaccctcgaacactagcggatttcactttctgaactgctcgtactgcggctccagacgatttcttgcatta

SEQ ID NO: 34096 - DNA, 1314 bp, Cannabis sativa
  modified_base (47)..(63): a, c, t, g, unknown or other
aatgttatttctgatctatattaacaagtaaatctgattatattgannnnnnnnnnnnnnnnngcataaaacccaacagtacatccctaggctatacccacgggactagaggaaatacaagaagaatcatcgccaagcactcagaggcccaagactagggaaccaagccctatatggtaccctttcgaggagaaccctgagaaaaatcccacttcgatccctgggagaaacaggaaggcacatgatcctcgaaaagtctgctctgatttcccaaaagagaaaggttcgcaaaggggcaagctcccttagaggatcgagaggactgaaaaagcgtatccgtgcatcaagaactcgaggaaagagggagaaaactcagaggtatcccctgattgatctaagaaaatcaacgagaagcatggtgacttaagaaacaatcttgaaaagaaaaaacatgcgttgctagtctccgaaggccccttgaacgaaagaatcttggctgaattggcaatactacgtaaagacatcgctagagtctcccggagacaaaaatgggatgattctgactctgattgcgaggaccgagaaccatgcgcccgacacatactagaagtgtaacacctcaaaaattttaagatgcccgaaatggcaacttacacgggagattcggaccctagtgaccatctgtcccggtttaacagagagatgaccgtcatgagggtcagcaatgacgcaaaatgtttatgctttacactaacattgggcgattctgctgaggaatggttcaaaaagttggagccaggatcagtggactactgaaacaagttacaagttagtttctggaggcagtttgtcgcggcgaggaagatcaacctcgaggtcagcgccctgactaacataaaacaactgccaatggtaaagaaagaacaacttccttcatataaaaaaagattcaaagaggaggcttcaaagaccaagaaggtggatgacggacaacagttggtccttcttcaggctggaatccgcatgggacccctttttggaacgagctgtagcaagagggagcagctaacctccaagactttcagaagagggtccaaaaatacattaacttggaagaagcccaaaaagtggcttacggaggatactactcgattgggatgtcaggctatgtacctggatctcaacttcagggagccccatatcttgccactcctcaaacgagcgggatacaattctccaccaccctagcctacaatcaaagtctcactttagctccctcattgtcacactttggggcacccatgagcaatccct

SEQ ID NO: 34097 - DNA, 1614 bp, Cannabis sativa
tggggtaattcccctaaaaaaatagtaattaatataaaaaaaaaattatttatacatattaatttctaaaaatagattttattaaatatttaaattaaaaattaattattttaagaaaataattaattttattctaaatttttttttacctattagtaacctgctattacatgtcaaaacaaatgtaactattagttacaataaaaatataatcattgagtagttacccatatatatatatataggtatgctctaaatgagtattacccataaatgagtattttattattggccattagattaaatctaatgattcacattaatagtattaattgatattttaaaaaactcaaatttattttttaaaactagtggtagggttacttgatgacatggaggtaatttattatttgaaaattcttttcttattcctatctcattacctctttattctaattaattcattttttcccaatttaatatatatatttttggtatcttctttgataaaaaaaaatctttaagatgatagtacaaaaaaaaaacagaaaaatcttcaattaatatgagaatttttaattttgattacaaattgtattttttttttcacgtacctttgatatattcttacattcttttaaatacattatttatccaccgctatctatactattcaaatgcagaagcagcagaacttggctaaacactaatgagcagccaacctaaatatacaaactccatcgtttgtttcatgtgaaggatgaatgtttaaataagtaatatataattctaataggtatatcaacctagcaagtaaagttaatggattatagaaatagtatcaatatcatcactagtaccttcctcgtaatagttcctaataagcctatagaataaacaataaaaacaaaggaatcaattacatgattcatgtctcaatggagtacttcttggtttaatgtactatatataactgaatgtaggcaaataagaacttaaattctttattagaagaagaaataataaaataaaaacaaagccttactaacttacaattgttctaacttgtttaaatttcctagttttggaggactagtagaattgttcaaagagaaagtcttatatacaaaattctccaaaattaattaatgtcaaaaaacgaagagaatgaggtgattgaatttttcaatgaaaaattcataaagtttaacataaataaaaaaagaacacatatttatgagaaagatagtacaaagctcttattgcatccataaccaacaatagaattatatgagaaagttcattagatatattgattgttgtggtcatcactgtatgacaacaaattacaatgtaaaagttagtgggaaaaaactttcaagtaatataaattctgagagagatagagaaagagactcaaagaaagttagagtgggctaatatgcatgctaatattatgaagttcaatatacatatacacgtgacttttagctttagagtgaaaagtcatcacttcactttgacaatctagtaatctaatgaatgtggattgttaatatatagataatgaagtaattttaattaattgccaggtaaggcagctgccttacctta

SEQ ID NO: 34098 - DNA, 2465 bp, Cannabis sativa
tagttcccagcatagcagcgttgcatctggttccggtgttggaggagcatcaaatgaacaaccccatgttgaccttgcctttgatccagtagcacaaccactgggtgctgccaatgtctactccgcaccagatcccatagcacaaccgtcgggtgctgccaatgtctactctccatcaccaccgcattttcgagaggaaattgctccagcagcagcactgccacctagtggtggtagttcagaagaggtaatcttaatgttattttacgaattattctaatgcaaaattataaatatggccaacttacaaattgagttgttgcttgtttgttttggatttacagaccttaccatgttggatgcactctctgttggagcctagtgggatggtactgaaggttgcttcgggccacattctcaaggaaaaatatttgaaagacggaaagtttttcattgacatggatgaatacctacacaaagattatcgtcgggtatatatcgaagaagccaatatggagaatgcactgctcccgtgtcccatagccgacgattcattgacgacagtaggtcaagctgtaaattgttatgtagcatggccaaaagactatcttacacctgttcgaaaacatttggtatgtttcaatttgtttacttaacttattgtgtttattcattaatgacattgctaactttattgtttctttttcatatatatatagacacaaccacccaccaagaaacttcaaaagcaacccgtgaagagaatcacaaaagcctttgaagatttacttggtcctccaacacaacctctaaaacaccctgagaggccgagtaaggcaaaagttcatggtcgttatgtccaaccacaccaaacttcctccatcattgccttttggaacttcgttagaaggtggtccaattcatccataatccaattccaagttgataatgagctatttggggtcgcagatgactctatttggcttgctaagagtgacaatcagaaattgtgcaccatgcaatacttgggagcccaacaataaggagtttggtgcaagtatcatttctaactcttaaaaataaacttgataatgttcttttgaaagcaacgattattaattatgactttttatcaggtacatgaaagaatgactgttggacattggtggcctgaatcgagtatatgaatttttgaatccaggtgcgattgccactgattcaggggctgatagtaatcgttgccaagcactagtcactcgaatgacttggatgactaactcagacaatggcttattgccccatataataataggtatatgtagatgtaaatgttgtacattatgttgcatgtgaaaatgttgttgaaatcaagaaattaaaagttgaaattgagaggctaaaggcacaaagaaatacacaaacaaaagagcttcaaatgttagacaatgcatatagagatgaagagagacatgaagaccaagaaccgaccgaaaattatgacgactaagaaccaatcgacaattatgaggatcaagaatcggtcggaaattatgaagaccaagaaccaaccgacaattatgaggaccaagagccaaccgaaaattatgaagaccaagaaccaaccgatcgacaattataaagaccaagaaccaactgaaaattatgaataccaagaacaacctgagcatgatgaagaccaaggacaaccaatggactatgaagatgaaggtcaatgtgtaaaattatgttcggataatgacaatgtcatggctgagggtgtcatgattgaaccggttgatatcttttcatatcatggtatcgtgatttcaaataattatgcacgggtttaaatcacaaaaattattcaagaagttgaaatcccataggtgttatacgctatgtttattggcctaagaaattgattttgatcgaagaggtatgcaataatttatttgtatttacattaatgttttatcataaattgttcaaggtacaacattgctccctcccccttattattaagttcttatgctggtagcacatcatagaagttctttgaataaactgatgagccttcgaaattttgttgatttccgcattcacctttctacttgtttcctgtgtttcaaatattacgacaaacttttcatgaatttgaagaattgcttattttattattttctttagtagaaattctattatcatcttcttcttcttttttttttttttaaagaaaaatggaaattttcattaaatgaaaattctattatcatttttatgtatcaaactattctcaaatgatagttttataaggtttttttacaattaattatattttcatttttattaggtacaacgagcaatccaataaatcatctcaacaaatttcgacactctcttggtaagaatttattagagttccggtgcatatacatttttagttcatgtggccttctcttgtacac

SEQ ID NO: 34099 - DNA, 3287 bp, Cannabis sativa
actcccttagcctggcccgacctcgatttcttcttcttctccttcacggacttgggtataaaatctgccgagtaaagctagtacttcacaaagttggcctatgtggtcaataaagtgatattccgagcagcctctggcagttggagaattttttgggccctttccctaagcctcagtgtgaagggaggatggcagtatgcggtgatctgctaaaatcgagtatgagcagtctccatgtcggtcacgaagtaataatcattaacaaaatgccctaatttgctaacctctgtgtccacggtgcctgtcagccacttgtcatctggctaagagaagtagaagtaccccgacctactctgcttgggggtagacttcgaatcaaagagccagttgatatcatgcaaagacggctcagcccatccttgaatagcgtagaggatgagcagggcgaataagtacttgatgcccttgggtgtgaactgagttggacaaagatgttagtagtccgcaacccttttgaagtacaggtgcaaaggcagcatcgccacttgttttgtgtggacacccgaccaggcacaatacccttctttcgggctagttgcccaatgatttggtgtaggaagaaagcactcaagtctgcccagatacccagccttctccaaagtttttaggtggtcctcatttacgatggacggaagacacacccatctagccctcatggcaccttgcctcctatgaaggaccacctcggcatactcttaggtgacatagtcttcccccttgaccaagacatcaccaagttcggataccggctccccagactcattgtatcctccaaaacgtagaagtcgagccactccttcctccttagcctaagaggggctatcaggacggtcgccgttgtagtcctctatctcctggacctcaacatccccctcgtagtcctcctcctctgcagcagacaagtcctgttctacactcggcatcgtggcatgtcgggccacgtgagggttagttgcattaattttctgcatcgtctgttttgtataggccatcatcctcctcttggatgggtattggtgtgtgtgtcgtgcaacagtcatggcaggagcaacaatcagaatgccgaaggcaccagaacttggacggcctataggaatagtgtaagggacaccaagccggacgatatagatctagttggaggggagataatgtctccacccttttctaagctcccaaacaaattgccctaaccttctcctgcgatctgctcggagtaaaagttatgttgcacttcgggttctggagtaggtaaactttcactattcacctcccaatcttcaaaacttgagttagaaagttcgtcactcgaagaggacagactggcgcgaagatgaggttggtcttcgtataaaagcaagagaagatcttggtcgatatagtttttgcctccccaaaactcaccaaggttcatctataaaagacaatacacgagatgagtatttggctgggatatcgaatagaaacaagaaaatataccgaccaggttgactcgattgatcaaaaagacaaaaaattttgtaaaggttaagttcgtaatccaaaacttcaaaaaatttgaattaaaggttaaccttcactaaacctcgaatgggcaaagtgaagacagaacattgtgaggttaaagttggaatgtcataaacaacgaagtcatatgatctattacagttaaaattataaagtctcaagcctagattttctatatgtttcctaaaacaagtcgagaacgattaaattttctacaatggatacccaaaaaattgaagatacaaaattaaaggagacaaatatgagaaacttactcactgttcgaagctttgatgttgtttggatgaagctgattggatctttctactagaattcaatgatagattcaagagaaaaaactacttttgctctgaaattacttagcaagaaaaatagtaaaagtggtttatgaggattttctaccctatttacaggaaaatcagtgaaagggtgtaattaattaaaatctcaaacgcttcaatttctccccaaaaagtaaatattgggaaattaaaaataatcaagtactggagaagattaactgtcaaaagcgtgcgagtgaaaggcgcgtctcgaggtacaatttgatcagagcattaattagcccaaaaactgaagggactcctagtccaagtcacatcgaatcacgaacaggcgcattcaccacgtgtcacccattaagatgtaaggttggctcgagtgaagtctacacgtaacttcagaagtcctgtacagacttgggggcaaatgttatccaatttttcgcactatgacgtggcagcacatgctggtgacatgtggacctgattccccatatctggctgaagagatgttccgaacagagcacagcatacacatgcagggataatgccttcccagccgatcagtggacaatcttagcagcgcatcaacacttagaaattttagaacttgcatcgtgaagtataaaagcaatccctataaatctgggatcgtatcagagagatatggcaagctgtccaaatcccacaatctgtatattttgaatatgtaatatatgttcttaccaactatagacattgtaagcaaaaggtaaaccttccctcaagcatttagccttataaaaattgatccattctcactggtaaaggggtcgaaagaattactttagagaaatataagatagcatactcagagattttattgtgatagcttcaagagaggaaacattgtgttctttgttcttgagttaatacaaatcttggggagtaggctattaccgaactgaacggggccgaacctctttaaaaactttgtgttctttattatttattcgctcatactatacgttaatcatatttcttatcgcttattatttgactcattgtcgttggctagtagcgaggtcaacaaaaataaatattattttcagtaaaataacatatttctatctttaatattatttaagaataaaattatgtttaactaattataatagttttattaaatagaactaaatagtaattaccactttaattatacaattcataattaatataattattcaaaatgatattctccacaaaatcactatttttcccttaaaaattattgctcatagaaattaattctttctcaaattcattaatcaaattaaaccttcgcctatacagtgttgtatagaggtgacctagtagccatggacctatattttgaagctccaa

SEQ ID NO: 34100 - DNA, 1289 bp, Cannabis sativa
ttcaacaaaaggtgacatacaataaaagatctcaacttgttgggaaaggagcaatacgctactctacttattcaggagccttagcacgaaatggatgggttcctattgatcttccaaattggcacaatgctaatgaagttaagttagacatgatatggaaagaaatgaaagtaagcattattcatatatataattttttttttaaatatatgaaagagctctttcattgttttttgattgtttaaataatatctacttcaatattttacttttggaaggctacctttgacttagatgattgtgtgcgacaccaaacattatcaaatattggtaacaattgcaagggtttaagtctaggttgactaataacttcataatgaagtacatgaacgatcctatttatagggcaaagaatcctcacacattgatgtatccacctgctatatatcctggcattactcaaccagtttggcacaattttgtggcgagtcgaactacaccagaatttcaagtgagacttcacaataatgatattatgatgtaaatacaatatagtttttttttttttgagaaggaaacaactaacatgtctactattttttttcaggaacttagaaagttacaacaagctagacgtgctgaaaatgataaccctcatcgcctggggcgtaaaggttaccctaatttagaatatgagcttgtgagttcaccaaaaactatattatactgaactttttttattaactgtcatattaagcttttcaataaatgaatagtactaacattattaaggtgtaaatagcaacaacaacgtaacactgaggaggaaatagaaagagctgtattatggaaggaagcccggaaggataaaaaaggagagtatgccaaagaatctgataaagaaatagctagcacaatagtaagtttttaacaattatcctgcttgaagagatattacgactcgttaaaatataatttcatcttttacttttattattgcaggactccttattagaaaagcgaaaacaaggggaggttgttgaaatcggtacaaatgatatacttagtcaagctttagggactcctaaatcctatgggcgtgtacgagctagaggacgtaatgttggatttagagattgttttccaaagtcaaaaggtggtgtacgatcacttcatgaaagacaaataatttatgaaaatgagacacggcgaaaatatgaaatagaaattgaaagtttgaagaagcgcacaaatgacattgaaaacaattttaaggcagtgatgaaggc

SEQ ID NO: 34101 - DNA, 1760 bp, Cannabis sativa
  modified_base (1697)..(1705): a, c, t, g, unknown or other
cactactacaaaattgggatttagtgacactatttagtgactcgcacaaaactgcgtgtcactaaatggttaggggtgagctttagtgacatgcacataaagaccctaaaaattcaacgttagtgtcccataatttgcgtcactaaaaatatgaggtgtcactaaaaaataattccaatattttctattattttttattaaaaaaaaaatattgacttatagtgacacgctaagcgtgactgcatacatatgccctgacacacctggcgcgtcactatatcacaaacattaaattaattttaaaataataaaacaagggggcacaatacttcaaaaaaaaaaaactaattttaaataataaatgtttttatttagaaataaaattcaataaagagagtcaacactaaacatttaaatcggctctctaatcaataaattgaatgtaattaatttatttccctagaaaaaagagaatataattaatttatacaatatattatataaaaaaaagtagaaaaccctaatttctctattcacatattatttcagccgcttcaaagaaaacctctctctcttaaaaaaaaagcttctattcactgggatttccttctctcttggcctgttatttccttctctcttcgtcggatttccttcatctcactgtgacggcgatgacctccaagggaaacgcctgagacacgaccatggacgactcccactgctccaccgccggcttctacgctgcccaaacgcccacggtcttccccgtatctttctcgatctatctccgatctgtgtaggtggaccagctccgactatgaactacttgcccagccgccgctttttgtacattggcgaaggttatcgactctcttctctacatttcctctcttcagatttctttattttttgcagatccacgatgatggttgctgttcgagatgagtgattgtgggtgtttgtagttgacgacggttagcggtcaacaccgattaggacgctcattgccgggattgaaaatgagctagaatatttaggttttgataattttttctgattttttgtcatatttattttgagtttatattatatatttaggtttgtatatattttttattattggtattgggtgtttttctatgagaagatcagtacattgtaaattagttgtaatattttttatttcatttagtaaattaacctattttatttaactgtcagtgaatgattttatttattattaatatgatagtatttatattgcctaaaacaatcatttatattctataaaaaaaatctaaatgaatttgtatattattatatccaataatattaataattgtatcttttaaattatataaatggaatgttaaaaaaattagaaaaataattaaaaaaataaaataaaaatagatttagtgaaactttgggagagtgggtattatctttagagtctgacaatttgggactctaaaagtctacagtgacgcgctttgagaatctctaatacgttttagtgacacgtgttgagtgtcactaaataatacatttgcagccacccacattagtgacatgcaatggagtgtcactaaaaatatttagagtctcttgaggcgcgtaactgaaacacatttttgtagtagtgaagaaataagactattagttaagaaatgttggaacggtgccacaaatgtatnnnnnnnnncttagactgaataagtaccttttttgcttctttaacattgagtctctctctggta

SEQ ID NO: 34102 - DNA, 2988 bp, Cannabis sativa
agtgccacgaacgtcttaaagagagcgacctagtccgcgactcaacccagattctatttcggtaacttcgttccttttattttctgcagcaactagtttctaacaagaacaaatgatttccttgaatgaaggtctgataacggaggcggagaccctgtgaatcacggggtttcgaggggaacatgtaaatcacatttatatgtaaaatatttgtaattagtgtatttttaaattttgttttaaataaaatatttgtaattagtatatttttaaattttgttttaaatcaagatatttgtaattaatatatttttaaattttgttttaaatcaagttatttgtataacattttattagttatttttaaatcaagatatttgtaattagtatattattaatttttgttttaaattttaaaatattttttatggcatttttatccttataaaatttataattttcatattatttttaaatatttttattttatcccactaaaatttatacttttctcaattaaaattacattcccatatgatccattctcacttaataattgtgagggtctaacgaattaataatattattttacctaataacaaaataggaatccaccaaataataacatcaaaatttattccaagtataattatatataccaatcaatcactcattgaagtctattagaaactctttgctcgatgttaaaaagtaccattttttttaaaaaaaaaaaatcaaaccctagttatttaaaaaaaaaaaacaaaacaaaatccaggtctgttctcaaaattggtaactaatgacaaactaattatatgttagaggtcactctgatcaagagatccacctgaaaaatatatacatagaagttttcaataacaatcatactaaagaagacagaagtaataatttaacaaatacctgaactttgtagtattaataatagtaatcactgagattaccatgtatttgtagagagacaaaaaagaaaaagaagaatatataaagactcacgtaaaagaaaaattaattaaaatataatgaaatggaagtgagaagtagatctggcttaattttattgggccacaagggaactaattaagcctaaagtttcacattaataaaagaaacagaaattatagaggtacataaaaaaaatttgattaacaattaattaattataaaacaaaatatgtactgaatcaatacgtacatatatactctcgcttaatttgtttgatgaagaaattgctaggttgatgataaaagaaaagagtgatatcagaaagagagagagataggtaccgtacagctaggttaattttaaaatgttgttcaatttatatatgatatatggttattatttatttatttattttttttaaaaagtaaaaatcatgatatatcaatattttttctaatcaagatatttgtaattagtatatttttaaattttgttttaaattttaaaatatttttttatggcattttaaatgttttttttaaagtacattttttttcaaatattttgaagtacattttaaatgtcattaataacaaaataacattataaataaatttttcataaccgactaaattatattttgattatttacatttttctgtacataatttttaatatttcacattttgagctcaaaaaataacattttttatttctatttttatttttgtccccatcaaatttatatttttcatttttatccttataaaatttataattctcatattatttttaaatattttttattttatcccactaaaatttatacttttctcaattaaaattacatttttcaatattagtattctaatttttttttgcccccactaaaatatgtgactggctctaccattaccactatatatacttgtaatgtacttattattgactatatattattatttaaggagaatttagttgtgaaaatattgttggcataacatacataacataattaatagtgaggaagattaattacctcattgaagaagcaataacagtagacaaaagctaaaaaaatgacatataaattctggtacataatatatgtgcgagttgtatccaattaaactacattatacctcctccaataccttttggaaaaactcgtatgcactaacgaaagaaggctttgcctcatcgagattaggcgtcatgaaagtataagatattagcatttcctagtgaccacatagcctcatgcttcaaagggtcaatgagtaaagcctcctcaaacttcaaaattgcatctataatatgattgagattaaaattcaaatagtccctgcttgaataccattaccacctatcaaatggtagtatagtacttttgatatataacataaacaacagttatatttttttaattctcttcacatttagacctaaggcaaatctatttgaacttttttggtagaaagactctaaacatgtcatatattgaaataaaaaaacgattatatttcaagtaatgattcatctctatatatacacaatttgtaactaagacccttttcctcatttttcttcttatgatcacacagtggttaattaatgaggtaaaataaaagggaaaatgcctcctcaatgcaaagaaagaccacacctatcaaactcaatcaatttttactatatatatatatatacacaaatttaatagtgaggaagattaattacctcattgatgaacttcggtaatattgatatctttcaatatagtatcggagtcaccctggtgatttgcctcacttgttgattatatatttattaactctcttattattttcactgtttgtatagtcggttaggcttagttaatttgttaggcttagtcagtttatttagttattactgttgctactttcgtggcttatgtcggtttattactgtgtatatatacttcccatctgtatcttctcaattcaattaatgaatacttccatttcatttccgcatta

SEQ ID NO: 34103 - DNA, 1297 bp, Cannabis sativa
cgcaacgtgacatgtcgagtgctaggcaccactggtgcctaatagcaatgctcttaataaaatacgtgctctcactttatacttgtgccattacaaaagtttggttattaattaagtcaagccaaaccgagacaaaagcacaactaaccaaaatttaaatcgtacaatgagatacttatactctaagctatgtcattaactactaatttaatttttaaaaaaatgtgattaagataatttttttttaaaaaaaatatatagttattgaagtagcaaatgagacaaggatttttatagaagtttggccctcttagagataatactatactattaagatgatcactatagctgagatctgatatagctctctataaggatacaaaacatggatcaagtagaaagatctctaatgagagagatgaaaagccttagaggcacgtgagagatgaagtgagaagagagagagccctattgggcatgtacaagagagagagagagagagagagaataagttttcggacttagagtgatttggaggttaggttaaggtttagtaacttaggttttctaagctagagttaaggcctttatataggaagcctaaaaacctaatttacaaagaaacccttagatatttacacattaaattaattaaatataaaagactaaattgcccctcaaaagtagatattttccatcagtttgttgggttgttaagcgcctgatttgcaggtagcttgttgtttacgttttaggtacatagagtcctgccgggttgatcgcttggccgcccatagacctacaggggaggtctggtcggccatggtcctgcgaagtcaattctggccagccatggtccagccatgacctggtaggtcatgtgcctgccacgatcctgcaggttactatgaatttaccaagaggagactagtctttggatgtagaggccagccttttgcaagtggagaataactttgtacactgttctcttgtagaggccaggttcccttggtcgaacaaaagttcccatggcccggaagtcacctttttggcaggccaacttgtgctcagatcttggccgacctatatgttcaccctagccggcctataggctcctcttggccggccagtcatgttgctacaaccccttctttcagttgctgtttgataattttgccataccttgtatggagagcctgtcttactactgggaatgatgtattccacctgtactctgtctttggcttacgtggatatgccacattaggttgacaaaatttaggttaacattagccct

SEQ ID NO: 34104 - DNA, 2060 bp, Cannabis sativa
agcttatcatagcaggttcatggcggataaggccattttttaacaccggcgcttatttttcaccggcgttattactcgccggtaaaaggaggttttaccagcgcagttactatacgcgccggtaaaaagtcctttaccgaccaagcttcccagataatctttgccggcgcacaactgcgccggcaaaagctggttttcttgtagtgtatattgtactgcggtcaaataggttgaatataatatgcatgttaaatcagtttgaatatcttaaatattcatttgtagtgaagtaattaaattttgtgaatacttatactgcggtcggatgggtggtaaatttttgtatttttaaatattattgtgattgttttatattatttgagattgttttttgttgttattaatagctttaaattttttgagaacgttcaattatagttgttatatgctgctgaaattttggtaaaattaagtttagttactagttagtaatttagtatactatacttagttactagttattaattttctaagtctcgaggcgtttgacgcataagccacacaaattagttactagttatgaatacaatatgacataaaattcaaacataccaaagatgtatcataaaacttaaactaaagtaaagataattatgtttctagaactagaaccctaaattctattatcttagaacacacttgactcataaaattcaaattaaaatattaatggaaaatgcaatgatgattagaaatcatctaagtcatcatcgtcacttgttttatcttattttagatcattttttattgttattaataaatttaaatttttttagaaatattccattatagtcattatgttatcaaaattttagtagaattaggataaaattatttgatataagtttctcttaaacttggttgttagaattttctgttaatttttgttatggataaatcatgcatgtgaaggatgtatgcttggaaagcaatcccgaaggagttttccaaaagagtcacaatcaagagccacaaagccacttgagctggtacacactgatgtttgtggtccaattaaattaaccaaactcatttggtaaaagtaaatacttcctcctctttattgatgattttcaagaaaggtatgggcttatttcttgaaggagaaatcagaagtgttcgagaacttcaagaaattcaaaggtctagttgaaaaagaaagtggtcttcctattaaggccatgaaatctgagatctgaccgaggagaaaagttcacatcaaatgagttcaacaaatactgtgaggatcatggaattcgtcgtccattaacagtgacaagatcccccccaacaaaatggagtgccagagaggaagaatcgaaccatactcaacatggctcgcagcatgctaaaaagcaaaagaatgccaaaggagttttgggctaaagagatagcttgtgcaatctacttggtgaatcgctctccaacaagaagtgtacatgagaagacacctcaagaagcatgaagtgaaagaaaacctggaatttctcatctcagagtctttggaagtattacttatgttcatgttcccgatcagaagagaacgaagcttgatgacaaaagtgagaagtacatcttcatcggctatgacttaagatccaaaggctacaagttgtgtgtggttattacctttttagtctggaaaaacctgacactatatccctacagtgacacgcaaaaaatgagtgtaataagtttcagtgacacgtgtggagtgtcactaaaaactgcctttccagtcagcctcattagtgacacgggttgaagtgtcactaaaagatttcagtgacacgtgtggagtgtcactaaaacccaattttctagtagtgaacgaaagttatgagagttgtttgaatatatcagaagcaacattacatgaatacatagaagagactgagcctagaattgaagctaaagaatcctttgaagtggctaaaaatttgggtacattggatgcttgctcaacaaatgatgatctcaatttggtgaatgaagaaaca

SEQ ID NO: 34105 - DNA, 1697 bp, Cannabis sativa
aaaaaaaaaaaaaacaaataactcagaccctaatctctctcagctcaccctctcactcggtctcaccctctcacttggtctctcactctctcacgcagctctcaactcaccctctcactcggtctcaccttctcacttagtctctcactctctcacgcagtctcagctcaccctctcactcgatccctctctatctgtggtggacagtgaacaaacgaaccacatcccaatccctaaaaaattattcaactattataatgggtaaattgtgttttaactatttttaggcagattgcttgttaaactttggttgttcataactttccaatcaaaactccgttcgggatgttccatatatcgttggaaagctcattccgagctctgtttatttgtgtaaatttgaaatactagttatatgattatgtgaaaatagatttagggattaatcctatttgtgaatctcgagaaattaatgtgactaggattaccagtacttgttcaggagcacccgaggatttagaatctccacgtatttaggacatcaggtaagacagtagttagcgcgtagagttaagcacggtggtgctcatgtttgatattataatggtgattaaatgagaacagggattagggttattaccctaaagtgagcggttatatggcctagggttattaccctagtgattaaatgattttgaatacaataccatgctatatatgttgaagtaaagaattatgtgctcaagtcataattaggttagactcggtaattaaaaatgacataaaccgttctaaggccttattgtaaatagacgtgtgagcgtaacaagtgagtctatgccacatagacataaataggcgtgtgagcgtaacacgcaggtctatgtcaagtagacaatgagtgcagtggcatcattagttatgagatatttgtttattgtgtatattgatatttatactgtcttgttgggcttggctcacgggtgctctactatgcagaaaagagtaaatctgtctgtaatcaaccatgagttctagggcttggcggtagattgtacatgttcgggccatactagaccaagcgggttgggtctactagtggatatactttgtaatcacaaattttgccgcttaggtacgtgtaaaataacttgtaatattttagaaaagttttatgggatcccgaatcatgttgtcttgttggattggttgtaaagtttaaattattacatgttatgtttttattccattgtaatcaaagtcttaaatttcccgctcttattttttagtaattccggtttagcaggattagattatattactggttgtcgtaacatgcctatttcttaggacgttacagttgtcgttgcatacgatgcaaacaaccaactatttctgattgcgtttggtatcgttgaaagtgagaacaacaactattggacctatttcttacaaaaattgagggaagcaatataggtggtcgagaacttagtatttgtgtcggatatgcatcaaagcattgaccatgccatagagcttgtgttccccaaagtagtctactgtacatgttatcaccacattattatgaatgtgaattacaagttgaagactgatgcttttcacacgcagatatggaaagtagcttacttgtggtctaagactgattgtgatagacagtttgagaagcttagacagat

SEQ ID NO: 34106 - DNA, 1768 bp, Cannabis sativa
aacttgctagcagcggcactccaaggcggagagagatcgggcaaggccaactcggtaaccaacgttgtagacggtaaaggagatttctctcgagcgggcgaaacatgagtcatacacccgagccaactgacttgaccctcatgcaacagtgaagtgagttgggtaaaagaaatctgtgtcgcagaccaagtgggatttccatcgagtttcactgtttgtcccttccattgaaattccatcgtcaaggcacggtggtcatgaatacacggccccagcgtttgcaaccattgcataccgaggacaacatcaagtccccaaatcggaaggacgtagagatcaacgctgaacgagtgtccctgcaaaataagttccactgcacggcatatcttagaacaagtcaaaaattgcccgttacccatgtaaaccttgaaggtgcgagtggtttcgtaaggcagctgtaaggaatcagcgagggactcttggatgaaattgttgttactgccagtatcgattaacacctcgagagacttggagccatgctgagcacgcaagcgaaagatgtgcgggttcgctgaattagacagtgcgtggaggctaacttcctcatccagttcgtcatccgcggtaggtaaatcagcaacatgggtttcgtcctcaccttcatgaccacacaacaacaagacccgattcttacacttatgcccaggatgaaatttctcatcacaggaaaagcacagtcccttatcacggcgatctttcagttccagcggagagagacgcttgacaggtaggtgttgatacgaactaggaggttgaaccgaaggagccccactaggatgagaaagtgcgctcggagtagcagaccgagaacttcccacagaatcgacccctgaaaaacgacgacccaccgagcccaatggcaccgaagcagaacgaaaacgacccgtcaactcctcatggcgatcctcaaacagctgggccttggacatagcatccgctaaatcagtcggagccaccagcaacaattccctgcgtatgggcagctttaatccccaaataaaaaaattaaggaacatagtatcgggcacaccagaaatttgggtcatgagttcttcaaacgcagtgcggtattgatcgatcgtccccgtttgggtcagcttggcaatacgacccaatggatcctcatacaccgaagtgccataacgtttccgtagctccgccaaaaaaacggaccaagaagtgagcaaaccaccacgctccatccattgatacccggtggccggaccaccctccaaatggaacgccaccaccgtgaggcgcaattcagaatcgatccgatgcagatcaaagaacttcgagatcttataaatccaggtttccacattcgaaccatcaaaccggggaactttgacacgaagagtcttcaaaagggattccaagtccttcggagaagacgcagacccaggacgccgaccactagccgaatgttgatcaccttcaagaagagggggcgaacccataactttcgacccagagagaggttgttgagaagcagaaaagaactgaccaaaatttcctccgtggctgtacgatgctggtccagtaaggaagtgaaggtctccagctgagtatcggcatggagcttgaaattggcctccatagccttcaacaaatcagccaattcatcattcttcattgtgagagatgaaagcaccagtaatagaaaagagtactcttagagacagtaccaatctcccaatctcagcta

SEQ ID NO: 34107 - DNA, 1062 bp, Cannabis sativa
ccgtattttttccgtttaagatttacatgcttagaattcttcgattcaaaacttcgaggcacaccatttctcatttaatgctctgactgttcctttcttgtaaaattcccatccgttagattagatttatcttgatcgaacggtggcgaccttttaggtataaatttgaaatcgtgccttatttttgcaattttaagccttcaaacctttgatcttttcatcaaaatctcaatcactctctctttcaaatttgcatgccctctttgtcttttatatttttcctgcgagttttttttattgcattctccctaacaatcatcaagacccaacttttcgatcttcagaatttcaatcatgaagttcatcttgcccagaatttttcatcagaacagtaaacaaaattcttttcttctgatttttcctctgtgctttcaattctaatttttttagtaagcgtttttcttgtctgcattatcttgctatttgggtattttgattttgagtatttgaataattctaaggctaaaaaatttaaggttatacgattcgtagatttttaaattttatttgtgtctgttttttcagaaatcatgatattgttagttataatcatgtctcaatttatcccagaaatcacaatccctgaatccttagaaatagtttgtcctcaaatttctgccataaaatttagacccaaaactcttagagcccaaaccattcttaaaataaataatgaaaaaattagggattacctcgttaagtctagtcaagatgaaacttctagccgttataggcgattcttacaagagataattgagggtaaacgtcactttttgcgagaagcagcttgaattgaacccttcaacttaattgatattcccttagtgaggccaatgcttttacctctagtcactattactttttcaccaggtgacttagattttgaaattatggctcaaaaagtaagcaaaccaaagagcccttaagatcctatagttactttcgaggctgagctaatcgagtccaaaatcaggtccattggactttatgttggggatgtct

SEQ ID NO: 34108 - DNA, 2796 bp, Cannabis sativa
  modified_base (138)..(138): a, c, t, g, unknown or other
gtaattccccaataaattagaaatatcccttaattaatactgaataactcataattactaaaataatcatcttattttggtcaaattttaaataacaatgcatttaatccaaccatattaattattattattattatnattattattattattatatgaatgcatcttcaatattatatattttatatcattttttaaaaaatttctccatatataaattcttttttggagaagtgtaatactaatatattagttctttttaaggaataatgatagtcataataaatttttgggtatttttagagtacactcatgcaccactttttaatttttgatatcttaataggtatataatcttaattttttttatatatatattatataatgatttgaagtgtagttatttaagacatcttgtaaaattttaataaattcaaaataattacaatacaaaaatttgaattatctattttacatgcgcataaaataaaagtgacacatacacttatataaataaattgttttaactttatttttagcgtattaaattacttttttgatttttttttttaatttataaaatattttaaaaaactataacgtagactgtcatgaagaaaaaaaaaaaagaaaaaaaagaagattaaactatttgaatttaaaaaataaaaaggagtaggtgggcgtagcatagaactccctaaatttaatttttctcatatttattaagggaaaaatttaattggttgcctttttttttcattttttgttttttgtccttctctagacattattgattgatttatgtttataatatatacctaataaatctttaattagtgtaatgttttatttataaactctacatttttgtcatttgtatttgaaaaagtaagaaatacataaacataaactataccaatattgtcaatcaataatcatggagactcaaacaattattctctctctatgggatgaatttggtttataataatattaattcagtaagcgtacgtaccaataagccatccacatcttgttctttctgtgacataaaaacaaagaaattaataaacttatgaaaaaaaaaatggaacaaatcataaaataaattttctgtatcaatcaaattttaaaacagcatattttgccgtactgatacatgatgataaagtctatgcaactaaaggcacatcgattatggaacacccacttctaatacactcaaccaaacaaattaatcaaagcatattacatacactacaatttttttgtccgtttcatagaacatagtggaattcaaaaacaaaatcaatataatgtgcctatgaaaatggaaagaaatggggaatgcaactttctttgtgtgtacataaatatatattactaaaacatagttttcttcttttcattaacctctcctatctatatttagctttattatatcatatatatatatatgagtaaacatatataaacccagaatccaatatcaagttctaattgattgcaaaggaaaaccatggtggtttcttcttcagagaaagctacaactaatgaacaagtcacaaggaagaagggtggccttagaacactcccatttatcataggttatatataattaatatacctcttatttattgatttacttgttctctatttttcaatttttctaaaggatcttttattaattagttggaaagttttgaattttgtgcagcaaatgagacatttgaaaaggttgcaagctttgggcttctggctaatatgatgttgtatttaatgaatgaatatcacttgaaaatcacaacaggagctaatgttatcttcttgtggagtgccttatcaaattttactccaatcataggagcttttctttctgactcttacttgggtcggtttcgtgtaattgcattggggacaatcgtttccttacttgtaagtaaatattttatatgtcaccatattaataactcaattcttcttattgttctattatatatgactgatttttattttctcagggaatggttgttctacttttaactgctgtaattccacacgcaaggcctccttattgtgacataaagcatggagaaaaatgtgttgctgcaaatcttggccaacgcttactactttacacttcatttgttctgatgagcatcggagctggagggatcagaccatgttccatggctttcggcgcagatcaactggaccggcccgaaaaacccgaaaaccagaggaacttacagatcttctttagttggtattacgcttcaactggagtctccataatactagctgtgacagtcatagtttatattcaggataacgttggttgggctgaaggttttggagtccctcttgggctcatggctttttcaactctcatgtttcttttgggtacttcatattttgtcaaggttaagggtaacaaaaacttgttctctggttttgcctatgctatctctgccgcttggaaaaacagacacttgtctctcccacctaacaactttgatgctaattggtatcaccacaaaggttccaagcttgtggccccaactgaaaaactaaggtagtaatatactaattaggagttttaattacaacttatttctcaatttttatgtccgtaaatataaatatacgttggaatattttttttttattttttttcgttgtaattataatattattgttgtaagtttttttgaaaattttgaataatttataggggaattattttatatattgtttttttaactttttgttttttaaatttacggtttgagt

SEQ ID NO: 34109 - DNA, 1678 bp, Cannabis sativa
atatagtaaaacaaatataaagactcaagaattttatagaggttcagccccgagcagtttggtaatagcctaatcctcataatttgtattgacttaagaacaaggagaatggttccttttcttagaagtcttacaataatacctctgaatatgaattcttagacaaaatgtttcgaccccttgcccattgaatatgattcactatttatagggctataagcttgggagggaagtatttcccttctggttacaattgatataagtagaaagattgtatagtaaatacagaatacactaattgtgagattcagacagcttgccatatctttatgatttgatcccaaagttatagggatttcattggtgactcacgatgcaaaagctgaatttgctaagtgttggcatgctgcgcggactgcttattgcccgactaagaggacttcgtctgagcagatgtatgtggtgtcatgttcggcatatttcttgcgagcaggtacatagagttgattccacgtgtcaccatcatgtgatgcgacgtcagagttcaaaaattgggatagcatgcttaattcaacatatctaaacataatttaacctttgaaaacaataacaaacaaccacagcaagaaaaacaacaaaaatctcaattcatgcaaaatccattttgctacgattcaagaaacttaagagaaagctacaagaggcttaccttggcttggaaatcactaaacacttgcttaactagcttgaattacagagaaaacatcaaaccctagatggtcttgggggttcgaatgagagagagcatgaaagagagagatgagggttttttgtctaattttgatatttaaaaaagaatgagtaaaataaatggttttattaacgtcaatattagccaaaataattaaataaaaccttattatattacttaataaaatacaaaaaggaaaaaatacaatatgggcaaaaagaccaaaatgcccttgcccacacaaaaccttcataaaatcacttaggggtatttttgtcaactctaaaatctcgaccattctccacattctaaatatctaactatactatccagctatactaaaaatactatggcgtgatcttaatagccaaacacagcgttccaaagttccaaggcacaaaacatgcaaaattctgaaattctaaatatgacatataaaatgcattcaaaattcaaataaatcatcataaataaataattcaaagataataaacaattttcacataattaaaccctaattatatgctaatttacaaattaaagctaagcggtctttataataggaaatggccctaaggccgagacaatggtctgccccttctggtacctttttttttgtgaagacaaatttgccaagttggatggccaacttggttttcatatttttttaatgcttcgtacttttatgcttgatctttaatacatacctgttcgcttgcattttcattcacattaaaaaatcatatattgatcaactgctttaggagtttccattgctcgtatatccctttgattctatgtagttaatagtctattatatgcgcaagtagtttattatctgccatgcttttagtttgcgagtagttatcaattctgcctcgcaataacagttataatctgtttcaagcaaacttgaatatactttta

SEQ ID NO: 34110 - DNA, 2798 bp, Cannabis sativa
  modified_base (85)..(101): a, c, t, g, unknown or other
  modified_base (1006)..(1017): a, c, t, g, unknown or other
  modified_base (2764)..(2772): a, c, t, g, unknown or other
tcatgtaaattataattaattaaggcataaattaaattcagaaaagtttaacatgccgaaaattacgttcaagcagtgtgttgcnnnnnnnnnnnnnnnnntttatacgcgtgtaaaatagactactcgaacgctgttttctatattataattattctcaatttctcaaaattttgtaggatatcttaaattgttataacgtaattcttctggatgccgaaaatagtaaaggatacatcagtacatcccttttaagagggtgcattgtagaattaccctaaattttaattgataaactaataatagtgacaagtttactcattttatttatgtatgtgtttgaaaaatatatatattttatttacaattttacaacttaaacctacaatttttatttacaaaaatacgattttcttattaaataattaaaaaaaaacatataaaaataataaaaaataaattcacaacaactataaataaatgagaaatgaactataaaaaaatataaaataacaagaaaatcaacctcatgaaaattataaatcaactataaataaactataaaaaaaacaaaaagaatattgaacagaattagtaatatgtatttttgtaaataaaaaagtttaaaccgtaaaaataaaaaattttctgtcatagcatatttttgtaattttttctttaaattttaatcaattatgtaataatcattattacaaaataagcttttaaaggtgcttttttttttagttaattaataaacaattgatgccatagtgtgtcactaattgaattttttttaaaaaaaaatctcatatggcatcggttacttgtaataaccgatgccaaagggtgataaattttcaatgaaactacatatggcgttctatgtaatcaggagtgcaattctgaatcaggagtgcttatagtgtaattctgaatcagaagtgcatttattttttgtgtatatagtgttttatgtaatcaggagtgtaattctgaatctatnnnnnnnnnnnnaggaattaataagttatgaaatttacttggtaaatttcagatctacttatttagagcttggttataaaggaccacggtccccacactagctaactgggataatattgttttgttgtctcattttaaataatcaatcaaaattctaaataagagtacgtcttttttgtgaattttcactaaacaaggggttatttgaggaaaaaaaagaggatttagggtttattgattaattaagagactttgtaacatctaattaataaatatattaaatgacaaatttatttgataattaattataattattaaatatatagaattgacatttatagagttagaattaaaagatcgcatttgtaaaacaaaagataagtttctataaaatagcagaattgaaatcctataggcccattaagggttcggccaaggatgattaataaagcaattatttttatcttttttaattccatttaaattctaaaccaaaccctaaaaagctaccctaaaagtatagctcttattttcaaatgacgactaggatcttttgtcggacaaaatagaaaatagaaaagatccactatcgagttcaaattcccttttcttcttcctcaaaatttttggagccttggtgaattgagagtatgcccccacatgtcaaaccaatacctagcattgtgaggaagactatgtctaactaaactgaaggagagaagattcagatcttgataatgctctactacagataggaatcaaaggctagagatctaaatagaaggagttattatattccgttgccgtcaatataaggatttcttaatctcttatgtgttcattttattatcttaggaaattcatatttaagattttagattatagattataatcaaacatacatgttagtaaatttagatcctagtaaaataagttttaacaattggtagtcgagccatggtaagattatttccatgaaatatggatttaaaatgatattttgttgatttggatgtgttcaggttggttttttgtgttaaatgatgattgaatgtgaattacaaaattttctaaaaaagtacttttatttttgtactaaaatattttatttggaaagttggtgaaatggaaagatgcctcccaatatggccatatatcgaccctcttttgtaaggcctttgactttggtggtctcggccataaacctttcgatctaatccttcaaaggttctccctgtcgttgtttgacttcgacaaggtcttcttgctacaatggtatgagccttgaggacaagaattgtgtgtcaaattctcaagaaaacttggcccaagaattgaatcttcatggaggaagtttaaagtttcattgctgagttgttttcgaaaaagtcatcgagaatatgcgacaccacacatcacctgtaatcttttggagatcgagctgcatctcgaagtatttgatgtgcgccagtagattttctcgcccgatatacatctttcgtactagtatcttgaatttgggcaagggcaaggcatttatgtatgtcgagaatggttatcgccttgactggtctagctcaaggtctgaaggttttggaccagctaggcccttgatcatattccttaattggtccaactgtgcttgcacagaaggatccgtttttattgggatttgaatgactagtccttcttcgaggggttgcaggctcggatgtgttggaattattttaccaggatcttggatctactcacaagtatnnnnnnnnncaacctaaatatgaacttctaaaatg

SEQ ID NO: 34111 - DNA, 2873 bp, Cannabis sativa
aaagaactaaactctaaataaaactaatatttacgtgcatcggcacgtaccttctaactagtatatatataaatatatatatttttgccgacgagtaataatattctttggtgttctgtccttattgaaatatattcatctgattttcatccccagcacccaaataatattttctcgttattatttctttattttatcttaaataaataaatcttattagtagacaaaatcttgtcgctttcaacacacgccaaattaaaataattcttcattttggagtatgagttggaattgcccttatcttttattataatctaaactgaaaaaaaaaataataaaagatcgactgatccatgctgggaatcattaatttctttcttaatcttaatatttgactctaaaacacattgaatattgtaaatacaatcacgtaagactagtactttacccaaagataaaataatacttacttgaattattatcattattattttcaataattattatcattattagtattcttttatgataaatataataattacaaaaattgaattacaccacaaaaccactaaaatcaaacttaaaacaaaatgcgccacatcaaatttcaatccataataattaacaaaagaattaacaacttaaaaagctcgaagcttctgaattcttaagactccacccaacaaaaaaataaaataaaaaattgtatgtttttcttagagttgtgggaagcacatgtagattgagtatattataacatgttaaacaaggatgacatgcctttcacaaaagaaatatagcttaaaacttgaagagtgctttacacggtattaattcctcttattaaattacctaacatatattccttttgacagccatttgtgttgcttcaaaagggttattcccaccagctcactactagacaaccaattatttaaacaccatgcaattcaacaggatcaatcgctaatatgatcaaaaaaagcttaaggcccccaataatatgcacacataattggataacttcaaatgcttctatttaataattcttctgaaaagatatatgatattggaacataataaaaagaatgattaagtcacaaattgtcttgccagttgccacccatgcagttttaatttatattttttttattaattttataaaataaggtcaggaaataattaaatcaaatgaaaatattttttataaatatatatttgatataatgtaagaaaatatatttttttgatatttttaattaaataattaaattaagcataaaaatttaatttttttttattattggccatcggatcaaaatctaatgatttaatagttttaaaattaatatttataattaaattttttttgtgcccgggtaatacctattgagaagtattttatatatatatatatatgagaaatattaaaaagtattagtggtgtcaatattatcataaattattataatgctattggtaaataaatagaaaattttacacaaaataacaaatttgaaaaattatttacatttttaatgccatatgtcattttttatttttatacaatttattttttttatttatacttttttaggttttgttaattacaattatacgaaattcatttttcctctaacttttatttcatccatatctttaattgtagaaagctcatctccaagtcctctgctgtcaataagattgacctcctcttcaacccccaatggtcgtgctaagtccatctccattatcatttgcttctaatttgtaagttattttttttttgggtttaactttcagaaatataatattgattttggatgtcttttcaatttttcttgtgtacattaattgatggttgtaaactttgttctgtaaatatattatattggtgtatggatttttttcataatgtgtatatatatatgtatatatatataaagatacacatactatgtgtttgatgaaatgcccaaaagaattgagttttcactagcctaaagaaagacgacatattcaattgtattttttttccccttaagttgagcttttcgtagttctaacattatttttgtttattttgactttatgatttagttattttatctatagatttttaatgattatgttgatatagcgttgtgttagtgttgcttataagttgtttatattttattttataaatgccttcactatttatgttgctgtcttgatgttgctgttgaacgcaaagaaacttaattctagtaatggtgaacttcaaagttgattagaaaaaacttgttgtccatttttattcatttacattattatttttttcaaaagtagattatttttgcaaactttattctgtaaatatattataatgagagtttgtatcttttttttttttttgtgtatatatatgcatgtatataaaaatacacgtgttatgtgtttgatgaaatgtccaaaagtgctaagttttcactagccaaatgaaagaagacattcaattgtacttttttttcttctttaagttgagcttttcctattgttgttttgctattattttttatttattttgatttatgaattagtcaatttatctatagtttttttaatgattatattgatatagcgttgtttacaagttgcttatatgttgtttatatgttattttttaaatgcatccattttttatgttgttgttttgttgttatagttgaatgcaataaacttaatttctagtgatgatgtgagcttcgtagttgattagaataagcttcccattcatttctattcctttggtagaataaagtaaatcacacacattgaaaatgtacaagaaaatgtttcaaactcttccaagaaggttgagctactgt

SEQ ID NO: 34112 - DNA, 2068 bp, Cannabis sativa
ttttttttgaaattttctatctgaagaagttgataacttttgaagatagctgaaagcataacactcagtgctcttagtctctcttatgagtttgaaacaaagtgaggagagagtgaagggagttatcgatttataagggaaatatcttctctactcttaagccaataaggactctatttaaatttaaatttaaaaggaaagataagcggaaaaaaaaaagctttatcatcttttcctttttcttttaagtttgcaaattcatgtttaatgtaggaattactgaaggcaaatagaaaaaaaatttctaaaagtgaaaattgatgtccatctggtagatttacatgaaacgagtttagttcatgttagaaagtcaacttcacacaagtgtaaaattgacttggcgagaaatatttacccaaaaaactgacccatatgatgtagacatcaaagtttgatacatggaaaggaggaaaacattcatggatctaagtgccacaagtcataccagtcaactctggaaggctcaatagccctgggtctaggttgattttaagagctctgaaatgcgtatttggaacgcgtcaagttttttccaagtcaccatcctttagtattctgagccaacaggtcaagaagactccaagtctaaagcctgggagctcaaagatgttgatttgacatcccaaaagtaaactcggacgcctagggtttaacttagtgcccaagttgacatcgctagctagggtttcaattttcaagtccatcttgttgcagaacactcaaacattatatttagacatgaataagacctgatacaaaaacgctagaggaatcataatctgaactggaacacttctcgtttgagacacctgggcacctagaggccaggttgacctaatgtgcactcagcaccccaggttgacatattgttaacccaaggttcttccaacaccatttctaaagatgtttctcaagtatttttttttttgtcttcatccaaaatgatgaataagtgctttcgagaaacaaacgaatcaacttggaggcaagaggacagaccaaaagccctggttgacactgggcttggtcaccaacgcccaagttgacattttgtcaacctaggccatgcatttctaacgacaaatctaacaaagtcttccaagcatattctatgttttcatcaaaaattaagatacgagtgctttcagtaaacaaaatgaagccatttggtggccaataaaaggacccaaggcccaatttaacttggggctagggttccagcccctaggttgacactttgtcagcctgagaagcaaacaagatcatttggggtctataataaggatcccagacataggttcacgttggggctagggctaggcctgcaccgaagttgacactgaacctagcgcgagtgctttcgtcacttagatacaaattttgttatggacattcttcttattttagtccaaaaataggggaggagccctcatgtgctgagtaaagtatcatcaaagtaccaatacggctctcggagagcccgaaaaggggtaaccagtgcccaggttgacatgcaacccgacacaggtggtttcaatcctccaatttcaattttgtaagaaaatctatgctagtctccatcgtaaacaaggtgtagcaattatggcaactctaattcacactttaatatcctttgtgggatatgctataaccaagaaagacacatggtatagatttgtattggagtctaacatgattacatggtcaaagacaaccaaggacactaagagtggagtaatcaggttgtgtgttaaacaaaacctcaagaggaaacttgaaatgtaattatggagtagacatcctatttatgagaaagacagcagtcctataggcttcataccaatatttaagtggtaaggaagcatgagaaataagttctaaaccactttcaacaatatgcttatgtttcctctcagcaataccattttgttcatgggtgtgaggacatgaaactctatgaactatatcacgttcttgtaaaagattggtattctcccccagtcagatt

SEQ ID NO: 34113 - DNA, 1735 bp, Cannabis sativa
aaccttgtagagtacattacaacatgctattggacgataatcacttacaacattcgggcatttactctttggtacaaggtttatgatcgtcgagttcagctccttaagtaattgacccgaatggagaaatgaggttactgcttcaaagacatcttgtttgactaagtcccaattatcctgataaaacgaactgttgtacccatctggccccggggcctttgctgctggtatgccaaagacagcttctttcagctcctccattgtgtatgcagcagtcaggatcttgctatgatattcagtaacacaagctccttttctgactaaattaatattcacaggcactctattcaccatcttagatcccaataagtctttatagaaatctaagaatgcttttgtaatgttctctggctcttcatgtatgaatccattcacatcctcgatagagagaatattattatgctgccttcgttctctgatgctcgagtggaaaagggctgaattctcatctccctctttgagccaatgtagcctagatttctgttgtaaaaatgaaaagtaatctttatgtaccttgataaatcgatctctaacttctttttcctggtattgcagctgctcactcatcggattctggtgtaacaaggtttgtgcattttcaagttccaaccttgcttttttctctgctatatggatgtccgagtagtgttccttgttcaactttctaaagaaaacttttaggactttaagttttgatactacctggtacatacttgtgcctgttattttttgatgccatatcttctttacttccacattataactcggataagaagtccacatgcgaaagtatttgaatggttttttgccacttgggaaatccatgtaagtgttcaatactgcaggagtatgatcaaatgccccgtcggtaataaacactgcttcagccctctcaaacatatccatccaagattgattagccatgactctatcaatcttagaatagattctatctttagattgttgtttgttgttccaagtaaagaagcaaccactactctttatatctgtcagttggcaagcactcacacagtcaatgaaagtcgtggagttccctattttagctctatccccaattctttcttctttaaaaagaatatcgttgaaatcaccaaatactatccatggatccggactagcaatactacgcaaatcattccaaagaatcttcctcccattttcatcattgaaaccataaacaaaggtggtaaaaaacttataccttttatttaccgtttcaatatgaagatgtatcaattgactagtacatttgatgatactagtattgaagagaagtggattccaagcaatgattattctccctcctttgtgccaagctgaatttgttgtaaaacaccaccctaaaaacattctttggtataagtctctaatttttggaggcttaaccctcgtctcgaagagaccaactaaaccaaccttttggattgcaataaattgcttcacactcatttgcttttgctagttgttaatcccccggacgttccaacaaatgattctatccattggcaagagagggttctccccctctcttgtattatgctcttgtaaatcatctgacttgcctctatcagctaccatgttctcatgcccttcttcttcttgctcaagagcatgaaacgaattggtgatgactgtctgtttcagtggctcttta

SEQ ID NO: 34114 - DNA, 2020 bp, Cannabis sativa
  modified_base (32)..(40): a, c, t, g, unknown or other
ttttggttactccatatgaatggttttaaccnnnnnnnnnttggctttgcttcttagttccttattctgacaatcaatttcgtgtttaaacaaacaaaggattttgtcacaagtatcttccaagtcataacatggtgagttccttgaaaccctcccactacgataaggtaccgtgactttctgtctaagaacactattggtattatcctcatcgattgtgtcaagacaatagaggcagtgggaccatcttatattgaataagatgatagaacaatttggaatcaaaataaaatttatctcctctactttgctactttgttttcaaacttagtcatttttttagaaaattaacatttgttaaaaataaacaatttcttatgaaatttctgtctttcttcaagtagatccaaggacaaattcaaaagttcttggttttcctcttgattatgaaatttgcatctatgggtcgcaatgttaacttctactgataacattacttttgagccgaacgccaatgaaagtggagtgtgtcccgtcgctattttctctgtcgttctgtgggcccaaagcaccggtggtagtttgtctacccatcttcctttagcagcgtctaacttcttcttaatagtatcttttaaagttttattaacaacttctacttgtccattttcttgaggtcttgatactgatgagaaaattttaataattttattcctctcacataattcagtgaataattcaccatcaaactgagttccattatcttatactattttgattgggactccaaacctacaaatgatattcttgataacaaagtcaagaactttcttcaagttaaggaaactagaggtttgacctttgtccattttgtgaagaagtcgactgccaccaccgcgtattttgctcctcctcgccctgtgggtaatgccccgattagatcaatcccccatattacaaatgggtatggcaaggtcatcattctccactctattggtggtatgcgaggtatatgtggaaatctttggcatttgtcccatctcttaacaaattcatatctgtctttgttgattgttgtccagtaatatccttgacgaatgatcttcttggatagactttgccaacctacatagtccacacagaagccttcatggatttctttaattatttcattggcctttgctggtaacacacatcgtaagagaggcatggaataacccctcctatacaatttgtccttaaatattgtatagcaaggtattgagtacaatttgcgtgcctcggttttgtctggaagaagttctccattgactagatacttgacaataggtgtcatccatgttggtgaagtatctatcatctcaatttcttcctcttcacatatgcttgggtcactcaagactttaaccggtaccaaatataacttgtcaagatcatattgggatgctagctttgatagtgcatctgcattagcattttgttctcatggaatttttcaattttaaaataatcaaactttttcaagttcttccgaactttctctaaatattttgccattttcaatcctttttcttggtattctcccaagacttgatttacagtcagttgtgagtcactaaagcacgtaagatttttggcctttagtgcctcagctattctcaaacctattaacaaggcctcatactatgcctcattgtttgaggtatcaaactagaatcttaacacgtcgtggaatttgaagttgtcaagcaacaacattataactcctgtccccgagccattctcatttgaagccccatttacatataattttcatgtctctattttgcgttcaacatctgggtcttcttctgaatttatcccttcaattagaaagtcagtcaaagcttgccttttaattaagattcttgggttgtaggttacgtcaaattgtcccaattcaattgaccactttatcaatcttcctgaagcatcaggttttgataaaacttgtcttagtggttgatttgttaagacttta

SEQ ID NO: 34115 - DNA, 2234 bp, Cannabis sativa
atataatttaaatcactttttaatcattaatttcaccttaaatatgataataatctaattaagcacatagagaattgggaatagctctggcataattagtaatacaacaatattagaaaaaaatatagtttttctcttatgtgtttataatgtttgttattattatacgagcattgttataaaatattagtggtgtttagtactaattagaagtaacattttgtaaataattagtgatatttcattatataaaatttgatatttaattatattaataataatataagtattaatatatttaagtatttttcttttgaaatgaagataatggagaagtaataattaataaatgggatgagatattataaataattgaagaagaagtggggttgattattttattggttggcttcttttttcccggcaagtgattgaccatagaattgtgagcattttccatgatcttctcttggtattaggatattaaatatactaattaactaaaacctattcttaaattaatcaaaccatttaaaccctattacaactatatttttttttcacttctctcttatcatggtctaaatgtcaatgattaatcatgtggtattggagtttatgtatcaaataagaaatatatgttgtaaatatttatatatataaatatctgtaaatattattttagattttatattttgtaaaaattatagattaattttatattttattaaatgacaatttcgataaactatatatttgcaaatatatagaaaataataatatcccaattccaattttggtcaaatatttttaaccttataacctaaactttcatctttcgtaataatcctaacgactttgatccaatttttaaatttaatatcctatccttattaattttgaccaaaatcaggctcagcataatgtagtgtcaaaattgctgtttacccaaaaaaaaaaaaaacaccaataaataaataagtaattttttacaaaatataattaatgtataaattatataagatatttcactagatatatttctacaaactactttcatgattgatattaatatataagaatacaatataatctctaatttattatatatataaatttagtcttagtttaagttagttataaataaaaataagctctaaattataatttatacaaagtatagtagttatagatttatgtattattaataattttatttaaaattataatacatgtatatagatattatatttacttaaaaataattttactatgatataatattaaagattgtttattgttattgttgtaacatttgatactttttagcatttaatttttttttttttagtgtacctctatttaattataacatctcatgtatccttaaataaatattctattatatatatggagcttaaaaatacaaaaaaaaaattatatgtgtaacatagagattgaagtatgtatgtaaatttatatatatagtaagtttcaatgttacatcaaatacgatgataattacatttacttttagttcttgaatcattaattattagacgattgtaattaatttaaaatgtactaaaaataattaataaattatttgtaattaatctgatactaacctgattttatttatttctttaaatttaatataaattaaaagttataaatattaatttctaaaaaagttttattaaatattttaattaagaaattaatttattttaagtataattaatttaagtttaaaaataaaaattttattagtataataggtcatgtaacaattgaatactcacatatttatatatatatatatatatgttgtgtatgtatgtattgttttctattggtttagataattattatgtatgtattattgaagtactcatcaatatatatacaacctacttgtcacaataattagagtagttgatgaaaattttggttagtttattatgaaggtgaactgagttattaaattcttttgttattatcattactttttttcaattccttttaaattgttatataattaagtctctcaagagaattaaagaaaacccttttgttgtttgttgtttctattctttgtttttatatataatgatatttaatttggatgaagatcatattaggttggggaccattttgctgtttttttttcttcatatattttatatattatattggcaacttgctttcaataagataatatgctgtaatat

SEQ ID NO: 34116 - DNA, 3616 bp, Cannabis sativa
  modified_base (1720)..(1726): a, c, t, g, unknown or other
ccgaaaccgattttcgggtgttcgaatgtgtcgggtatcagatcgggatcttcaagtttggcatagtcgcgttcgggtcctattaggctgagcccgaatgtttaatttctgggttgaaatgaaatttaatttttaaaaataccatttttttttttatttttaacattgttttgacttttttttataattaatattttttggtgtgggtgagttggacgaatcgagtcagtcaactggtgtgggtgagacggtctggtggttgagtttgtcactgaagtgaatagtgaatacgaataggcagcaggctgagagcttttgtttgaaattgaaaatgattaaaataatatttactacaaaaaaagaatacgaataggcattataggacttttatcataattaatacgaatagtatttattacagaagaagaatacgaagaggtatttactaaaagttttatgatattaaattagtaattaattatttaaagtattaattttttaataaaaaaaaatattttaatatttcgggttacgagttataaaccgaccagaaaaaaaaaatcaattaagctgactcgaacccgaaacccgtttacagtctttttcgggttgaacccgacctgactatacgggtttttaggtggtcgatttttttggcagcgggtcggggcaggtggtcgggtttttcaggtttgcgggtccaaatgtgcagccctaattagaatcagattcagagcaagcttatttttgagcacccaggaccccagtgcccaggcaccccagcacccaggttgacaatttgtcaatctgcgcaccttccaagtatcaggtcgacgatccaaattttgcatcttcttcctctttataaaaaataaggaaataggtactttttggaaagaaactacacttcatgggtgccaaaagcaaggcccagtgcccaagttgacacttgggactggcccagcacctaggttgacatttattcaacctgcgccgatttcaatgatgtgtttttagaactcctccgagcatcttctttgttttcagaaaatattgagattcaactatttcctgagaccattccgaagggccataattgggacccagcgcctaggttgacatattttcaatcgggctatttccaatcaagctcacaaaaaagtgtttcaggcattttttctgtcataaaaaataatgaagattcaagaaaactcggggagaaaaccacaaacatgagccccttgaaacagggcccagccgccaagttgacctggtgttgggcctagtgcccacattgaccaacaacctggtgcactgcttttgattgctcaaatactaaatttgattcgaacaatgaatccagaacggtcaaaaatggggcaggaccacgtcctcatattcaagagccttggaagtatcaaaacaagatcctgggagctcgggaatgagtatccaacgccaggttgacaaataagatggtgcgttgggttcgcttatctgattttgattcggctttgactgtttgctagtttttcaaaataactaagatccatgaagttagagaagtcaaattcataaattgacatttctcatttccaacatgggaaactcactcagaaatgaagagtttcaagtctctcatttccacaaaacagcaatatctatgagaattagtgattggctttgcctgaacacaaaaatagactaagtgatgtcaaannnnnnnttaggcatcttaaagtacatcccttggatatttttacacttacctaacgtccatgttggcgtcacatgtcaacctaggcgctagatgtcaacctaaaaggtgggtcatgaactgccttaagtaaaatggccataactcactcaatattgattcgattgatgcaattcaacttgcatattgaaataagctccgggttacccacaacaggactcaccaggctctgaaaaaattgtcatcaccactagaagctaatttttatcattagatcgtcatctacagtcaaaaacatctaatttatattttgccgtatttctgtgggtctccttcacctataaaaggagagctcccttagctcattttggactttcagaaaattacccacaaggttagagcttctttctctagtttcgaagcttctaacacttagccttttttcgtaataccatctcgtgaaaaataaaaactcgaagtagacgtagctccattacagtcacaatacagggagtgaactactataaatttattgtatctcccttataattacttaactacttttttattctcgtcaatctagcgagcagatgtggcttagaagtctattttagatttttaagtcaacattttggtgctttcattgagattcacagctcaagaaagttactagcatgatggttacaacacgctctacaagtgtttatagaggaatcccaacaacttgccaaccaactaggggagagccagttgatggagttgggactgggactgctcctgtgccctaggtgccaggagcaggccttagaaccaactcctcaactcttcctccaaggccacttaatgctcttgtgactggcaccaatgaccagatcccacctggggagcctcatgtggagatcgatgaccctaaggaggccgatcctcaggttgctgttgggattttatgcctaaataaaatataatattattgtaatcttatttacttttattaaaaagatcaaaaatcatatcatgacttagtcataagctttgattcacatgttttacacatgattatagctttaatatatataagttctattaaatcccaaatatatagctattcacaattactgtgatgttatcacaatagaaagtaattgtgattatatgcttcaaattatttagtctcacaatttattagtgcattggatttacactgacatgataattaataatggagtttacttacacttggacaagtggaatgtctgttccagaacattagtaaaataaaatagcatcgatgtattggctatacattagactagaccgatattcacagtggaagagatagcataaacttaccatgataccgtttttctaggttaaaatataaagttgatcttagatcaatgatcttaatcctaagataattaggttctggcttaactatgttattcttgttctttgatttgttcgtttgaagcctactagtaggtttggttcaatacttacatattgggaactggatagtacaattgagggagcgctagttatagatatagcttctataaatacatagaagtgaagcgacagtttctttagagcttgtctaaacgagtttaaatggtttctttagggttaaggcattttaagacgcaccaaagtgggctatgccttcagcccccggaagcctcacctaaacatgtcagactatggacctagtgaccaggctttttaaggtacgatgtcagaggttgtctcccacgacacgatattgtacagagcatgtgtgtccttgtgtaccctagcaaatgatccaaaggccagggataaagggaaattcaaaaaggaaaagccctaaggggacacgcatcgaaggcccatcttgtacgatctaacacctttaaatgc

SEQ ID NO: 34117 - DNA, 6563 bp, Cannabis sativa
ccgccacaggacggtggcagctcttgcaatcaaacataggcattacggccatgcacatgcaattgctcagcaatgacaaagttgtcatctttgaccgtactgacttcggcgcttcaaacttgtctttaccagatggaaaatgtcgtatcgattcaaacgacaccgttttaaaggacgactgcacagctcactcggttgaatacgacgtcgcttcaaacacgtttcgacctcttatggttcagaccgatgtgtggtgctcgtcgggttcagtgacgaccgacgggaccctcgtccagactggtggctacaacgatggagaacgaatggtcaggatgatgaagccgtgctcatcgggtgactgtgattggacggagattccgttgggtctcgccgcacgtagatggtatgcaactgaccatatccttcccgacggccaagtgatcgtcatcggtggacggagacagttcaactacgagttttatccaaaagcttcttctacggctaaacacttgtacagtttaccgttcttagttcagacaaacgatagaggagaagaaaataatttatatccatttgtttttctcaatgttgatggcaaccttttcatctttgccaacaacagagctatattattggactataagaaaaaccgggtcgttaaatcctacccacaaataccgggtggtgacccgagatcttacccgagtactggatccgctgttcttcttccactgaagaatctaaaggcacaatccattggagctgaggttttgatatgtggtggtgctccgagaggttcttatattcaagcaacgaagaataatttccttccagctctaaagacttgtgcccggatcacaataaccgacccgaatccgaactgggtcatggaggatatgcctattgctagagtcatgggtgatatgatattgcttccaaacggcaacgttttgattataaacggaggctcgtccggaactgctggatgggaatttggtagggaccctgttctaaacccggttgtttaccgacccgataacaaaatcgggtcccgattcgaaaccgaaaacccatcaacaattcttcgtatgtatcactccacggctgtacttctccgagatggtcgtgtcctcgtcggcggaagtaaccctcacgtctactacaacttcaccggagtacttttcccgacagagctgagattagaggcgtttagtccttcgtatttggatccacagttttcgagcctgcgcccgaggattgtactgcccagttcgcaaactaagttgtcgtatgggcaaaaggttgtcgttcgttttatcttaagaggaacagtggcacagaatttgttgtcgttgactgtggtggcgccgtcgtttaatacacactctttctcaatgaatcaaaggcttttggtattgtcggtggagaaaattacaagtttagggaaatcaacgtaccaaattgaagcaaccacacccggttcgggtacacttgcaccatccggatattatctattgcatgtggtccatcaagaaattccaagcgagggtatttgggtccagataaaataaaataaaaaaactcagatgatatgatgagtgacatttacattttacatttatttttattgttactattctttcttttgttcattaatagagcaaagaaacattttaaaggaagaaaaatatatatatatatttattgattttaaaataaatgatagacagaggtaattgaagaagtgtgttgtgtagtactgtgatgtagggtataaaaattgattattgtaatcctactctcactttgatatagaaatttatttgataatgatttattatatatcaaatagattattcttattattattatattattttttgtcatattaatgtgttagtttataatattaagctaggctagctagctgttattgtcaaactcagtaattaaataattgaaaatttccaacacatgtgaatcactttattaggattttctagtgtttattttaatttgttgagctgaaaatgcttgctggcacatcgaattgattggtatgaatgttggaatggcttcattaaatgatgaatactataccaacccatgcgtacaactataaatttatggaatcatatgcattattaatggctttagagataaattgagaaaggccattgatgatcttaagcttccaacaattgacatctctatctatatttggaaataaatactgaatgtataaaaattataatgtatacatatgttaacacaatcggtttaattaattatggtccttattatataatttacaccctcaaaaaaaaattatataagttactatacttacatgtattccatacatgcatatacatttctccttttaaggttttctgatttctgacatataccctttgggaaaaagttagaataaccaagtcaaaagttctaatatataaactttaactaatcaaagatgatgattctcttttgctaccaagaaaaaaaaatgacttacacaagatatttaaggcacaaaattgacagtttaaataatttcattctaaacaaatattattgagatttctaagcaaagaaacagtggtcgttttcatatacgtacttagttgattataataacattgaagttaaattaaattaaataaataatttcatcaaataaataaataaaataatacatgaacatgatcagcaggctaggccaattttattcctagcacttgacctaacgcgtcatgtatatatatataacatatatattttatatataatgaatagccaataataggtctctatatataatatacttaataatacatgggtcaatttaattaagcaaaaagtgagaaaacttccaattttgcactgatcataagttagctagtactgtttcttttcgtgaatcgtgacaaatgggtcagatatatattattagaaggaaccacgttaaagttctttcaatctcaaatccagccaaactgatgaaatggtcttatttatacgtaattaattatattgtctcttcgcctgtatccatatgtttattcttctatatataataattctttgtagttttatatatatgtgtgtgacagttggtggtctttcctataggaaaatcatcttgtaaaagaaagtcaaattttgttttttttttcttttctttccagctgcaggcttcgatcggcgaaagaaaatgtcacatattatctatatagtcagagaagaattgaatctataagtatatatgaagaagaaaaaaggaccagctaataaggctaattatatatataacaattttcgcaggaaattgcgtgtgggaattctgtttttataattataacacaattattacaagtcatatcaagttgtttttgcttgattatttttgctttatattataggatatatatactattggttttgtcttgtttccttaaatcaactcgatccctatcaaaccatatgtgcctatgtatatatataggaagatataagctatagatttgaaatggaaacacgccatattgcacgtcacacgttgcttagtaaatttgaatttaggctttacatttattgacatgacatgtacatatatacaaaatgaaatgaacaaaaagcaaatatatacatacatgtaccatagttcttccacgtacgagtcaattatatatacatttgtagcttgttcacatggaataatcggcaattattattgtggaaatccaatccttttcaattaagactaataactacaaaacaaattaaagtaaaatagaaacttttgaattctagtttattatttgagcacaaatattaaagtttccacgtggaattaatgcacatataaatggtgttacgaaaactatgacctatccaaacaccccacaagctagagttgatagaaccacgttcatttttatataattatgtgtatttatacgtggataaaatgatccatcgattattgccccctggaaatgcatagattaaaatgtgtaaaacttttagttcaattgatcattaacttaaatactacataagtattataaatgaataatatgatgagtcaggataaatattccaaattaaaatttatttacttttaattcccgtatgtgtatatatattatatgtacatgcattatgtagtcagtaaaatttatttatattttcttgaaaataaatatattctgatgcagatatacctatacaatctgttcattatttttaggtttttatatcatcgatacaagtacccttaataaacaaggataagataaaatagatcattaatagctttaattatacctgccgatcgatctctagaacaaaaagaacagagatatttgtcacgatgttcatgttataagctatagatattatctaatattatatatataatgaatagtatagtgtctgcaatttgagatatattacttgatggtcacggggtctttaggggcttaaacagtaaagaatttatatacgaaaagaaaaaaaaaaggttcgtcacggggttctgtctttatgttggctaggaactcatctcatcaaatcatcatcagtctcgtaaaatattcaccattcccaactgttctttttttttttttttctctcttcccaaacacaaacagacaacagtcaacaatagtagactccttccatcatttcaactgaattttgtcatcaagtgtagtcaacatgatcttctctataatagtccttgtaattttcttttataatttacattatatatatatatatatatatatatatacagacaggggagtaattttcatgttcatcatcattagttggtcctacttcttcaaacaaaaggtgaatatattatagacgatagacccacccatggttaattgatattgtttttgtgatcacggcaaggcatcatgtgatttcatggtggtcctttccttacattatataatatataagttgtcgaattaaacaacaaatgcgttttaaggtgacttttctctaaagttaaaaaagagacaggcccaccaaaataatctagacacaggctcactgataccggcccattcagtacaagactcccactcccaccatgcaacattactgttacttatagccacaataccccacataaattagaaaaatttacaaaaaaatactaattttttctaaattttacatttatattttaaccaaacaaaaataatgctaaaaagtgctacacatttctacacttttcttatctaaaaaattttagtattaactacacaaaactaagaaaattagagaaaattagaattatctagaaactatatttgtaagctaagaaacttaaaaaattctagaatttcttagaaagtaaaattgtaattcaaaaaaagaaaaatctagaaagttgtagtattaacttttagctccctataaataccaagtttgggttgaggagctagtgtaacaaccaacacccaaaagtcaaaagttccaaactatcaataagagcttactactttacatacaattctctcttctaagcccaactaatttcatatactaaatcaacaactactcatcaacatcactgcttcactatattaccacaacaaactattaaccacatatccacctattctaaacaaaaccaatagaaatttattctcaaataccatcagtggtatcagggttccattcaatcatatccttggacgtaatctttttcactcatcaacatgagttcggagtccaatcgctcttctctaccttttccaatttttcatggagaaaactatgatttttgatccatcaaaataaggacctattttcaatcacaaaatctatgaaaaattgttgacactactacaaaaatagtttttcctgacgtttttaaatagtcgtttaaagtattcccgtcagtttccataaccgccatctatacgaccgtcgcaaaacgagcagaataggcgacggttaaaaaccgttgctaatttggacttcctaacggtaatgattgaggaagtttggcgtggttggacataacgaccatgaccttttgcattactcgccctctcaaggtgttttggaggctgtgtttgaggacggagtaaatcgtcagaggctttttttacttctcttcacgggttgcttctgaagtttcttggtgggtggctatgtctatatatatggaaaaaaaacaataaggttagcaatgtcattaatgaataaacacaataagttaagtaaataaattgaaacataccaaatgttttctaacaggtgtaagatagtcttttggccatgctacataacattttatagcttgacctactgttgtcaatgaatcgtcggctatggaacacaggagcagtgcattctccacattggcttcttcgataaatagccgacgataatctttgtgtaggtattcatccatgttaatgagaaactttccatcttttaaatatttttccttgacaatgtggcccaaagcaacctttaatatcatcccattaggcttcaataggcagtgcatccaacacggtaaggtc

SEQ ID NO: 34118 - DNA, 3994 bp, Cannabis sativa
  modified_base (1269)..(1272): a, c, t, g, unknown or other
ttgtactattttagaaaatataggatctattttgtcatttaaataaacagagggtctaattggtaacttttacaaaacacatggtccaaaatagtatttacctctaaaaaattctttattattatattaatttttaataaatagaatatttttttttaatattatatatattaatttactaaaattgccacaattattatatataattaatgatttaagtaaaactactttacaagacaataatactgtaatatcagtaaaacgcgataaattaaattatcatattatatgtaataatataaatattatattactagaaaaaaaaaaattacattcttgacaacaaaaaaaatacattaaattaaattaaacctaaaatacacacttaaaaagatttgttaaattattataattctgcgagttaccatgtgtcgagatagaaatttagccaactcgttcgtatttatagatgagataaaaattgtaaagagcacacacaagaatttatagtagttcactccccatgtcgcggtggataatggagctacgtctacttcgagtttttatttctcacgagaattacaagaaaaataactaagtctgcaaagtctaatttctaaagagagaaactagagagatactctgaccttatgagtacttttttcaatatgaaaaatgagttagaggacctcctcttttataggacaggggccctattaaaataataataaaatattctaaaaaatataaaaaatacatttaggctatttttgaccgttgatgatgatttaacggtgaaactgactgtaaaggtcagtcgtcaatttttgaaacttgagtcgcatccgcgggacccacttcaggtaacttgtggcttaaattcgtaactttcttgagggcgaaatttggagttgccaactttagaattgtgattggagtgtgagacatgacttgatagagtattgaaataactttgaaatgcaagttgaatcgcgtcaatggaatcaattgagtgagttatgactgttttactcaaggttgttcagggaccagtgtccaggttgacatccagtgcccaggttgacatatgacgtcaacctggatgctgggtgagtgggaaaatgtgttgggatgtattttttgatgcctaagtgatattttgacatcacttagctagtttcagtgttatggtaaagctattcaccagttctcagagatgttgttttacgaaatcgagggactcaaaactccctgatttgcaagtaagtnnnnttgccgaaaaagtgaaaatatgaagttgtcatttgacttgtctgacttcatagctctaagttactatgaaaaactagacgaatgcttaaagatggaattagaaacagataagcagaactcaacgcaccaggccacatgccaacctaggcactgagtgttttttctggagctttcgggatgtcattttgatacttccaaggttcttgaaattgagaacgaggtctcctagcctatttttgaccattttagagagaatgctcggagtagaatttgcatttaagtgatcgaaaccaatgcaccgggctcaattttcatgcctttggaattcttattttctcccagagtttacttgtatcttcattatttctgatgatgggaaaaatacctaaaacacttttttgaaaatattattggaaacagcttaggttgacaaaatgtcaacttgggcgttgggcccagcaccaagtgtcaacttgggcactgggttgagtttcaggccaccagatggttttgattgattcctggaaacacttttatcttaatctttaactaaaataaataatatgcctggaagaattctcgaaaaaattccttagaattggcctaggttggaaaaatgtcaacttgggtgcgggaccagcaccaagtgtcaacatgggtgcgggactagcaccaagtgtcaacatgggtgctaggccctctttctagctctcaagctagtctgtttcttccccgaaagtacttgtttcctttgtttttgatgaagatgaagaaaatcacaagataattcttcaatttgatgattggaagtgccccaagttaacaaaaagtcaacctaggtgctgggtgcttaaacacctagtgcttcgggtgctcaaaaatgaaagtgctcctaatttgattttgatgccttaaatatgttcgtgacatgtctaatttatgtcccaatataaagtttgacccatcttcactaagacagtcatggaaacttaacctttagttgggttgtcaacctcggtgatgggtaagaccctaggcgccagggttgatttctgtggtgttgtttcatgtatttttaactcatgggccttggacttggatgctttatgtatttatggtacagaataatgaaacatggtgagttgggggcaacttggtgggatccaaacaaccattctaaagtttctaaagttaacctgggcgcatggcttaggacctctcctaggtcaactgctatgactagggactgcttaactctgagatatttactttcttgccacatgtcaaatattgatgtccacgtcactagggtaagttgttaggttaacatgtgcccccaagtcaacttcatacatgtgtgaggttgacttgatgacatgaactgagctgtttctctcaaaactaccaagtggacatcaaatttgacaatcttgagtaattgtctctatttcaagcattcttgataggattagaatttcgaatttcaatcccttaaggaagaagaattcaaaattttatgagtagaggaaagaggaaaaacacttatcatttttcacttatcttttatgtttctcttttaaaactaaaaaaattctcataagtcttagttgcattaggattaagtgagtttctaagttttgagttcctattccctttagtagaggcatttcacaaatttaagtagaaatgagaagagaaaagatatttatcttttgattgtcatttatctttttcttttctactttaaatttacttaaattctaattgcattaggagttgttgtatattttaaattttgtattccaattcctttttcaatatgaaatttgaaatttaagtttaaaaaggagaaagagaaaagatgattatcttttacttatcatttatctttttcttttaaactttaaatttaaaagactctcaactgctttaggattaagatacttgtatcactatagataagagaactcttatttagtttttctccacttttttcttcactgctccacacctatagttttcttgagagcttgagtgtttcaacttcattaatttttcaagcgttcttcaggtagaaaaaaaatcaattttatttatttattcttcttcttcttcttcttttaaattttatctaaggattccaaaagtaattggaaatccttaaactcctttgacaagagctccaaaaattaagaaatacaagtttttgtgagctatttaggttgaaatctctctttcttgcctggacagtcaccttgatcttgccttgacaagattaaaatagggttgtcttgagttgatatacagttgttctgagttgaaacaagttaatctttgaagccaccatgccttgtatgaagagaagtcgaagaatgcctgatgaatatgatccacacgtggcccaatacattaaagccaagcttatagtgccgaaatccaagaatctaggcaaagtgcatggtggaaaagttatggtaatcgagcttattaaggctgccaataagaatgatgattcgaaagatcgagctttcaaattgaaacctccttgtcttcagcactatctctgaacatcaagttaagttgatcagggatgattactttgttcttgaaactttcatccataaacctcaaactggatgtcccaatggttcccagaatccatattgtagtgcttggcctctgtaatgaccgctctagtaatgtggattagaaaaggcaatta

SEQ ID NO: 34119 - DNA, 1396 bp, Cannabis sativa
  modified_base (43)..(74): a, c, t, g, unknown or other
gtgtttatttcatcgttttagaacgttcatatttagggtgttnnnnnnnnnnnnnnnnnnnnnnnnnnnnnnnntggtaaaataatttccaacacgcctttcatcacatcgggacgttgcagaaaggctggaggtgccgtcttgtagaacatttcatatagttgttccatacggctcacagcagaaaccggccctgcctgcacagcaaggccaaagccaacttcatttcaggagtacctttctgcaacaggcgtttgatttctttgtcttgtgcattatttctggcttgcattgctgcaaacctattttcacaatcctgggctacttgtagagggttaacatctcctcgaccacataccctacctcttaggcctctacctccaccacttttatttggtggaaactgaccctaactgccactggatccgaccgaggtaccctagcttctcttgttctgccttgcgtccattctaatagaaaagcctataaaaccaagagctagcctggtctgatcgtgctcaataataatttactaactaacgcttatttgagaaaatgaaacttgcgcctattcaactattaggctactaacatgcttcctatcaggcttttcttataacatactaataaattaaactacaaaagcattaaaagcttactcgaccatgagtcgtgtttaatattgatgattgtacatgtcgtgacgatctttgaaataaaaccttgcagctctgataccaaaattttaacaccctactagcttaggcgtgttatcatgatttgaaatttgctgtgcaactcgttgataatcaacatgattattggaaatcgtttttaattaaaacttttcttaattaatctttcttaaaaataaaataaattttacaaagtcgagatctcgtatttcaaaagttacaatcttgatacaatgcattcgatacaaaatttgtcgcctagcaaccaatcaaaatatagcctgttgtcccaaagatcgtacgctccaggcctaactaccccgacatgtacaatcttcgtctactcgatctaactgttgttcatctttagttttgcccttacctacacatgaaacaaatatataggagtcgacagacttagtaagaaaaacataatattaataatcataaatataatctggattacaattaagcacccataaacccaactgtaatcatatccacgcaccctagacggtacaaagtctagaacgttcatactacaataccacagattacaatatcagcctatactcacactagtcgtactgatgtgatagtgtcgatagtatctgagccaaacatacatctatcgatatccaatataactctacgtatattgataccgcaatcgatgaaatctaacaggcttaataaatatg

SEQ ID NO: 34120 - DNA, 2619 bp, Cannabis sativa
  modified_base (2045)..(2062): a, c, t, g, unknown or other
gttgtaaacatagggtggcggtggtgatggagaaggaggaggtggtgacttgtagtgatatttaggtttatgtggagacttgtagtgtgatggagatgtagtataaggcttatagtcatcacttgcacccacattggtggtagctataataaagcatagtgctaaagcacatactaaatgaggccaaaaattgaccattttttagtacttgaaaaggaacaccaaaacacttaattttttagagatatttgagacctcctcaaagggtttgaagagggatgtttgttgtgagtattgagtattgaagaggatgtcttgtatgtttatataggtattgttaaaacgagtgaaatgttttgtttattaatatatgaaagtttccacaaacctccaactctcacctattattatatatttgaacctttcaattgagctttcccacttgagaaaattaaacatatatataaatatatatgtaatgggaagccatttagtctactatgattcttattcatgcatatatgtgcagtgcacgttgaaacagtctaattattatatttatattggagaaattagaccataccaatattaatggatttctaatatcatgaaggattcttatttagtagttcttaatttctatgttaagaaaatcgtggagataaacatatatatatatatatattcaccgtatttagacatatatatttgaatattgatttttgattaataatatgtgcatataaaatatatttaataaagtggtagtaattttcaatcaacgagatttttaggtcataaaaaaatacaaagagcgtcaccactagagtgtcaaataggtagtgtaatgttatattttgatacttttgttaaaatgtgtgtaaaatttagtacatgttaaaagtttcgcaaaatttaacaaaatatgtaaaaattatattatatttggcacaaaagaaaagagtttgagatatattttatattatttttatcccatataaacattttttcaattataaatataataattcaacccaccaccactatggtgtcacatttatacccaaaaactcactcattctatccgaaatctaaaaaattgggaaaaaaatacgagtttaaaaaattagatgtcaggatcgggttttattaatctaaaccccgaaaaaaatcaggttatacccgaacccactctaaacttgaatatatgtaatttttttatacattttttgaaaacataggcttaaaaaaaaaactaattgtaaacaatgatatattatttttattttattcttcttttattttctttttattttttctgttttttaaatgaaaaatgtatataaaaaaaataatatttttcaaaaaaaaaaaaaggccaacctaaccctaactcgatcaaaactcacgtggatccgattttaacccaaactcgacccaccgcacatgaaaacccaaaaacctggtcacacaaactcaaacccaaaaacccgaaaccgtaaaacttacacaatgtgcacccctaaccaccaccacataattcgtcaaaggtagtttttttaagacacactttacaattatttttagaagagactacccattttttattaaaaaagaaaaagtgacaagagaaaccatcttgaaaagttaagtcatattttacatttaataagataaacaatttttatctataaacataagagattactattaaaaagataacacaaaacataactattgaatatcagataataattcttagtaaaaactttttcattctatccttttctaaagaggtcttttactatgaaaaaaaaaaagataaaataaaatctttgaacaaagcttgctttttggtagcatttagtaattttttttaaaatatttttattacaaaaataaaagtaaatcatgcctccagaattttaacatgtactaaatcatgcccccagaattttttgctccctaaattttaacatgtactaaatcatgcccccagaacttttctggccgttgaaaattcttcctgaactattgagattgtnnnnnnnnnnnnnnnnnntctaatttcatttaattttactatttaagtgattgtttatgtactaaatcatgctcctcagactttaatatctaccaaaccatgcccctcgaactttgacatgtattaaatcatgccctctaaattttcatccatgactttttcttactaaaattgaacaaaaatccttaaattcaacaatctcaatagttcaggaggcatttttaacgaccttaaaagttcaatgggcataatttgatacatatcaaagttcgggaacaaaaatcgtaattagcctaatttttaatcaatttttttatttttaaattaaaaaaaaaaagggaaaatattttctaaaatcatgttttttaacaaccaaaatcacttttataaaactgtttccattttttaatttttttaccataaaaaatcactttcaaactttttattaatatttttgactcataccccaactagacctggaatccaaaccacgacccaaaccttaccacaaacccaaacctcaacctgaactagaatcctgacctgaaccttggacctggacacaaaccaccgtt

SEQ ID NO: 34121 - DNA, 1161 bp, Cannabis sativa
ggtaagtgtattgggtttcagagctaccctaacgattgcctcgaccctggttcccacgaaacctcttgctctaacctgagccacaagatgcagtagattcctttctattctgatcaatggccgagccactacctcccctactaaagccggatgtaggaggagtaggagccccaccaacaattagagtcactcgagagtctaaggtgcactccattgcgccctcagcttccaatgccttacccaccatatcagcgtagttggtgttgtcatcggtactaatcattaagtcgtgtctgatcttggcattcaacttgtgtaggtatttctctttcttgctgaaatcgattagcacgattcctgtaaccaatcttgcgaagcgatcaaactgagtcttgtattgagtaacactcacgtattctttctaagtcagctgggtgaattcttttctttttgcgcttctaacttcctcattgtaatactttgaattaaacagttcctgaaacttttcccaggacatcatagtaacatcctgagtcacagacaccatgtctcaccataccagagcgtcttcttgaaattggaatgtggcacatgtcaatctatcattaccagtgacgcccataaagtttaagattctggtaatcactgttagccactgctcgactttcatgacatcgggacctccaaggaaaacaggaggtgcttgcttatggaacctttcatacaggggttccattcggttccttccagctacaagtcctgcctgcatcgtaggggcaagagctattggtatttttgcagcagaaattgtaggaggatcctgctatctcaaacgtcgaatctcttcatcttgttcattaatcttggcttgcatttttgcaaacatactttcgcaatcttaggtagcttgggcagcttgtggcgggttagcatcaccccggccacgtgccctgcaactaggacctcaacctcggccacggatattaagggggatctgaactccctggccaccactggatccaaccgaattaccttggctcctggtgtttcgcctgccgtccatactatttagaacaacctgcataaccaagagctagtctggtcagaccatgatcaaataaaaacatactaattgccgcttatttagaaattcaaaatata

SEQ ID NO: 34122 - DNA, 2447 bp, Cannabis sativa
ccgtttcataaataataagggatgccttaataataaattacataaataaatagaatgttattaagttgttaattatggaaactacttaatttagtgcttgccatattctccggtagcacattaacattatgtatagaatataaaatcaaacaatcagtacatacaatttcataaaattttacttgttcaatcattcacaagaaatgtatgtgaaaatttcaaactcttgtatatctctcatatgtatttaatttctcctctaatttgtatactgcgtatttttttttttaaataaaaagtttaaatggtagatgtattttgaccaagaagaaaaaatgtatgtttttcaagcaatggaacgcttggagaagaatgtatcatcaattaaagaggctattgaagaactcattcgatttcagcgggaaaaagagaagagggaaaaagatgttaaacgagaacttcatgacttgaagttagaattaaaattaaagagtttgtgttattgaaatgaaaaaagatatgggggaagtagatggattatttggaaggatggatgaaatatttgaaaagagctcttatacaacttatggtgatctttctatcaagactccctctactcaaaccaaaaagactaagcttaatacaactcttaactctaattattatgaaagtggggtatgtaatctaatttatgtattggggagatttatctttccttggttttggttaatatttttattaagttaatatattgtcattttttttgtttttttggtggatgattctaacaaagagagaagtcatgataaggctaccaagagaaaaatattttatgcagatgtgttttggacgtttggatggggagtgttctaatttttatcattttattaatgcttttcttttacttatattgttctagagcatggttagtgagtgctttcagaaactactatgtttatgagctctttatttctatttgtcaatttctctttttctcctcatatatgaaataagttcttagttattattttataaagttttcattacaaataattttttcgttatcgcaaaattaaacccctattcattgtatatattactacaaatcatacgagttgcatccatacatttactccaatttgttacaaaaagaaaaggtttaaaaatgagagtacaacaccatttttccattaaaatctataataaagatacaactgttaatatcaagaacaagaatgatatgctgagtatttgttttttcaatcataaaggaatgaacttttcagggtagtatgataatatcaagagcaagaattagccaaaaaatatttcatgcaattacatctggtcaacaaaatgcctgaattgcagaaagataatatagtattatttgagcctgaaaatgatacttgggtttcaaagacctcaaattctccacttccaacaatataaaagcaatctcctttaccccctgaaaaagatgaaaactaacagttgttaaagatttgcctaattactcaaataaaccaaattttctagaattgttggaacaccacattttgatgatataaccttcaaaatactacttcatttaaaggatatatgtaccactttaccgtcatcccataacaaccacacctccattaaatgaaaaaagtaaattcaaaatgcaaaaggagtaacctgtttaactacaacatccgcaggctggagttcaactctttgcatgcaatccaccaaaacatgacactgagaatcagtaagcttttctatgggatatggatggaggaaccaaaacttgcacattctctagagaacttttgattgcacgtagacgagcctatgataaatcatgtctaccacgttggttctttgaattctagctaaaggttgaaggagattatgatcctgtaacctccacaacttgaggaacaggcggccgtaagacagcagcagaacttaaagtctgaccaccaccggtctgacagagaaaagtggtgaaaacatgttattggtgaggcaaataaatttaaaactataagaaaaaacacactgaaaaaatcaatttctcttacttcagctagtccatcaatatgcacaacaatgattgtgatatcatctgtacgagttttatactgtagccaaagcctataagattcagctacaattgcagcacacgcatcacgagggtctttatacttagcaacctggaaagacaagcacaatcataaatgacaactaagtactagtttttaagtttttagcatatgtacacaaatgtagtgagcaaagctccatgatttttgaaaaatttgacaaggcaatgtcctgtcttggatctaaaaatgattaaatagttaaaacaaaactacaatatcaaaatcaaaatttgtttaaacttatgtacaatacaagcatttaaaaaaccaattaaaagagtatcatgc

SEQ ID NO: 34123 - DNA, 1732 bp, Cannabis sativa
gggcaaggctaaggttaggttgagcatccgtggagcagatgaagattgtacatgttggggcagttagacctggaacatatgatctttgggatagttggttatattttgtctagttgcaaggcgatagcttttgtattacacactatgtaacatttgtatatattttgtaaacaggatcctagttatatatatgttatttattttggtataaataaataatttaataaatttttaattattaaagatttttaataaactcgttgattagcaacgagctgcacaattaagttaaaatgacgataacacgcctaaactagtagggtttacacttgaattctttcctcagccttcctttctagaagtcgaagcttgctccataaaaattcaacgtgactctcacatgcacgttgtttatcgtgcaagaaagatcactgggggtacgatgcgtcttcaaccctccttccaaaaattgaaggactgcttgaaatctgtcctactccctgtgatactttcccttgaatcttttcaagcgatgtccaagtttgaatttttatgcaacttcaaccttccttcccaaaagccaaagcccgctccataaaaattgaacgtgactctcgcatgcgttgttttttgtgcaggaaagatcattggaggtatgatatttcttcaaccctccttccaagaatggaaggactgcttgacatatgtcctactccccgtgatgctttccctttgatcttttcaagtgaagtctaagtatgaatttttatgaaacttcagtcttctttcccggaagtacaagcttgctccataaaaattaaacgtgactctcgcattcacgttgtctttctcgtgcaagaaatatcattgggtgcatgatacgtcttcaaccctccttcttggtatggaaggactgcttaaattctttcctacttcctgtgattctttccttttgatcttttcaagcgaagtctatgcttgaatttttatggaacttcagccttccttcccaaaagataaagcttgctccataaaaattcaacgtgactctcgcatgcacattgtttttcttgcaagaaaggtcactggggttacgatacgtcttcaaccctccttctcggaatggaaggactgcttgaagtctatcctactccctgtgatgctttccctttgatcttttcaagagaagtctaaacttgaatttttatgcaacttcaaccttgcttcctggaagacgaagcttgctccataaaaatttaacatgactcttgcatgcacattgtctttcaagtgtaagaaagatcactggggttacgatacatcttcaaccatccctccaagaatggaaggattgcttgaagtctattctactccctgtgatattttcccatattccctttggcgtttgcaggcaaggtaagtgtctaaatttcttgtgcgtttctagcctttcctcgtgaaggtcaaagtttgccttcataggactcaacatgaattttggaccttagcatgaaaagagttgcccgtgtagggatacattcccaattttacctctggaaaaccaaaagcccctacgccataagaaacccatggccttctctcacggaagcatgggagtggccagtgcactaccaagacactcccctctaagtgatcatgtaagggaagacagtgtgcttcctgaattagggcaaaaccacactttattctactcctcaaaaattaaaagagg

SEQ ID NO: 34124 - DNA, 1066 bp, Cannabis sativa
gtggtcctcataccaatgttgctcctgctctttggaataaactttggaatgcaaaaattttggagcgtcacaaagtcctttggtagagtattctctctaatattttacctatcaggactcctcttgctaaaaggatgaatattgaggatgtgtcttgccctatttgtagtgacggagaggaaataatggagcatctttttctctattgtaactttgcctatcacctctagagatcctccccttgggggtgatgctagtgatggactttagggctcgtgtttgggactgggttaaatttttatgggggctgaaggaataaggagtggcaatgtaggaagtatttctgtatgcctcgattgttgtgcacacgatatggaaagcctgaaatggtaaagtgataataattctttatgtaacattaaacagtgtattgactctatttctatatgttacgcagattttggttcttgtttgttttcttcgacgatgatgattatgcctcctatctggtccccctccaaacgattgggtcaagatcaactgtgaggttagaggttttagtgactcaatgtgtgtggtgactttagctagagatcatagggagtcaattttgtgggtgcctagcaacatactcaacttctctaatccgctcattggagaagttgtgacatgtttgttagccctcaaatcatctatcagttggaaacattcttttgtgataattgagaataattctgtgacggtgatcaacacgctgaaggggacttgtaccatttgcggtattggtaactatgcgctttattgtaagaatctctcaagacttttgattagttgtaattttttgtttatttttagactttgcaatttcgcggcccataatgtggccgagtgggcttttgcccgtaatgtaacgggtatggtcgatccatcctccatactagataacttattatgtaatgaccatgagatctaactcttttacctttaatataattacgcttttagtaaaaaaaaaaaaaaagaagataacatgggactaatataactttatcttgaagtctacact

SEQ ID NO: 34125 - DNA, 1361 bp, Cannabis sativa
attttatattatcttgagtttgtaaatcaagtctacaaaagaagaagaacaacagtgctacctccgagagagggttctacaagctttcaggagatagcttttcaagtcttgcctcaagaggaagtacttttcaaggagatcgaaaggagtttgagcacttatagagtttcgaaagatttgattagaagatggaatacatcaagcttgcgatatacaataagagagagtctatttatccaatgaatcttatctctgggtgtggccgtggactagtaacaatctgcaaaaattgttgataccacttacaaaaatcttgtgcgtttttattattctacaccgtttgtctttttagttttattctataattacagaattgtattttgtagttacataataaatgtttcagtatcatatttattattatatattagtaattgattaattaaataataaattggtaatattaaaatagagaatttcatattatatacccgattttgaaatcataagattttattatttctattatgaatgtaattatttatttaactttcaaaaaataaattatcattttaattgtcactaactcaaaaaagaaagagaattttttttgaacgtatgaaactggaacaacgaattccatgaaaaaaataatgtagtagtacaaaaatataaatcaagttgtcaaaactaagtaaaaagaacataatttaaaaacatattgaggaggtgatattgttttgcatattgaaattgtgtctttgtttttttttttttgttattttctagttatctttttgttgtttaatagttatttttatgttatttgttaagttgttttttagttgtatttttaattttactgaaacaaagtatttttggaattttgaaatattaacacagtatttttgaaaacttagtacagtaaaaatatatatataaaaaataatatgagtagaaatataaaattgacaaaaaaaaaatatgtatttttgtaagattccctttcattattctataagttctgcattttgtgactctagatgtgggtaaaaatatgggctatttacaaaaatatgggaaaataaagatatattttgatatatatgacataaaacttaattaccttaaatatggcatttttttaaaaaaaacttataaatatagaaaaaagtcacgaggaataccataaaaaattttaaatttgtgtttctttttaatttttttttttaaaaaaataaaacactaaaataaataaaaaatgatcctaactatggatgttgttttttttaacagaaattaaacttgtttttttatttaaactattgtttgttttttttttctttgtttttttgttaaaa

SEQ ID NO: 34126 - DNA, 1693 bp, Cannabis sativa
gagattgagaggatctcatccaacattgatacttggacttcacaattagaagcacttggagtacacagatcaatacacaatgcagctgaagcttcttcaagtcatgtccaagagcaaagaaagttgaggcaagcttattcttatgttgaagacaatcatgttgttggatttgaggaagacatcaaagtgttggttgcccttttgactgaaaaagagaaccctcataagcataaggtgatttctttgtgcgggatgggcggtttggggaagactactcttgccaaaaaggtctatcagcatcctcaagtcaggactcactttgattgttatgcttggacttcaatatctcagctatgcaatacacgccatgtcttcgaagcaatttactttgcttacacttctcccacagctgcacaaagaaatcacatcaaaaacataagtgatgttgaattagcaagggagctttacaactttcagaaacaaaaaaaaatgtttggtggttcttgatgatatatggaccactacaacatgggatcttttgaaacatgcattacctactcaaggagaaacgcatagcaagatcttactcactactcggaataaggttgtagctttgcatgcggaaggacatggtttcatccatgaacctcatttgctcaatgaagaggagagttgggagctatttcagaaaaagtactctactattggaacagatccatcacgtaatatactatacttcattctttttaataattttttttaccatttatatttatacacgacaatacttaaaagttaaatcataattcattttcatcatttcaatggacaaattcagattcaaatgatgatgaagaaaggaagaaagaactagcagtagagatgcttaaaaagtgctctggtctgccattagccatcattgtgctcgctgggcttctatctaagaaacacaccatacatgactgggagttgatgaaagcaaatgtaattctctgcataggtcaaggtgatcaacaacatgatgttcactcaaattaccgtagtgtttccggggtgttaggtttgagttacagcgagttaccatctcatttgaagccttgttttctgtactttgctcgttacgctgaagatgtccccataagagcaaaagagttatgtcatatactcatagcagaaggtttaatatcgcgaagaagaggttctgtggaaactttggaggaagtagcatatgattggttgtgtgagttggtggagaggagtatgattcaggtgaaagaaaagagttcaacaggaggaaggataaaatcattttgcattcatgatctcatgcgagacttgtgtgtgtctaaagcccaagaagaaaactttctatattttactgaatggcagaacaaaggggaagagccaatagaaacaaaggtacgaagactttccatctatgctaatagaaatactgatggtagtgattttattcatatgtttagaaacaaagatggctctctcagatgccttgctgtatatggtggaagaattgagtatagaaaaagagtattgagacatgtatgcaatcactttttgaagcttagagttttgattattggtcatgattccagttctattttaaagttgcctaatgaaattgggaatctaatccatctaaggttattaagtattcttccatgggtaatcaaaa

SEQ ID NO: 34127 - DNA, 1426 bp, Cannabis sativa
  modified_base (1122)..(1122): a, c, t, g, unknown or other
agttgggagatttgtggggctgatgacgtgatgtataaaatttagttttgtggagaaaagctggccgattggggtaagcaagttattgggaactttaaaaaaagattaaaaaagtgtaaaaatgagatgcaaaggtggaaattgggtcgagatgaagtctctgttgctaattacaaacaagcaaagagaaatttggccgaaggttatgtgcaaagggaagttttctggcgtcaaagatcgaagcaattatggttgcaagaaggagacaataatagcaaatattttcatgcttctacaactacaagacgaacttatggtttggaccaacttacggtttttggtgcgtgggttgtctgggatagtggtttggaccaacttatagttttttatttcaacgaactttttttatcttctcaaaccgattggagagaagtcacaagcagtgtgcaaactcgtgtatcatcacaacagaatgccaagttgttgctaccggtttcaaatgaggaggtttgcaaagttttgttccaaatgcatctggataaatccccagggccttgatggtataactcctggcttttttcagaagtgttggccgattcttaaagatgatatcatcattatggtcaagcaattttttcataatgggtttcttcctataggtcttaacaaaaccatttttatcttaattcctaagaagaagcagcctatggatatgggagatttaagaccaattgctttatgcaatgtgttgtacaaaattgtgtccaaagtgcttgctaatagactcaagagtgttatgccgtccttcatatctgatactcaaagtgcatttttacaaggccacttaatctcagataatatcgcaatttcctatgagattatgcatcatttaaagagaaaacgaagagagaaggatggttatggcacttaaacttgattgtaaagacgacctaagattaatattttggattattgaataattagggtttatgcatgagatttaattaatatttataaaatgcatgttgtgaaagtatatttaagtttatatatgtttattatgctattttatataaattattcaattctgtgttgtgctcggaagctgtggaaagcgacgtngggcctttagagagtcatattttgtatgtttagaatattatcggggtatcattgttagatgttagaggtgttagaatttttggggattggtaaatgaccaatttacccttgggagtgtgtaattattttatttatctagaggggcaagaaagtcttttggcaagatttcttttgtcttatttgaattataataaggttgaatataagttgattttttttaaaagaaaatctattttacttaaggtagaaggaaaatcaaagaaaattaaggaaaaggttcacctctttcttctctctctctctc

SEQ ID NO: 34128 - DNA, 1918 bp, Cannabis sativa
gactcgaacccagacccagacccacgtcgggatcgaaactcgggacctagatccatactgagaccttgacctagacccagacctggacctgcacctaagacaaaaactttgaccttgacccgaacccagacccagacctagacccagactcggacctagactcaaaccaagactcagaccccaaccagtcccggacccaaactcaaactcaaacactgaatctaaatcaaaactgggactaggacccaaacccgaacatggacccaaatcgggagctaggacctggaccatgacctgcgcctcggaacccagacccagatctaaacacaggactcagactcaaacttggaccaggactcaaacccagatcctgacctagaccgagattggaaactgaaccgggactctaaccctaacctaagacacggaccgggacctgggacccaaagtggaactaaactgggagccgagattgtgatttagatctggactcaaggcttggacctgacccgtagtcagtgtttggatttgggacccatacctagactcggacccgaacccagacccagacctagacctagacccgtaccccagacctgggtccaagtctgagtctgggtttgagttcgggaactggaatcactctaggaccttagacccacacccggatcgagacgcggacccaaatcaaaactcacatcaggactcgagacgcgaacctgaacccagacacagacatggaccaagacccagaccaaggactcggattgagattggagactcagacctggacctaggtccagacctagattggggacccaaactcaaaattagaaccagaatcgagacccaggattgggattgggacccaagaccagaccccggtctcggtccccagacccgaacacggactgggacccaggatctgaatcgaaatgagaccgagacccaagattgggatgcggatcttgacccatgacctagggttggatccaacccatagtcggtgtctagatcttggaatcgtaccaggactctaacctagaaccaattctagaccaggacccaaacctagactcggacccgaggcttgaaatctgagcaagaaccggaataaggaccttggaacaagaattggacctggacccaaaactagctctagacaagaacccggccaaagacttgcgccaggacctgcaacccaggacccctgactcgggacctggacctggaccaggtgctagacccgtacaagaacccaaaccgaaacccaaacccaatctcaaaccaagacccgaacccaaacactaattgaaacctggacccagacccagacccggactcataccagaactctgacttgaaaccgagactcagaaccgaaccaagattaggagtgggacccagacctggacaacaaccgagacctgaacttggactaggactagaacccatactgggaccgcgattggaactgggaacaggagtaggacccgatacttggacgtgggacctaagaaccatactgtgacccagacctagaccaggccatgactcgagagaaggagtggtaccgaacaaggaccgggacctgcattcgggtgggacgctaacccagaccgagacctagcaccttgacctgaattgggaatccaaacccatgactcaggacccaagacccaaacctggacctgagacctgaactaggacccaagacatgagctagaactagactaggatctagatttggactctggacaggacccaaggctcgaggcttggacccaacccatagtcggtgtttaaatctgggaatttgaccttaacccggacccagacccggaccagaaccagaactcaaactagactcgacatgtggttggtgtttggatttgggaccaagactcagacctgaacc

SEQ ID NO: 34129 - DNA, 2306 bp, Cannabis sativa
aaatagtgctataaaaggatgaagatgaagaactaattcgaatgaatattaatatataccaacatgcataaccaagtgttggataagtggtgcctttgcaatatgagaatactaatctttaagaataaattaatgcatgcatatataacatcatcatatatatatatacaagattctatatctatatatttatagtgtgaactcatttcaaggccatgcaaaaactaattaatgaaaatgaaagatgaataagcaagtgcatgccacaaatgcatataaggtctctcgtcattttctcttttggagtaagttatattcttttattattattattattattggtgaaaatatcaaacaaatatatttgaattcgatcaaattcaatctaattacaaaaaattagatattcgattatacttgaattagattatatattaaaatttaaatttcgttgatatagaatgcatttggtaacacttttttaattaattttttgtgtttaaaattaaaaaaaagtaaaaatattttccaaaatcatgttctataaaactgtttttactttttaaatttttaattaagaatctaaatttttaaaaatatcactttctaccaactagtgtacttttctctaatgtgttggaaaacacaccttacatggagccccaccactacctcgagagtttgctgctcattactaggccaactccaaatagaatcagagtatatcgcctaactgagcacatccatggatatcatgagagtacactaaggcacatcaccttaagaggatttcagatgattcatttgcatggataatgttgggatctggctctgataccacttgtcaaggacgtcagacaccaacatttccactccaagtatgatattatttgctttaggcataaggcctcaaagttttgttcttgggaacctttccaaaaagcctcgtactaataaagatatgtccatccttatatatccatgatcctttctatttctagccaatgtgggactttgttcgcattcccaaaaattggaactttaggacattttagtaataataatacatcagatacaacccaaggcacatcaacacaacaagtggagatagaacctgatttgaatcaggtggaaccagacgtagaagacactagctaggtggaactaggaacatgaaatacaggtcagatggaacaaggacaaccataacctggtatggtttaggtggaactagtagttcagatagaacctgactcatgataggtggaaggaaaccttgagaattatcagctaaccagagatagaaagaagagaatccccaagccaaattagaaatttagtttcaaagtttggtaagaagtaatggcatatgatttcttaagtgccatggagacaaaatgcactaaaccaaaaaatcctatgacattgctataaaatgcaaagatgcaaagagatggaacaagactatgagtgaagaaatgcgatatctaatgaagaataagacttggattgttattaagagacatgatgggaagaacataatagcttgtaagtggttattcaaactcaaggaaggaattaaagaagatgacccgatgagatacaaggccagacttgtagctaaggagttcacacaaagagaagggatagacttcactgagatattctcccctattgtgaagtacaagaccatcaaaataatgctagccttagctactcaatttgatctagaaatagagcagatgaatgtaaccactgcatttctaaatggaaagttagaagaagaaatcttcatggagcaatctaaagggttcatcaagaagggagaggaagacatggtgtttatactacaaaattcactatatgggttaaatcaatcacccatacagtggaacaaatgatttcataattttacgatgaaacaaggattcaaaaagagctattttgatacatgtctttatacaaaggggatcaaattacatcatctatatacttgctcttatatgtagatgacatgctaattaatattagcaaagaaaaggctaaggttgaaaacttgaagaacttactaaaatatgagtttgagatgaaagacctagagagtgctactaagatcctaggagtgacattaaaagaaacagagaaaagggaaagctaacacttacattacaaaatccttggagaagttctccatgacagatgcaaaagtcacaaagcaacccattacaagtcacaccaatttttcaaagctcaatgctgttaggctatttttagcatacgttttgggtcactttttatagttgttt

SEQ ID NO: 34130 - DNA, 4236 bp, Cannabis sativa
tagatatgaggagaggtaaagagaaaactaaattccccattgagtcaatgatatgtttgttgaaaaattgaaatttttagtttcattcggttgtataaaatacaaacttattagtatatgtatatttgctattgatatgactaatattttagtatgagtaagaaaactcaactatgtcttacactatgtggtttgcatctattttggcaaaaatttgctccaggcaaggagatttattaccttaattgacgagctgtacaatcatcactgccgccttgtttgttctgcggccgcttcaatcgatgagttatttcaaggaactgaagagggtacactttttgatttggagaggcaagtattatccgtgtcatatttgcttaagcacttcatttaagtattgttcttgttttattatcattcattattattattactaggtcaagtacttgttcttgttctcttttttctttttctagaataactcctgtgttgatagtttcaaactcttctttttcttttttcagtttccaatttgaaacagagatggaaggcacaaagcttcgtcgaaatgttttggaagaagggaatgtgagttcaggaggtacctcaaccagtattgtttccatgttgtccggcgaagaagagatgtttgcttttcgtcgagcagtaagtggcattagaatcagaaatcttagaatttttatttatactatccgtacagttaagacaataatgctgcttttaagatactttgtaaagaattgtaattatcaaccatcccaccttaatattttacattatgtctaaaaattatttagtgagaaatatagaatagaaaatctatatctactgtgctagtaatatgttttctgacgagtggctgtctatgcaggtgtctcgtttgattgaaatgcagacccctttatatttggagggagttggtagtctccatcattattttcgccaacaatctgaaactaagtctgcaaattacttgcaatctcagctgtcacactgagcaccatatgaaacgagtaccaattctaatctgaaatataactttcagtgtcatgttataatggataaatttgtgggactttatttttatttttatttttttgaaaaattaaaattaataaaatcaaatgaaataaaagttcaattattttattcttttaatacgtggattcaaataatgaatttcgatattttgtaatagacctcggtaacaaagctgtttattttctatagtagagaccaattaaggctgacaattcgtgcttatgagtctacattatatatatttcagaaattagaacaatatatatatttagttatgtatatatctcaattataattatcttattagggcggattgtgtgcagtaatagtcctactcctaataactatattatttgtagtgagtatctttaagatgaataaacattgagccttctctagcagagatcataatgaaaaatcggtggaaccttttcaaaatgtaacagaataaagtaccttgatataaaaaaacggcaagtcccttaatcaaagctttcactgaagtgaggtggcatctgtgggaggaaagatcccgagaacctccagccaccatcgtaaagatacatgcaaagggtatttcaaaacccttaaataaaaatcttgcactagaatgaaagatttgaatacaaataccaagggaaagcactatccaagggagaattagtaagatgaggagagaaaatattagagttagttccacattgctaatgtgtggaaataaactatcatatataagacaaatgagctactcctcccattgtcaattgattttgagatgaaatctcattcatcttatcctaaattctaacatggtatcagagcctcttgtaatccgttgtgagcccaaaatgccgctcttccaaaaagacaagccaaacttaaaaactttcgctatcttccctttaacctcttatttgaccttgtgggattctttcaaatgtcacgttcgaccatgtagtcttttaaaggttgttcgttatacccacacttttcaagcccaaacgtgaagagagtgtattagagttagtcccacattgttcatgtgtgaaaataaattgtcatatataagatgaatgatctactgtttctattacgaattagttttgagatggaacctcattcctcaaatcacaaattctaataaattgtgaaaagattaatttggggctaattattgattatatatataattttagaaatgctaaaagacactagtggtgtctagctccctcgtatcgggtcacatatagtttaatataataatttttaaagaatatcactaaccaatcacaagacgacacgtttagaaggtactaaacactactgatacccaataacaatatttttttttatttacatatttaataaatatacagtaatatgtataattttttttctacgagaactacaaccccctaactcagtaactacatccattaaagagagacccatttatttaattaaattgttgtactttatcatgacaatttttttttaaacaaccctttggatggattttatttgaaccccataatgtggaaaaataaaattttttttttacacttcaaaccagttttttatacatttttacggaattttatatagaaactcctattgcaactagccccgcaacctaaattacaacaaaaaattagaaacccccattgcaactagcgctgcaaccattttaaaaatcaaaatcgtaaatttaaagaaaaaaaattaaaaaaaagtaacatatgggataattccccaaaatgaaatcggtgggggcataacgtaaaaaaattaaaacctttaccgaacatagcaaagatattttattttcattccaactttgtgtatgttacattgacttgactttattattattattattatcattattattattttgctaataacaactcagttattactaattactttctctcttgtacatcatattggatatttgtactttgcaataatagtaggaggtgtttattggatcacatctaatagattttggcccaatccaacaaccgatccgattggattttcaaaatttataaaattcattggatgataattggatcggtttggttggttatctattggatcggatgtgccatccaacaaccgatccgattggattttcaaaattttcatccgatctgatccaattatgattgggttcgattctattggatcggttggcattagatctatcgattgtaattgaattgaatgactttttgcacactcttaaattatatggatggtaatttactacttttttgggtgtgagcaacgctacaagacacaagcgaaacaccacaagacgtgaaatttgtatggagaggactcattcctatgactttcgacaaatgataatactaatttatatagttttttgaaatcatactaatttatatagttaaatacactacacactaactagccgtacgtactactttattttttattcattaaggatgtatacttgattaattactacagttaattacgattacgatacgactgattacataaacttacatactgtgagagggacattcattattatttgtattttatttttgaacaaaagaaacttaagatcacaaaatgacctatcttgttcaaaacgtttccattttcatttgattacactgattaatgtcaaccttcacatataaaaatccccatttatcgaaatcatgtgtacttaattaatacgtgcttattcactagctctttcagtctttgtttaatttcttttacaaaattatatgtttacctacctgccataatgtattactgattttatttccttttcttttttatggcaatgtcatatcaaattaggtgaacaaggtttgtacatactccgaagataacgatcaaccatattataaggagagaacctcatcatgctacttaatttccctcagcaagggaggaaaaatacattataactaactctaggtctatttggcactaaaattatattttaactctttttcgactcagcccaaaatataaaatattactataagctggtttggtcaaactaattttttatggccaaaatacttacaatttatttcatcaatatatttatattccttcaacgtagtttttgtataaaataattttttgaaatacattaagttattatatatatatata

SEQ ID NO: 34131 - DNA, 1831 bp, Cannabis sativa
  modified_base (27)..(39): a, c, t, g, unknown or other
aggatgttaatgaaacatacatggtannnnnnnnnnnnnctggtaaaatattttcaacacatctctaaactatttacaccaagttagagatggaacatatcttttgtacactttgggctatcttgactgaacgaaacaaggtggttcatggcggcaaagcaagaacagctcaggacttatccatttttgcctctgtgttcatacagaacttccaagctgcccaacggaaacccactgctgctactgtgactgcaccaagaacttcgcaccagcaggttaattctgctgcaacactgactccaattccgtggtctccaccagcatctggtgcccacaaactcaacgttgatgcggttgttgactcctcaacaaatattactggtgtgggagatgttttccgagatgaaaatggtttggttgtggctgccctgtcaatgccgattgttggcaattttaaatcacacaaaatggaggccaaagcactattccatagtctcaattgggctattcaacatcaactcccaattatgcaaattgagaccgatacgcttatggtggcaaatgctttaaaagctcccttcaatccaaattcatctttttcagatttattagtggatgttaatagtctcttatccttttttcctaatgtaatggtttcacatattaaacgtattgcaaatgaagcggcacatggttttgctaaatttgcattaggattggatgaggcttgttcttggttggagattattcctccgcctatctactctattattgtaaacgattctctatttgtttaataataacaagtacttttcctaaaaaaaaatattttataaaaaaatattaaaatttaaaattaatatagtttatgaataaattattattaaaaatacaaccacaagtttcatttgtgttgatatgtatatatataaaactaaagtataaaacggtgacatgatgctttaaaatggtttcaaatatctctattaatttatttcgtaaatacaatcgttaaatgaataattgtttatttacctcaaaaatcgggactcgaaattcacctatatatagattattttggctaaaaagatatattttatttacatatttttaaattatatttatcaaaaataagaaatatttttttaattatttattttacagtaaaaatattatataaagtgtaatttttttttaaaaaaataaaatacacgcaagagcggcttagttttcaataatagcaataatttatgaaattaaatttaattcaataaatgataggtgttatctaatcattatgtgaatcgaaaataaaaaccctaaatatgttacaatgaatttatcttgtttaccctaaacgtttgtcattgtaagagaagcttagcttacattgctttagggcgtagggctagtttgaccaagaacaatacgaataagcatataccgattaaagtaggggcctttagcgccaaaacaaccccaaagtattactctccttagcggtgttaggtccgacacttctcgttgattctctaccacaatcaactctttctgcctaaacaacaaaatctctcagaaaagagtactttttagtctctttaagcttcttcttcttcttcttcttcttcttccctgaaaactcaaacaatttattctttttcattttttgtttggttttcaatctcaaaatttcaaacccttacttttcccatcggcagtactattaaagctttttcttttttaatcctaacatacgttgttttcacgccaacgcaaaacccagttagtatcatgaaacgagggtacacagaatcgccatctacctctcttg

SEQ ID NO: 34132 - DNA, 1879 bp, Cannabis sativa
aaaacacagaaatggagaaatatcagtttttagtaacaaaaatagtacctttgcaggtgattacttgaccttgagtagccatggatatgaatgagcttgggagaaccacaaaaatggaaaagagaacaaaaaattgaagcactggttttgatttgggagagtttcagagattaaagataaaaaaaggtaaaacaataattgaaaatgacgtggataaatgtggaccattggatggaaataattgtggagtttgactaaaagtaagctgtatcgacgttccaggatgttttggaactacagtgtttaagataaagacgcacgtgggtgattttgaggtgaaggtgacagttggcagtgttagtagttgtaattgtcgatgttagggacagatgcatatggcgggcttacttatgggccctacattgtctcgtgggcttttgttttgggaaactcgacccaactagcccatcttataagaaaatgtgggccttgttgtaaatgcccaattcttaaggcctcaatatgtccctttaaggtaaatactatttggagattatttttgtggtttttaaaggataagtttgtaaaaatatgattttttctttaaaaagttaatttattgaaaatttttagaaaaaagtaaaatatatgggaaaatagtattaagtaactgattatcctcttatggtaattgtttacgcctctcgttaccctaaggataccttattacctttatttaattttctcatatttttcaatttttttttttaaaaaaaaattctcataagataattttttttggaaaaaaaatcatatttttgcatagatagtattaaaacctaaaaaattttataagtttatttgttggactctctattttattaaatgataatttaaaacactattttttaaagtgatacaaaatagtacagcgagcttactttgaattaaaattttaaaataatctaatatagatgtattaaaaccaaactagttacactttttatacctttttgtactagaaactcacttcacgttggttatgttaaaaaaataacaaaattgaatttaaaatattattttgtactattttaaaaaattgaactcatgtaatatgcgtgttataaaagtaattgtaagttcattactaaaattggactaaagtccaagaattgaaaactttattttattatttttaataaatcgtgcaattttattaatagaaattagctaaaataataatatacaatccaatcagaatatctctcatgttggagacacgatcatgattagaattaaaaaaacgagtcaaataatcaatagcttgatttttcagatcgtttcacataaaaactaaaaaataaaataagatgaaaaaagactgcaacatcacagttaaccttaaaaatacttatattcagttttatctaccgctcaaaagacataacaatagaaactattgcagtaggttcattcaatctcatagctcgagcactcaactattgtgtgagctaagtaattgtactactaacaacccattgagtcacagagaacttgttattcccaaccactaacagcgatttgatggtgagccatcgaagaacaaagaagaaccaacaataaaacaaaattatgtcacacaataagtttaaaacactcaaaactatgtcacaaagataagactaaaaaacttaaaactatctcacagagactagagtaattgaagtagcaaaagttgaatcacattagcaaaacacaaccctaaccaagttgtacctacgtccaggaaaggttggcaggcctaaccaaaaaaaaaaaaaaaaagacaaccttctatagctataaatcgagaaattttaattttattttttaaaattaa

SEQ ID NO: 34133 - DNA, 2159 bp, Cannabis sativa
ttagagttttgcttgatcaaacaagcttattatagcatgaagcaaataatagttgcccacaatgatggcatgtcatcaaattcaatagctttctttcaagctttaccatatcagttataataaaatgagtttatcagaagattaaacgtcggcgaaaatgatcatgttgaacactacataacaaattagtaactattgagcataccaaattttctgtagcaacttaaaaaacaaaatatgtaatcataatatagaacacagagctatatctttctttttctgtaaatgactatagtctcactaactaatcatttcaatttacactaatagctccttgtagtgtatcattaggaagcatttcgataatctcaaagaaaatcgattaattcattggaaaaaaaaaagaccttgaataaggctccggcctgcacgctgcattgattgagatggttcaattaagttaactttctccaaggattgaggccagacttctctaagcgccctatgacattcaatccataaacataagaatccaacaattataattacaagtcaatagctcatatacttatccaaaatacatgattattcagtatatgatctacaccagaaggcagagcccgtgccagcaccaaaatccaaaacagtggacggagagaaaccaggtagccttctacgaacctgaagattgaaaagtaagcattaaatgttttaattgttttgtttaatatataagttgataaattatctttgttgttaatgggcttagcttcaatacgaagtctagttgaagcaaaagtgtgagtttatcttgtcacattggtaggtttttggttttgttttagggatctaaggaggcaaacttagtaggttaatattacactaacaatctctactatttctcaattatctcaatgaatcaataatgtatattttctatatcaattaattactcatagcgttctaaattgtatgcaacttagtatcctagtgcattatgaattctaacatatgtatcatcatcatcatcatctcagcaatgaacaaaactcagtatttgacacaataacttgacatttcatgagaagcccatatgaaaaaattcagtttttaaaaggacattacctccttaagaactctatgacaagcagagaacacagctggcatacgtgaagcaacataggcaatggtctcatcatctctatacatgagaccaatatcaccataagagctctgaatcttccatctcttggattgatccacagacttcaaagggtcatcaaaaagctccttagaagtggtagccgttaactgcaaattcacgcccttgatttcattcaacgattgagataaagacaggacctttctcttcatatgaggttgttcttgctctacaaaccaaaacccaaaacccaaaattaactctttcaacacttattcaagataaatagatagagaaagagagagaagaaattacagacctcggatgtactttttgatagctcgacggagacgaacgggaacgacgaggcaacccacggattgtttggctgcagaacgaagtgtttctggagtgaaaaccttttgggcagcctcgtggattacgacggctgacgccatttttggtcagaaattgtgagattttactactcaccggcgatggctgctgttatcagtgtcgggggtttattgagaggaagacgactcgggttggggttttaggttcgttttgggcttctattgggccctacatccacacacttttgggcttttttgggctttgaaatgaaaaaaaaaaaaaaaaagtcttcataatatcacatacaaatttaattgcagtaaatatgatatttctttaaaaaaaaaaaaacttaaaaatatagaataaatcatcaaagataaaaacaatactataaaaaacttaaaaactcttataaattttttacttatattatatcaaaaccagtttcttcatgaaaaaactgattcttaatgaagaaactagttttttaatagaaagttttctcaaatacgatacatttaatttctctgatttatgcttcaaaaaaagagaaagaagcttcaaaacgttaaatatgagatttataaaaacatttgtaatggcaaacctaagcccataaaaattcaaaaaaaaaaaa

SEQ ID NO: 34134 - DNA, 2219 bp, Cannabis sativa
gggaactaaccacgttccattaaacgattactatttgaatttaaatataaaataactgccaatctattatcctataaataggggcacaatcccatagataaggggacaaatgattttttagaaaatctttgagagaagaattattatattgtatattgaatactcaaaaaatatcttgaataagatagactcatggagtatgcagatttaactggaaaaccacgtaaaaaactatctggtgttattattatacattattaatttcttataatttctgtgttaaatttattacgaaaaagacttattattggttaacaaaaatctgcgttaacaaaagaattgttaatgggcactagtggtgttcaatactttttataggcagtgtcttatgattagttagcgatattttattaagttatatgagactcgatatttaattacaataatagttgtatgacaccgagaagagtgttagacatcaatattgcttaaaagctaaaatcttagactcactggttagccaaccaatagctcaaaatctatagtttattaataatattatgtaacttgtaaaaatgtaagattatatctgttcattaatgaaaaattggacgttatttaaatatatattttttgacaataagaaattgtttaagttaatttttgtaaaacaagtggattagaacatctccaatgatgagaataaatgaaacaaagttaaaatataatccgctttgttaagaaatatattttaatagtgtgccaaaaaataatacaaatttgacacataataaattttgtaatgtgccaaatttacatcactataaatacaatatatctttttgtttttatgttatttttattattttagtagtatattttaacattaaatatattatggacaaattacattcttattttattattttaccttataaagctaataataatttttttaataaaaatattaattaaatattaaattttacataaactttattaaaacttatacaaatgtatgacaaatgaatttttttttattatacatatatatatatataacataattttcacatacatattcacttcttgtattaagctccactcacaagtgaagaggtgttcatctcgaatcccttattattttattattttttttttgttttaaaaaaatgaaaagagcaataaaaattaataaatgatactatattttgaaagatcattgttattgggcatcaataatgcctaacactttctcgatatgtcgtgttgcaattgattagtgatactctttaaaaaatattatattaaattatatgagactcgatatttagtaggactaattgtaatattgaaacatagcagagtgccaaacacaggtattgctgatgcgctttagcatttctcattttgaaaatatgatgattaaatatctttgaaaactttgttaaaccgttagccgtgggaacaagaactgacaaaaaatgaatgtagcatctgagaaattactccgctgaactctctccctatacccaaacacctatgacctacctaggccggctctaccctatagctacttacttttagaaacaaacaacaatccacagctatgtctttcacaatcatgtaatactttttttaccagttacattaattattaaaacaatacacattaataaagttaaacaagaaaacacacccacatatcattattagtactgttagatatttagatacattggatgttatatgtacatacagtagtctacttctaatatctaagtcatgcgtgcataataatgttaaaagagattagtgtctactgctaactattagtatatttaatgttaatttattataattaaatatcaaatatcatatatttaaatataataatttttataaaatttggttaactaatcgtattaactctatgttatgtttagttagtgttagtaataagtatatgaataaattgtaatgtacttactgtgctggccaactaagtattactgcttcccaaattcgtagggagtcctatgtaacacgtaggttgactaggatccatcccctttttaccaacaaaaaaaaaaaacgtatcatgtgttgggatttgggaaggttaaagctggtctcactttcatttctcttgtcgtttttatttatttatattttatgtttctatcacgttcattatatcagccatcttctatcctaaa

SEQ ID NO: 34135 - DNA, 5393 bp, Cannabis sativa
  modified_base (615)..(616): a, c, t, g, unknown or other
  modified_base (812)..(818): a, c, t, g, unknown or other
  modified_base (1644)..(1650): a, c, t, g, unknown or other
ctctctctctctctctctaaagttgaatctaaatctaaagtatgaaccttggagattggagatcaaaattcccttgaaagagtagagacactcctatttatagttgttggtggggtcccctttaagttgctattaaagccaaatgttataactaacaacaactttcttcagattcatttaatgaataaatagatggatctattgactttgatagattaagtgagtttaatcacaatacttacatacaaagtaaattctaatatgagggtcgctaagttggtgattaatggtggtggtgatattgcgataaaaaatgacttaccaaggtattctttcaggaaatctagaaattgattcccacccgccgctctgaggctaaaattattatttctaatatgggttgacatacccttcttaggttgaagtggcctatggtatttggtggtttccttagataactattggaaaatatttatcataatacatatatgtaaagtaggttaaccattactacaaaaaattgctacttttcgtgacaatcttttagtcaaaacataaattttttgtgattaaatgtgaattttagtcacaataaaaagttacttgtgactaaannatagtatttagttacaagttgtcactaatttagttttagtcacaataaatattatgactgaaaacacgtttagtcacaacaaattgtaatttttgtgactaataattttagccacagacattttcgtcacaacacaataatgataatttataattagccacaattttttttatctttagtcacaaattttgttgtnnnnnnnagtaagattttttgtagtgcatcaaagtaatgttaactttttgttaataattgacacatttaattaaaaatatatattgtaataaattaatatgaaaaatgctccccctaattcttataggaatttttacatgaaaaatataaattgacattttatttcaaaaaatacttccataaggtgtaggcaataattttatctttaatgagtttttatttactaaaataccacttacacatatccattcatgtcagtccaaaccaccttccagccattaccattttgaaacccatgttcaaaacccacaaaaaccacctcccaaccataacctttgttatcttcttcttccaaccgcctcctttatcaattttttttatatatcatcttttgcttctccatctctattgccaaaaaaaccttcaaaaataggtcataaatcagtggttaacaaggctaaagagaaacatccagtcatcgacgatgatgactccgatttggctccccccgtggctaaaggtggtcatcgttcagtgaaaaagaagtcgaaggtgtctttgcctgaaattttttttaacttcgacaaccataagggaaagaacaagtcaacttcaaggcaactgtgatgaaactgtaatgcaatagttatatctgttgcgagccaactaacataaaaccacaaaacaactaataattctacatatttaatacaaacgaatattacaacaattatgttttatctgttcaggtgtatttgacaatttcgagccatgtttttataatactatgatattatagtagcaaaactattattcaactaacgtgcaacttnnnnnnnactaaaaatgttaaatgtgaatgtgtatttataagaaactatttgatagtattttttttatcattgaccgataattacttgtaccttaataaaatatgtggagaaacaaccgttagcaaaatatttatgcaactgttatgaaacattaaaaattagaatagtgtttccacatacgtaactctatctacatgtttattcgtgatttaatatgaacaaattcactattagaaatctagtaaataataaaaatgcattgggataaacatttaactataatattgatgtaattttttttgggttatacttaagttggattgtttaagaactccagtttaatttttttagatctgcatttcatggatctgaaaattgaagttaggacattagttttatgtaaattaaactagatttctagttgaattttagattcgtagtagtttttttagattttttttttcatgaattcgaaaacagcccatattttgattgattttggttgttttctcacaggtgaagtcaccgaaattaatggtgattttctttcttgttgggtattgtttcagttgtgttgggttgttggattggtcgatcgaaggttgtgtgcgtgaggttgtttgtttctttcattaatatgaatcaacatttgtttcaattgattcctatcttcttctccggtgaggtcaccgaaattaatggtggtatccctcatacttgggtttcctttcggttgtcttgatgggttgaacgatggttgctttcgttggtaatttttctatttcgtgcggctaaagctttagaaaaagaggtatttttttaattttttgtttgtgggttgtataattgtttaaaggaccgacccactgtattttttttttttgataaatttcaatcaaactcatagtattaatccaattataaaaattctagtatggtgttatggcttcgtagcttctcatactcaaatattcttagagaaaaaaattaagcctaataatattaaggagtatttttatttttacacttcaaaataatttttttttacatttttacaaaaattcacatagaaactcacatagcaaccaacagaacaatttaaaccgcaacaaaaactcacatagcaacttatataaaaattactagactaatccaaaaatttaaaaaagataaaaagttaaaaaaatgttatataaaataaagcctaataatattaagggataattacataagacactcttttttttgtaaaaaaattacatttctacgttgaaagaatttttttttatatttttacagttttccatagaaacaacagaaaaacaacaagaactatataaaagtaacataaaaataatatataaataacatcaaaacaacaacaaaaaataacatacaaataacaaaagatcaacaacaaattaacaagagtataatataaaataaccgtatattctataaatagaattaaaaaaatcgtaaaaatatttaaaattttataaaatcatatttttataatttgtgtgtatttgtgaaagcaatattaaagagtatggtataatattgaaaaaaaataaaaaaaaaataaagaatttggaccgaatctgaggtggctaaagtgggcccccacgtactcaaagcccaggatttgacccaaaacggggttcgcctacggtcacgtcactttccacgatagagcgccaaggcgttttgactgcgttcgggcagcgggcagcaccgttcgggcagctccctttctctttctctctgtgcacgcctcactcgaaaaagagatactaataataataataaataattattaattaaataaataaataatatttaataaaaaaaaagaagaagaaagagagagattacaatctcacacaaacacactcagtctcaggaggaagagagagagagagagagagagtttgggaaaagggaaagtttggctaaaaagtgggtagcagagaaggaataatggggaaatgtttgaaaatggtttcgttttcatggggtttcttttgggtgcgatgagatcgaactttttattctgatttagtacatgtaaatttgtttttttctttctttttttgaaataatataaaatgggtgtttaattcttgtgttggtttggtgaaagtttggattttttttttttttgagttgagatttggaaagtagggtttttggtgatttggattggttagtagggggagttggtttgggtttggggttggggtaggaattttttgtgatgttgtgtttgggtgtggcataccatttggatctaaggtttttggttacttagactaaaatagcaagggaggaaatatggaaaggaagaagctttggtggtcttcattttgcctttggttgattttggtagttcatcctttatgggtgattatggtatctgctaatatggaaggtttgtatgcatgtttttttcaatttttttgggtttttttttttcatagctttgatctttttatataatgggttttggagggttttgtttcttggcaattcttttgctgcattattctttacttatttgataatgggtattgaaatacttttctcatttttgaatattttggaaatgttagttgttttgtgtgtaaatgaggttggtgaaatgttgataaatttggggggtacctatgctgatcaccttgttgtttcacatttatggcttggagcttagttttttttttttttttaatgaagttagtgagcactttgatttctcttaaatgtcaatgtttgattcccctaatgtaaccttttgatttggtcctacttcagtatacagtagtaactagtaaggattctattagactttgagttaatatagtagtttaagatcctttttttgtatgctttgaaaagaccttgacttggttgatgactcaaatttgttcttccacatgttgactttatttgtgtgatcacccttttgtttagaatgtcaatatttttataaggttcccattttttcttattgtagtttctgtcttttagtgtcatgttcatggaattttccttttagctttgcggttttcagactatgatatggtattttcatatgtacattctttgcagcaagaacttaattgttatacatgtattcattttgaaacaggtgatgccttgcatagtctgaggtccaatttacaggatcccaacaatgttctgcagagttgggatcccacccttgtaaacccgtgtacatggtttcatgtcacttgcaacaatgataatagtgtgataagggtgtaagtttctgccatagataacctcacaatagctgctaaattagtgaatttgtttaagaaaatatcgtggaccttttactaaagtacagtctatgcagtgatcttggaaatgcagctttgtctggtcaacttgttccacagcttggccttctcaagaatttacaatatttgtaagtaatagtttttatgcgaagctcttttcgctctttgtttttgttaattattttggcctttaccctttgttcggtgaatcattggttgcactttgggcaataaaacaactgtttacatcttgcacagctaaactagatccttttacatttttccaagtactagatgaagctggtattatatgatgatgataactttagcaaagaaatcattctatgtgttatattattgattatcctattagctgtttttgatcagtacaagtatacaattatgcttgtatctctctctctc

SEQ ID NO: 34136 - DNA, 1454 bp, Cannabis sativa
tagaatgtataggaacattgctaccatctcctcgacagagacatttcttgtttttcttaaatttcccctagtgctaagtatgttacataacctttgaaatgtttctctatccatttttcaattgtgaaacacaattgacatcacttgcaaatactaaatcatgcaagttttctaactgtttgtagactctcattatggataatggttgattgaggcgtcttctagaatttatccatgcataagcactcacaatagtacatacagttaaaataacatctaaaatcacaattaaattctgcaccacaataattaacttttgcttttttgctaaacttaaacgagccattttatctacaaaaaataaataataaaaaaaattacacgacaatatcaacatatatacataaaacacacataaatatatatgtacaacatataaagtaatatgtaaaatttcttagaaaaaaataatatgtgtaaacaaataactaacaacaaatatgttaattaacaaaaaaaaaaaattaaataacaaacacaaaatatataatatataaaataaagtaattgacaatatagcaatataatataatttttattcatgtactcataatgaataaatatatatgtatatgcatatatattttaaacaataaattttatcaatttctctcaaaaaattataaattaaaaaattagggagccatgcaaagatggtaccgcccctgtccgttgtcccaactatagacatatgtatatatattagaatacaagagaaaaaaattaattactgtttaacaataattttcagaataacatatgcaaaaatgatatatttgtaatcataaattatattatgattccaagtactatttttttgtggcaataagctagttattggaataacaataatttaatactttttttttgtgatgaacgtaatattgaaattcattaagaggttctgaggttgtttatgtggtttgcctagctggagctgttcatataattaactttttgtaaggattttattatttgtcttacacaccttaacatatacctcactgaatcctattttcttaaacagactttctaatatcattattaatatttatatatactctttatcacttttcttctcgattaatgagatcttgttggacaaaggtaaatataactcaacaaatagaaaatggaaatataatgataattcaaataagatttttattaatatattttgttgttgttgaaggaggtttattatgatgatgatcatcatcatcacggccgaacttgctagtggaaagtaaaatatagaaaagacaccacaataaagcagctataaatcgaataaaaaaaaatagaatgaaaaaaaaataagaaaagaaaatccataataaaattatatacattcatatataattacaattatcaatataaaaaatatattttgt

SEQ ID NO: 34137 - DNA, 2045 bp, Cannabis sativa
gggcataaaacccaacagtctgatggtcacctttacccctaacttgagtgaggtgagtgtctccaaaaagaaaaaaatgacagactagcaccttcataagtgggatatacaatcaccacacacatacatgctaaatttgtttaaggagtagatgatgctacctccatcataaacataatgacattatcaaaggtagataaggacatcctcacgacactatgactacccacaacgtagaaggggtctcgcggggtcatcccgagatgacaattgacaccctccttaggttgggtctcggggttgtcactcccaagtgttagcttttatctctgaaggtctcaacaaccgtgtcacacccttaggagaccctcatcgtagtgactagttcaaatattcaaatcccaaaagaagctcaaagacagttataaacctacaaaaatagcaggatattatcacaaaaatcagacttcaactacctccgaaaaatcaaggagacggttgagatagctccgcgttggtcacgtctcctgaagcgagaagcaccgacatttttccctatataaggggtcatccaagacctgggaaaaggatccacaattttgagcatttagagaaaaaacactcctcttttattctttccatcattcaaagagcctgttcttgacttttgtaactctgattaataaaacacaagggaagtggactattaccaacatctgaggcgggacctctttaaattctagtttctttctttacatttattgcgaattccggtatcattatttacatgtattgttacgattttggtttaaattttatttattacgattctgcgttgattagctaaaaaaaaatattactgaagggttcctccctttcccttattgaatatgaaggcatatccaattatttcagaattcggcaactctagagtttgttgaaaaaattccatagtcgcatgtattagtaatttatagttaaataggctcttaatttgttttgacaaacatgctggcgcagggcattatcgcgttattatcgtaaaaggatatctcgagcaactaaggttattccaaattctaaatgtaaggtcgtaccgtgagcttatgagagtattcaatgtctgaggtgatgagtctagataatttaaaaatgaacatgttctccttagtgccaaatttattaacatgggatatacattataaaatttcaaagacaacaactaaaaacactttatcgacggaatcaagctttaagcaaaatagggcgctaaatagacgagaacaacactaaaattccatccccaagtaccaaaattaacaatttgatttgacaattgagctaatagtaccatactgaatttaattgtgaggaaatgaaggtgaaaaccaacaaagaaacaaaaaaactaaagccatgattctgttagagataatatgaggtagcaaagcaagtcagattaggactttttctataaatagtttatgatatcaatccatctacagatagaatgcgtagactaaatagtagaaaagtaacagaaagtcaaatgtaaaaagaaatgggaaatcataactatcttctccaattaaaaaatataacattcccaggcatatcgaaaattcgaaatagcatagatgtaagatttgccttttctccttccagaaaatcccagaaagaaagaatgtatactagattttttttttgtttaaaaaccaatttggaataacaaaccaaaacacctgaatgaaaactctctataccacgtagatagcaccttcgttcttaatcaaaacagcttctccactcggacaatttctcgagcaatttacgggtgtaaaagtcaggatcacacaaagcataagctgtagcaaaaattgatttaaggagaaggagagtaataagcaaaaggtgacggattgacgggtggttgactggctgggctgtgcgacagagtaaagatatacccgacaagtttattccactcaagtcgactgtaatatccagtttaaaatagtatttaatttttcgtttggatattaatt

SEQ ID NO: 34138 - DNA, 5490 bp, Cannabis sativa
aaagtccttaaattcaacaatctctatagttcaaggggcatttttaacaaacttaaaagttcaagaggaatgatttggtacatttcaaagttcgaggggtaaaaatcctaattagccttaaaaaaataattaggaaattatattttgaagtatactcatttgtttacatacgtggaactaagttatcaatttaataaaggtttatttgtactccaagtttttaaactatataaattttagggccaatttggcattgtagaaaagttgtgataaaaaagtgtttgctaaacagttaaaaaaatagcttattgaataatttatgaaaaatgtacagctaaaagctaaagcttgtacaactcaacttttttaaaaaaactgttttgattaaaaagactctataataaattattttttactaaaaacatatttgattatttattatatattacaaaaaataaaaatattttttttgaaggaaaaaatacttaaaataaataatatttaaatctcttatttttttattttgttttaaaaagcacttcatattatatttttattattattaacaaaccacatcaatttagagtttcctataaactataagatataaaaatataatttaaatgattataagttatttttatcaaatgtgtataaatttatgctgtgataaaaaataattaaaaatatataaaaaataaaaattttatataaacataattttttatatagatttatgattataataaactagattataacattcttattattataatagaatcttaaaaactcacagcactttaaaatttatatttactaaatactcaacttagcttttttcaacagttttgctacagctgttttttctcacaacacatctacagttacttttcctcgcagcacagctgtgccaaactggcccttagtaagttggtgcctaaactttattttttggcaaattagtccccaaattatataagttttggcaagttggtccccaaatattattttttggtaaattggtctccataatattatttctttagcaacattaagtccccactattataaattgatatttttattaatttttatttattttacatactttaatttattttttgtgttaaaattatatatatttttaattttaatactttgataaaaataattttattaatattttttatttttttaagtactcatataatatatgctgtataattataatatttaattttttaagaaaatatttaaaatacattttattcatatatattattaataagaaaaaagagtacaaccattagcatttataatgtattttattactgatttcacccctatacagaagatctaatgggtttttctgcaccactcatcgacagtaattcatctaacttatgatcataaagtgaccttaagcttgagcaccaagcacaagcaataacccactacatctcaatagcgatctatctcactcagagtagatagcttcaacatacaagactttaaaatttttcacctcagttattaagagatcaacgctaaggggcaagagcagtcagctcagacagtatcaacaaaatttcaaatataatggcgacaaaaagtgatggttaatgaccaagaatcaccaaatattctaatcaaaatagaccttgaaaagagtgggtcactccttaagagattcagagccatgcaagcagctcatgtatgatttcaagtgagccaacattgctccctgtggtaaaattagattaccactcacagtcaaaactgccccgtggcaaacatcactatgactctcttcatagtggttgacaccaagtctccttggaaggtcaatacccaataacctctgagccatctcacctatctaccatctgtctatcaaattcttgatagcagctagtattgaccatctccttggcaaccaaagagtagcatgtgaatgttacaacacatcattgacatttgccaagaagacctcatttgttgtgctaacagccgaggggataggaagacctcctctgctaacagtcgaggggaagtagaagacctccttcgttatcaagacaaccaaggggacgaaaaatgcctcttttgttgtgaatacaacaaaatggatgatgaagacctctaaggttaaagaccaaggataaaatggagatcgtacctacaatcactctaaggtgcacccaagacgggaaaaattcacccccatcttgggcatattagtttgagagttggccaaatcctcaattgaccaaagaacagccagcgactgctataacacatcgttgacagtcgtcaagaagacctcctccgctaaaaatccaaggagatggtgaaggcctaatttgttgtaaagcttaggagatgaggaagatctcttctgctgtaaagccgaggagattatgaaggccttctccactgcaaagtcaatgggatgttgaaggcctcctttgctgaaaagtcaatgggatgttgaagacctcctccactgcaaagccgaggggatgttgaaggcctcctttgttgcaaaattgaggggatgttgaaggcctcctatgctgtaaagctaaggagttgatgaaggcctcatccattatcaaactgaggagatgagcaagaccaccttcattgaaatacaactgagggaatgctaaagaacttcaaggctacaacctaagagaagacaaagactacatctatattcacataaaaacacagtgtcataagagagtcaatgttaagacaacagctaaagatcagagtaagtgttggcattccaatgttgacacatttcagaagtatctcaaatcaaaggaaatcactcaaggggtcatctatattttaagttaaaaaggaaaagataaatgataagaaaagatgaccatcttcctcttttccttttatacttaaaatctgaattccactattcaagagggaatggaaatttgaaatcctactcttaatgggaatgcttgaagaacataaataattatctaagattgtcaaaattgatgcccacctagtagtttttagagaaacgggcttggttcacatcattaagtcaatctcacacaagtgtaaagttaacttggggggcaaatatttacaccaagagtagccctgatgatgtggacatcaatgttggacatgtggcaagaaagatgacatctcagagttgagtagtcctaagtcatagcaagtcgatctgggaggggtccctagccctatgcccagaatgacttcgggaactccggaatggaagttcagacttcagtaactcatttccaactcgctatctttcattattctgtaccatgaagacatggagcaatgaaatcgaggccttgggagctaaatttacacgtacatgtaccccgaaagtcaacctgggcacctagggtttcacccaatgcccaagttgacatcctcaactagggtttaagtttttaggaccgacttagtgcaaatgggtcaaactttgcatcgggagatgaactagacataccacggacatatttaaggcatcacaattagattcgaagaaagttcatttttgagcactcggagcacccagcgccctggttgataatttgtcaatctgggcaccttccaagtatcataccgacgatctaacttttgcatcatctttgtcttcatcaaaaacaaggaaatatgtactttaggagaagaaataatacttcttgggtgccaaaaataaggcccagcgcccaggttagcaccaggggctggcccaacacccaagttaacattttgtcaacctgggtcgattcttataatatttttcgagaaatatttcaagcatcttctccattttcagcaaagattaatattcaactatttttggggaccaaacgaaacttttgaagggccaaaatgggaactaagttcttgaaaaagtattccaggaattttttttgtcatcagaattaatgaagattcaagcaaactcagtgagaaaaccacaatctcaagaccctagaaatagggcccagtgccaaggttgacctagtgttgggcccaatgccaggttgacaatcaacatggtgcactagttcaaaatgttaaatctaatccgaccattgaatctggaatggtaaaaaatggggtaggagacctcgtcctcaagttcaagaatcttggaagtatcaaaacgacaacctgggaactcagaaatgagtacccagcacccatgttgacaaatggcctggtgcgctgggttcagcttatccgattctgattctattttgacagtctgtctagtttttcataataactaagatccatgaattcaaagaagtcaaatttacaacttcgcatttatcatttccaacatgggaaactcactcggaaatgaagagttttgagtctctcatttctacagaacagcaacatcttcgagaactgatgaccagcttcaccaaaatacagaaacatactaagtgatgtcaaaatatcacttaggcatcttaaagtacattccttggacgtttttacgcttaaccagcgtctagtttgacctcatatgtcaacttgagcattgggatgtcaacttgggcgctggatgtcaacttgggcattgggtcacgaactgccttcagtaaaacgaccataactcactcaatattgatctgattgatgtgattcaacttacgttttgaagctatttcaacgctctatcaagtcatggctcacacttcaatcacaattctgaagctatcggcaccaaattttaccccaaaggagttacgaaaataagctctgattacccgcagcgggtcctactgggctccaaaaaaagactatcaccatgagaagctaattttcaccgttagattatcatctacgatcaaaaacatctaatttttattttctccctatttttgtgggcctcattcacctataaaaagagagctcccttagctcatttttcatattcaaaaaaatacctacaaggtcagaccatatctctctagtttctctctctataaatcagagcttaaatgctgtcttaatctgtaattaccatctcgtgagaaataaaaactcgaagtagatgtaactctattaccatcgcgacatagggagtgaactactataaattttgtgtatctctctaaattatatacctaaacttattactcatgtcgtcaatctaatgagttggttgacaattttttattgttaacatactataagattttttttctctttttgttaattttaattaatttgttattttattttaactttttgttttaattaatagaatatttaatgatataatattttaataatataaaatatatacaaagaagtataaaattatgtccatttaaaaaaatatttgtcttaaaatacacacttagggttcgtttgataagcctagtacaccatattgtattgtatagtattatattaaattgtattttatgcaatatttttatgtaa

SEQ ID NO: 34139 - DNA, 1267 bp, Cannabis sativa
aatgcatgagtcagtagtttgtacatccttatctcgattaagactttacagtcagaaagttataaatatactctatcagctccacatttaatgagttattccattttaatatcatttttaatataattaccattatattcattgattcgtattctccaaggttgacatgtgtcctcctctgaagtgccaactgaattttaggcataacaattgccccttaaatagttctttttagtgaaaagttctttttaaaataattactaagggtatttttgtcataattcattttgaaattacacatgcctttgattttggcggttttatggttccaatgcacatctatagcgttaatgaaccgtctttttcccttatcttctattttcatccattagatcttctatattatgatctgatggttgttaaatttagagtataaaacggtaagaatccaattttctactattttagtccttttcaaaaaaataagcttcttgaaactcgagcttcctatattcgtgcatgccatccttatccttgacattcttctggtgaatttacgcagacttgctcttcgactcccaatgttcgaaaaactcatcccgccggccatcacatctttatccatagaattctccaacacctggttttttgacttcacacagtaagtacctcatcaattttcctttccccttcttttttttatttgggttatgattctcttggattttgttacttcattcggtttaacaattagggttcatattttctgggtgacttttcgggcttagacataatttaggtttatcacattccttaagcctctggtttgataaatttcatccagaaattgggattatttttcttttgtagaaatgtcctaatttggttcagaagtttattgtccagaatttttaaaaccagaatatcctaaacatctagcctctccatgtaaaccccaaaatttaaaacctcaatccaaattagaagtaaatgatgccaaaagtagggaccatctaattaagtcgaaccaagaagagactgccaatcgttataggcgattcttacaagaaatttttgagggctagcgtcgtttcttgcgagatgcggcctggcctaaacccacgatattaacttctattccactcgtaagactaatattgttacccaaagtcaatgttgcttttgaaccaggtgaccttgagtttgaaatcatgtctcctaagcctcacaaatcaaagacccctcaggaccccaatgttacctttga

SEQ ID NO: 34140 - DNA, 3490 bp, Cannabis sativa
  modified_base (605)..(606): a, c, t, g, unknown or other
tgttatgatgcaagtactcggggagcgatcttgacatttaagaggctttggccatctccctagactgaagggagttggggccaaaagagcacctgccacgcattcttcggccccaccgactgttacaatggaacagtacgaggctttacagaaaaagtggatgaagtagagtagacaactcaatatgcgaggtagaaatatgaaacacaacaactctacctcagacgattccaagattagtttgagtatctttctcgagctgttccgggtttcaacttgcctcccatggatcttccaccattgcccactcctggtgctggatcgtcatctcatgctcctggtgctggatcgtcatcacatcctccccagactcaggggaacaacgacgatgatattactcgcctatagaactttactttttttattatctgattcgaacatcttttaatgttttgtttatatactaattttagtacaacataatataattaatgtttgtttatcttttaatgtaaattatgttggtttttttcttaatataaaatttaatataattaattttgggtctataatataattaattataattaattaaatataattanntaatttttttaaaaaaaatagtttcaaaaggtagcaacaaaaaggttcgcgccaatcctgaatagttttgccggtgcatctatagcgccggtaaaacttttcgtgccaatttgaggattggcgcgattctttttaccggtgttatattgcgccggcaaaagattatcaaagcaggttcataacggataagggtatccttttacaccggcgattcacctttaccggtgcattttacctacgccccggtaaaaagtcctttaccgaccaagattcgcagacatgttttgccggcacctttagtgtacttttgccggcacaaaaatgcgtcggcaaaattaggttttcttgtagtgcctcttctcgcactattgctgcactaatcgtgtcttctgagattgccagatagaggagtaatgtttttccagtcactggttttgccaaaactggaggcgtcaccaaatgccttttaatattttgaaaggcctcctcggattcttttgtccactcaaatttcttgttgcctcgcaatacattaaaaaatagcaaacacttattagtcgacttcaaaatgaatctgttaagtccagccatccttcttgttagtgcttggacttccttcggctttattggtgatggcatatctatcaaagccttgattttctcagagtttgctttaatgcccctctcgttgactatgaatcccaaaaaatttcttaaggaaactccaaaggaacattttttttgggttaagcttcatattgtacttctttagtatttcgaagcattctgcgaggtccttggtatgactcccacttttcactgattttaccaacatatcactgacgtaaacctccatgtttcgactgatctgattcgtgaacatctcatttaccaatcgctgatatgttgccccagcattcttcaacccaaatgacatgactttgtaatagtatagtcccatgttggttacgaagctcatatgttcctgatctagaacatgcatttttatctagttatagccaaaatatgcatccatgaatgacataagctcatgcccagtagttgcatccacctgctggtcaatcctaggtagtggaaaacaatcttttgggcacaccttattcatatcagagaagtcaatacaagttttccaagttccgttaggttttgggacgagaacagggttggctatccacgagggataaaacacctcgcgtataaagtcattgaacaacaacttatccacttcctatttgagtgccccttgtctctcagaatccaagggtctccttttcagtctctttactaggtagtttggatcaacgtttaaatgatggcagataatatttgggtcaatccctatcatatctccatggttccagtagaattgatcctagttcgcccttaagaaacttattagctactacttcaactgctcatccaggttcttcccaatgtaaacacactttgtgggatttcttgggtccaaaataacttcttcctattcttcaattggtttcaataagtttctttcatcttgaatctgaggatcaagatcttcgtccctttttttgctttcttctgccaagactgccattaactagtgaccgacttttctgtgttgcagctctatgtgatagcaatcgtgagccaacatctgattgccgtacactacacccacaccctccggtgtttgaaacttcaggcataagtgcttaatcgaactaactacccatagtctcatcaatgctggacgacccagtaatatattgtaagccgatggcagatcgacaaccaggtagtcttgcataattgtggcggataaaggtgcctcacccaaggtcaattcgagctcgattataccttgactggcgatactatcgcaagtgaattcttatagattaaccatacaaggcctcaattttgccttttcgagccccatcttcatcagtgtttccctgtaaaggatgttcactgaactctcgttatctatcagcaccctctttatccttttattggtgagttggatagtaatcaccaatggatcgacgtgagggtatctctcgttcttctcatcttccttcgaaaatataattggaggttctacagtttttaccttcttggaaggttctggagtaaatactaactgctcattttttatttcctttacgtaccacttttgggcattgttgctctctcctgtaatatgcggcccctcagagataactaggatatcctctccttcagtaggaggaggttgtaatccctggttgcttgggtttttgggtgaattgggctggttatgtttatttccctgtctcttcacatattgcttgtagtggccttacgcgatgagactttctatctcatctttcaactgacatcacttgtctattgtgtgcccaatgtctttatggtacttgcagtacttggtcgaatctcttttatccctcgcgtgcctcattggctcaggtttactgaaggcaaccttgtgctcatgcgtgaggtaaatattttcctgagtttcattaagctcgatataaatagtataaactggcatgtaattatcgtgcttcttttgtttcttcttgtctttggacaaccccttagagtcgtctttcctctttgagccagaggcctctgagttatcagctttcgtcgagacggtacttgttgaaacagtgctgggtttgcctcccgagcaagtttttaacaagttcatatcttttcgagcttcttcttttagaataaagacctaagccctctcgttgaactcggtgatgttcttcactagacgaccttgtaagtcgtcccacaattccccctcagtggtggagagaccagttgtgatccctgcctgaagggcagtaagttgtgtactatc

SEQ ID NO: 34141 - DNA, 1203 bp, Cannabis sativa
tctttgtttaggaaaatggcttaatggtttgcccgtagtggcatttttgtaaagacaagtttgtaaaccaacttggattttctcttatcttaaatttcttgtactctttttgttcgaacttaatataattgcgtttgcttgcatttttattcacaatgtaaaaaactatattttgatcaaatgtaaagtacttttggatttttccattgctcgtaatcttcttatttaagtaattagctatctaccaaactttttgattttcgagtagttgtcaattctgccttaagcaaacttgaatatacttttaatgatttatcactttgtatatttttgattgctcgtatgaatagttagattatctatccatttactaggtttaagtacttttgccaatacgtctcgatgtctcgtttagtactttcctatcttgcggaaccgttaatattcagctttatacgcgagttatgagttaaatctcatttataacttttgattttcctttcctgtcagataggtttttaatcaaaaattatagttgtttgatccctttctcgtcaaaaaggtttgatcaggaagctataacaattcgacccatctttcatcaaaaaggtttagtcaggtagttataacagttcgactcctctttcatcaaaaaattttagtcgagaaccttttttaaaagattcaatgttttttttttttatttttgaagtggtgggtttgtattatatcatgtatttccaaatgaattttgtttaatcatacacaaatgcctcttaagtaattttaaagagtagagctttgcaattacttaaataatagaaatgattctctttattcataactgaagtcaacctattacatcagcaatgtgagttacatcatttatttactagtaatagggtcacaaatgttctacgttccagtagttcattattagcgagccaatgagtcgagccaatttataaactccaattccaactactgcatcgattacatatggaccctcccagttcgggttgaacactcctgcagatgcatccctcgcgtttgcaaatacccgccttagcaccatgtctctaacattgaatagtcttttcttgacatttttgttgaaatatctgttgggttttgtgctttaaataaaacccattacaatttgattagttatcaatttagaattttgaagtgatttatgttaac

SEQ ID NO: 34142 - DNA, 1500 bp, Cannabis sativa
aagtaatataaaatacacaactcaagtaaaaaagtgagacaccaagatttttatgtggaaatccaatacgaaaaaaatcacgggaccgtagtccactcaaatcatctactatcaccaaaattcaataatgggattacaaagttcttctctaataaaactagaggctcacaacaatatcaagattaaacaatcttggaccaccaatacaatcatcatctcaaaagatggaaacacaaagaaagaagcttggatctcacaaaaatggtattgtagaagagcaccttagagagaacaatcgttgaatcgaaaccaatagattggtcgagcaccttgtaaggattcaccacccaaaatttgagttaaaatagatgagaatcaaccacttaatcttcaagttaaagtgccaaaatcctactttctctttccctttctttttctttctgctgcttgccgttcacgacaccaccatcagcttcttcttcttttttttttttcttttcattgtttcagttaattgggccttaaacccttatttagtccaacccactaaatgtggtggacccaacaagaactaaggtgaatctattcttcttttgcattcttgtatgattgtatgatatataaatgtattgttgtaatataatttgatttgatggtctcttggagatggcaacaacattgtgcaggatgttgatagcatccgttatccttatccactttgttaatgcttgtcgtaaaggttttgaagctgatgccagaaacagttaagaagggcacagcagggtggtatagcaaaattgagattacaaatgatccaaaagaagttgttatatgaggtgatgttgtatactctgatgtatgggccagcatggggattaagagcgcttagaattagaactttaacattatcattataaaatattaaatatactcccaattcgaagcaagaacaatttattctaatgacatcgtcacctcccaacatcacctatgaaaacatccatgatttttttgttaatattttatgatgaaaatccaattcaaaactttctaacttaagcgttaagatgctaatttagggatacgaaaaataatttacctaaacacttttactttgatcaaaatgatactcctgcaatgcaacattaaggtttcccttgacaactttatttttaatgtcaaaaggatgcacttgtgatgctccagcaatagtcccttcaaaatttaattgttggggaaaaaacgacactcctacaatgctactgataaccaagttagttaaattggttttttctgttattactgttccatcagtttgttggtgtgtgtttgttttcttttctgcactttatcaattctgttatttaccagaatttctgttttgtaattgtactgaaatactctctataaataaaggtaaatgcctcagttcagaggcaagagttcaaagcattccttgtgttctctctctctctctctttctctgcttctcaatcttca

SEQ ID NO: 34143 - DNA, 1204 bp, Cannabis sativa
ctcagacaatttctcaaaacaagaaattgaccgaaaaacaaagactggaaatccaccaccatctcctgaatcatttatgtcttcagaagagctacaaaattctactaatgaagcattacctgtccctttgagatagcatctcatggatttactaactttgctcatctgagttacaacagcaaccaaatttttataagatgtcaacaatttgctccaataaagctcgaactgcttaaacagtttccatgaagctgtctttctaatatcaggtatatcacttagagcacccaattccattgagggcatgaatttctcattaaggtaagtgttgacaagagaggtggcaagagatcgtccattggaagaggaagagttccactctttccttaaagaagatagctttgaccactggtttcgcagatttcgctgggcggctggcctccacagccttgatactgatggtgctagaggcgaaggagtggagccagggcttctaaaatcaatatttactgctttcgatgaaggagaaggggttgttggttccagggtttccatggttagggcttcagttcagttcaatcaaacctgttaaccgctcccaaattttgagtaaaattctcaataaagtataataagttacagataatgagtaaacagtttaccatgtaaaattgagatgattttactgacaattcatatcataacagaaacataaaataaaatgaacttgttccttcaaaaaagtaaaatgaacataattctgagatctgatcctagaaatttctaacccattcaaaactttttttatgtataacccaactctataaactgaaatgataaaatccaaccaacaaggtctcttgagttcttgagttctcctttgttgttgcttggctttttagttagattaattgtgtattcaaaaaccaacattaacataataattaaattattaaaaaattccgaatattaagtcaaacaaaataataattatcagattcccccaaaaaacaatgaaacattctaattttaatatcacaaaactatgtatttctaacataattaattcccttttcacaatctagagtttcaaaatactcagatttaaattaaaaacaaaaaatcatggttggagaggtattatatgattgtctgagatatcttcctccataacacattaatgtatatataaatataaattcaa

SEQ ID NO: 34144 - DNA, 1311 bp, Cannabis sativa
  modified_base (103)..(103): a, c, t, g, unknown or other
ttagtggtccacgtaatattagttttaaaaaataattataaatatgtaaaaaaaattaaaaaatcagaaatcttttttaactttttttttctttttcttcttnttcttcttcttttttttttttgcagaaaccttcccaccctcgaattcgaatcagttcgctaaagaatcgagctccaatttcaagcaataaaattgggataacccaattttgacgaaaaattgcagtttgatattatctaatctgataaagcataagcacaaatgggtctttaacaagcccgttgatgccctagccgaggggctgcactattaccacgacataatcaaacgctcgatggatctggtaccgttaaatcgaacctcgccaagaacctctacacatcgccagtagattttgcatctgatgtgagggtaacgtttcacaacgccatgacttataatcccaaagggcacgacatttacaccatggctgaacagcttctggctaggtttaaggagttgtatcagcctttgaaagagcaattggaagaagggcctgcacccgaacgaccttacgaagatgaattacaggcgagttcttgggatcatgtggagctcgagaggcctaaacgtgaagagccttcgttcagagcagagaagaaataagaacccgaacggattcccgctctggcaagctcgtcaaacccgactccttctcctcctatcccgcctccttccgttcaatcaccagtccgtacaccttcccctatgaaggcacctccagtcaagcctttgaagcagccgaagtcgaaggcaaatgatcctaataagagggagatgaacatgaaagagaacacaaattgggagttgggttgcagagtttgccacaggagaagatggagcaagttgttcagatcattaagaagagaaatgagcatttgaaacaagatggtaatgagatagaagagagagagagggagagagagagagatatggtaagctggttttggggttaggctagagaatggtggttatggaggcacacaagagctagacaatggtggaggaggaggcgtggttgtattctgggattagtttggtgtgggagggatctgcagaaaaaagaagaagaaaatagaaagaagaataagaagaaagaagaagaaaaagaaaaaaagaaaaagaaaaaaaaataatttttttaaattaaaaaaagtaaaaaagaaaaaataaatttgattttttaattttctttaaatatttataattattttttaaaactaatattacgtggaccactaaaaatttgccacgtgtacaagtgtgtac

SEQ ID NO: 34145 - DNA, 1494 bp, Cannabis sativa
  modified_base (1452)..(1458): a, c, t, g, unknown or other
ttaatcctggccgcccatagacctgcaaggaaggtctggccggctaaggcctataggttgaggtctggccagccaaggcctgtaggttgaggttttgccggccatgctcttgccagaacctggcaggtcatgtgtctgccaggatcttgcaggttcctatatagctttaccaagaggaggccaatctttgtatgtggaggccaaccttttgcaagttgaagacatttttgtacaccgtctccttgtagaggtcaggttttcttggtcgaacaaaagctcccttggttcgaaagtcactttttggccggctagcttgtgcctagatcttggccgacctatatgctcaccttgggcggcctataggcttctcttggttgactagggatgttagtacagctccttgagggctcgcttcactctattcggttgttacttgacagttttaatatatcttgtgtggagaccctagtctgctactggtagggttgtactatacatgtactctgtctttagcttacgtggacatgccacgtcaagtgggcaaaatttgggataacagtttatttgtaacactttatataggatatatagtattacaaattaaaaaatattaaaataacctgagatatgccgtaacaaaaattgagaaaatagaattatttttcactcctattttctctctcacgctacccttctctctctctctctctagtctcacatgcccacactagttaaggtgtgtgcaagattgaacaaccctatctcaattgcagtgtcttatgagttgagtactaataactacattgattcatcaattaagatctaatagcccactctactcctcagtattgagcctggtttggaagattaagatgttaattcttgaacaaaagttcttggattgaattatcgttaaatgtaattaaagataccaaggataccctgataggcttcaagacatattttctttcttttagtagtctagatttgatatatatatatatatatattatgttgagattcttgggcttatggttcatacataaaaactagtatattttttcaaatctgcttgagcttttatactttgatatggactataaaaaccaacacctagaccctaagaaccctgagaggaaaggatccttttgtgccttctctcctctcatgattctctctttgttcgcctcaccaccatcagactagtgttgttttcgatcactaccacccttttcttcaaatctaatttctctactatctcgatttactctctctacctctccttcttagatatgctatctctctatccccctcttagatctactcagtcttgtactcttcttgtcagcttcacctcgatcttctcttgagggttgatcttcatttttttttctttggacatgaatgttgtggttaatgtggcaatatagttagtgttggaaatattttacnnnnnnntagatttactaccatgtatgtgttgggttttatgcc

SEQ ID NO: 34146 - DNA, 1119 bp, Cannabis sativa
tacgatttcatggtacaatcatttatgtattgtggaagctatttggcgagaaagaaaccaaagagtacatgcaaaaaaggacactgagttggtgttgatcatagacacggtccgccagaagatccttgaccatgtcatggttgcctcgaatacagttgaagaggttctagaatggactccgcctccaccctcatgggcctgctgtaactccgatgtagcaatttctgctacaggctgcgtgttatctgcagtcattcgagatgattcgggtacaattctttccatcacagttaagacaggtatggcaacttcgcctaagcttgctgaagctcatgcagtgtgcctggcagcagaaaaggcgattgaattaggtctgaaaaacatcatcttccaatgtgacaatcgttgtgtcgtgaaagcattcgaagctcctatgtccaattgtgtggacttcaatctgcaggaagccaaatcaaggtttcttcacgcgtgtgacaagatgaatgactggggtattgtccacatctcgcgcaagtgcaactatatggctcataacattgcaaagtgggcttctaattcgagagtaattggctgtattaatcctgaggcgctggacgaatctgttctcgatgacctcacggagtgggatcctggtgatatgtgaggagttggtgatctttggttagggaggtgttggtctgttcttttagttcgcccgtttgttttggttgttatccctttagatgttttttctgttgtttgttttgctggttccctgttccttcgttgggtgtttttgggtgtttgtattgttgttattcgtgttttttgtgttgtacgcacattttataataataaaaaaaaagtaataaaaattttactttctaattaagtttaagaagtcattgagtgaaggttctttatttgtattgtctgcaaaatttgaagattgtggtaaccaaaaataagtacataccactttcaaatgactataaaattttatttttagttacaacttcagtggagagactagaatgagaaatagttaacatttcgatcaatgaatttcaattcataattctaatgtttgccagcataagtaccaaatggttgtaaaac

SEQ ID NO: 34147 - DNA, 1797 bp, Cannabis sativa
cacattaatcttgaaataaccaacatgaggggcacaccagtgctcaaacgatgaagagaagggtgaaaagtttttcctttgactaataatatatcaacacatatcatgtttagaagcaaccaatgaattagttgaaattaggactaacggagttacataaattggtagtttaggttagaaatttatttacattaaatataaatttttgagaacttaagtggcaatttttcttattaaaaatttgaaaccaaaggaggaggcttccctctccctcttaattttttttattttttcttgtggtccccatgtaaaataattgagggagttattatccctaattaatgcaggcagcagcctaaattatcttgtttgtggttggtttgattgcataattgatgaagaatgaatcatgactctgactctccaaaacggacgacctgctagtgccactgaggcccaatgcgaagcccatctatacagtcgtttcgaaggaattacattttatatatccactttattttatttgttttgatttttacttttatttttattttctttaaaatatacctatttttatagataatgtcactatattctttaggttaatataaattatatgctatacttagacttaagtagagagtgagatcatattgagcaatccactaaaaaaaatacgtatattttaataaaatataatatgaaggtattttaattaatgcatacaaaaaaagtgtttttcaacttatatccagccgtccagacattgaaatgatcgatctttgggcctggtccagcaaatactacatattcggcccattcgtatgttttaagactcaattaactcactaaactcttcggcttgtttcagtcaactactcctttagactttagagcatgccaaataaatggtgcaatcaatattttgacatttttgtcaaaagtatttctccaatgctatgttagaatttatgtcagacacgtgctaaaagttaggtcaaatttgatgtaaaatataacattatgccaaatatgatacacaataaatacacttttttttatttataatattcattttcttttaaaaatatatttaatttattgattatcataaatgatgataattattttttgaaaaatttacaaaataaatcaaaattttgaaaaaaattataaaaatattttaacacgaaaaaattcacttttactccttgaacaaaaaaatacattttcagcaaaaataatggtcacttttttttttttttatagtttatttataattatattacagttgtaataagattatttttttggtagttttacaatttatttatagttgatttctagttgtttttctatattttgctgagtaaggtgtttttataattttaaaattttaagtgtatttttgtaaataaaaaatttagattgtaaataaaatataaaatatagtatttataaaaatttccgagcacatttggaaaaagtttgtcaaatatagcatttattaatttttgtgttaaattaaacacattttttatcacttacattggaaatgttcttatgtcttctccactaatcttaatatcttaggcaaatttaatgagcacgctaattttaaattttattgtttacatagtattgacaagtaatcgattaaaattattacgggctaaatgtgacaagtataatagagtaagaatttcaatttttttaaatttgtcaactgatcattgagattagattctgaaatgtatacttagcttaaatatgaaaagaacaaaaattaagaaatgc

SEQ ID NO: 34148 - DNA, 2202 bp, Cannabis sativa
  modified_base (2151)..(2151): a, c, t, g, unknown or other
aatactactcagaacccgggacaactttttaccatgactcaggcggacgcagatgctagtccgtcagtggtgacaggtcagttatctgtaaatggttgttcttattctgcattgtttgactcaagagctactcattcctacgtgtcgagtagagtaattgaaaatttccataaaccatgtgatatatatgattcggggtttggtaccctgctaccttcgggagaccttatagtatcaactaggtggattcgatccttgtctttgtggattgacggttgtgaattattcgcgaatctaatagaattgcaactgtctgatttcgatataatcctgggaatggattttctgtccaagtatggggcaacgatcgactgcaagatggtggtgtttgagcccgatagtgctaacccagcagtgtttgtgggtaaagttcaggggacacgtataccaggaataacaattttaaaagctaaggatctaatgagcagaggttgtctgggattcatagtcactgtagtggataccagccaacttgtgacatcttgacctgagaatacaagacgggtacgcgagtcctttgacgtctttccagaagatttacagggatcgccacctacccgagagattgaatttgtaattgagttggttccaggagcggaaccagtatcaaaagcactgtatcgaatggctccagcggaattgaaagaactaaagatacaattccaagagttattgaatttgggattcattaggccaagctactcaccttggggtgctccggtgttgtttgtaaagaagaaagatgggtctctacgaatgtgtattaattacaaagagttgaataagcttaccattaagaacaattatcctttacctcgaattgatgatcttttttatcaactgaaatggaagatagtcttctccaagatcgatcttcgctcaggctatcatcagctgagaattcgagaggaagatgtcctgaaaactgcttttcgtactcggtatggatattacgaatttctagtgatgtcttttggactcaccaatgccccggcagcattcatggatcttatgaatcgggtattcaaggattaccttgatagatgcgtcatcgtgtttattgattacatctttgtttattcggaatcggaagaggaatatgagttacatcttagatctgtattgcaacggttgcgagaccacaagctgtatgctaaattcaaaaagtgtgaattctggttatctcgtgtctctttcatgggacacatagtagataaagatgggataatggtgcatccggccaagattgaagctgttaaggatgggccaacaccaaaattggctactgaagtcagaagatttttgggcttagcttggtattatcgtcgatttgttgagcgtttctcaaagattactgtacccttaatagagttgacccaaaagaacttgaagtttttctagactgatcggtgtgagaaaagttttttggagttaaagcaacgccttattaccgctccagtactaactcttccttcagataaggaaaagtttgttgtttattgtgatgcctcaagagaaggtctcgactgtgttcttatgcaagctgaaaaggtaatagcctatgcttctcgacagttaaagcagtacgagcagaggtaccctactcacgacttagaactcgcgctagtagtagttgcgctaaagacttggcgacattacttatatggcgagaaatgtgagatatacattgatcataaaagtttgaaatacttctttacccagagagacttgaacatgagacagagatgctggctggagttggtgaaggattatgattgtgagatcctttatcaccctggtaaggccaacgttgttgccgatgccttgagtagaaaagggcagagtcagataagtactatgaaacaaatctccctgcagctagtaaatgaaatgactcgagctaaaattgagctagttgtggggcagttggctaataataccctacaatctactcttttagagcgaatcatagaagcacaattgcaagatccagagctagtgaaatcccgagatagagttttagcttggaaaactagtgactttacaatggatgaaacgggaatttacgatttatgaatcgtgtttgtgtgnctatggatgatggtattaaaagagagcttatgaatgagtctcatacgactc

SEQ ID NO: 34149 - DNA, 2912 bp, Cannabis sativa
tccacgtgtcaccattcatgcgatgccacgtcagaatacaaaaattgggataacattcaagtttttgaattttccacttgacatggaattacatacttttaaaaatctacccctaatgtcaaatatgatcacaataaaatgtgccaatgaagcaacattcactggaatcaaaacataatcaagcaacaaccatgactttaaaacaaagcatgtagaacccctcaatatagctagcaaccttagaattcttaggaacagaaaagagattcttccccttgcaaagatagtttccatacaactcaaaaatttgagttgcaaaaaaacaatcagttgtattgactttaagcttgataaattgatcatacttaatcttctttctcaaatagtaaaataatacatcaatatgctgcaaaggaaaaaaaatatcaaacatacaattgcaacataaaagtaacaagatatccatttttaaaattttctagagggttaaaactttctaacaggtcaaagaaatagcttacacacaataatcatttcatttgaaaaaaaaaattaacatataactctaacatatactacatttttgataatattttattatttgcattcctttcttatgcaagtatgagaaaaatacttcctaagatgaaactaacaaactaataattaaccgttaacaaaaatagaagcacaaattaattaaatactttgctcaaaccatctaaactagttaaaagacttaattagtgttgttgtcctaaaacttgtatataaaagctaaataaaaatgagtagtttttttttccatcattactttactagaatccaaaaacacaaatttaagttataacgaaaaagttaaaaaaaaaataatatttaaacatgactaaccgaacatgatatattccttccaggtattaataaatcgtagaaccacatcttgtgatcaattttagcaacaacaaaatcaaaaggcttttcagtataatgatatctcttcaagaacttgttattcgtgaaattgacacatataaaatacattaaaaacttaaaataattacataaactaaaaataaaaacaaaaaataaaaaacttatacattgccaggcctataaccaatagaaaaccattcatcaaaggcttcttgatgcatacacaaagccacatccgtcaaactagatgaaaatacaaactgctctttgattcttggtatctccttactaacatcaaccaaaggcctaccaaaggattgcataggctcaaaaacaagaactttatctttttcattgcttttgtcctaacaaatgcgagaaagcaatacaacaagatggtaaaaaaatcaaaattcgttcaaccatgaaacttataaaaataaatagggctctaaaaaaacaaatatgtgaataagaaattaaatataacaaccaatgaactaaccttcggattacttttctccttaaaaatagaaaaaaaaaatattgaaacaaacaagaaaaatatatcaaaaattgattgaacaatgaaactcacaaaacaataaatgagctttttttttcagaaaaaacataaaaccatgaacacatcttttctatatcatctattttctcattgataatatccagaacagcagcgtaatgctatcatcagtagtctagctacccatagccttttcatcagcaacatcgatatcatctccacccttgtcaccaacttggccactatcttcaaacttcataggagcatcatcattaaacaactaaggctcgttaataaacttcattaagttgaaacttggacagtaatcatttgaattctacaaaaatatatttattaaaaaaaaagaatattaaaaaattgcacaaaataaaatatatcataatatgaaaaagtattgatataccatttgaaccatattgtgttcagcattaactcgaacaacttcctaaaaaatttatacaaccaaacaaaccaaacattataacaacaacaaataaacaactaaattgcaacaaaaaataatccaaatatatattgtacaaatataaaacagaaaaagaacaagatcttaccaaaaataaaacaacacaaaatcactaacagtcgtataaaaatatgacactattaaaaaaataaatgcaatcaaatagctaaaaaaataaataaaaccaccatttgttaaaacgaattagtaatatatatataagaatctggatctaaaaataaatgaaaaaatattaaaataattaaaaaaaaatgaaaagttacaacattgaattatgtcataaacatctaaactgcaacaaaacatgtcccatacaaaaaatataggaatataacacagaacaacaacaatatctcatagaaatgagccaacacactaatcaataaacagttctagaaagacatgacaataataataacaaaacattgcagcacctgaactatattgcagtaaacatcgactccaacacttacctgaaaattttaaacaataaaaatcaaacaataaaattttaaaaaatttaccaaatacaaaaacaccaagaaaaaacttgtactgatatgaaatattttttatgtaccttggtaacgcagattttcgttaactatattaaagcctaaatcgtgatgaattgccacagaaaataatagcagtaaaggaaaaataaagagcacgaagcttttttacgtggttttgcagttaaaattctacatagtccacgagtctatcttattagatatttctgatacaattctagggctttttcccttaaggatttttcgttcctttttcagtgtatcctgctcctatttatagttacataggaggacagttaattataaatcaagttgatatcttacaacaataatcccctgaaattaagggatgtgattgttgggttttatgccc

SEQ ID NO: 34150 - DNA, 7055 bp, Cannabis sativa
  modified_base (3223)..(3226): a, c, t, g, unknown or other
  modified_base (7007)..(7026): a, c, t, g, unknown or other
ttatatatatatatttgagtgtgttttgtgtcttaatcaatatagatttgttctaataatcaccatttatttaatgatcagtgttggtgctgggtgttctcaactcctctctgatatgcaggcttttaaggttgagtttataaaaagtatgctttgcaatctcatatatttttctatttgtatatttgaactcatttttcttttaatttgatttgctaggcagcgaatcctggttgtattttagaagattttgttaggtggcactctcctcctgattggacagaagtggagccaattattgaagacaaagacccttctaatgatggggatatattgtctataagaggtcaattaagtagtcgaatgaagaaagaaggtatacaacatgcatatgtacaaatacatgaggtttacatgtttataagctaaacttgtactatttttaatataatgtttcgataaaacttgggtttcttcatgaagagttgtttaggaaaaacactcgtatatttatgtgcatatagtagtgtgtaaagatgtaaacagagggcctagtctgatatagcaagtttgaatctgataaatgactgatgagttgtttcaactaaactctttgattaatctcctattttctttctgttgatttcaattttaaccatataacatgaacaagaaactctaacaaccttaattactcaatggatgggtttctgaatatggcagaaatgttcccatgttttctttcagaagaggaatctcaataatcaatattttgagccattccacttaatctactcaatggaacatttcttagaaatatattagcgtgctggtgcaaagaaatgtcgtatgaaatttgcttgaacaatgtttgtgcttattcaataggaaatttatggcgtgagctgtgggagacatcaaagccagttccagcagttaaacaaacacccttgtttgatgaggatttggcagtgtgagttccaattattgatgttttcactttggtttattattggtttccgtaataatctaagctattggtcctgtagggaaggtattctggacaatttggaggaaattccaccttgtgagctttttgagcaattgtttgtatctttagtaagttgattgtctttcttatgaactgctagatgctgtcattttgatgagtattagtaaattttcataaactgctatatgttataccttaactgttctcgtgttcaattgagtaaagaaatactgtgatttgttctaaaaagttatacctgggctacaatgtaatttcctttttactttctttccttttccttgtgaagagtgcaggctggaagttctgcttatcctttccaaattataaatctattttttctgtttggtttgaaaaatctctatacataaatctttatagacatgtaatagaattaaaaattaaaaattaacaataaacctttttgtttgtacaagcaagacaagacttagatcaatatgttttaaaacttaaatcaaaacttaatgtataaatgtgtgacttactatataaaattataaatattggtgctgtgcgatttgaatcgcaattaataaatttaaaacttaaactgcactgtaccgcgcggtttgaccacatcctcactgcaaatgatttcaaactgtctcttttatatggtgtaggcggtttgatgaacactcttacttggcagcttatagtttattttcttgactaactatttatctgagacataaataagcaatagtttttgagtttttgacatggcatctggtcagtctcatgattttagacagtaatgtaaatttcaggtcctggcttcatttcatttatgaattgtgtgacatggcttcaactatatgatctgttcaccatctgatctcctctccgtttccatctctgccttaattatcttttaaatgtgctaaatctctgctgagattacttcagtgcttttaaagttttcaaaaaccttttatgaatgggatgaaaacaaaatgggacttgaaacaagtattctgggcagagatactgtgaattacaagttctgtgacaaatattctcatcttgttggattttttgcctcacttttgatttgtgtggttgaggttttgaattttgtctacaatagcctgttactaactaggtgttgttattacattcagctgggtttaggctttgttattgcggaggcttctctatctacaaacagtgatttgtcaaagctattttatgaatgcaaagattacgcaattgctgtttgccaatccaacgctttgagtgagaaaatcaatgatctttgccaggtaaaactcataagcttagaactgattgatagtgtgaagctattaaaactagatgtaaagacttcgtacttaaatgtgacattgggttcattagaattagtatcttaattctttttctccatgggttcatagtgaggaaaatgattacgctgttaaatttggtctgattaattgtacaggtatacgaaacagtggagaggatgttacacaatcctgaggaagtgctaaagatagtgaggctggcagaagatagtcctagtcctgcaggtgaaccaaaaagactgtttaagaggctcaatcttaactttggtggcaaagataggaacttagggaaaccagcttcaaaagaacacaagaactccgaaaacaggagaagaggtcaacagttttcaagtttctttgatggaaagtcatctttatttttgaaaaggcctcctaagtctggaagcatgtcccctgctgaaaagcctactactttagatgaaaatgattggacaatgatttagaaattaattacagatgggtttttttttttttttctcagcctaggttatataatgattggttttgttggcaactaattgtaaattaaacaaagaaaagaaaaacaaacaaacaatacaaaaaagaagggccagctgggttttattgtttgcaatatgtgaatgaatttattgcttcgattacagatgaaatgaaaagagaatttgattttggatttctggatttctggatttgacacttacccatatgcgctcaataatttaccaaatatattagaatatggatttctcatatctggttctttagttcttcctttcaacattagcgtaaatagagatcaaaagcaagtaaaaagtgagtaacttagtgcatgtttggtatcataactaaaaaattgtttttnnnntttaaaaacagaaaattattttttaaaaacaatttggcttttttggccttatttttttttttttaaaacagttttcaaaaaacaaagttacaaaaaataaagttacaaaaaacaagaatttattgtttttaaaaaacactaaccaaacatgacttgtgtttaaaaacttcaaaaactattttttgctctcatttttaaaaacaatttttttgaaaataaaaaacagaaaacaataccaaacatgttcttaagtcattactctgtttcatttgcttactaatttattcattaatcttaatcgtttaatttcacatttaaacatcttcatcaccatcaacactttgtttctcatctttctcctccttatcaaactggaaatatttggagttgatttctgacacaacaaagttaatttgaaaaaaatataatgccagtaataacaacaataaataattaattagtgatggaaatttgacccatcccctggtactcatcctgaatggtgtggggaatacccactttggtgggttatggggtgggggcaggaccaggaacaatttcatatactcgaagtgagtttgaggagggattggggttgatactatccattccatattcgatcctaatatataattttcatataattttttaaatatttattatataaccgtattaaagtcattagttacaaaattaattattggtctttcttattgacatcataataatattttttaatatagtgttttgtgtatcaattctgatttttaatatctttattaattatttattacttacaaacttaacatcaatatattggttatgtttctggcttatttatcttttacaatttataaaatatgaagtataaatgatatatgttagatagaatgtttatttcaaattcaaaaattctttacatttttattttgaattacattacattatttattattatcatttcttttaatcttaacgggtacccaataaatctccatacctaatagggattctcctacctcaaatccgtaggggattaagtgaggttggaacgaagatgggagactaaataaggaatggagatggggttgggggtgcattctccactcattacccacctaatttccatccctataactaatcttattagaaatcttattctagatgatgatacttttgttgtcaatgaggaagctacaagaaataaagttgcaaaattttactcttctcttttctcctctgagggtactaataatgaatctataagtcatgtgttgtctagtgtcagtagagaattagcgaggactaatttaatattttataatccctttatactgtttgtgaagtaaaaattattcttttccaactctcagtggataaagctcctggagttgatgtccttaatatttatttttatcataaaaattaaaatatattaagaaatactgttctggttgttcttaaaaatatggaatatttataattagttaataaaactcttattgtactagttccaaaaaatagaatgctaataagcttagaaatgttagatctattagcttatgtactaccctttatgaaattatcagggttaacaaacttaaaagggttttaactaattttatttttgatgttcaaagtgctttttttatcgatagaattatttttgataatgtgctgattgctaatgaagtaaattatgctattagaaattggaaaacaggcaaggtgagttgggctgtgattaaattggatatggaatagagttttgatagggttgagtagaatttttcggaatctatcatttgtcatttaattttccctttaaagtttatctctttgtcttatgtttctataagttttaatattaatggtaagattgtaggaaatgtcaagcctactgcgtatattgagatcctttatcgcctaatttatttttgctttgttctaaagatctctcttctattcttagaataaaacaagcaactaatattttttgtggtattaaagtttctagattagctccgtctatttctcatcttttgtttgctgataacaatttactatttactactgtcaatagtgattctagtgtagctattaagaattctcttgatattttatgataaagccataggatagttaattaacttcactaaattctttattttattttctcctaatacctctgctaatgactaggagttattatcgcataattcgggcttgaaaaataaagctttcattagtaagtatcatgttttacctcagtgttttgataaggctaatagtgtctcttttaatttcttgattgacaaagtcagaagtcatataaattcttggaataataatgctttctccaagaaaaagaagtgttgttaaagtctgttatccaagcccttctttgatatactatgccatatttcagaattcttgttaaaacttataattctatagagacacttatggaaagtttggtggggctcttatagttgtaactctaaaatccattggaaaaggtggagggatttttgttactctaagttctttggagagctaggtttcaagtttttgattcattttcactagactatgttagccaaaataagctcgaagaatacttaaaaatcatgatagctttctatttatagtgcttaatgccaaatattttagaaattattgtttccttcagtttgctaaaggtcatgctctttctttcacttggtttaatattatacggggaaggaaacttcttttaaaaggcatgcttttgaagattggagtggtacgaatattgacaatatcaagcatcattagatctctagtattaaacacctaaattacaaagcttctgaatttcttattgatcccacaaatttctttctttattagaagcggaagctaagacataaacaaattgctccattatagttaagagaaattctcaaagttcccctgattttaataatcacaattctttgatacagtctttttattaatctggtctcattactgtcaaatctacataccatctagcttttacttcttatttctccccttcatggtctttttttggaatcctaattagattcccttcaaaattaaacactttatttgggtatcttacaatcatattatccctaccactcataatttgcttaacaaagaattcattcctattccttcttgttttatgtggctattgcaatgtgactgtgacttactcaacaattggttgttctagagttaaatttttttcgaaacatactctttttatgaaattttatttagaaattcaacatttagacttaaagaatttcttgttaaatgattttgaattgtttgaaaaacgacgtggatgatctggaacaacataaatgatcagtatcttttagcaagaatcactttcctaagcaggaaatatttaatcgaggagcttgttacattcatgattataagttcaagtagctagtggaaaaaggacaaataaaagtgtagaatctggtgttttaatcacctgaaaaaaatcaacaacaaaaattaaaattagtacaataacatgaactaactaatcgagagaataaaaatataaatgcaaaaagagaaatcaaatcacaccaatttaacgaggtttaatcatttgcttggcagtggaaactactgtctactccctcctggatggaagaacagcctttggctttaatctttattattcacacttggtattacaatggtggtaatcaccaacatctatgaattgactgttgggttttatgccctnnnnnnnnnnnnnnnnnnnntaatcagatttacttattaattaagatca

SEQ ID NO: 34151 - DNA, 1572 bp, Cannabis sativa
tgaattatagtgtccacatgcagtgtaaaaatttgagtatgtctaattaatttctgatagaattccataatttttgtaatcttgagaaaaagaaaaagaataagctgtatgaaatcaatccacttgagacccaaacaaaactgtttgatttgaaggagtgaaaataaaatagaatggaataaaatttaaaatgtataaaaaaattgataaaaaaattattaaggtattgtctagttgagaggaatgaaaacatgagaatagaaatgagaatggaatggaataaaatttaatatgcatagaaaaattattaaattttttctcatcatgcaacattgcaatgaaatagtctttttttttccattttaaaatagaatagtcattctaccaaaataatagaaaggtcattccattagaattagaatgacattctaatattttaatttgcaacgaaacaaatgaatgaaatgaaagttgtttcttttccattccattgtatttcattacctccaaccaaacgctacctaaattttttctcatgttacggtggaatggtctattttttttttattttaaaatagaatagtcattctactaaaataattaaaaagacatttcattgggatgatattctaatattttaaaatacaactaaacaaataaataaaattaaaattattttattttattttattttattaccttcaaccaaacgccacctaaaaattcacttattattaagggactacaaataatattgtgtactaacatggcacaaaataaatgtgacaaattcataaacatttttaataatataaatacatattttttatacataatgcgtacttggtttatcgtgttgtaataaaataatagcatcgacaatgaacaatcttgtcaaatatatatttaattatctaagacatgacttaatcattaaactaagttaattatgatttgttacaaatattaataatatgatatccttaattagattttgttacatgtttattacttagtgtttgtaaagcccaatcaaaaaaaaaaaaaaaaaaaaataccccatatgttattttttaattttttttttaaatttacggtttaagttgctccgataatttctataaaattgacttttcccaacggtttataactgtcttttatactatttcccaacagttcctaaaccgttagttgtgtaggtgtcataaaaatgcggaactttaaataacagtttataactgttgggaaaaattattttaaatgacggtttacaactgttagaatttttttttttaatgtctgttggaaaaaatattatgtagattaaaaaaaaatctatttaaactaatttattgtatatgaattattatctaattaaaatattatggaatagtcattctactaaaatgattgaaaatataccatttcactcgattcggtggtggttgagtcagcagtttgactgagagcgacttgaggagcggtggtggcgcacagatgtgtcgactgggtttcgtggtggtaggtttcgactaggtttcagacggagtttagtagagagagagagagaga

SEQ ID NO: 34152 - DNA, 1048 bp, Cannabis sativa
gttggtgcattctggtgtaacatttcgtccatgatcaaatttccttgttacgtgtcagcttgccaggtatccaggcccggccctaggcataggcgggctaggcccatgcctagggcccacacttcctacgggcccattaaattttttgaatatttcattatttaaatgttatatttaattttgattttctcaaaaaaaaaatgttatatttcattaaaattaacaattaatatacccaaaattggcctagcacagtgacaacctagagaaagataagattttattagttaagggcgtgagtttgaaccctatcaaacctcttttcctagtattatttttttttgaacaaaattgtttaataaacaattacaagcccccactatacactaaataactaaagctaaagaaaaataaatgcataaatattatttaaagaaaagtctaacatttcataagttcattttcttttttcttactaagaaaaatctcgtctatttttttttaatttttttattttctttctttcttgtggaaaaaaattattaatcaagatataatatttaattttaattataataataaataatttttttcttgaatattatttgatttgattttaatttgttttttttttatatatcttattataattatgaactataatctaatgtagttgttagaaattattagctacagataaatttagacttgattgttttttcattttaagaatttgatttattgtatcattgagattttagcaagataaaaattttatcataaatgataaagataattaaaaaaaaaaatacaaattcattaatttttgtaatatttataacttattttaaatttatctatatttattttattttctttatgttatgatatgtagcatataatttttttagatcaattttttttatttaaatatatttatatatttattaaggggcctaaaattttatatcgtcttgggcccctattttttcaaggtcagctctgactaccagtagtgtttggagatcagaagaaaccaaggtcgcaa

SEQ ID NO: 34153 - DNA, 1373 bp, Cannabis sativa
atgttggaccgcatcctcacgcttctggctagccactctgtgctcgattgtgttgtggttggcgagggctcgagtatgcgaaaactctatagcctatctccagtctcaaagcattttttacctaaagcatatggcgtttcatctcatgccataatgaaattgggactcgataagattttcttggaaagttggtataaaattctatatttctactcgtattttgtattgaaatatttttttttcaaccttcacgctcgaaattatatgttgaaatattttttttattttttttcatagcaatatttattatagttatagtatcatccttgtaaatttctaaaatttcaaatagtttacaatgccgaaaatagagttcctgatattccagtttaccacgcacatttaaaaaactttaaacatattttcggtactgtaaactattcgaaaatttttaaaaaattacaaagatgatgttgtaagtataacgaataccgcaatgaaaaaagttgaaaaaaaaattccagcatgtgttttcgaacacgaagattaactaagaagttgtaataggagattgacagcactactcatattttttttaggttcgagttgaaaaatgcagttctcgaaggagggtcagcattcaaaagggctcacgacggaatgaatgtgtttgagtatggaaaattagatccaagatttggtgaaatatttaactcagcaatgcacaatcaagccatagttgttaccaagaaattaattgagtcttacaaagggtttgaaaataatattgagacattagtagatgttggtggaggttgtggagttacaattagcttaattgtttcaaaatatcctcaaattaaagctattaattttgacttacctcatatcatcgaaaatgcccctacttatccaggtaaatattatttatttatagttaataatattttaaatcttgcgttttataaaaattatcgattagattttttattttgttaaatgataaaaaagattctatatttacaaataagatattgaacttaattttcgataatttttatttttattattatgcaacttgaagataattcttattacagatagatgtaaaaaatataatcagttttgtcataacacttttagattagattattattaagttttattttttaaaaaaaaaattagttcagagtactatttagtactattttgaaaaatataagttttaatttatcatttaacaaaatagaaagtccattcagtaacttttgcaaaatacaatatctaaaatagtatatttcttaatttaaaaaattagcaaaaataataattatgattttaatcaatattaattatatgtattggtgcaggtg

SEQ ID NO: 34154 - DNA, 1405 bp, Cannabis sativa
atataataatcagaaatgaatgaagtgaaatttataggttcaaatgaagcactaatcgatcttaggttatcaaacccaacgtgaatcttaatacttgctggcactagctgttaaataaaaaaggtaattgtaaatttacaacatagaaaacatataagtatatatatattaatagagagtaacactctcctaatttgagagggcttctatattaattaatgtaatttaaattatataaatatttgtgacaattattagtgcactacaacaagaaaataatttataaaaagagaagattaaataaagtaaaaagagcaagagatcgaggagggaaaagaaaagaaaagaaaagaaaaaggttgaaagggagagaaggaggggcccaagtgtttggtgaaatgaaatgataataataagaagaataatattcataatgatatataaaaatatatatatatctgtttatatatatatatgggtaaaggaatttggcttttcattttcaacgcccacttctcaacatcatcattatttttgtggtatatatatatagtcgccagtactatctctcacccaataattgaaatcgatatcaaatccatctttcatatatatgtaaattatgatctatatatactctacttcaacgtaagtctaatttagaataattatatctcatataatttaattagttgatatgctaagataatgttgagcatcatgatatgctttgtatggtaatataaccattgctcttatatattataagtagttaatgtataaaagtatatagctaggttatataattagacacctcctaaacttcacaagtctacgtacaattcatgagatttattatgataaatattgaaattaagagatgactatatttttatagattttctagtagatatatatatattatgtgtatcagtgtatattattaattactacgtaaactatctaaaaactagctataaaaattatataatatagatctcaaaagtacgtacgtagagatataatttttggaatatctgagtgttgaaaaagggagagaatgaaaaataaaagcaccaatggatcatcatattcatattatatacatgtatgtatgtatgtatatatatatatttatatgatataattgataaattaataataaatataaattaagaggtagaagaggtcactatctctttctatcactacttttatttttgtttgcatgagaacttgaccgcgttttgaggtagctgtctaaggtatcataaattgtgttctttccaaacccatatgccatgtgatattactatttacccatcatttttttataccaaattcttttatttctttcactcttttcacatattctaattactaattactttatattattatcttt

SEQ ID NO: 34155 - DNA, 1764 bp, Cannabis sativa
accttttgaatgagatagtggaaattagaatttttaaccctgccaatgcaatgaggaaccccaaggtatttgctaatgaagccttcaccattgagcaaaagggatgttctgaattgggattgggaatcaggagaggtatttggtgagaagagaattgaggatttatcccgattgacagattggcctgaagcttggaagtaaaggtgcaaaattctgtttatggcttcagaggattgagaagtgacaggaacaaagaccatgctatcatcagcaaaaaggaggtgagaaaaagagggtgcacctcggcaaattttgatgccagagaacaaggcagcatcctcatgaatacggatggctgcagataagccttcagccacaattaagaaaagatagagagaaaggggatcgccctgacggatgccacgggaagatgagaaaacagttgatagttggccatttaaggaaagttggtaggtgacagtggagagacatttagttataagagagataaagttgggaggagctccgatatggtgaagaaaacaagaaataaaggaccattcgactctatcaaaagccttttccatatccagtttgatggcggcccaaccaatttttccagatttcctggtatgaatggcatgaataatttcattagcaataacaatattgtcagagatttgcctaccagtgagaaatgcactttggttggggctaataatcgagtgaaggacctatttgagacgattagccaaaactttggaaacacatttgtacaaagtgttgcagaggctaatgggacaaaaatctcttactgttttgggatttttcttctttgggataaggaccaatgtaatataagttaaaaagcttgaagattgaagttttttaatttgtattatttcattaaagcttcttaatttaaattaccttttatttaatatattaattttagttttctgacttttcatttcgctataagaatcagccctcaataatttagcacggttgtgagaaaacaagcttagtttaccaaaaaattagtttgatgatgtggacactattttgacacgtagcacgaaggaaaaacatgaccccacatcccaaaatagggcagtgttacttgcacactaggggcacccaggtaagcaccaagatctagcaaagtcgtttttgactgttatctttcaacaaacaggttggcatgaccctaaaacgatgaaccatgaagttgaggatgtcatgtagacatcccagggctcaacttgggtccagcatcagtgttaggcgcctaggttgacatcatgtgtgcattcttgggtatcttagatgctcctcgttctaggatattgataatatcatagcaaactctaacctatttgtcccgggtttgaatgcttctatgactatataagatccctccctctctcattggaagtctctaatgtcgctttcttggtcaatatcttcaaaggactcatatgacacattttcactgctgctcccctattcttgatcattgttggaaagagagggagaatcttcttcacttcccccttgtcttgagttttcttggggagtaggggagattcttcgtcaatgctctcccactcaagatcatattgaaaaacagtaggggactcatcatcaccctctcgctgctcgagttcatcttgggaaacagaagacaagtttgttttaatggaggcattaggtgttaatattgggttttgtgccctaaataaaacccattataatataatc

SEQ ID NO: 34156 - DNA, 1938 bp, Cannabis sativa
ggtccgatggctaccatattgggccaatcggacccatcagactcgaggggttttttttttattacgcggtggagatcgtcgggtcgtaggcggtggtgagggggtgacggcgtggtggttgtgtgaggtggctgggatcgtgcgaaatcggagtcgggcgtggttgtgtgaggcggctgggatcgggcgaagagggaccgagagagagaaagggattgggatttcaacaaggctattttgggagtttttgaaaattggtcctattttaaaaattacctacactaagtgttctccaaaccaattatgtattaaaaaatgcataataattcaaatttccctaacacaatttgtactcacaaaattaaaaaaaaaattacaatttaataaatattaaactattttttgtatacaattacatgtgatgtgagttgtaattttgaatatataatattaagaaaatatattttagacaaataatgtctcaaaatcaattatatatatttattatgtgttaatggaatattgaataaaaaggccacactgttatttctatatgaattttataaaacaaaatagagtcgttttttcagttaaatgctaacttttcattatcttaaccaactcaagctctgttccaaactcagatcatcttctacagccaagaaaatccatgcccaactcatcaaatcagggttagattcatgggagccattgccaaacacccttttaaatgtttacaggaaatgcactcttttcaaagatgccctccaagtgttcgacgaaatgcctcaaagagaccatgtttcttgggattcaattctcactgcccacaaccaagccaaccttccccgtcgaacaatctcaatgtttatcaccatgtcaaccgtcgataaattgcaaccggaccattttgtgtttgccagtcttgtcaaagcgtgttcttgcttgaataatgttaggctcgggaaacaagttcacgggcgatttatgttgtcgtcttattgtcttgacaacgttgtgaaatcttctttagttgacatgtacgcgaaatgtggtttggttgatgaagcttatgctgttttttgttcaatttctttgaaaaatgcagcttcttggacagctatgatttctggctatgctcggtgtggtcaaaaaggcgacgctataagattgttcgggagaatgccgtttaggaatttgtatacttggacggcgttgatatctggattggtacaaagcgggaatggtaatgatgcttttaattttttcattgagatgagaagagaaagaattgatataattgatcctttagttctttcgagcattgttggtgcttgtgctaatttggctgtattagagcttggaaaacaggttcatggtttagggatatcattagggtatgaatcttgcttgtttataagtaatgcattagttgatatgtatgctaaatgtagtgatatttcaaatgcaaatgaaatctttagtagtatgaaacaaagagatgtagtttcttggacatcaatgattgttggttttgctcaacatggtcaagccaagatggcattggatttgtatgatgaaatggtttcggttggtgttaagccgaatgaagttacctttgttggtttactctatgcttgtagccatgttggtttagtcaaaagaggaagagctcttttcgattcgatgatcaaggattatggaattaacccctctcttcaacactacacttgctttgttgaccttctcagtcgatcagggcattttgatgaggccgagaatgttgtaaactcgatccctttcgagctcgatgaagctatttgggcagcattgttaactgcttgcaagaatcggggaaatacccaaatggcgattaggatagcgaatcaaattctgagtactaaactcgaagatccttctacttacataatgttatct

SEQ ID NO: 34157 - DNA, 2040 bp, Cannabis sativa
  modified_base (142)..(142): a, c, t, g, unknown or other
gtttgccctctcctgtccaagctcgtcaatgttttctatccatttttttatacaatcagaccgccagtcacgtaaaccctttgacatctcgtactcaccatagtctacaaacataggattatctcgtgggaggacaaacttngtctgcaaaaaagttacacattcacactagtacattaattagaaatttaagaagaatgtagtaaattataaatttaaaaataaattatgaaatacctcaagtctatcccacattgcattaattttagctctgaaaatatcttcccatttgaatttattcatgggaatggacatgcgaaccatccatttaaacatattggaactttttttcatttttgccgactagggtgcctatttcttcatgcaattcaatgtatattttagcagccagtattttggaaagcgcttcctcaacatttttacctttgtatttactgtttacccttttttttcgaagtgctgccacctagtgtcgacatactatatatacaacacatattttcagattgagtaattggcggcaaaacccccccaactatcaatttacttgcaaagaaccatccaatctcatattttggtgggaaaaccctccaaagtgcacttccatctacatttttaaggtgtcatcggtctaacctcgttaagttctaatttttctcacgtggcaatgacaagtcactaaaaaattatcctacgtggccatatttaaaaaaaaaaaattaaagtaagtaattaaaataaaaataaaaactttaaaatatacacaaaaccctaaaatttacaatagactggaaattagaatcaacaaagaaaagaaagaaggagaggaagaagaagagaaagaacaaagaaaaagaagagaaagagaggacgaagaagacgaagaagaagagctagaggggaaggagacgaagttcagcagaataagggaagaacgaagaataggaaagaaaatgactataaaatgtcgttgtcgtcctctgaagagatctatgattttcacctcttggactgatacaaatccaggtagaagattcatgagatgtcctctgtacaatgtatgtttgcatttgttgtatgtaaatatgaatttattatttttcaaagtttttttttctttttcgataaaaaaatatgttattaaaactaaagttgtctaaacatttaagatgtcctctgttaaccccaatactctgttaatcctaatacattggaaggttgaaccgtttgggtaatgataatgttaaaaatcaaagtaattatgtttgatttctatatgtaataccaactgaagctatataacgatgtgttattattaattatatatatgtaaacacagaattactcacttataagcattagctaggtaagttttagttgtaatcgcacaaactgatatggaaatttgaatgagaaaaggtcaaaagcattaggaataaatcctctctttttaaaagaaaaaatctaaataattagtactactagagttaagcaaatgataaaagagtaaatataaggtttttgaaatgatgatattttggttaagagtggtgatatatataaaaatatcaccacaaaaatagaagtttatttgctatgtggatatttttgtatatatttaaatgttctttcgatattgggcggtgtcccaccagggatattcaccagaattttgttttcatcactcatgctcatctcgatcatattgtgagctcctattatttctttatatggatacccaacttcaatttataatttatgaatgaaaaaaatgtagttattgcatatttctatgtgtttgagttttatgtatcgatttaatatagcttgaagaactctcgcgaagcttcatacttatcaaatttataagttttgggaagaaaaaagttacttttgtcagtttgtgttattttgtgaagatgatatctataaaaatatcaccacaaaaatataagtttgtttgttatgtggtgatatttttgtatatatttatacatgtttagaggatatatatatgtc

SEQ ID NO: 34158 - DNA, 1816 bp, Cannabis sativa
ttatggactatgcaaacaacatcaaagactagtggagaagtattttgagtagtattttgaatagtattttgagaagtattttaagtagtattttgagtactatgaatgtcataccaaagcatcaacctacaatattttgagatgtaattggtgtttatatggcagaaattaacgaaatttcatgtcaaataactttctttgtaaagtcaaaagttacatcttttatgaaatgtaactggacttgtaatgttgttctactagacaggttattttagttatgggaatttgttgaaaattgtcatgtggtaacatgaacatctatttttaagtacaattttatcatagaggtttatcatggaggattcagtttgttttgatattttgagatgtaattgatatttatatgtcagaaattaatgaaatttcatgtcaaatacactaacagaatagtaaaaagtataggttagtcttaataaatttattgcaaagttcacaattcatctttgatatacacatacatataggttagtctttcataaattttaaagattaaaaatctcacccaaaaaccagaattaatcttaacaacaacaatgtatcaaacaaaaaaaattacatcttcattctagtttgtcaagagtacaatattaaaaaaagaatatttaacaaaactaataaaaataagaacacaacaaaattgcaagaacaacatatatgccaaatttgaaatatttcttcaatcttctaatttcttcatcagatttttcaacatgattttccagtgccattacattcttctcaatcatctctagccttttaaccaaatttatatcattccttggagttggtgggtcaatgcattttaaaaaacggcacccaatttgaacattactctgttaaaaccaaacaaaaacccattaacaaattttcatactaaaatattacaaaaaaaaaaaaattaaacaaaccttccatcttggacacccaaaacaccttctccttggattatcttctgtcaaagaagtccgttcaacacattctaaaccacatttacactccggtggtctccattcatacatattcatagatctatcttcactttcataagaataagatgatgaagacattaaaaaattaaaagggaagaacacaggcgtgaagatcgtcatgcttggagcctagattttaactatccaattttttttttctgcaaaaaaaaaaatcagcaggttgaagaacacaaccgtgcgtgaagaaggcgtgaagaagagagagggattgatgcgtgaagaagagagaggaaataggaaagggcagctagggtttgagtgtttatagttatctttttagaataattttatttaatttgttgttttaattcattaatgtaaataaacaaaagaaaaatatttaagttacattaaaatatccacatcacctaaaattaatatccacatgtcttgccacatcatttttttatttaaaataatactgccatataagtcaataaacgacaaaattaaacagaagtgaacggaaggactacatttctacattcgttataatttgaggactcttcgtaacaagcagtatatattagagggaaaaatttggtagggcaaaaagttcggggggcaaaaatgctatttattcattttttaatttggacccaatctcggcgggtcccacgtgaatcgccgagatatggtatgccctatctcggcagttcacgagggagccgctgagattgggtccccataaaacaattttttatttttttttaaaaaaaaaatttatcaatatttattccaatcca

SEQ ID NO: 34159 - DNA, 1055 bp, Cannabis sativa
ttttatactatcttacatacattctaatataatttttaagtgtgcattggatgctagaggtcgttgtgccagggaaaattatccatttaaaccctatacatggccacgatgttctcgaacaaattacttaaatgttggaaaggtaataatttaattactctttatgtaaaaaaattttaattaactaatgaattgaaatgataatataatttttgaaacaaagcataccagattataggaccatcaaatgcgtatcttggaccgtggccagaaattacactagcaaattgtccaagacaacctaaaaatcaagaatgtggtttttttatgttttgatatacatgactgacatcgccgcacgtgtaatccccaaccgttataaacacgatcaaaaagctgtaagttttaattattaattatagtatttattatattaacaataaatatatataaactaatataaatttatacttctttttacagtttggagaaaagcagacatacaatccaaaaacagaattattaccattacagcgacactggatagaacggttgatggcggtgattcacgaaagcttggacgaatgatgctgaaaggcctaagaatttttcttccctttattagcttatttttttaggttacttgtaattagatttattaacttgataatacttggactaattttataatatttctgtaatctataattgtaatatatttaattgtttctacaaaatgaaattaagtatatattcactagtcataaaattaatttaaataatatttaattttgttttttttttaaaaaaaaaatatttaattttaatttattaaataatatttaatataaattgataaatatataatttaaataaattaaatttgaggttttgaactaaaaaaataattattaataaatgtataatttaaaccctacaacgtcggttttattatctacaacgttggttattttggcaaatagcatcggttatttgtgaataaccgacaccatagcatacttatggtgtcggttctttaataataactgacgcca

SEQ ID NO: 34160 - DNA, 1896 bp, Cannabis sativa
  modified_base (717)..(720): a, c, t, g, unknown or other
ttaaatggttgtcgtatatatttctttagtaaaactttttataacagggatccccagaacacactttttatgtcgttataatgtccattttcaatgttttactttagtcaagtttttaatattatcacagtttttaataattaattattatattagtattaaattagtttataaaatcacacacatggcgtccctatagattagggcgttacactgtaatacttccacacccatgccaacaagcttccttttcaacaaaagcaccttctgcggcttacgatgtcactcaagcaaactcggcctagtgtaccaagcatacaatatggactacccaatcaaccttgtactatgccaacgagtttcaaactttttgttgcacctttctacaatcgcatgtggtagttgtctttctagcatccttccatacgcctacatgccctctaggataggccaaccaagttcacctcccactgaaatgaacatggctatgataccaactgccacgggctcaccttttcagacagcagaacacccgtgcggtaccttgacttctctaagccaaggttagccttccaacaatccaagtaacaatgggctcatttttcgcgagaccgtgtgcctcatgcacacttccgtctctcaaacaacttccgttgagtcatgctcgcaagcatccaggagtgcatccatgtatcgaggctctctagccaagatacnnnnactgtccataggttcccactatgataaggcaagtcccaacactgacgctcaccttgtcactcgtgaccaaggcagaaagtgtggcaagatgccaacaccaagcgggcatgccaacgcttctaatcatgccccatttgatattgtccgaacagtctccctcatcacccaaggactcccatacgtccatggaccaatccttgaggcaccatgcctacatgcatactgataggccctcgagacaagccaccaaactagcagcatacatcagacctctatctcttactaacatatcctatgcgcatatgaaaactagcccacgaatgacaatctgtgtcttcactcataattactcaaagaccttgtctatgagtaactcctacattggtagcttcacgtattgctcatgctttcttggtcagcataaggccgaggtatacttccctctcctatttgcctacccgatcgactgtgtcctcgagaccttgagtgtcttgaactagaacttgcttcaccctatatcggcattcaccttcgaaagaggttagatacatgccctctatttagatacatgtatacatcctccctttttgatcgagaaggacattggaggtgtcttggaggtatcccacttatcttgggttggtttctagggtttctctcattttccacgacggattccttgattcttaggttgaggcagtcttgcgtcctcattcctgcaagaatcttctggtacctcattttgttcgttcccttagttcgtaaatccttgggatccttgaggaacgtcccgtcgttgctcatatttatttgtcttaatatccattagagcatcccttatacccccaagttgctcttcctgggtgttttggagatttcccttgttggtttcatgtctcctagttttagaacctcgaggtatgcctcgtggtcttcttatcgcaggatcaggttgattctgagggtttgttccttgtgatgccctggctattgtagcctctctttccaactcaatgtttcgtcagttagattcggctaagagttgtcggagttgtttattttctaattccactaatggtactgtaacaccctaactagcataggcgtgttagcgtgatttttaacgtactatgcagctcgttgctaatcaatgaggttattggaaaaacgtgaata

SEQ ID NO: 34161 - DNA, 3142 bp, Cannabis sativa
  modified_base (325)..(326): a, c, t, g, unknown or other
  modified_base (2756)..(2761): a, c, t, g, unknown or other
aggtcccaggcagattttcactacgttgtgatagcccctcaactagcttctgagatggttagtgtagggattaagtttgtggttggaaagttgcacaacttcacacttcaatatgatcagttagaaagaattagaaaggcacaattagaaaatcccaagctagtcaaggttcaagatgaggtgatggttggtcggcctaaagacttttcagtctcgaataatggaatgttgttgtataaagctcgagtttgtgttcttagtgttgatgagcttaagaaagagatccttaatgaagctcacaccacaccttatttattgcatccgnngaaccaccaaaatgtatcaggattaaaaaccctacttctggtggtatgggatgaaaagagatgtggtagactaagtgtccaaatgcttaacctgccaccaaattaaggctaaacatcaaaggccggcagggttactgcaacctttagcccatcctaagtggaagtgggaggacattgcaatggattttgtaactgggttgcctagaaccacgggaatgtatgattcagtatgggtaatagtggatagatttacaaaatcagctcactttttgccagtaaaagttacatagttcgtctccatggagctcctaaatccattgtttcagacaaagatccaaagtttacatcaaaattttaggtgagtcttcagaaggctatgggtaccaagctaaagtttatcacaacttttcacccgcagactgatggtcaatcagaaagaaaaattcatatactagaggatttgttgcaagcctgtgtcatcgactttgagggttcatggagtaagtacttacctctaattgaattctcctataacaatagctaccagagtacaatagggatggttccctatgagatgcgatatggtaggaaatgtcgctcccccattcattgggatgaagctggagaaaggaagtacttaggtctggagttagttcagaggaccaatgaagctattgacaagatcaaggctcagatgcttgcttctcaaagcaggcagaaaagttatactgatttgaagcggagagatgtcacatttcaggcaggggaacatgttttcctacaggtttcaccaatgaagggtgttaggcacttcgggaaaaagggtaagttaagccctaggttcattgggccattccagatacttgagaaggtcaggcaagtagcgtatcagctggccttaccaccatcattgttggctgtgtatgatgtatttcatatttcaatgttgaggaaatatgtttcagacctgactcatatcttaagttatcaagcccttgaaatgtagtaagacttatcctatgaagaacagcctgtttagatccttgataaaaaggagaaggttcttcggaacaagaccattgccttgttcaaactgctttggagaaacattaaggtggaggaagccacctgggagttagagttagacatgaggacttagcatccacaactattcatgttacatttcgaggaagaaatccttctaacggggggataattgtaatgaccgctatagtaattttgattagcaaaagcaattagcactaatttctgttaattatttatgaatttaattatttgtgagccccattgctagaaatgggcgttagagttataatttctacatttcagagattttattaaactgtaggtgtattatatgaattctatgtgaattatgcaatttttataatttttgctcggcgacaacagaaaatttgatggatggctagtttgatcacatgggtaagtctagaatcttatttcttagtgggaatattggagaaaataaaatactgaggttaagcgggcattttagtaatttgccattaagtgatttggtggctgccttaggttgtgacacctagctgctatttttagcaaagattaatgaagttaatcttaatttacttgaagaaaaagaattaaagaaaaaaaacaaaggaaataccttaaatagaaacatcctctcttctcttttctctctctcttcgaaccagctgggaatcaaggagtttgattgctggattttgtgttttcagcaaggttaggaggaggatttaatcaacgtaaaccctagacaatctttagctatgtgtttctcaaagttttagttggtttcaagtaatggtttgtatgaattaggactgttagggtttgattaggttttggtttagctcttatattcattttaggttgattccaagttcttgcagctggttttagtgtataatgttagatttatgcaactttgggtttgaaaacctaaactttgatctttaatggcatgttttgatttagggtgtttttttgggaattacttgttggaaaatattgtttataccttaattaggtactctgcaaggtttggttatatttggtggagttttgagcaggaaatgagatttcttttgtgaactagtataaaccgggtaaccggttttacacgtacatataaaactggttagccggttttggcagggttccccgagtgtctcgttttgtcaattctcgtccatttcagtgcaatagttgggtgtttccctacttcctgagttattgtaatccctagattgtataatagaacctagagttatgggttcaggtttgccgaattagagtttttgatcatgtgatttgcctagattcaatatgtgattaggacatccatttcgcacaagactttctgttcaggtcggccaacacacttgnnnnnngaaagaaggtaagaactatatatactgtgttatatggatatgcgaatgtacgtatatgtttagtgtatatgtgtgcttatatgttgtgattcatacactaccaacacttgtaccgttgtggtacaaagtgaattggtaaagtgtatgatgtctgaaagtacatcgtggtgttaccagcacttgtacgggaaggtacacggtatctgtggtacaacacttaacagtactcaaggtgcggttcataccttacctacactagtacgatggtagactgagtgcatgtggtacttggtacatggtcgtatcctagttagaacgttcttactcatctgttgagccttgtaataggtgtatgggtgcctagatacaagtcggtattat

SEQ ID NO: 34162 - DNA, 1540 bp, Cannabis sativa
ttttttatagcttattaattatatatgtaataatgtaattattaattatagctcaatatcaatttgtagctaatttaattagttcacttttttttgttaaaaaaaaaaaactcttcaaataaaatgtaataaaaaaacagaagagtcatgcgcaatttagtttattgtaatcttaaattgagtacaataaataataataataataataataataataataatgaaatgttttttttttaaatgtaatgaaataatttattaaataataataattaatgaaataaggaacaaaaatgttatcttttgatgtgagtgtgtggctaggaaaatatagtgaaaaagcctgggattctaattttcagtgatttctttttgaaatatcatcttttcttttttcttcttcgaaaaaataaagtaaatcattttgtaaagaaggtaataaaggggtcccaatatagtcacacttttatgatttcacaaaaaaataaataaatgaaaaaaatcacttttatcttgtactgtctacgattctccatcactaatgatcactcaataaaattcaaaagaaagaaaaaagaaaaaattggatcatttcactctctcacaagctagctcaattgtcacttctaagttctataacaagatttttgtatatccatagattttattacatttataagatttagatttttgaactcaatctattcttatatttgtgtgtcatttcatgttaggtaaaattaattattgtaccattttagatttttttttcttttttttgaaatgaatgaattctcattaaaaatatcggtcaaagaaaagagaaagaagttataaacaattaggagtccgatcctagccaccaaaccataacaacatctaaagtaagagcaatttttgcaaaattatgagttatgaaattggcaaatttcatgtcgtttattaaccccaaagattcaaccctcgagaggccccttatcactacaagaaacaaaggctttatgggtgaccattttagaggcgagacaaaatcgtctctaataatagaagtattaggggcaacaaaatgatgtcgcccctaaaagtaggtgtttaaatttttttttacgtctatactaaattgggcgacaatatttacctctaatagtattaaaattgttttttttaattaataaaggtgacaatgtcatccctaataaatttaaaatttattcgttgcatttgaacgagatttctctcgcttatagcattaggggaaaatgttgccctaaaagtcaggtatttgacacggttaggttattaggggcgacaaaaagtttacttcattaaaaaacctagaaggtaagcttttctcagagccccagtctctctcttactttcattttctttttcttccacaatctatctgaaatagttttccccaacctatacaaaaaaaatccccaccctcctcccaagtctagatctatcgtccccattccaaccaatcgtccccctccttgtcatcagtggcattttgagtgttgtcctcattctcccc

SEQ ID NO: 34163 - DNA, 4595 bp, Cannabis sativa
acataaaatatggtactgtcgtaagaaaaatatagtctataaatggtcatacagaccctatcgaccatcgaagtccttccaatactttaaaaagccagcgtcttcgtctgcatcgttcctccgcatcctgaggagctcagcgtcctcatcgtcctcattgtccacagcatcatacctgcaaaggatgagaggggaagacatcaaaacacagtagcaataacaaattttattttataagtcagcaatatatataataattgaaagcaaaggcaaattgtacgtaaaagtataatagtcctatatatactcagttccagtccttaccaatttaccatttcctgccatctatcatgggtcaaacgacgatcttctctcattccttgcaagtttacaagacttgggatatatatcattcttcttattctgttgacttcatggaagtactccctctttggatgtggaggtccaaatttttcaatgctcaatgcttggacatcgtaagaaaatggccttccccgattaaatgaaaaccacaggagaggaggagtagactgacataaaattggtagtactccatctttttccgccaaatagggttctgtgcataaaaacgtcaatgcaacaatagttttacgctcactccacctcaagtccccaccatcatattgtgtcattttcaagaagtgaagatcctcccctattatttcagaaatagctagacaatcatcacattcaaaaaactctgctttcattaaatcaaaggatgtaccgttagggaaaccataattaaaaatatgaatgtcatcccaaatgttattagatatgactaacagagtgacacgattccttttagtttctttgtactcttcagaaaatacatcaatgtaatgaattaccccactgcatcttatctcaaattttcgtctgccaaacacttttaattctttatcatccaaatctacttttggtgatctttgcacactaagaacatgaaaactaaggctacgacgaaatgagcctttaaatttctcaggacaaattttcataatcacttcttcgggaacatctaatatgcctctttgtctcccgctcccaatacattgccattcgatgtctttaccaacttcaaaagtttgtaaagtcagaagatcccaatcgttatacatatattgcaatttgcactcatgagtcgctctgttgaaagcgattctcccagttccagtgccaaggtggcctttcatgggatcctgcaaataaagtgctttgccaatggcagggttatgaagaaaatgtggaaaatttccagcagaataagatgaccataccaatccacagaaggagtcaagtatggttgtaacataatcatcgtacggttgtggatcgaaagagccaagagaagaccggttaaaatgaagaactgaaacaaataacgtatcttcaattaaagatttccataacttcttgaccgccttgcatttcaccaaagtcttaacatctaacctactcaatatgtcactcatcagatggttggaaagtccctcgatactcatttttcttttaacttaattatgaaagaagagaaaggtaatttagtgctaagcacatcgaaagaatgtacaagaatattttgacgcagttgatatcatagatgcaaccttaaagaacatatacaattttaacataacaaatcgaagaatgcggacgagagtaattatacacaagtaaattaaataccaaaaaaaaaaacagaaaggaaattattaaagaatcaaaccgtaggtttattacgccaaacttccagagcaagaaggagggtgttcctttgaaactttactcgcattaaatgaaacaagaatgaggatatatacggataatcagagttcttatatattttttataactggagttctttaaaaatcagctttcttttttattgaggtgatcatgtaatgtgggaaaaagtaaatatagctgatttttcttttttctttacgtgaattttttatttatttatttataaacaatcaaaacatcatttcaatggaagatataaaaattatctatatttggttcaaataataattttgtaatattttttaatcaacttttgatatcatgcttcaatacataattgtaaaacaaaatttaatatgtcatttaatatttatctaataatttataaaaatataaaataataataattttacaataataaatataaaatttaataataaaataacaataataatagaagtcatttaatataaaaactaaactttaataataaaatattaaaaaatagtattataataaatataaaattatagcatttattgtaatacaaattttacaacatactatattgtgatcctctttattatgtgagatattaattaacatcacaatttagctcaactttaaaatagacttttgacaaaataggctatattttacatttacaatcacttgtttgcatactcttaacatttcattaaggcttctgatgttagtgtgggcacttgtcaccaaaatgaactcattactcatatacatttaaattattgactttttaaaactcaatattagtagctcaccgctacacaatatttttatttttttttcctcttcgtaacttctgattggctaattgaactattttttttttaaaaaaaaaattacactgaattgtaaatactaactttttttttcaaatcttatatttatacttttacaagaaattttttacatttatactttttctacttttacatataaaaaactctgtcccaatattttttgtaaatttttttccattttacagtattttttgtaaattttcatttttttaaaatattaaataaaaggtgggtccgggcaaaatgatgcatgcattaaacttgctcttaacatctccaatggaggttgttcattggagtagtcttgccacatatgtctaattttatgcttcgtttggagctgaaccttcattggaagactaccagaacacgctcgccacaagaaatgacgaaccttaggagggacagccaattgccacaactttttccagtagttattgtcttccaaataaagccaatttcctatactcgattgaagatgtttataagcatttttaaccaagtaaaaccccgacgattccatgttccaataccatgtatctctttccacaaaagcacttaactgaatgtttagaattaaacccacatctctttccaaaaacatgtctgaaatgagttcaacatcctaagatctttccccaacagtcataagactattaacaaacttattttgaagcccttgattctcagctatgacgtaaggattggactcatggggaagccacggatccttaagaacattaactcgagaaccatctgcaatttgcaccttctttaaccagtccctgagcagcccaaatactcctccaaatgaagctcggattttgtcccaattcagcagaaataaaagtgccattcgagtagtaacgtgctttgtaaatcttaccaacaagcgagttttccatagttagtattctccatccttatttacccaaaaaagagaggttgtaatcccgaagatcacgaaatcctaatccccctacattcttgtgttggcaaagacgtttccaactaactcaacttacacccttgcttgtgttcttagattgagacttccaccaaaactttgccatcattaatccttcaagactcgaacatatctcttggatcaaaagaaaaacgctcatagcatagctaggcaatgcttgagcaaccgacttaattaacacttccttgcccgctttagggagaaacttagtttcccagctaaaaattctttgttgtaaggaaaatgcatttgaattacaatcagctatcattctaggcatatattcccataactcacccataactcatattcaatgcatatatgatatattcccatctatctaattcacttacaccttccaaaataccccatttcctcaataaccaaaccacaaaaacaattcggatagctttttctaaagagcaagacgtttttcttcttgatgttttcttaaatggaagagattatggaaaaaactaaaacaacagataacaggaccaaaactcctaaataaataaggtaatcatcaaaatactaagttagtaactttacacaaaatcaggtaagcaacttcacaaaatctagagaaaaataaaatggtctcttacctccttcaagaccaaatcaaccaacttcacagaatagagagagcgctactcagttatcaatttggtataatatgaggtgaattgacagcccatcaagaatatgtgtagatatgaatgctttatataataggtccaacgtgaaaagcccaagcatgcaatagacatgtgttatctcattaaacaatatgggttatgaaaagcctaacatgcaacaacttatcatcacacctctcattgaatagttgatagctgatatcttattagttataggtaaataaataattaagaagggttatttttgtaaattgactataagaagcccaaagaattattctcttttttataaaggtttatatatatata

SEQ ID NO: 34164 - DNA, 1964 bp, Cannabis sativa
  modified_base (1934)..(1937): a, c, t, g, unknown or other
cgaattttgctattattttttttttttatactaatagttagctataacaaaattgattacttaaatacttttgccactaatttatttacacacataatttgaccatataaattaagtatcttttaaattaatttactttattaaatatttttatcaagaaagataatttctattaatcaaaccgagttcattacatccacaaatggattccccttcaaaagacaaatttacagctcttttacattttttttttttaaaaaattatctatactagaaaacttctttttctatacaagattaaatctatttttgaggctctttttaatgctactatctatacaactcagattcatatactttttcatatgagaattgttaaaaggcaccactgatgtttagcaccgtcctcagtgtcctaccgttattggtgtaattaagtatcaagtcttatataacttaagaaaatagtttttagggaatatcaataatcaatcgtggggcgccgcctatagaaggtacttggcactactggtgcccaatagcaatgttgttttcttatttatacacaaatttcagtttagccaaatgtcataaactgcacctgctaacacattcttatgaacataatataatttttatgatatattttaatatatatatttttttatttttaaaattatatatgtattttttttgaaacattttttatcaataacaaaaaaaaataaaataaaataaaataacaaagtctattaacttaaatctgaaaaaaataaagtccattaatgtatacatacacacgacatatataaagcagtcatttttttgtttttttttaacaatttttttttatacagcagttgctttttttttagcaaaaaaaaaaaaaatcataagtgtacatacacactaccataccatgtaacctttgtttgaatttaatgttattggccaaaaaattataccatgttatgaggtacaaaacagtaaaattacccaatatatatataaatattcttttatttgttacttttacgtgcttgcagtagtgtagatattggacatatgtatgcatatgttctttataattttttatgataaaaataattttttttgcagctagataaaaataattttgattcaaagcttttgtaaaatgataataataaaactttggatgtgtttgtgcaacaaatattagtagtttatttattttttaattaaaagagtgataaatattttaaaaaaatgtgtagtaaaattgttttagataggagtgtgtcgatacacctcttttaggggggtgcactgtagaattttcttataacattgaactactaaaaatagaccattaagcaaaaaaaaaaaattactaaaaagaggcctaagaacactcagattagatgctttaaaatagataatctttaaaatatttaaagatttaaactgaaaacacgctatattagatgctttaaattctttctctattttaaaatttctttaaaattcacttttcatgctctatatttatagaatattattattcattgctctaaatatattttatcaattgtttggggttttaattttacttttcatatggggatatgtgtaaatattaatattatatgtttaaaatgaaaaaaatataataaaatttgaaagaaaaaaaatagtgatgtatttcaaagaaggtgatgtatggtaatgtggtataatgtaaaaatttgaggtaaaatagaaaataatgaattaaagtaataatagaataaaacatctgaaaaggcataaaaaaaaaacccaaatctaagctggttccatttccccacccacctataaaacactcaaactcaagtatgcctattcattatggtgccgtttggtagcacttttgttttttaattttttaatcaaaaaatgaaagtaaaattttnnnntttaaaaaatttatttttgaaaaacaa

SEQ ID NO: 34165 - DNA, 1518 bp, Cannabis sativa
ccctattattttggggccctgtgcaactgcccaggttgcacaggctattagccgcccttgtaaataacaacaataaaacaacacaataacacccttataaactataaaataaataagtatataaataaatgaaaataatgtttttctctcacttcaaataacttgacaaattttaaaaaaagtaaaacgatgatagtatgaaatatatctcatcagttaatgtcatatatatacttaaagcaaaataattaatatgtgaacggtattggaaaacgttaatatttttatattaatttggatcacaatatttatgtaaataaatcaatattaatgtgcttgtatgtaaatttcccaaaaaaataacttaaaacaactggatcacctttataacaactaattgtatttttttttcttaaaaaaaaattctacatcaaacccacaacacgctgacaaaaaacaaaacaacaacaaaatgtgtcaaaaataaactaaaaatatacacaagaacaactgtatataaacccaaaattatcattaaaaaataactcaactttaatatgcaaataaattagacataatatattgagtcaacaacctaataaataaaaaataatttaataaaataaaaacacctacaaaatattacttataacacaccataaaaactaaacatatattataaatatatttgtattactgttacgttctttaatttataataatatatttttatataattttagattaatgtttagtttcaaatgtgtattttaggttgattttaagtttatttatattttaggttaatttaacgatttttttttttttgctgggtaaaattaatgtaatgagtttatattaatgatttgtacttattttttttttttgaaacgtatcaccgtgaataaatttttattgttattaaactattagttagttgatttggagttgttatctagttgtttgttagttgttcaacatatattaaaatgtttttttacatgcaaataactaacaaacaattaaacatatattcattttttttattgaacaactaataaattacaactgaataacaactccaaaatcaaaatttaaaatatataccatataaacaacgtaaaaataccataacatcaactcccgcagtgtgtcattccaatatgaaacaaccaacaaaaacctcaaaaacgacatatatcaattttattttgcgccaacctaaaataaattacaaaccaacaaaaaattaacacatcatcaatcttacactaaacaaatttagaaactaaattacaaaacgacaaaaaataataccacatcagtatctaaatgcatgatttttagaggcattaatataactaaaaaactaccacattaacaatatcacacaccaacgagtccaacatatatcacaaactaatctaatttgcaatgtatactaattattttagaaaatatgaagtatttatttgtagtattaagaggctcaaagtgaaacaagtgttaagtatataa

SEQ ID NO: 34166 - DNA, 1343 bp, Cannabis sativa
ttcttgttttctcaacatgaaaatccaaactttcttgctaaatcatcaataatactcatgaagtagttagcacctccaagagtttgtgtccttgagagaccctataaatctgaatgcacataattgagtggctccttggtgacatgtataacagaagggaattttaccctacaactcttgcctagtacacattcttaccattcaacttgtttcttaacatgccctgcttctctagctcaattagacctctttcactaacatggcttaatctcaaatgccacattctggttttatcaccgcctttttcattcacagcaacatttgttgttcccaacactgccttggcattaagaacatagataccatttttgatatctcccttcataactatcagtgagcctttgatgactctaaaagaatcctcaatcttaatggtacatccactagcagctaattcaccaataaagaataggtttcttttgagtttagggacatacctaacattcttgattgttcttttgatgccatcacacatgataattaaacaacatagacccaattcctttgatttgacaagctttgttgtttcctaagagaacatttcctccttgtatgtccttgaaatgcacaaagcaggttcttgtgaggtgtcatatgaaatgagcacccagaatctagtaccgattcttcaccagattctttacttgacacaactaacacatctactaattcatatccatcttctgcatcatttttttcacccctttctttgctcttgcttctagcattcttggctttcaatgctctacattcatcttgaaaatgtccttccttcttgcagtagtaacaaaattttccactcttgaacttggactttgtcttggattgactattgcttctatacttgttcttaaattctcttttgtcagttcttcctcttataatatatgtacagaccaccaccacttgagtcccctctatcctcttttgtcgtcattgataatgtgtaactttttttaaaatgttagggcaactttttttaaaacgttggggtcgtcactaatatgtgttagttttttttaaaagataataattataaatcaaattatttttataaaaatttgtaaccctaattttcaaaaccctaaataaacatctcatctctttattccctatctctttctcgatttttctttcccattctcttgctttggttggcgtcagagtaaactgcagccaaccatcaattcccgatgagaaccagcaaccccgagcccacttactcgcccatgtctctcattttctctctctctctctctctctctctatcactgcctactgcc

SEQ ID NO: 34167 - DNA, 2418 bp, Cannabis sativa
attatttcaaaatcgagcaaataccaagagaacaaaactctaatgtcgatgccttagcaaaaatggcctcgcagaatgaattggatgaattgaacttggtttcagtggagatgttaaacgaaccaattatatgtgaaaaggaagatgtcgagatgatagatagctcacccacgtggatgacactcataatcaactatcttctcaatggacaacttctagctgacaaaaacgaggcacgaaaactcttgtactcagtgcctcgctacacgatagtagagggcaaattatatagaaggggctatttgatgcctctcctacagtgtgttcttcctgtagaagcaaacgagatcatcagagaaatccatgaaggcttttatggggaccatgtaggttggcaaagcttgtcaaaaaggattattcgacaaggataatactggccaaccataaatgaggacacccacaaatttgtcaagaaatgcgataaatgttagagattctcacatatacctcgcgtaacaccaacggaactaaggatgatgacctcgccttacccatttgcaatatgggggataaatttgattggggcactacccacagggcgaggaggagcaaagtacgcagtggtggctgttgacttctttacaaaatggacggaggttgaacctctggtgtccataacctgcaaaaaagttcttgaccttgtagtcaagaacataatttttaggttcggaatacccattaagatagtatcagataacggaactcagttcgatggtgaattattcactgagttctgcaaaaggaacaagattatcaaaagcttctcgtcagtctccatgcctcaagcgaatgggcaagtagaagttgttaataagaccttgaaagatactatcaaaaagaaattagacgctgccaaaggtagatgagttgatgaattacctcaagtactttgggctaataggacaactgagaagacagcaacgggacatactccattctcgctagcatttggctcggaggcaatgctaccagcagaagtaaatattgcgactcacaaacaagagttttataatcaagaagaaaacaaaaaactcttaaaattatccttggatctacttgatgaaaaacgtactgagtcgcaaattactgttgttggaggaatttagacaacaccaaaataaataatatattaaaaatataaacagaaaatgtgcgagtactcaacctagaatggcgagtattcaagctatggatgtacagacgtactaagttgagtactcgcacattttctgtttatatttttaatatcttatttatttaagtgttgtctaaattcctccaacaacatttggtgtcgtctattggaaagaaattttctgttgatttcagaggaaaatcatcatggctggaaaccaaacaaatggagataacaacactagattaatcaatgttggaatgatgaatattccactcccaggtaatggaacagcacctgtccacaccatcaacggaggagtgggacagacaaccattactcctctcaacttattccctgaaactgccgctcatgttggagaaacatctacaccggcagccattgtggggcaattcccgcctattacacctacattggtgtctgaaggagtcatccaattgaccacgacccagtatacggccttacaagaccaaatgcaggctttgcaggctgaaatcaatggaagggtcagaacccgacgtcctccacgagtactaaccacacgtttagataactcccaggtaacgaatactaagcgacgaactaatctcactcgcagagaacgaaggactggacaatagggactagacttgtatcaaccaacatagagggatcaagtcgcacgaaactccaaccgtgaagcgccacaagaggaggaccccgagcgacgcaaccctcatagcagggcccaaccgcgtaatgaggtaaacgatgctgaatctcattcttcatcctcacaaagtcgtactcctagtgtatataccaggtctggctctgtggaaacaccgcgaggaggaaggtaccaagttcacagaggtgatcctcatgatcacctcaatgcaatttttacagcgtagtcccaaacgccccgaaactgttaaaagcctcgtgatccccaattgggcgatcaaggcataaacaacggtaataacccagcattgtcaacctgcctaacgcaccaactgtgccatcagcctacatcttaccagggaatgcgcattgactcattctgtcttgataaaggtatttcaaatttgacaaaatgaagcacagagtgcctgctactcattcattatttagacagatgcgcctctctcctagtcatccaagttcatcgttcgatcaatcattcatacaggaggactatatgaaatatcttacta

SEQ ID NO: 34168 - DNA, 3224 bp, Cannabis sativa
  modified_base (961)..(963): a, c, t, g, unknown or other
atcctggctttcctcatcggcttgggactgtgaccttctcccacaaggagtattttggaaccttgtagtcacaggtgaactggtccgagccaaggaggttgacagtcctcagattgacttcgttcaaaaggaaatctactgatcgcaatccgaaaggaagacccagcaagattttgtggcactcagccatctcgagggtggggattggacttttggtaaccgttgtcaacacaataagtgtaataagtaagcaacctcaaagtcataaatataaaaagaactcaaaaccaagtttttgagatagaaattactaacgtataatgtgaaatgcagttgagttgataggagaaagatagtagtctagaagaaatcatccttgaactcggtcttgtttggtaacctcacaatgatcatgcaatcatttgtgtgggtacaaagataataaaaacctcctaaacaccgctacctcgcgggaacagctttgacggaataaaaataaactatctcgaggtgagtgggacactcccagcctaaaatatggtacaagacttttagactcgcaagaatcctataagagcttggaatcaattgaaaagaggcaattccaagataattacagaattctttgtagtacactcttaaggggagaatcgctccaaccttgatgtgctcgaggctccaagcgcctattccagacgagccactagtattggcgccaccacactcctcgcgaattactcgttttggtgaaaagcaattgaattctctaggagcaacagatctgatgcgaatcctcgcccttgcttaatgccacaagtcgttaatacgccaccagcatagtctccaatggcccttatcttggattcaataagctcggcctcaaaagtgacattaggatcctggggggtctttgatttgtgagtcttggtggacataatttcaaaatctaggtcacctggtnnnaaagcaacagtgactcgaggtaaaaacaaaggtctcgttaaagggatagaagataaagtttgaggttcaggccaagctgcatctcgcaaataacgacgtttaccctcagttatctcttgtaaaaattgcctatatcaactggaaatttcaacctgattgatttttattagatgatccctaattttggcatcattaatctcaagttggatttaggtttttggattttgggtttgaatggaagggctaattctttatgacattctatttctaggaaatctggagttgaaatctcaaaaccagattgggacatattaacaaaataataataatcctaattcctggaaggagttgattcgacttaaacaagaaacctaggaatttaataaacctaagttcactctttaaagtcctaaaaattacccaaaaataaaatcgaaaaatacttaaaccaaacacagtaaaagaagatgcaatcggaagcaaaaataaaagtaccaacttaggaaaaaaggaataacagagagtaagaaataaaccacttactatatttccgaagatttctgggtactgaataacttcgcgattgggatcatgatgaatgtgatgatgggctctgagaatttctaagattaaaaatgaaatctgatgaaatacgcaaaaaatatgtcaaggacaatgagggcatgcaaggtgatgaaaaacgaagatgattttttgcagaaagctgaaaggtttgaaaggcaaaaatggcaaataagtgttttcacttgacttttatactttaagaatgatcaccgttagattgaaagaataaagatctaatggatgggaacaagggagaattggaaaagatgggcatttaatgctaatgatgtgcctcaaaatcataaaccgccaaaactcaaagcatgccatttttcaaactgagattaagataaaaatacccttgtaatcatttaaaaagctctttttaaggggcaattattatacccaaaattcagcttcacttccgaaagtgacacgtgtcttgcagttgaatatgaacaacgtgatataataaaattatatcatttaatgtaaagaaaaagaataactttttaaataaaggattaaaagaaaatattcataactcgttgactaaatagtcttaagcgagacaaggataaaaggctattaaaacttaaattgacaagacacacacctgccttagagtacacaaccaaagaagataattcatttattcaaatgagtgaatacagtcgtacaaagcaacctcggattaagaatagcgagacagctacctcgcaattctaactaaagaaacttgacgaggcgaactatctgctaacacttagtgttttttccacattatgataaacaaggataataactcggaattaagcgagatacaattgtccaaatcagcattaaccatttataaggataagaataaaaatcagttaagcagttattttgtattatctgcatttaaatgaaacgtgggaattgttcacgtttcatgaacagttacatttcaaatcgatctcaaatgtaaataactgccaacctatattcctataaataggggcatattccacagaaaaagggacggagaatttttagagagaaaaagatacattatcaattatatattgtatcttgaattcagaaaatatcatcaagaatatagactcgtggagtatgcagatttaactggaaaaccacgaaaaaatatctggtgttatctatacatttattatttcttattatttctgtgacatatttattacgtaaagacttattatttttagttaacgaaaatctgcgttaacaatattgattgatgattgattgatattgatttactaaatactcagcttagttttttctatagttctgctacaattatttttcttacagcacaactacatctgatttattcacagtacaactatagtaaactagccctcaataaacacgtcaatattctattatttacgtgtgacaaaacttgtctcctgtttacgtcaataaacacgtcaataatattatattgtttacatgtctcttatttgctattaaatttaatgttgcttcttttaaatttatttcccgtgagttgaactctttggctgatttcctagcttcctaagctagagtaaatcgtttatgccaaatttttgtggttagggagtcagccccttttgtggctgttgtgtgagactttgtttgtgtgtttttgtttgcttaaataaatacca

SEQ ID NO: 34169 - DNA, 1375 bp, Cannabis sativa
  modified_base (204)..(210): a, c, t, g, unknown or other
  modified_base (1197)..(1197): a, c, t, g, unknown or other
aaatttttataaggaggggatagttgtaatatcccgaaaccctaattatgaataattaagatttattatatattatgggttaattaagtagtaatgagcaggatagtgatcctgctaacttaatttagcataaattataaattttaatataagtggataaataaacgtaatttattaactatggagatttaattaaaatatgtnnnnnnnatgtaagttatttgtgaaataaaaatatttccaagttcggcgaccctgaagacccgataagggaataaataagtgtaatttattaattacggagatttaattgaaatatgtggatataatgtaagttgttcgtcaaataaaaatatttttagattcggcaatcctggagacccaattggagactaaaaatgtcacaacggtattagttattgagttattgatattgttgaattattgaattattgaattattgattattgagataagttgattttagaaataccaaaatattttggggtactcgaaattaaccaaataccctagaattagagatttcttagtgactaagaaataataagataactattaataataaattttttattaatattattattattcattaatattatattttttaaaattaataagtttattggtttatatatattaagtttataaacagtacgtactaacgaaaccctcttctaccgtatgaacaaaaccctcatcctgctctattcatttttttttttaattttcaacccaaaacctagcgatctaagctctggtagtagcgggataacaaatctttgaagagagaaagcttaaggtatgatttaattttgttttaagctaaaaatgattaattttagataggggttttatgaattagaatagtaatggagattccgacttcgtagaattgttctttggtagctatgggactagtttcaatgtttacttgttgaatttgaggtacttttgagtttaaaattttgtttggaactttttaaagcttactcgaacattaatgacgttttccatttaagagctcactttcaatttgggttacgttgggactgtagtatatatggatatatgtgtcctgtgaagtttggaatgatttggataggttttggggggtgtttcggtgagtgcaaaatttgggatttttcgtgtttcaccgtttttagaaattcctangatatcagaattcgtatttttgtcataacttttcactcgggtgtctgctttggacattatatatatcgtttcgaagcttgcaatgaactctacaatatggtgtatgatttagagccaaaatataagttttattttagtatatttatactgcagtatttggtagaaaactctagattgt

SEQ ID NO: 34170 - DNA, 1651 bp, Cannabis sativa
tgagcccccaaactaggaccataagttgggcctcagaacttggatcaagatttgggacccgaacccagacccaaaccttgacctaggacccacattgggacttgggattcgagactcgatgcttggacccgacccgtagtcgatctctagatctaggacttagaccagaacccgaacccaaactcgaactcaaaccaggactcgcacacataccaggacccagatccagactcgggaaccaaaacggaaacatgaacaggaaccagaccgggatcttggaaccggaccgggatgtggacccagacccaaaccctaaactagacccagcgaccctaagagaccgaaacctagacctgaacctcgccccagacccaaattaggacccaatcgagacttggacccaaacttgacccgaacccgtaccccatgacttgacactagaatcgaaacaagaagcggatcgggacctaggaacaggaccaggaccaagacgtggacccagaccgtaaactgtaactagaccaaaatcggacatggacacagacccacctttagattgggtccaaaacctgaatccaaacccgaaccgcgactagggacccaaactcaaacctgaactcagacccaaacattgaccaggactcaggaccaagaattgagatcgagacccaaaactaaaccccaatctcgatcccgaacctacagcaagacctagcccgggacttgggacatgaaccgaaacaagactaggacccgtgattgggatccagatcttatgcgtggatctgagaaccagggcttagataagatccatagtcgatgtcttgatctgggactcggacaaggacctgaagccggactaggacccagactaggactaagactcgaacctgaagcggaacccgaactcgagactcaatcccgaacccagaccaagccgttgacctaaactaggattcagacctaaacatggacacgatccaagacccgaacctgaatacaccccaaacccaatctgcgatcaaaacacaggacctggacccagacgcagacgcagacgcagacgcagacccaaacctgggacccagacctaggacccaaacctagacccaaaccgggattcaaaaaacccgtacgcggactcggactaagacttagaccataacgcaaacatggacccacacacagacccggaaccaaacctgaacccaaaattaaaactggaactgtgactaagacctgaacctgagaccagaaccgaactcaaataataacccaaactcagacagaaacaggaccgagaccttaactaggactaagacctgaaaccgaggacccgaacctagatcgggacctggactgggaccttgacctaacctggtcttaaaccctcaccgagacttgagacacgcgacctagaccaggatccaaaccttaacaaggacccaaacctgaacccagacaaagacttggactgagacctagacccgaacccggactgggacatggtttaaaccaagactcgggacccgaattggaacctggacctaaaccaagacctagtaaccggacttggatgggggacctagaccagggacttaggccccagaacaaagaccaagagctaaatcgaggactcgaacccgaacca

SEQ ID NO: 34171 - DNA, 2023 bp, Cannabis sativa
taatatattactacgtgaaaaatatactatacataattaatttatccatatacgtacaaacttcttattaagtcacaatattattaatttgaaaccaaattcgtaactatatatatatatataaatgtataacaagttacctaactacaaactaagatataacaagttaacaactgattaattatactattattttttataataattataattaattagtacttatatattcacaactaattaataattaaggatgctatatatatagctaacgtatatatatatatatatatatatacactttcatacttttggtcacgataatatgtcatgatcacatacgtgtaccttcctctttttcttttctcttgacctataatagcctcttttaaatttatcactaaattagattaatatatataactacaaaaatataaatttaagaaataatctataaggggttatatatgaatcattatatatatatatatggaaactctataagaatatttatatggttgctcggcttatatatacatatattaattcctattttgatagtgaaaatacttaaacatgtacatacagtaccccataccaaataaattaaataataatgagtgtatatatattcctagcatatataatcttataaagatatctatgaatatgtatgtgtgcatatgtatatatatttgaaatggaatataattatgtctgctagaagtttcttggagcatgggagggggtagtttcttgttggcaataataataataaaaataatatactaataatttagttctcatctcatccatgatatcatcattctaaatgagaatcacttgtttttaattttatggtttcaaaaagtagtatatacatatatatagtagctaggtagtagtcatttttttcttctttctttttaatttaatttatctggaatttaaattatcattttcaagatttttttatttttttttccaatgatatgtagatatatatatagttgtgtttcccatgcatgaccattaaatcagattcatatgctctgaaaacaaaagcagctcacttttgagttgcaagagaactttttcattcctcccacgtgtgtatgtaaccatacatcctaatttcaccaaaaccatacatatatatatatatattatatatgcccttacatatatatatacatgtatatatacacacacatcacactcacgggcctctcgtctactacagatcatatatatgtaccatatcctagtaatgtagattattacattagtaatattatttctaaaaatttgtaaggctcgataccacaaaagaaaaatacatttaaatatatataatgaaaacagatcagagaagaagaaatgattacggtcgatattttgattatatataaatatgtatccgtaataaacaattgcggaataatgaataaagatgatcgaatatatatatatatatttatatgtaccctaagccattgatgaatgtaaatttatatctcacaaatatgttgatcggatttttgaatttggaaaaataagagagaaagcacatattaatggatcttccaagctctctttgataatgatttcatagaaactgaatgagtagatgccttatatttatatagatttcatcaaagtctatatgtgccatattaattatcataatatttaatttaataatattattatttaaaaaattaattgagaaattaaataaatgatgactatcaatattagaatatttaatcaattatgaattaatttcttcaatttatcaaatcaaaataaaatcaatcaattcattatattattaaatataaaatattctaccataattatttatattataagatattaaaagatgctgaatacaatgtacatatatatagcaagtagaactactaatgctatagtctggatctccttgaatattaatcatattttgacagttaatttataatttacaatacatattaattaagcatattatatatacata

SEQ ID NO: 34172 - DNA, 2113 bp, Cannabis sativa
tttttagtcatctattgtcacaagcctctaattattaaattagtaaaagttcaatataattttgagaatactcaaacaactttatttaatttttccaaaaaaaaatatttatatattttctcaaaatttttatttattaattaattaatttatttaaaatattaaatattaattaatatataacaattaaaattatttaaaaagaattttaaaagcctaactgtaatatccattgaaacgtgaaataaataaatatatacacaatgaatttattggaactaacaagatttaccttcctatattttcgcctcctgtttatcttcagctgaagtctgttatttagttggttaggtagttaaattagttaagggcagtttagtaattacaggctgagttgttgatttttttcttgctctgtttgagccttgtatatatacctctgtatcttttatctcagttaatacaagatttcattttcacccaaatgtgttttcgtgttatggtatcagagcggggaagaggagcttcccctcgatcttgatctgtctttcttctcttcgctgtgtcattttctccagcgagagttctgtcttcttccctgaaattttgttctgaatttcgtctctattcttcgattagtgtttcttcctgatatgtctcgtttctgccatggaaactgataatcaagctgagatccaaggagctgataacgatggtgttttcgccactatcgaagaagttactggaccacataatcaatgaaatcatacgcagcaaaggaatcccctagaagatccttcgaatccatactatttgcaccatggagacaacccaggtagcatacttgtgtctcaacctcttactgggcaggacaattatatgtcctggagtagagccatgcaattggctatttctgtcaaaaacaagattggattcttggatggtaccattcctaaacctcattcttctaattcggttatgtacaatgcttggtatagaaacaataacattgttatttcttggattctaaactcagtctctaaagaaatttcttctagtctcttatatgatgaatctgcagctgccatctggactgaccttaaggttagatttcaccagaaaaatgggccacacatatacaacttaagaagaaatctgatgaacttaagacaggaaaaccaaactgtgagcatgtacttcactaagctcaaaacgatttgggaacaattgtctaattacaggccaaattgtgtctgcaatggttgtacatgtgggggtgttaagaaattacaagaacaccatcatatggaatacataatgtccttcttgatgggtctgtcagattctttttcacaggttcgaagcaacattctcatcatggaccccctacctgaagttaacagagtatttcacttggtgacacaagaagaaaatcagaaggggaacattagttccactgctgatccaaattcgaacatggcatttgccttccaaggagacaaaagcaacagcaacaagaacaactctcaagggaacaaacctaatcaacctaaaagaaaccgacccttttgtactcactgcaacatccttggacacactgttgagaagtgttataaaatccatggataccctcctggttttcacaaaaatgacaaagggaaagaggcatctgcaaaccaggttcagactattgttgaacctgcaactgggaacgatggacaggctatactgccacaactaacagcagcccaatatcaacagttattgaatcttttggctggacagcaatcaactaatactaattctaaggttggcaacaatacaggtaacccaggtatagtgctttcgagtatgtccaatttacatctaaatgaatcttggatactcgattctggggctactcgacatatatgttatgataaaaatatttttcaaagtatatgttatgttggtccaactaggttgattcttcctaataacgaaagccttactgttagtcatagtggcactattgctctttcgaataatctaaccttgaataatgttttatatgttcccaatttcagatataatataatctcagtaagctgccttactaatgacagtaatcttg

SEQ ID NO: 34173 - DNA, 1444 bp, Cannabis sativa
acaaaagactaaataaagtaaaactacaatgactctaatgccctttttttaatataaatataaaaattaaagtaggggatgatttggtcaatttatcatttattctaatattcattctaacaacaaaccaaacatcttaatcaattcccattactattcttatttcattacattattattaccattaccattactattacattcaaaaaaaaaaatatcacttatgtattgtaattcccattacatcataaaaccaatgtaatgatgattacattgttagaaaatatctcttttgcctttttttaatattttttttaactttaaatattaaaaataataaaactaaaggtatttttgtcaatatacaacttattttatttgattacaatgttcattaatgagttaaaccaaacattataataccattcctattacaattctaattccgttacattaccattcatattacaattaccattcttattacattacattatatcaaagcaaacaccgcctaagttttaattaaccggtttccgaaaatctcaataaacactataatttggaagaaaaaaaaagctgatttttttttgttagaaaagaatcattttaatctaaaaaaaaaaatatccaatataataaaaatatgcaacaattcacaaacccaaaacaataaaaaactaattataacatatatataatatgataatgtaaaaactaaaaaggtttattttcttttcttttcttaattttatttttctttgaaaaaaaccttttgtacgtatattttcgattattattattattatttccaaatttaatatcagaaaattaacattttaaaatatatagtatatatttataaaaggggtatacttggaaatgcgctcctagaaggcgtgagacgtttttcttagttggcatgtgaaatctcatatgatatagagatggtagacacatgtcaccactactatgaaagaaataaagttcagttacgttaaatagattccaaaattaacggcaatgacaagaaaatagttggaatgatttcttctaactaaatataattattatccaacactaaagtttatttaattaaactatgcgtaacttaatttaaatttcacaaatattaaaaaaataagataattaatttttaacattaagtattaaatcttgaaaagataaggaacttgatgttaaaccataaagagagtttacaagaatcaaagaatctgtttccaccaaatccacatcaatattcatttgtcttgcccattctaatccatgaaacaaagtcttaagctttcgtatgtttcctactattttttttttcttgaaagagcagacaacacatgctcttgagagtctcgaatgacagtctattctgtttaggaatgtcagtcgggccgggcccggcccggcccgccacaaacccggcccg

SEQ ID NO: 34174 - DNA, 1089 bp, Cannabis sativa
  modified_base (198)..(198): a, c, t, g, unknown or other
  modified_base (646)..(650): a, c, t, g, unknown or other
taaatttttgaaaagtggcataaaggttattgggtgattttacaatgtactcctataaaagggacgtattgatgcattctctacttgtttgggcatccaaaaaaaaaattagtctaatttttttttccatattcatgtacgttataactatttgaaatatcctataaaattttaaaaaattcggaataatttacaatntagaaaataatgttcaaatagtctattttacacgcgtataaaataaaatagtcacgcgtgcaatacattatttgaatgtaattttcggcgtgttaaacttttttgaatttcttaaaattttacaaggtgtcttaaatgagtataatttatatgatcatgagaaaaagattgactaaaaaattattttagatactaaaacagatagagatgtatcagtgcatctcttttaaggggtgcattatagaattttctaagattatttatttggataaaataagcaaatgatgacatttgttattgaatttttaaaacttttcaccgttaccaatatgttcccctgaaaaaagaaaaatctcaccaatatgtattctgcaaacatttttccaacaacattaaataaattcaattattattattattgggaaggtattattattattattattannnnnattattattattattattttggtgttgtaacgcacaatactttttcaaaataataccagttatcttatttaaagattaagtacttataatttatgtattattattacagtgaaaaattaaatttaagtatttaattataattataaattaaatttaagtatttatatcataaattattcttattataataaaattaaactttttatactaccaaattagagtatatagtttgttaataatatccattaaaatataattttttacaataacgtaattcttccatcacattttatttaattttatgatgaaatatgtaaagtaatggtaattgataaataaatataaattaaatattttttatctttattacgttaatgaataataaaataaaataaaaaattcttttttataataataatttatattttttaatgtttaa

SEQ ID NO: 34175 - DNA, 2328 bp, Cannabis sativa
  modified_base (2001)..(2002): a, c, t, g, unknown or other
ttcgaattttatttgagtgtctatatataggttggatttgtaaatttgatataaacgttttttattcctaaactttacaaaaaatatagcgtgtgaatcggtttaccataactaaaataaaaagcaatcaattccttattacaactattttaatttaaaatataaaataaataatagtaaagttaaaaatatggtcaaaaatatttataatattttaaatttaaatttctttacataaaatatttacataattttttttattttaattcaaagttaaaccaataaatttaaaaatatgattaaaaatatctataatattttaagtaatttaaatttctttatataaaatatctacataatttttatttttaattgtatataataatattataaaattaataaagaatattctgttaattaataggatactctattaaagttaacgtagaaaccccaaaagtatcgttaaaccaagaattctgttacatagccacactttatatagaataaatatgttttaatttttacctttatttttatattttttttttaagatatactcacttttatagatgatgtcccaattatacatgttaacgcaaattttcgttaactatatttgagcctaaattgtgataaacttgcacagaaaataaaaacagtaaagaaaaaagtaagaacttgaaggtttttttacgtgattttgcaattaaaattatgtatagcccacgagtcaatcttattagatttctgatacagttttagggccttttctcttatgaattttttcgtacctttttcagtctaacttgcccctatttataattacataggagtgcagttcattacagtgttgtctgatattttacaacaagtatcccctgaaatcatgggatttgatcacattccacgtaaaatatgtgtggttaatatctaaaaatcacacagctgtgattgatccacttttatttggtcaatataaacgtgtattaaatacgttacaaatcgtatcgttttgggacatcgcgctgggaatatagcaacaacaaccctggtatcaagccagagcttttcccacacctttccgaggttaataatgtgagcctcgtcatttatgctattgaagtcataacactccatctgacaattgcagttcttcgcgacaaagtgaacttcagtagccaacatcatttgaatgtcagcttctatccgagagaactgacttgacagagctgtgaatctcactaaaagatgtctggagttgactagtgaagataccacaagcgcgccttcctatagcgagatggacgcctcgctattagttgtatgggtttacctgattattatacttagtttgtatacggtatattatacgctaagtgtcttatcggccattgtatctcgtcttctaatgcgtagcgaggttgacgcctcgccttgtacatctgaaattgtatgatttctcactaatgcacgaggcaacagtttgcatatctttatctcgcctaagatttttcaatcagtcgagttataaatatactctgtcaatttcgcatttaacgagttattctatttcaaatataatcatcattacgtgtgttgatttgtattcttcccagtttcacacgtgtcctcctctgattgctagccaaatttcgagtataacaataccccttaaattaatgtaaactagaaaataaaccgcgatttgcatgcagtgtaagggtgagcaaaaaattcaagaaaccgaccaaaccgagtgaatcaaccgtttgaacaccgaaaaaattaaaaactgaaaaaaccgccttcggttaaaactgccttaacacggtcggttttagtgtcaatgacaaactgaccgattaaactgagaaccgactgaacatatatattatacactgtatataatataattattttttgtacatatttaatagggtaaataccatgttggaccctgtgttttgtaaaaattatcaattggaccctctgttttgnnaaatgacaaaatagaccttatatttttcaaattagtaaaaatatgatcctgagctcaatttttaataattttatttttttaatacaacaaactttaagataatttataatacggacagatacagaaaatataactaattttgtcataacatctctagatcagattattattaggttttattttgacaaaaaatcagtttagggtcctatctatacaatttttgaaaatacagggtctattttttcatttaacaaaacagatggtccaattggttacttttgcaatacacagggtccaaaatgaaatttaccctatttaatatataa

SEQ ID NO: 34176 - DNA, 1375 bp, Cannabis sativa
tgttcaagtcagaaatttactaattaatattcactaattaattttagtattctatttataataaaaaaatatattttattataaaatgagaaaaaatttaacaattctattttattttatctatatttctattcatcctaactaaagtacgtaatctttttttttttttttgataattaacgttcattaatcataaagttagacctcgcggtcattacataaaatattcataaggatagatgccacatcaaagcacccaaagcggttatgggaaaacgcccatctggctacattgtgagccataaaattacaagttctacagtaatacatagcaaacagctagcaaaagatgaaatggttctattataaaataaggaatagttctcaatttcccatttagggtcgaagtcattgagcgaattgatcactaccttagaatcgctttcaactaggatgaaattatgttctttgtcctttgccacttcaagcgccaaacaaactgcagcagcttcaccacaaagagcgtctgaaaagtctaactttaccgtgtacacccaaatcaccctactagaattcaaaattcatagtatagagctcactgtactagaattcatgtaccaaatgaatagtcctacttgttcatacatgaaaaaaagtaattgaatagagctagttattattcatttacgtactagttaacatttatgacaacttttacaacatatttggctgaaactttgaaatttatttaatttttttttttcaaaaaaagaaaacccaatacttatatgaatttttttgggccttgctataattaccatcttgataattttataggggtttttacaaatttattagattttaagtaaaagtttacaatttactatcacaagaaattttttacaaaacaacaaaactgaataattaaaataatagtggaacagctaaaaaataattgtggaacaacagtgaaaatttaacacagtatacaatataaaacttacatagcatttttttaaaaaaattccacctcatagtaaaaaagtaaaaattaaaaatttcaatatgtggtgtaaaaacccccaattttatattgacattgtttgaaataatttattttctcattatatagtcaaccacaattatttttgtactttgtaaaatgttgacttgttttttttctttactatgtacgtgcatatattcattgccatctttaaagcaagagagcaagtagtcgcctctttgcacaaaggattcatgaatgatagagacttagaaagagcccaaataatatttagttacaacattaataataatatgatgaagaatgtcatgaaaattttggctttgaactttttcatttctagccttc

SEQ ID NO: 34177 - DNA, 994 bp, Cannabis sativa
cgaaatgttacatgaatcagaaatggatctatgtaaaataaatgaattttatgaagaaataaagaaacattgctatgcatgtgttaccttttattttttttttattgaataatcataattaattaaactttaaactcaactacgtagtagcaaatattgctatcatggtataccatatttgattatatcctgaataagctactacatttactgaacgttgaacaaaataaaatgaaatattttttaactttgcaagtaaagtcttacattttttaataatcataccgaataaagaaagcatttcaaaaggactcctgatagcttgcacaacaaccaaacaatccgtctcaagtgtaacataattccacccagcttaattcttgatccaacttaaaacttctctaacaccaatagcctcaactatttctacgcgaacatcccctgtataacttcgtgtaatataattaaatacttctcactcactcaaatgatttaatatatataattaaaagtaattattgataatgtatacttacatttttctcttcacaatgattaattattgcacgctttaattataggagtgtaaatgggtcgggttgattttgatccggctatgatccgacctgattcagatcatgtaaggatctgccccgtcccgttctgctatattagatactcagaccggatcagatccgaaccgacttattcggatcgaatctgatctgacccaacctttgttttaaagaattttaatattaacttataatttatattcattttaattttgtattagtatattatttaatataatactatgtttggtattgacatatattaataaattgtgtaaaaataatatattttcaataaactctaccccaacaccaactacaggtcgggtccgagtccaagtttgggtccggtcctagtttgggtttgagtcagggtcttgggttcgggtccgggtctgggttcgggtccaagtttgggt

SEQ ID NO: 34178 - DNA, 2475 bp, Cannabis sativa
agattggtttgaaaataatttcttaaaaaaaataaaacctacccaaaggacaaaacatatacaaatcctgactcaactccaacaatataatagaaaaatagcaatggtgaaggaggaaaattatttatttctattactttgacctttcaatattgtagccacaactcatctggtccccaatttccttttatatacgaataggactatggctgcccatttaataccatacatttcttcttcttcatctttcatgtatatgcatggtttctcttaaataaattattcaatattattagagtgatcagaagcaaaaatggctgcccaaaagtgcagttgtgtagtttcaatggcgctgttcattgcggttgcgttacctctcgtgactattttcttccacagtaccttcgacatttggtatatgtttttctcaattgtttaattatttcgttttctaggaaagcatcacatctcctcttctaaacaatactttttatatctatttatttttccctttttaaaattattactcataattttttttaattatttattaaaaaaaaaaagaagagagtcatattcattcattactaaattggttaagtcataaattaaataaaaaatttaatcaccaaagtaatttaatatatatatatatagttgattaaaattacatgcaagacacggatttttgttttattttagatgttataatttatttttttaatgaaatttaatttaatttaattttgattaattaaaagttttttaatataaagtgattaattgaaaaaataataataaatagaagaaataagtattataagttttgacttattattttttttttataaaaagtattttttaaagtttttgaatatcattaaaaaaaattataagtaaattaaaaattatataaattattttaattataaaaataacttcttaaaagtctttaatggaaaaattataaattctagcctctatcaaaaaggacttttaatttcttttatctttctagctaataaaaattaaactctgtatcatcaatagtttagaaaccaaagttcacatttttcttagagaatgaaaaactataatcaatgtcaaacaaataaaatttgtatgagtatttttatacacattgtgaaaaatatatgtagttgtatgaaaaatagaaaaatacacaagagtaccaataaaattggcattagcaggagaatatatataacgagtgttaattttttttttttttaacaaaaacttgacaaacagaaacaagaaaaagaaaattgatcgacaccaaataaaccttccatatcgttttaatacgaagaagggagataaattatgttttaacatttttttttgattcagtgatatatgatttaattaaatctatgtttcatcatttctacaaataagcttcaattttttttttattaataaatgtcaaaatctaactaattatctcaaataattttttctttcaacatcctgacttaactcttaaaaaatataaataaaacctaaatataaattaaaaccctaaaatcctgactcaactccaacaatataaacttctcttcagccgtgaactacgcagatgacaaaacaattctgaataaacttaattagtcgtttcgtcgaagaaaatctgcataatttcgttcaaggactgtcgagttttttgactttcttctcgctatctctctctatagtatttctcagtggtgatttttttatattctttctttcatatgtccagtcatatgcttgctactcctattctttataattttatcatcaccgattcgagttaagtatccatagtaagtgtgtagcattattattatcttttaaaagctaatcttcattctcctcttctctttctagaaattttgaatttgacctttcattattgatttttaaataaccccacacactaattaaaataagtttttgaaccattttaaattatatgatttttttttttttttgttttgagatgtaaattatatgattatttattgaatctttctcaattaaattatagagcacctaacataaaattaagtatacgtgcttgcacgtaattttcttctagtatatagatatatagatatataaatatagatatttataatttgctaaaaagaatattatataattaattacttattagtaaaagtagatatttatttaaattttcattaaaagaaattggtccaagatggatattttagttttattttatttaaaataaaaaattcattaaaaaatggtgtggatgctagttttataaaaataataaatttagtattaggtttgtgatattttaaaatatattattatttttatttgttttatcattttgaaaaatagtttgttaagttagttatgattaaaaaaattaaataaatgagaaaattaaggagagaacagaaagatacatttagaataattttagagtgatat

SEQ ID NO: 34179 - DNA, 2752 bp, Cannabis sativa
gtaatattttagatcttcatactatgtttttcacttaaattttttttattttttttttcataaagtctaatgttgttatttatcatatctttttgtatttattatccattatttatttagcaccataattaatttttttaaatttgttatatatttttaaatatttgtttttatattaatttttagtagcttttattaaatattttattattaactttagatattttcaaatgttaataaatactacttaatcaaaatgtattaccaataataatcaacaacaaatcatgctcatataattttttgatggttttaatgctttttatggttttacaccttaattttatggcatgtgtgccatttattatggcttgtcgctacttgtttagggtagttttgtagtatggtcaataggtatgagaattgatccattttatgctcatgttttctatttaagcgtctttttcacttttaacagataagtattttaagtcttttcaagtctttatctttaatataatttggtttaccatcgcttctttcacattacctttcttcattatattgtgtagtaataaatttttattttttgttattttgtaagttattttgtggagggcctacacttatagaaaatttatcaataagttaaattttaaatataatctatttgatattgatttttagcatttttaaattagggtgcttttttattgttactagccaaagggtaatacctttggctagtttttcttagaattttgttagttttttagttattttgagttgtgatatgggttgtgtgttatattctgagtttgtatattaacttttattttaaaattttcattctaatataactgtgatttttagtttggtgttgtgctgttttttcaatttcgctaactctggcaacaactattaataaagggaaagtatttttcaatgtgatggggtgctaattgaagatgttataactttattgtctaaatttccgggagtagttttgtctcatgtgctcgcgataaatattctgcagctcatggtttgacaaaacatacccttcggttagacaatgagctatcctagttcgaggaggttccactgtcgattgtaatttgttgcattgttaatcatgtgtgaatttgtttcaccacgtcaaaaaaaaatagaataataaattatatttattataatgttgtaaatattatttaatttatagagttgttaaatttgattgaaaattatttagtttatttattttaaaatttttggttttattaaatatttagttaaaattattctttattaacaaaaaaaaaaaaaaaataatgacagctcataattggcacaacatctagaatgatctaatgacaactcatgattgggaaataatctagtatgaggaagactattttttaacatgctccctccaacttgacttggttgactgaccactacaagcttgtccttcaggtagaaaaattgattaattgaaatggtttttgtgaagatgtctgcagtttgctctgatgtaatgtacctaacctcaattagtcactatttaatgaggtctctgatgtagtgcacgtcaacttcaatgtgttttgttttgttgtgaaatataggattggaaaagaggtttttagtgtcaatattgtcgcactagatagttacaggtagctgatgttgtatgtcaagttctttaaacagaaagtgaagtcaagcaactttcatggtagtttgcgaaagagctctatactctacttctattgacgatattgcaactaccttttgtttcttcgagcaccagtttataaggtttcctccaaaataaacacagtaaccagttgttgattttctatcatcaatagaaccagcccaatcggcatcactaaaacactcaatggtcaattctttagacggttgaacataatgcctttgcccaattgtgcctttcaactatctcaagagccttttacatacattccaatgatgttgagtgggactgtgcataaattgactcaatttatttactgtaaaagcaatgttagggcgattgagtgttaaatattgaagtcctcccaagacacttcgaaagaaggtaggctgatcaaagcgcttattgtcattgatattgagtttgttaccttgacagataggagttgggcttgagtttgggtgtaacatatgagtttaatttggtgagtaaatcagtagtatattttacttgtgagaggtgaattccacagctgccgcaagtgatttcgaaaccaagaaagtaattaacggagccaagtttttttagggagaagacttgttgtagctgagcaatgataccacaaactttgtggttattgttgcctgttaaaaggatatcatcaacgtatacgagaagataattcaacacctccatttttgtaaaaaaattaatgatgaatctaagatagaattttgaaacccaagtgagaatatgacttgtttaagttgatcaaaccaagcacgcgacgcttgtcgaaggccatacaatgccttgtgcaacttgcacacatagtctggatgtgtcttgctaacatagccgattggttgttccatataaacatcttcagagaggacaccattaagaaaggcattgtcaatatcgacctgttgaatatcccaattgtttgatgttgtcaaggcaagtattacaggttagacttttaacaacaagactaaaagtttcaaagaaatagatgcctggtttttgttg

SEQ ID NO: 34180 - DNA, 1961 bp, Cannabis sativa
atttactttaattaaaataaagttacttaaataattaatgcactcttaaaatgattactagtgaagtacgagatatgcccaagtactgaattggagattagagatctaaaataaaataaaatctcatttgtatgagaaaagtagtagataataataataataattttagaattagaaagaggtttagtaggtaagaagttgagctataaacttgtgggtgtgagtgtggcaaggcaaataatgaaacttttattttcttttggatttttttctttttcttttaagaaacatttcttttggatatgatattccacatatgattcttggtttccaattgtgaataaatgacatgttcattttttaagatacatgaaagcttctagccatgaataaactctctaccacttttcttcacaatgtgtaatttacaaaaaaaccctcttctttagcaaacttttgcctatagaaacaaggtcatattggtctttttgtgtaccaaatatggatgaagtgaatgttacataggatcccacaaaaacatgatagattatcctttgattaaatagaacaatatttaacttgagtaattgagtttaacttgaagggtgcatgtgtagcattggatgagccctaaaccaaaattttcaattttaccatattatataatatttattaataaggttgtggagtccaaatgggttatgttaaagtgtcaattataattgtaagtagttatttctcatttattaagtgaaaaagaagcttttgatatataatatttaatgtacaatacatggctgagattgacattgtggctcaaatattttctcattgtcgttcactaattttgtcaatggtggagccttgatattggcccaaaaactgccgactttgtgggcccattgtgggccctgaatttgaatagagaaatggaagatttttataaggattattcatgcttagggcttgtatttgtcattttcataaacaatggcccaacttttgtttacaaatataccaaatatatgggatttctttaagttttacactcaaatacattttggtaacctaagagcattaacatcaacttctctactttattttaaaaatatatcaacaaaatctcactttatttattttacctgacacatttacattacaatatattttccctgtattattttaaaattatttaatttaatatattttttaaataaataaatataataatattaggcacacacatttctaaaaagatttgaaaaactaatataacatttgagcacatgtagctaagcattgttgttttagctataatacctcatttgaaggagcactatttttcacctcttagttaaaattgtgtagctattaactattttaactactatattgtgagtgccctaagataacaaaaaataatgtgaaaaaaaaaaaatatatcgagagagaagataaagaagaaaaaaaagacaaaaagagaaaagttagccaaaaaaaaaaagtctattaaaaaaaatacaaagaaagtacaaatataaaaattcttttcttaaagtataaatgtaaattttaaagaaaattaatatatagtataaatatcaaatataaaagtaaaataatgggccccttaaagagtgtgggccttcggacgggtctagcccgcttataacttaattataaaggggttttcacaaaaatactagattttaagtaaaaaaaaattaattgtattaccacacgacgaaaattacatttatactgttcttcctcttttttttcttcttttaaactgtaaacaccaaaaagaaaaaatacaaggcctccatcttccacacccacagacagaatcaccacagcaacactaggacagccaaaaaacaaccattaattctggcgagattgagcaaaaacagtgaaatcaatgtcaaataaataatcatgataaaacaactgtaaaa

SEQ ID NO: 34181 - DNA, 2948 bp, Cannabis sativa
ttttatcatttaacaaaacacagagtccaatctgtaacttttgcaaaacacagggttcaaaatagtatttaccctataattaatttgggtgatttgaatatttatagatatatataatatttcataacatgtatgtattatttattttataaaattaattaggtattttatgtattaattatttttttcttaaaaaaatttataatattttattttataaaaatataacgtgttttaaaatatcgtaaatatttttaagagctacaaaattaataaataattttagtctttattaatttacaaattaagacaaagaattgacatgttacaaatttattaaaaaaatatttaaactacgagctcacgtacccaactagttagataaaaatttagaaataaattttgttacttatttttataaatatattgaagtaataattaataatatcacattacatcactcaactacattttttttatatacatttatacatttatgattggccggctaccatcttcaattatgaacctcttcaatttttctcatttaatacatttttgtaaaaaaaaatgctaaaattaaaagtactattagtactaattatacatttatatattttttttttcatataatttaattttaataacttttaaaatgtattcctaactaatgtctaaaagccatcatttattatattatatataatatatatatatatatatatttagtaaatatcaatcacaatcatagcatttattcaattataattttgacaaaaattacaattttaccaactaaacaaaattaaatatgacatatacagatagggcttttgcctatatatatgagtagtatacaaatatatacatcatacatgagtataaagatcacgtaaaataaatgtataaaagatcacaatcagcaactgatcaaaacattatgggtagtggcagtggatcagtagtgattgttagatcagaaatggaagcggttcagacggtgccaccgttagagataacggctccaagaaaggtccgtcaaatagtgatgtcatcggcggctggagccatgggtgagtacgttaggggttggggagggtgcgttcacacggtcctttactacaacaagaagccattagccgaggaggaagaggactctggctcgcttcacgccggctggatcaaggagtctctagccatagctctctcccaacaacccttattctctggaaggcttcagaaactagatgatgttaattacggaattgttgctaatgatgccggagtcagattaatcgaggctcggcttccggtcaccatgtcggagtttttacttgatcttgatcgtgcttgtggctccactaggagggaagctgaggctcagcttgtgttttggaaagatgttgatcaaacagatcctcagttttgtcctctattttatgttcaggttagtaatatttcattataattattattctcttcttttgtttatatattacattttataatctgaaatttgaaccgagtacctccaacacacgcactctcttatggccgcctaagtgactaactcaagtggttaaaaatattttcttttataaaataaatataaatctaagtaattgtttaggaaaactatgattgaaaattttaatattttctcaacaaaaaaaaaaaaccatgcatatgattttctctagtaataaagtttgatatcctacttgatgtaagcaataagttatttgggtagctagttagaaaatttttggccattagatttgatataacatgcatataatttgtgaggtgataaatattaatcagttatttaataataatgagattaataaaactaaattggtaagttggctctgcctagtatagtggtatatttatatgtattattagggcattaattatatctatagatatgtcatataatgatatgttacaagatattatgggattaaaattgcaaaaggtcaataaacttgtccaggatctactaattctcttttttgtcttatttccctttttgttcttgaaatttatatataataaaaatggactgcaatattaaatactgatgagaaaaggtgaattgattaagttttccaatagagatcaaatcactataaataaatgcagctaaaaatagtgatatggacattggacaatattttttttttgactaatattgattatagtaatattattctgtgaactcttataaactatggtaatttaaaatttgacttttctttttacctccttttatattgggactgggacctttgggcatggtgcctaattattaaagctataaatatgggttggatagtaggtttaagtaaaaattgagtcaaccatgtgtatccaggtttaaattaatagtagctactgttttttttttttttttttaagcgtttatatattacaacatattttacttgggactcgaactcaggacctctaacattcacacactcacctccaacatgttttaatggtagttactttaaagaatagctatattgcattacagagattttagtcggcatttattattacggtaacatctctcattttttttcttattttttaaaaaattaaaattaaaattaaaataaaaaaagtaagaatttaaaataaatatatattaaaagctgtaggacacttttaatttttaagagttatttagcattgaagtattttttttttaataataaggtaacaaaaaataatgtaaatgaaagaaaaataaaatattatattttaagatgatagatttgtccttttcaaaaaaaaaaaaaaatgatagatttgcccataaagtgatttttgtcatggacaatgtggttaatatttttaaagtcattttattaatattattgtctatatttggtacggtcaagtggcatatacttaccttttttttaaaaaaaaaa

SEQ ID NO: 34182 - DNA, 3221 bp, Cannabis sativa
cttgtttggtataatcaaagagtaaaacatattaaatcatttattactctgtttaaaatatttatacatatatatagagataatagaaaaatgaagacaagtgttttttctctttttgaagatggatgaaataaatctgataataatctatggaactaatcctacttgcccatatttttttttaatcagccataaattaaattaatatatattgaattcattctcttgaatcatacctatttttcatatatatatatatatatatatatatattatgtctaaaaaatatgcatcaactaattttttttataagtgcatcaattttcttaggcatatacattaaaacatgttgttttaggtaattttaattgaacatcattcacaacattgcagaatccaaacctagatatgaaaatttatagaattatatgtattttatatatatatgtatatatgagatgtagaaataatactaagtatatatatattgcattgagatcctattatttaatttatttattggtattaagttaggccttccaacttccccagaaaaataaaaggcacgcatgaagttctcaaacaaaaagatgaatatttttttcgaaaaaaaaaatgaaggttttttctttccaaacaaatcttaatagagaattaattaggaagacatgtgccaatttttcattattgggacaggcaatgggacattcaattgggacaaaggatttcaatccatatataagatgtgaaaaagtgaaaagaatggacggacttaatgtactcttagaagatgtttagtaatttttctttcttttttttttttttgaagaacctgtaactttcattaaacagactatgatcatcaagccctaaagcttttttcgcaactcggtgagcatcgacattatcattcctacggacaaaactaatagaaactttagggaattttgataaggagttacaaatgttacaaactagatctgatattgctaaaagtttatttttacaattcataattttagtgaagaacctccagtttccataacttgtaagaaagttcttgattttatcgtcaagaacataatccgcagatttggaatacccattaaaatagtatttgataacaaaactcagttcgatggagagttattcactgagttctgcgaaaggagcaaaattattaagagcttctcgtcagtctcaaggtctcaagaaaatggacaagtagaagttgttaataaaaccttgaaggatactattaaaaagaagttggacactgcaaaaggtagatgggtagatgaactaccacaagtactttgggctcacagaacgactgagaaaacagcaacagggcatactctattctcgttggcatttgactcggaggcaatgctgccaatagaagtcaatactgcgacccacagacgacatttctataatcaagaagaaaaccaagaactccttaagttttccttggatctacttggagaaaaacatactgagtcgcaaattactaatacagcataccaacatcgaattacgagatattttaataagagagtgaagaaaagactctttcacgttggagatttggtgctaagatgagtgtttgaaaacacgagagatgcatctacaagagtgtttaacccaaactgggaaggtcttaatgttatcgaggcaatagttgggaacgggggtttataaattggctcgacttaacgactcactaataaagaaccattggaatgttgaacatttgcgtgttattaccagtaaacttagtgttgtatttcttctttgtaatgtgaaattattattatcaataaagttgaagtattattcaagtaattacaaagttttttccttaaaattacttgagggggcatatatatgtgtatgattaactggaatttatctagaaatacatgatatattgcaaacccactccactttaaattttaaaattttttccaaataattgattaaagttgtcaatggacaatgtaaagtcaaaaattgaacctttctcgttagaaaggagaatcaaagtagcggttgtaaatgagagttaactcataaaaataacattaagttacatgcgagattgaatacctaacggctttcattgtgtaggcatgtattataaacgaggcaccaagatgccttaaaaaataatacttaacctaaaatatgaatagaaggcctaactattcatataggcaatcaaaaaatgtacaaagtaattcgtagaatgaaatatccaaagtatgtttaagtttgcttactaagtcataaatggcagattagaacttctcgcgaataaaaagcatagtagattaataactacttaatcaaaggaaaaacaagatcagtggaaattcttacttaaagtataagtttgatcaatatattatttaagttgtgaataaaaacaaaataagcaaatatattaagtttaaatgtaaagatacgaggtaataaataaaaagataaaataaaagcaaagttggtcatccaacaatacaaatttgtctttacacaaaaagtgccacaaggggcaaaccattgtctccgtcatagggctattttcctaaataaaaaaaatagttaaaaaccaagcctacattgaaggagacttggacagatcttcttcttcttcctctgcctcggctttttcttctgctttcttggcctgctcgcattaggctaggacttcatccataccctcccccaaaaaacttaaattcatttatggattttccatccaagctcagtaaatggaacgcttggcaatagcgttgcatcgctccttggcattggtctcagcaccctcgagcttcatggtggctgcgttaagttcttcttagagttttaggcacatcttagacttgtccttagcctctttctgggctacctcaagttcagtcttgtgagccctcttcacctcctcgacctttttgtttagacgggtgatctccgattgagcctcattccactctttggaaacggcctcgcattgcccaatggttttctgaagctcgcactctaattgcttcaccctgttgagacatcgactttggggggacgaggaaaaggaaggtaggctataaaaaataaaaatgcatatgaattcttgagggttcttgaatttaaagaaaaaatgaagggaaggagaaggaaactaaccaagagactgaaggcaagacttctctcgagcatct

SEQ ID NO: 34183 - DNA, 1702 bp, Cannabis sativa
gctccctcgttttacaacaagaaaatcaaattaaatctgcttgaaaatttgtttttccgtcaaggggaataaaaatgtattaactctttgtgcttaaattaatattatgtccaggttcaaatcgaagaggtttcagctgtaatattatagtcgcagtgtgaaccttcgttaaaaatattgtatatgttctctccaaaaatatcattacaaataaattgcagtgatatgtatgttaatgtatgtaatcaacttatatatataattgattttaatccagttggctatatgaattttgtaatgcatgatatcatcaaaatctcagtatcccaaaattctttaaagttgtccaatatattattttttttgatatatcttctgcaattaatagtatagtatatatttttaatgagtgtgtgaacaaagtaaactctacaacttgttcaaaaaataaaaagtaaactctatcacacaacgactctactagagagtagggatcatacatattcataatgtctctcattttaaataatatcttttaaaataatacttatatattaataacaggatattaaattatatatacattttctgatttttttaaataaataaaaaaaaaagtgaaagtaaattttttttttttttttttgtcaaggaaattaaagtaaatttttcttgaaagataataaatgataataatggttagctgtgagtgcgtactatcccgtttgacaaaacaatatagaacaaaaatagtagttagtttggtctcttaaatgtaaatagttgttgcatgcttgtatctctctttaaaaaagtagacatgcattcatcatatagccgaattcagcaatatatatataatattacattacaaaaaaatgtgaccataataatagaacattgttataagtaattttaatgtatttaatactatattgatttgatgcgttaagagtaatatgcggttttttatattatttattaaattaaaatacgtgaacttcgatattgaattgtactaagaacaatatatcattgtttgtggtacttaacatcttaaagtatctcttaatatttttcgtcaaaatatcagcatagtaccttcagggatatccgaggaaaatatcattatatatacttatatcttgacattaaaaattacatactttgcaatacattataatttgttgtccttaattaaaatgtttaaaagaatttgtggtgtagttcctccaaatgaaaaggtatccaaaaattattactgaaaagttatatgtctcctgaaagtatgttcctagacatcttacttgtccatctagaagaagtctcgtggaatgatggttgccatccggaagggagtttcaggatgaccatcatgtccactccgggtgtagtaccctcaggaaagctatccatcctcttgaaaggagttccgaatggtaagttattcctcctagaacggagtctcaaatagtcgactccagttggctctttcttatctggatgctccttcagcaagtattggtctgtgtttctgaaagctctcatgcttgttcctagaagcacatccgcttatgctgatgtggagatatcactcaaaggggagttggttaagtttgttatggcccaactaacttaacaacctaacttcttgcagcgaccaactttaggatcgttacctaagcctataaataccaccaac

SEQ ID NO: 34184 - DNA, 944 bp, Cannabis sativa
tgtctttctagcttcttcttccacacaaagagaaaccttcaccaaaccatcttttgcacccaaacaaaatcacctttgctctcaaattcggcacatccaccaccaaatgcattcctcttaatccattacgcgaattctctatcgaccataaagatggaggtcatttttacaaatgaagctcacatggttggtaaagatggaggtgatccagattttgatggttggtaaaaatggagctcaccgtaatttagattgccactaaatatggaggtcgttggattttcattgccaaaaaatcgaggttgtcaaatttttttcacaatttggtcctaagaaatttggagaggatcagatcaaagaaggaaaagaaaaaacttataaaagagaatgaatttttagtttaaaagttttagtgtatatattttcacattaaaggctcatttttggtacatcgtattgtattgtattgtattgtattgtattggattatattgtattagtatctgtattatttaatacaatactatgtttggtattgacttatattgaaaggatgtgtgaagttataatatatttttagtaaactggaccccaacatcgactccgggtcgggtttgggtccgagtcaggtctagatttggggtctaggtccggtctagggtttggggttaagggtccagttcggctgggtcctaggtcccaggtttgagtttgggtcccaggtcccaggtctgagttagggtctgggtccgagtctatcttgggtttgggtctcgggtctaggtccctagttcgggtccaagtctaggtccgagtccgggtccaagtccaggttcgagtccgggtccaagtccggcgtgttagtttttatagtccatattagagttagaaaagtagaagtagttttgattaaaaataatttaatttaatatgaaccataagct

SEQ ID NO: 34185 - DNA, 5180 bp, Cannabis sativa
  modified_base (66)..(71): a, c, t, g, unknown or other
  modified_base (5030)..(5035): a, c, t, g, unknown or other
ttgagttaatacaaataacgaggattaggctattatcgaactgctcagggctgaacctctataaannnnnngtgtcttattattgctttattatacatatatttttatgacatattgtttatcgcttataaaatagactcattgtcgtttgctaaaagcgaagtcaacaggaatcttagggcatagtgaaacttaatgttttttgacgagatctgtatcacccctgcacccaagccattttcattagatgctccatccacgtacatcttcaaattgtctatgtctcgttggataagtggactttcatctggaattatcccttctatcgagaaatttaccaaagcttggcccttgattgatgttcttgggtaataagttatgtcgaacatccctacttcaatagaccattttatcaatcttgcataagcgtctagttttgacaaaacttgtctcaggggttgatcagttaacacctttatcagatgtgcctggaagtaaggccttaattttcaagatgaggaattaggcatatggaaagtttttcaagaggggaatatctcgatttttgcgccagtaaccttttactaacatagtaaactaattgttgttgctttcactcttctcgcactaatgctgcactaatcgcattctctgagatagccaagtataggagtaaagtctctccagttatttgttttgccaatactagatgtgttgatagatgtttctttatgtttgtgaaggcttcctcgcactcgtctgtccatttgaattttttgttgcctcgcaacacattgaagaatggtaggcacttgttagttgatttcaatatgaatctgtttagagcttccattcttccaattaaggcttggacttccttcggttttgttggtgatggaattcctaccacagccctaattttctctagatttgcctcaatgcccttcgcatccactacaactccctaaactttccttagaagactccaaaggaacacttcttggggttaagtttcatattgtacatcttcagtatctcaaagcactccgcaaggtcttttgtatgatcttcactttttaccgactttaccaaaatatcatcgatgtagacctccatgttccttcctatttgcctttcaaacatttcatttactagtcactgatatgttgccctagcattcttcaagccaaaaggcatgactttataataataaaggcccatgttggttacaaaacttgtctgctcgatcagggacatgcatcttgatcttgttatatctagaatattcgtccatgaatgtcattagctcgtgtccagcagttgcatccactaactggtcgatccttggtagtggaaagcaatcctttggacatgccttgtttaaatctaaaaagtcgatataagttctccaagttccatttggtttcgggacaaggataggatgagatatccatgaagggtagaatgcctcgtgtataaagtcattattcagtaacttgtccacctcttctttgagtaccccttgtctctcgaaatcaaagggtcacctttttagtctcttagcctgataatttgggtcaatattcaagtgatggcaaatagctttaaggtcaatcccgatcatatctgaatacttaccttgtgggattttctggatctaaaattatttcatccaatttctcgattggttttaacacgttcttttcatcttaaactcgaggatttagatccgcatcctatttctcgctttcctttgttacgactgtcattagctgatggccagcctttttattttgtagctctatgcgatagcattcacgagccagtaactggccacctcacactacacctacacctacagctattggtgtttgaaacttcaaagatagattcttaattgaactaactgctcctagtccaaatactgcttgatgacccaacagtattatataggccgatggtaagtcaataactagaaaatcttgcattacagtcgtggataaaggtgactcgcctacagttaatgggagttcaattattccttgactggcgacactatccccagtgaatctggacaaattcaccgtgaaaggttttaacttcgcatttttcaatcccattttgttcaatgtatccttgtaaaggatactcactgaacttccataatccaccaacaccctttttattctcttattgacaagctggattgtaatcacgagtgggtcgatgtgtgggaagctcacgtgctttgtgtcttcctctagaaacaaaatttgaggttcttcaatcttagctttctttgatgatttaggagcgaaagctgaccggtcgttcttgatttgcttgacatatctctcttgggcattaatactttctccagtgagatgtcgccctcctcagataaccaaaatgtcctctccttcaactaggggaggttgtaatcttttgttgccccgcttatttggctgatcaactgattttgtccattgccttgtcgctttacatactgttgaaagtaaccacgcgagataaggctctctatctcatctttcaactgacgacattcatccattgtatgccctgtgtccttgtgaaatctacagaatctcgttgcatcccgtctatgcctcgcatgtctcatgggtttaggcatgaaaaatgcaaccctgtgctcatgtggaagaaaactattttcccgagtttcattgagcatagtataaatggtgtaaatttccacgtacttatcgtgcttcttttgtattttcttatctttggctgattccttatagtcatcttttctctttatgctagaggccccaggattgtcagccttcaacgagacggtgcttgttgcaacagtgttgggtttatttctcgaaccactatttatgaatttcatcttgttccttgcttcctctttccgtgcaaacacatgagctctttcattgaactaactgatgttttttacagggcgaccctataagacatgccacagctcgcctctagctgttgagaggttagtcgtaatccctgcttgaagaggagtaagctgtatacatttctctcgttgccacgagggatttcctgttccctagtcttgggttgccttatgtcctcatttttacgacaagactcccgtaagtaattgttttcattcccctaggttgtgaatcctaaggctcttcagggcacttcttaacgaggtgcctgattatttgttgttcatctttaggaacatcgctaggttccctaggttcctcctcctgagtgttctgggggttttcttgagccgtatcctgcgtcctggttcttaaacctcacggtcttctcactccaggatcaggttggtttgtgtgttgtttttcttaagtctccttggctgcggctaccacagttggcgattttccaactcaaccaacggtacgtacctagtgggatcataagcaccctcgctcataggtacagaaccactagcattagtgttagtttcctcatccctagtttctgggttttgatcattatcattttggcttcttcttgaacatgttgatcgtgttgaacgtgtagttcttgaagtggattgcctccgtgagcccattggctcttttccaggacgacaattagtcttttcacgatgaatattgtcattttccccattatcaggcatggagaagaaattccctcttgggttaggagggattttctgagcttttatcacgtagactctcaatgaaagcaccaaactgttaacgcatatttttcgttaacgattttgagcctctttttgcaataaacttaacacaaaaattataagaaatttcagaaaactaatagaaacaaaaatgacaccaagattttatgtggttttgctattaactctgcatattccatgagtctatctcatttagatatttctgggtatagaattagggttctacaatcagtcaactacttttttgtttaagattttttctctcccttttttcagtaaaatctgttcctatttataggaatataggttggcagttatttatattttaatttgaatcgtataacagtattccccaaaattgtgggctttaaatacgctccatttaagtacctgtaaatatcatttaaaaacaacttagctgtgatttaaaccatctttaaggcagtcaacgcagacatagataggaactcccttttagaggtatctcgctggaagtatctcgccttgtacatagatgacttggtttattcatatacacaacaatgacatgagcaacagtgtactaagcaagcttaagaactgctctttgaccataaggccttgtagactggacaatcatatccttcaagttattacacttagttattattacgtatattatacgctaagtgttctaataaccaattcatcttgctaacaccgttttacctacagcaaggtagatgcctcactatgcattgtttatatctccctcagtattacgccttccaagacaaggtggtttctcatcaataaatgaattgatagtatacagtcaacaagttacgaatgtactatattaattctgcatttaatgagttattccatttagcatttaatgatattgttatccaaattttttcactctgacgtggaatcacatgatggtgacacgtggaatcaactctgagtatctgcctgcaagatatagtccgaacaggatacctcatatgcatgctcgaggcaacgtaatcaacaatccacacagagcgaccaacatttagcgaattcaactttcacatcgtgagtcatcaaagaaaaccctataacatagggattagattgtagagatatggcaagctatcgaaatcccatgataagtgtattctgtatttattatgcaatctttctactcatatccattgtaacgagaagggaaatacttcctctccaagctcatagccctatacatagtgatgtatgttcactgggcaaagggtcgaaagattttactggagagatattatctgagatttcatattcagagatattgttgtannnnnnataagaaaaggaacctttctcctacttcttgagttaatacaaataataaggattaggctattaccgaactgttcggggctgaacctctataaaattcttgtgtctttatattgctttattatctttcaatcgttataaactactt

SEQ ID NO: 34186 - DNA, 1309 bp, Cannabis sativa
aaaaatgtcagcaaaggggtaggctccctagagagtactggccctcaagatcgagtggatcgaaaaagcgtgtcagtgcatcaagaacctggggaaagaggcagaaagagtcgcaagcatccccctgccgacctaagacataagcttaatgataagcatggtgaccttaggaagcacttagagaaaaaaaaaagtaagcaataccggtgtcggagggtaccctaaaaaaagggatcctggctgaattggaactcctctaaaaagacattggtagggtcttacgaaggcaaaaaagagatgactcggagtctaactgtgaggacagcgagccctacgccaggaacatcctagaggcaaaactccctaaacattttgaaatgcctgaaatggcaatatacacaggagatacgaaacccagtgaccctctgtcccaattcaatagagtaatgacagttatgagagtcagtaattacacgaagtccttatgttttccattaacatttggtggatccgctgaagaattgttcaagaagttagaaccaggatcgtggactgttggtacaagttgcaggtcagatttcgatggcagtttgtggtagcgagaaaaattaacttcgaagtaagtgccctgaccaacataagaccactaacaacggaaaccttgaagaacttcataaagaggttcaaaaaggaaggttcaaaaatcaaaaaagtcgatgatggacaacaactggcgctactccaagccaggattcggatcggaactcctgtttggaatgagctgcagtaggaaggagcagcaagcctccaagactttcaaaagagggtccaaaagtacattaacttcggagaggcacaaatagtggcttacgacagatattacccaactggagttttaggatacataacaggaacacaacttcctggagctaacctccccgtcatctcataaacaagcagaatacatttttttgccactctgggatatactcaaaatctcgcccttgctccagctcagtcacacttgggagtgccagcgaaaaatcccttggagatgaatgcgtagctcccagctcagtctgctccagcaacaagcatggcaacagtgccccaaagtacccagagtaagaggtcttccaatggaagtacacgacctgaggataagaggcaaaggagaggttatacaccccagtatacggagtacacagggcttacggacactcaagaacgagtatacttcgtgactcagcaaaatactcattactgaaaacctcttcctttgcatcgagacagttcttggagagatccc

SEQ ID NO: 34187 - DNA, 1857 bp, Cannabis sativa
ttaatttaagttgtttatataaatatatatatatatttatttttaaaaaacaattttacttagttattaaattttttttatacaaatagttagctataataaaattgattatttaagtattttcaccacgagacccagactcggatccggacatggacccagacccaagacaccaacatgagacccggatccaaacacgaacccggaacccggaccgaaacccgaacccaaattcggacggggaccctggacctagaccccgaactcggacccgaacccaaaactcgggacttggacccggacccgacctgtagttagtgttgcggtcgagtgtattcaaatatattataactttacataatctattaatacaagttaataccgaacatagtattgtattaaataatactaatacaatgcaatacaatataatacggtgtaccaaacgagctcttaatgctctatttaatgtaagtatctatacaacttgaattcatatatattttttaattatataaaaaatttagtttagctaaacgctataaattatacttgctaacacattcttatgaatataatataatttttatgatacattctaatatttatatataaatatatattcattttaaaattatatatgtgtttttttaaaaatatatttatttatttattttaataacaaaaaaaaaataaaaataaaacaacaatggccattttttcttttaaccacaaaaaataattttatgtgtacgtacacattaccatgccatgtaacttctatttgacttaattttattggtcaaaaaaactacccatactatgagtataaattaagggtcctatagtagaattaccctatatatatttagataaagaatttataaatataagatacttctacaatgcacctctaaaagaggtctactgatgcaccccctattttttcaggatctgcgagaattttttagtctagttttttttatagtcgtctatattttagttatttaagacatcctgtaaaaatttgagagatttgaaaaaatttaacaggccaaaaatagtattcaaacaacctgttgcatggtagactcttttattttatacacttgtaaaatatactgttatacctgaaattcagctaccatttcagtggaggacacttgtcaagtgaaggggaatatggatcgatgtgtgtaacgttaatcacatgtaatggaataactcattaaatgcggaagtagcagagtatacttgcaactcgctgactataaggtcttatgcgagataaagatatgcaaactgttgcctcgtgtattaacgagaaacaatattggatgcataaagcgagacatcaactttgttacacctgggaagccaaatgcgatgcatattgactgtgaaaacacttagcgtataatatctaaactaagtataacagttgggtggactccagacctaataagcgaggtgcctatctggctataggaaggcacactcttgctactttcaccaatcaatttcatacatctttcagcgagacttatagtcttgacgagtcagaagctgacatccaaattatgatgactgctgatgttctctctgttaataagaacgacgactgtcaaaatgaagcgttaagccttcaaacaaagaatcaacgaggcgtacatcgtcaatctcggaaagataggggaaaaagctccaactcgctatcaaggtcattggtactgagtgttgggattttattccctaaataaaatatgcaatctgattatgccttgagcgcataatccttaaatctcattacatttaacatggcatgacatttacacacatatatcacttgggtaataa

SEQ ID NO: 34188 - DNA, 2606 bp, Cannabis sativa
ccaaacacttaattattcaaggttataattgtaatttcatcatcaaatttttaactgaatggacattttgttaatttttttataaaaaaggacattattaatttaattgttagatttagggtcatttgcatcttggccctaaaatttaatataattttaaatttacaattttatcatatttaaattttaatttagttatatttttaaaattttaaattaaaattctatcaaaattttaaaagaattaaatttaaaatatatcaaaaattcaaaatttaatatttttttacaatattaattttaacaattaactctaacaaaataataataaaaaaaaaaacttgttaaactaacaattttgattagatagtcataattagagataagagataaaaataaaaataaagggtttgataaagatatttacattcatattttggagaattacttcatataatattttttatttttttttaaaaaaaaaaaattaaagtttgagttgcattggtggtttcttcgtggtttttgcgtgagttgttatatagattttagttacaatttaggttgccttcgttagttgttatagaaatttttgcgtgtaattgtataaaaatataaaaaaattattttaaaatttaaaaacaaaaaaacttcttatatttttcccacagataagaatatcactacaagaattgtcacttttactatcacagttcgctactgtgttaacttttaccagcacattttcgcaaactgcattggcaaagaggtcaaagttttactattgtacatttgcagtggctaaaatctaacttttactagcacatttacgcgctgggaaaaatcatttttgccagcgcttttcattttatgttggcaaaagttctaataccaacattgatttgccaactcctttttgccaacacatcacaagtaaattctattttaccagcgcaatagcaacttttgccagcacaaaaatatactggtaaaagtgacatttcttgtaggaaatgatgcttattgaattggagttgttaattatgataatcatatcttgattcctaaacagtactactcaaattttcaacgtgttccgggcctcacggctgcatctcattgagactcaattgttgaattatttctttcttttttttttttctataataataatatcatcaataaaatgaggacttcattatgtgtatatatgcgtgattccaaaaagtagaggaaaagaaaagaaatgaaaagaataaacgttcaatatgtggttgatttttctttgattctctccccaaacctatacactgtataagttaactatatacaaattttccacttttatatttcttcgttcaactacaatctgacttgctactctttttatcattatataatatattgatatttttcccattaatgaacttccacttttcttgttaatatgcaattgtcgatataaattcatgtttgatgtcgtttaacatgattaaaaattattgactttggggcgtttaccatactccagtcgagtccacctgcacttttcaaatgttgaatagggtctttgtaaaattggtgtcgtttgaataagaacattgtcgttttttgctggatagattattgcagttgtaaagtttgatttctgtcgtttttaggagtacccaagtaaagttaactacgatattttgattaaaaaaaaaacaaaaaaaaaattagctacgatattattgactgcctagactaggacaagttagtccattcgattcttgaaaattcaaatgtttagtattaagattgggaaaatggcaagaagattaggcagggatattacgtatacttactctttttggtttgattttgtttaattttaacacttgtaaaaaatctggcatcactccatgatgatcacttagtagaaaaaaattgaaaaatggtagtttttcattgaccctggtatacatatacatttatttgataatgtggatacatatatataatatattctacaaaatcacttatagtggtggaacaagaaaatgaagctcatcaacaattagttataaaaataaagaaaaagaaaatgaagctcaagagaaagattgaaaatatgtacgaaaagggtggacttcggtcttctctacattaaactcttcgtacgttagcatgatgatattcttaaatcatcataaattgctaccaaaacattttttttttttttgggatgtgaatgaggtagatttagaatgtctctaatcatatctataaacatattttttaattacaatagggagaattttaaaaaaattagctccaaaaacaatgaataaataggaaggctctttaaatatggagagttttcaactattttgctaattttttttaatattattttaatcaatagcactattattttttttcattatgtcattaaattaagacatttttacatcaaaaattcaatttactcaatttattacaaaaaaatctctacaagcttacatcatcatttttacctttcctttttcttttattacaattataccacttacacatcaattccatccatgcagccacgtcattgattgatgacttatatcaat

SEQ ID NO: 34189 - DNA, 1484 bp, Cannabis sativa
tcggtggaaaatagcagtggaagtcgggaagctcagtttgactaatctaaacgtaattgtgaatgttgacgactttaaaagctaaaatggacttggagctcaacatgaaagttttagatctcattctcagcttttaggaacatcttgaattgctgctggagcagccagagtcgtaaatacattcgtatagtttgcacagaaattaatttttaagctaaatttgaataaacttttagggttatataaatatgacttttagagttcgcttgtagcactttttaactgcgttttttagagagaaactcatagaaagtggagaagagcgagattacatcatcaattatatatcattcaagttattttcttctctctaatctctttaatttttaattatgattatgcttatgaatatagttcttagttctgattatggagtagtttttagttaagagttattttaaaaccttaaaacataatttcttgataagtgataattaatgttatttgatttctctcatattattaaattgtttatattttttatttcaatgctatgaatattgtgaattcttcttatgtgtacaactaattaatgtttagcattgttctattatcaacttagaattagttttcacctaatagtttaggattctaagtagagtgataatttgcaattaatagtagtgtcaaatgtattattgattgtacatagaacataggttaaatgaaatatatgcttcattgatttgtaacctagattaataaatctcaatagaaattaatgattttcccaggttaaatagattgcatgattcgtggatctatttcttagtaaaaaaatttaatttacgagcctttcaccttaattaattgtaatagggagattgagaaaattgactacttccatattttttacggggtttttttttttttgaaaaaatcattcattcgataagcaaattagacctcacggtcgctacaaaagaggttcataagaatagacgaaatagctagtcgcccaaattgcttatgggcgaaagcccagttggccacattatgggccataaaattacatgttcttgtagtaatacagaataaacagccaacaaaggaataaataattgttttacaaaataaggaataattcttaatttctcatctaggatctatgcctttgaaagaattgatcactaccttagaatcacttttcaccaagataaactagtggcccttttccttagccctttcaagagctaaacaaacagcgacaacctcaccacaaagagcatctggaaagtccaattttttcttattgaccgaaacaacctcactcaggtaatctctagcaataactgcaatacacatgtgctcccctcctacttttacatcacaatttaacttgaggcagtcttgaggaggagggctccaaacagtagaagggattggggatggggagggaataagggaatctctgtaatcttcat

SEQ ID NO: 34190 - DNA, 1092 bp, Cannabis sativa
tgttatggagacaaagttgccagctggacgtggaacggacctcaaacacaagcttcgttttgatagtgttttagaggtgtcgaggcagggtcttgggggagggattttacttttttggaaagactgtactgatgttaatgtaatttcttactcccttaatcatgtggactgttataaataattttaatggcaaagatgacttttcttattatggttctccttatgtatcttaaatctgttacttggaccttactcaatcgtttatttgatactgcacctctcttgccgtggttagttatgggtgatttcaacgactatctctctttaaatgacaggaattcctctcttagccccccctctcatgttatgcattttttccatacttttcttgataaacataatcatgttcccattcctcaagttgggcctaaatttacttggaggcatggttcaatccttgagcgtctgtattggtgtacctctaattagctttggagaggcctctttcctcatgctactcttttccatctggggttttatggttctgatcatagagttttgaagatcatgcttcaagaccctaattttgcaactcaaagatctaatcgatttcattttgaaaatcattggctgaaagatccctccttttctaacctttttaattcttcctgggctaactctagggattctgcttcatctcctttgcagctctttcttgacaagcaatccaactgtattgctaaaattaggaattggagtaaatctcagcaccctattaagttccaaatatctcggacacaagctgaatgcttcccaccaaactcccaactctctctcccacattgcctccctccaatctagattggatggcctcctcctcaaggacgaaatctactggaaacagcgttcaagagttgattggttacgtgctggagacaaaaacacaaaatttttccaccaccgtgcctccactcgaaaaaagaacaatttcattcgcctcattacccttcctgatggatctatatctcatgatcacgccactataacttcccaatttcttaatttttttaattctctcttcacctctcaagg

SEQ ID NO: 34191 - DNA, 2814 bp, Cannabis sativa
gtgatgatgtggaaccgaaaattcggttacggtctggtcagtttgatggtcggtttcggtttttcgatttctatgaacacccctactttccagtaaacttctcgagatcatactttgcagtgcccatcttcttggttgttcattgaattcttgaacaagaaacaagacaattcacttcgaactacctcctccaatgctctgataccacttgttatgcaaagtctagcattgatctctctcaagcactcaagatcaattcacatggacataggtcgattggccattgaacaccaagttctacaacattaaaagaatcttgtattgtatattatgagtgtgtattgttacaattacaatgcagtagtaattaggcacttatatatatcctagaactagctaggagttagttaacataactaacttaccgaacaatacctaactataactgacacgtatacattagggaactaacaatattacaaagaataatcttgtcaaaaaccattatgaacaagatgtaaatgccataaatatattattgtggttgtggtcttttgatgattcctaggtctatttacaacaaagagttcttagaataattcaagtggattttggtctcagaatataaaactcataatctatacatttaacatacagtttggatccattgatagaaaataaatattaacaacttgtgaaagttacaccgtagtgttcaatgtattttgaaaattgaaattaaatttctatttggaatctaaaatttaaagtcaaagatataaatctatactaaatatttaatgagtaatttttctagcttggaccaccaataaagtactaattcaactttaagtttaagttacctttactaagcatatatataagtaagagatttttttaagattaaaaattaatatcattaagggatagaatatctgaaatatgatcatctgagctgcgccactcattttttttataaaaaaaaatagtgacatcataaagatgatttataaatctttttatccaatgatatatgttaagcaatttctaaaacaaaatacgagaggaaaatgtatttgtctgtttttttttttaatcttatcaatcgacccatactttgatattctatataggacatgaatgaaaagattaagtaattaaaaggaacatatataggctagcagaatatcttgtctttgtgcaaatcaaatgaagacaacaacctaattcaaaagccaaacttctaacaacaattttaactagttcttggaactgccaggcttctcatcctgccaagttgcttgccattgcttatcataaaatgtcgtttcttccagcagcttctttagtgtatcgatgtcctcgttcttgcgtattagaagtacaccggacactgctacgaacaacaaagttttgcaaaagaagtttcccatttgatcaaccaaacctactccagtcaagctatcaacaaaataagccatgaaaaacccaatcatggcagcgcggcctgcataaaacatgtaaacgacttatgattgattaatggaggctagcggaatgtgtttttgtgccaacaaaatgaagccgatattaacaaaccgtttagtaattcggcttcaggtaagtggtatctttttatccatgcccaccaaggaatgatggaggtgtcgaaaactactggattctcgttactggatgattcagggttgtcctcaagccattttctcctctttgcctctgaaaatagtcaatacttaatgtttctcattagcgttgaagtaattttggaattatcatgaagcatacaagttaaattatacataaatatatacaatcgaaatcaagttactttactaataagttacatgcatgatttatttacccaatgtacaaagaaaagattagatatatttacccccaacatatagaaaataacactaattcagaggtgtaaagtccatatcaaattatcagttttggataacaactagtcatatacaaaattgaataatgataacctgtatcaagccaaaataagtgaaaagaaacaaagaggattagaaaccatgtatctaataataagccattgagatactcctaagtattgtatctgatgacaatgttgaagaaaagttcattagccaaatctgttttgatatgctcaagtatgtagactgataagctccagtgcacagaaagagataagaaagatcagcatcaccattcgatttcttaacactcttgaagaagaccaagtgggatatgctgattttttaaccaaaacttgaaatatgagctaatgtgatcggaatcctaatctaatctcaaacttcataaaaatggttcgaaatttagaaaccctttatgctatgtatgctcaatatagagtagacaccttcattaaacaaaatatctcatgaggaaattgaacccagaacaagttttctattaattgaccaagtattacattatcaaaattgaactagaaggcagtggctaatgtggacagaactagtggaattgtaatagcagtgagtggtggtatggtgattaattttaagtgatgacagtaacaagtatggccacaaggatcctggtggtgctatagcataagattagtgttataacaagtagcaggagaggctaatttccaagaaataaatattacataaataaaagattgtttagaaactagtttaaattattatttagccaaaataaaaactaattaaagtttacatttttatctgatactaacaatcaatgtgtaatgctgcacaaccacatttctaaccatatcttcagacaaaagaa

SEQ ID NO: 34192 - DNA, 2714 bp, Cannabis sativa
  modified_base (2017)..(2018): a, c, t, g, unknown or other
ggctataaaattataactcattcaaaatactttcaaagtataacccaacccataataagcgggttaggttgggttgtaacccttttaaatctaaggtaaaatttgagacctagctaattcattattccatatcataatattaaaaaaataagttagatcaattttaagatatttacatgactagtacttaaccaccctaattagtaattattaggatcatccaaaataattattagttattacagccatccatgatcacaaatataaatctagacattaaaataaattaaaaaagttactttttgaatcttcaatagcaccaatagttgtcttgctcttctattttcctacttcctagaccttaagtttttttttttttttgcctgcaattcaaatttcaagaaacaaagttacataattattgttgaaaataaattaaaaaaaatcataataaactcaaacaacaatcaagcataattgcacatcttttattttttcctttgacaatttcatatgattttaaaaatataaatcaataacaatagcacaagaaaacacatacgacatgaacaatatcaataataaactcataaacaaatctgtaatcaaataaaaaaatctcaataaagtttctgatataaatctcaaaagtcccaaaataatacattcgtataaatatatgtatatatcaaagatcaatcaataaaaaaactcccaaactcataaacacatatgaaatcaatcaaatgaaaaaataccaataaagtttctattaatcataaccaaagcacaaaatgagaaaagtaaattagtcagcaagtctattacaattgtggcttaacaacagtaaccagaattcaacaatttccaatctttggttcagaaaaaagattacaaccaaattttttggataaaaatctacaacaaatagcatgtgcaatgagaacaagaattaaaaagtgtgcagcttgataagttcaaccaaaattggtttgattttcttaattacatgtcctagaaaactcaaaagtcaaaacaaacaacagatgtaaatagaaatttataaacatatttaccattgaataacaaaaaatgcaacaagggaactgatttaacctaagatattaacatatcaacattttaattcttaaacatgcgagacatcctagcttcctcttcgagtgagatgaacaaaaatgaattgatacgcagttgggtgcagcaatttgaccgcataaagcaaaattgcatgacatataaaccccaaagtcagcacagttttaacaaattagatgatagtcaagcaacaaactttaactatttattccatcaaaattcaatttttgcatacaaatacgataaaagagacaaaacatacacttatgatcttcattagacccttgaacaaacaactcaatttcataccctgaagcagcaaaacctaaaatttatattcgatgtaacctcctcaagtagagacaacttatatgagcagacagcagagatacaaatttatatccataaacccaaaaatgaaaccataaaacaaattcaaattttgtctttcttaaaaaaaataaaatacaacaacaatcgaatcacttcattagacgtaccgacaatgagttacatagataagacaaatgcatgagaaaaaattatcaaaacccattaacagatttgatccaagttcacaaaaaagcaaaaaaaaaacggaaagttctgatcatgggtcggcacgactcacccacgacactcgatactccagagccaagcgttatagataataaattagggtgttctaaagaggtgggtttaaggagatcagatcgaatcagatgagatgagatgagatgtctgggttacagggaaagagagtcagatagatagggagagggattgagaatcttgggggaattaatggtgaagaaggcgatggtgggaataaagaggagaaaacacttctattaatcataaccacagcaatacattcacacaaacacacacacacacacanntatatatatatatattaaagatcgtaggaaaaaaaaaaacagcaaaaaacttacaataataaactcataccacacaatcacatccgaaatcaaatgaaaaatacaataaatacatattccaaaaaaaatgaaagagaagagagatgagagactacctaagactgaggaatggtggaagcaggtggtggcggcgacttcgcctccggctggaattggaaggagtgcgaatggtggtggtggctccggctccggctgctgtgttggatcgatagagatggagctgagagagaggtttgctgcgtttagggttaataagacgaaaaggaaaatgaaatttatatcgttgaatcctttttattattattattattgaaaaaatagtaataataataaagaaaaggaatgggtcaaatgaataaaacaaaaataaaatattatttttttaattttcctattattattatttttatttttgtttgagaataaagattgttgttataaattaagatgataaatcatttacaacaataaaatttataggcagagtgttgagaatcatggagtttcatttcaaaatcaattggcaatgagtagcccatgttcttatatatatagttgaattctctaccatttattccatgtgggacaatgtccacaatattcttcctcaagatggtggctattttttttgctcac

SEQ ID NO: 34193 - DNA, 1795 bp, Cannabis sativa
tcttcatcaatctaaagattgtaaaaaaaattatcaaagtagatcaccaattaattaaaattgttgctttttttttcacaaataagcataacaataggaaaatagtaagcgaattattaaaaatcaagagaaaatctaactgtagttggttgaatagagaaatggatttgtggcatagatgtaggagattgtatcgaagtggaaaattcacataatgttaagttgggacaaactaaaaccctaatttttaatttttttttataaaggaggaagatgggtcaagtcacggtgttgtaaaataataattagatgtaatttttaaaattaattaagtattcaaaaaattattttagaaagggtggaagtctaaattttgtaaaaaataaaataaaattttactgtaaatattatagttaaatggtttaaatgttaaaaatattataatagggacttaaatataaaaataaaattattcataaaaattaatggctaaaaatggtcttattaaatatttaaattaaaattaattaatttatgaaaattgttaattatgattaatttaattttaaaaaaaattacctataacctgctattacaagtaaaaaaaaaatgtaattatcatgattacaaaaaaaaaaaaaaaatgtaacaattaagtaatcaccctatcacattatttattagattggggatatgatatatagtagcgaaactcgatatctaaataattttttttttttatgtataattttatgtaaaatatttgaagacaaaacttataaattttacaattcataccttgttttaaatagtgttattaagtttgaccaaaaataacaattgcaatgttatattgggtcaaaaataattttaatttaaatcattataaaaagtaattaaaatctattcaaaaatattaattaatgtataaaaatctaaaaaacaaataaaaaatataattctaatagtcaagaaattaaaactaatgtaataataattattaactatatatattaatatttaattttcttctacttgactattttttttttcttgattttaagattaaaaattgattttttttgtttaatttagatttttaataagcttttttcattaattgatatttatatacttaactcaattaaaattatttttgagttcttataatcctatcatgtattattttagttaataaacttgttgtgtttttttttttgtaatttttggaacaaagttgaacttcatttgtaaaaacaaacagtgaattaattattggtgggattattttacacgaagattaattatgcaacccatagtttttttttttttaataaaacttgtaaagtaccaaattaatgttataatacaatgtaaattgtattattttctatataataataaaaaggataatccccttgtgcaagtcttgtacttgagcgagactttttttttttttgaaaaattaatgcgtaaatatattaaaatatcaaataagttagatctcgcggtctttacaaattaagttacttagaatggaagatagatccaccatatatacgagtcacattacacttgaaagtctattttgctacattatgagctgcatagttacaacttctagaaataaactgtaggaaatttagtctttttccaatttttccctacaccaacaaataaataaccagttttaaacaaggtcaatttcaacctttaattgctatgacttttcaaagtcagaaagagtcaatacgacttcgttttggctttaaacaaaaccaacaagggattcgag

SEQ ID NO: 34194 - DNA, 1348 bp, Cannabis sativa
tcattaattagtcacccaaattttttatttttagtcaccatttagtcactgaaagtcggtggtaaaaaaatttaataactaaaatattttgtcacaaatagtgttattttttatgactaaaattcaatcacaaaatatattaaatttagtcacaataaatttgatatattaatcattgtacacttttaacaaccaaaaaactatgcttcactaactaaaatttagtcattggagtttacattcatttaaattataagcaaatatatttaaataatattaaaggtatttattcattacataaaattataatgtcaatcataaaaaattacaattacaatgtaattcttgcctatcttgaaaaatacaaaatctaaacaaaaaactacaaaagcaaactccatgaatcaaagctgtaaaccaaactacacaaaaataaagaacaaagaaaactagcaactaaaaaaaaagaatgagaagtccctaatttggctccaactcagaagttggaagcatacgctcctcaaactcttcgaagattatctaaaaggcatgaactcagctgtgcgatgctagtagagcttgaactgtcctttgggagccagattgaaagatgatctctaagcacaacaaccgtattatatctctattgtcaaagtcaatagctgaagttcgaaaaagatatatatctctgtcagtaaatgtctacaaagtataatgcctctcacttgtgctaagaaaatcaaacaatctataatatattataatatgcccaaaaaaaaatgaaacagaaatacaatatgccccaaaaaaatttcaagtttctgatataatcattaatgcactgacaataaaaaggttcaatgaagcaatactaccacaactcacctcgagggaaggtgttgaagaggccttccaccaagaacatatcatcattttcagttgtcactacacaaataaaaaaaagtaataattgtatcgctattaatcagcaaaatcaaaatatatctactaattctttccaaattcaaaattacgtctaagaacacgtgacaataaaataaagaaaaaataaatacttactgaatggggataacttgctcgagacaaaaggactatccaaaagacaaaatactagacaacaactggaacaaatataagaatcagcagcaaaacatagctgtcactacaatttatttatcgaaattccactcaacattgtcttgcaacagagaaggatccacaacagcaagaggaattgaacataaattacacaatatatatatatatgtatatatactataatatctcacctgaaagaaaaataatatgttgcctatctccttgagta

SEQ ID NO: 34195 - DNA, 1179 bp, Cannabis sativa
atgtagccaacatgatagattgctacactgtctttcttatcagtcttaatgtaaaattggacgagaacaagaaaatagtttacgatcccacctttgaactatacggctcccaagaagcacctttcagagaaatttcagagtacatggatctccaaaaagttattttttttagaaaaaccagactattctaccagaaatttggccaaaaatagaagttgatgccccatgaaaaatgtttccctcatattattgacgacacatagaaaatgctctagaaaaattctaaatttatgttaaaattcacaatcaagttcaagcccttaaagaaaagaagaaaaattcatcactgttcaaagaaacagacaatgtaagggtcctactccataaaataagcatttttgaggattcacaagatctatacatggactaaaaaatcaattagaatccctatctctttcaatacaatgaactagaatgggagttggtttattctgaatatgagtcatgtccaccagctggaagtgacgaagatgatgaacaatcaagttggcacccacttcaagagaactctaattatgactttgactacaatactgactacgagccaattataaactgctcataagtagtacaaagagatttcatatctcttacttttttaagatagcaataaatggaaaatttcttgatagtcatgatgtttgtaggaaattttcctaatcgtttgtttgtcggttcgtcattttctatgtttgtcagtttatcattttctatatttgtcattttgttggtttttttatttgttgtcattttgtcattttctatacttttatgtttctgggaaatttttaggaagtttcttattttgtatcctaccccatatagatgactatatatagagtcatcctttttattgtaaggggcatcaaaaagcattctactaaataaaatttctagtatttttctcttaaaatgttcttttttctttaagagatttttgaaatagtgatagtgtgcattataagtggtcatactgaaaatattacagttatgagttaagtatcactcaagtgtaagtttaagacacaactagtgtccaatatagcaaatagcaatgctctaatttattactatatctattgattattaattttcaataggaagtagttcaagaaagaa

SEQ ID NO: 34196 - DNA, 4593 bp, Cannabis sativa
  modified_base (1155)..(1166): a, c, t, g, unknown or other
atttcaatattatacttggaatggatttcttatccaagtactcagctagtatcgactgcaaacggacgatggtaattttccaacctgaggttgaggaaccgtttattttaatacgattcaatgatctcgaatcccagtgatttcagcattaatagctatagaatttttacgagacagatatctagggtttctggccatggtattggataccacaccgcctaaaacagtttggccagaagatatcaaggtggttctggaatttttggatgtttttcttgatgaacttctaggtttgccatcgcatagagaaatttattttctaattgatctagcatcagctgtagaaccgatttataaggccccttacagaatggctccaacagaacttaaacaattgaaaactcagctttaggggttacttgacctagggtttttgcggcctagtgtgtcaccctggggagctccaaggtcatttgtgaagaagaaagatggatctttgtgtatgtgcattaactactgagaattgaataaactgacagtcaagaacaagtatcatttacctaggatcgatgatcttttcgatcaacttcaggggaaaacggtctttaccgagattgatctccgataaagctatcatcagttgagaatctgagaggaggacattccaaagatggctttctgcactaggtatgggcattatgaatttctgataatgtcttttggactaattaatggtcccgcagtttttatggatctgatgaatagagtattcaagcatttccttgatatttctgttattgtatttatcgatgacatccttgtctactctcagttagaagacgagcatgagcaacatcttcggatggttctacaatagctttgagaacataagttgtatgccaaattcaagaagtccgagttttggctatctcaggtgtgttttcttggacacgttctcagtaaagatggaatcaaggtagatttggggaagattgaatctgttaggtcatcgcttatgcctcatgtcagttgaatgaatatgaacagcgatactcaactcatgatttagaacttgccacagtggtatttgccttgaggatttggcggcattatctctacgaagagaaatgtgaaatttatactgaccataagagnnnnnnnnnnnnctttactcagaaagatttgaatataagataaggcattggttagagttggctaaggattatgactatgtaatcctttacgatcctggaaaagccaaagtagtggttgatgccttgagcaggaagggtcccgggcaggtaactagtatgattaggatttcacgttagttagcagaagacaacgtcagatcaagcatcgagttaattgtaggcaaactttataacttgacgctgccatctgatctgtttgaatgaattaaagttgctcaggtaattgatccagaattaatgaagattagaaaagagtttttagcttgtcaagccaaagattttacaatgtgagatagtgggatacaggtgtttaagacaagggtttgtgttccaagtagtacggaatttagaaacaaaatcctcgaagaagctcataccattccatattcattgcatcctggcactaccaagatgtaccaagatcttaaaccctacttcgtgtggagtgggatgaagaagaatgtggtagaatttttatcccggtgtctaacttgtcaacaaatcaagggtcatcatcagagaccggcaggttcactgcagccattgacacttcatgaatggaagtgggaggatataaccatggactttgtagttggattacctaaaaccacgggattgcacgattcaatttgggttgtggtagatcgattcacgaagtctggacactttctactagtaaaaacaacctttatagtggatcaatatacataattgtacgtgaaagagatagtgagattacatggtgttccaaagttatatcggttagagatctaaagtttacttccatgttttggtagagtcttcaacagactatgcgtaccaaactaaaattcattattgctttccatcctcagactaatggacagtccgaaagaacaattcagatactagaagacatgttacgagcttgtgtgatggattttgagggctcttggagcaagtatctgccactgatagaattctcgtataataacaactaccagagtacaatagggatggctccctatgagttgttgtctggcagaaagtgtagatctcccattcattgggatgaaataggagaaaagaaatatctgggtccagaatcagtgcaacggactaatgaagctatagagaagattaaagctagaatgctcgcgtctcagagtaggcaaaagagttatacagatttgaaacgcaaaaatctagagtttcaggtaggagatcatgtgttcctacgggtgtctcaaatgaaggggatcaaacgtttagggaaaagagacaagttatgccctaggtttacaggaccatttgagattctcgagagggttagactagtggcatatcggctagctttgcctccaactctatatgcagttcacaatgtgttccatgtttccatgttacaaaagtacatttcacatcctactcatgtgctgagttatgagaatattgagctacaatcagacctataatacgaagaacaacaaattcagatcctagatagaaaagataaagttcttcggaataagaccatagctttggtcaaggtactctggagaaatagcaaggtcgacaacaaaatccatttaatggagggataattgtaaagaccgcttaactttaatttagaaatttgaagataaatagggtttaattatgaaactggcatataagttatgaattattattttacggagatttatttgaattcaaaaatccttttatatgccatatatgaaattttatatttttgcatgttttgtgcctggcaacattggaacgcagagtttggccattagaataaaattttagaattttttttagtatagcggggcaatatatttagccattggaaatttcgggaatagtcgagactttagaattgaccaaattacacattgatggtttagtgacttttagttagtgtggggggcaaaatggtctttttgccctaaaagttcggttctctttttgtgagttttaattaactcatttaatttgattttcatttattccttaagctagtaaaaccattttaattacccttttattcaaaaaattcaaaaattacatataaactctttttccctccgaaactctctctctctttctcgagctccctagaaccacctagggtttgagaatttttcagcacaactcagggatttctagcaattttctagtgtatccaactcaaggtaagtttctagcatctctctatttagttttcgaaggctttaagttaagaattacgcacaaaattgagtattagggttttgtagttgttgttggtgtttgttgttgttttttgaagttaaattatggtgtaatatgttgatttaaaggggatttaggggctgttgtggtgtttgagcaagctttgagtttaagaactcaagctttgctctttaatggtagattttgatttgagcatgttaggttgttttgtggcttgaaatatgtttttcggggtatattaagtaggtctggaaggtttggaaacgaattgggctaggttttgaattttttagggttacctggtgtaaatcggttaaccggttttacaggtcctataaaatcggttaaccggatcaccagctgggttcctaaatttttcgtgctgtcgatttgtgttagttttagagctttggttggttgattcccttattattagggtatttccatgttagcttttgatagggaaagtgatttagcgtgtcactcacccgtgttacgaataatgtgatttaggggcctgtaattcgttgaggaactgttccactaaggttggccaacacatctgaattcataaatgaggtagaattgaggtaagattagtataatgatatgcatatatgtttacatgtttagtatacatgttatttatgactattagagtacatcgatagcagtatcaatatacataaaattatactggatactgatagatgtatgattggctcaaatactaatccatgttatcatatcagtatggctagagtatgactagcatattgagtataggctgatattatggtcgatagtattatcgtatgaactatctagactcagcaacgtgtgggacacgagtatagggatatggttgggtgcgtgggcgcctgattataatccgagttattgctatgatattttttatgcttttcttacatagtctattgactcataatttctatttctatgtgtaggtaagggcaaggctaaggctaagcactcgtgagtacgagcagatggagattgtacatattggggcaaataggcctggagcgtacggtctttgggacatcagggcatatattgaaaagtcgctatgcgataaacttttgtaatattgatagtgaaagctttgtaaatgttttgcaaaatcgaagccggttta

SEQ ID NO: 34197 - DNA, 1460 bp, Cannabis sativa
cttgcctttaatcgatgatcacgacttaccttatatcaaattgacttagtttgattgaccacttaagaaaacgtctagatgtatcaggcttggccaatacttgtcgaagaaaataattagttaatacctcaatcatgtgggcttgaaaataaggtcacagcttttgaaaagctacagctaaggaaaatgcaagtcgttccatcagtggatagcgtgattctacatccagtaagcacttgcgtagtagacagggtgttatttaccttggtctacgcaaatgagcaccgagctaatcgcataatcaaacattgcgaggtagattggaaatacttttctaggaaacagatttgagagtattgggagttgccccaggtgcatttttagagcttgaaaagcctctttgcatttgtcaattcattgagattttttattgccttttagaatctaaaagaattctttacacttgtcaaaggaacatgaaacaaaatggtataaggcagcaacattaccagtgagactctgcacttctttaggcttagtaggagatcagatctctactaaggctttggtcttttcggggttggcttcaattcctcactgattcaccataaagccaagaaattttcctaatcctacactaaagatgcactttagcggattgagtcgcatcttgtattaacacagtttttgaacatcgagtttagatgggagacatgatcggtcgcatgttgagattttacgagcatatcgtcaacatatacttccatcattttttctagcagatctgcaaaaatcatattaactaatctttggtatgttgcacatgcatgtataagcctaaatggcattactttataacaataaaaacatcggtctgtactaaaggaggtgtgcttctggttgggctcgtacattgggatttgattgtatcccaagtacgcgtctataaagttgaggagctcatgacttgcggttgcatcgacaagttggtcaatgttaggtaaatagaagttttcttttcgacaagttttatttaaatctgtaaaattgatgcaaatgcatcatgagccatttggtgttggaactaagacgggatcggctaaccagtttaaataaaacaactccttaatgaagtcgcatgcaagtagtcgatctacttcctcttttagcgcttggtatctcgtggggtccattttgtggcacttttgtcatactcctcgcacaactggatctatgttcaagcgatgacacatcacctcaggtggaattctaaccatgtgtaaatgttaccgtgcaaagacatctagattttgtttgagaaaggtcaccagcctttctcactgctacaaatttaatttagaactaattttcaaaacttttgaatcatcaaggggatcgattggtacctctactgtctcttcagcagcttgtgcgtgttggaagttattttaccaggatct

SEQ ID NO: 34198 - DNA, 2184 bp, Cannabis sativa
gatccctattggccggaggcactgacttggccttgttgtccgtgagctgtattgccacatggtgctaattttgtcaatgtaagcaatgccacgtcaggtgggcaaaaatctggataacatttgccccaattccctatgcagacatttgtacaattagggacttaccagttagattggtgcggttggaactgatgtagcctttgctaaattaaagttgctgcatttttagccttttgaaatgatttgccttaactgtctgatctcatttgctgtagcaaactgtctactttatttgtctctttgttgtgtatgtaaagtaagtgaagaaggggtcccatatgtactatataagttcttttgggggcaaacccttttcactttttactttcacttctctcacttaatatttgaagaagctcctcattctctttagagggctagacccacaaagcatcaatctctcagaattttcgtgttgtttcgatgatccaagctttccaccttcttcctcaacaatttctcgaagtgggtaagctttccattcctgctatttcacttgatttggttaattttgccacgaatgcatgaacatcgttcttccctttgaatatcttttgattcctacattagattgttgtccttttgatattttgatccgcatgatagccttaggatacgtaatttatgatttctagatgaaaaagatctgaatctgaccttcattgtgattcttggctctttgagtcacaaagaacatgtttgagttcttgaaaaacacatgctcagatccgtacaatccctggctggcaaaggaggtcttgttccaaacctggccagccaaggatagctattagggggcctggctggccaagggggtataccccataggttggctggcctatgcttggaaattggattcctggccggccaaggccaaggctctaagcgggcagccaaatttttaccctttcttgacctcagctagggtctcgtgacgaccttagaggcatatacaactgtagtcttatacgtggttgcccttgggaactctatataagactccgtaatgagtccattatagtcaattgtataacttaagatttactatatgtctaagtaagtgtacttaagacggtacttggtcgataattgaccttgtactttgtgatttacctagaaggtacccttgggtaccgttgactagaatgtgtttgtagctttgttaggttgctcacccccccttatctcttctatgcacgtggttctgagtgtcggataggggaggtgacagctgtgtaggtcccttggttatcttgtgatcatagaaaaaacaaaacagacttgtcgtagagtgcctcaatgtgacccccatgtagccagggtggctacaaggggtcaagtcaggattgtagaggaagctactcaacctcatgttaatgctaatccaaaggttgactaggtagaggtgcctgacgtcaaccaaggggctgagagccctgatactgagtctgatcttgagaaggccgcactagtcaggagaaagagatacaagacttgtattgtcctctccaactgccctttgagtcattacgatgccaatggtaatctgttgaacaagcttggtgagccttcagtgttaggccttgatcatgtcttaaatcaatcttttgagcctgagattctgaatgcgagatcacagggagccaactgggtctctcccgcttctaccctctctgttgatgcctttagcaagatacttgctagtggtttagtgaggggtgtccattgcaagatacctcttagagatcaaagggcgcactagcttcccctaggttggttagcttagtcagagcgtcttgttgaataggggtagtattgccgctccatccttattttagagacattgctgcctactttggaatgtgcccaactcagatcagctcgaaaagtatcaagtacctttcgacgatgtttgtcttgtatacggagctaggctggcctcagcgcaatccttatgagattgggtactattttgatctaaagtctactccgaagcagaataggactgggtacttcttcttcagccaggttggccaccagtggttgggtgacatcaacagcacaaacatgtcaaaagttggtgggtacgccaagaagtactttatgttgggaatattttaccag

SEQ ID NO: 34199 - DNA, 1481 bp, Cannabis sativa
  modified_base (360)..(360): a, c, t, g, unknown or other
  modified_base (528)..(532): a, c, t, g, unknown or other
acatctaatgcttcacttttgttatgaagaaagtagatatacatgtagcgtgagcaatcatctatgaatgagatgaagtatttctgactatgtgagttcatttctagactacatatatcagtatgtatgatttctaatatttcagaactcctatggacaccagttttgacagatttggagatttgctttcctttagtgaaatccacacaagtatcaaagtcagtaaaatcaaaggtattgagtaccccatctttaattctatcaatggagatatgtcctaatctccggtgccataatgtacaagaattctctttcataacaaatctattagtgccagtgtaaagaccgcttagctttaanttagaaattagcagataattaggatttaattatggaaattatttattaattttgaattattaatttatgatgatttatttgaattcagaatacatttaatatgtcatatatagaaatttcataaatttgcatattttgtgtccgacaacattggaacgcggtgtttgnnnnntagaatcacatcctagtatttttagtataacgggacaataaaattagacattaaaaatgtcgggaatagtcaggattttagaatttcccaaaatacccctaagttccttttatgccattttagtgggggaaaggcaaaatggtcatttttttccataagctttttgtcctttagtggactatggagaacttaatatgctgaaggttaatatgttattaattcataaaaccttttattcatttgatattttataaaaaagatagaaattaagaaaagaactcgctctctctctctctccaaagctctctctctttctcgaagcactctagaaccagcaagtattggggtttttctagtttcaactcagatttctagcaagatcctagcatttcaattcaaggtataaacccctcaagcttttccttcttgttttcttaagtttttagataggttttatgcatgtttttgagaattggctgctgttgttgctactggtgtttagttttggtttcaaagatttatttatgttagattatgttgatttaagcttgaattggtggttgttaggagatttaaccaagttttgagttttagaactcaaacttagagctttaatggtgtttttcaattatgagcttggatagttgttttgttgcttgtaaatggtttattgggggtataatatgcaagtctggaaggtttgatttggtttggaatcgatttggttgagctttgaatttgtttggtttttctggggaaaactggctaaccggttttacaggtgcctgtaaaaccaagtaactgatttttgcagcagggttccccaaaaaattcagctagtcaattcatcctagtttcaggtttctggttggttgattccttgctagtttattgccatattaagttgcagtagataggtttttgatttaaaacctaagtcccggttgtg

SEQ ID NO: 34200 - DNA, 1385 bp, Cannabis sativa
aaccttgatatttttgcaactagaattcacaatgtccatttgtctttgtccctgatgaaaaaatcaaactcataagaataatcagatatattttaccaagccaatgaactagtagaatgaggtcataccagtgacgtaggaaaaatatttactcagtcaccaaggtctaaccaccccgatatgtacaatcttcatctgctcgtactcactgctactcagtcttagctttacccttacctatacatgtaaacaataactatgagtcgacagactcagtaagaaaaatataatataacataatcttaaatcggattataactaggtgcccatacacccaatcataacactgtcttgcgtcccacgagtactgagtctagaacatttgtatgacagtactattgaccataatatcagcctatactcagtactctaattgtaccaatgtgatagcgtcaataagtacttaagccaaacatacaatcatcagtatctaatataactctatgtatattgataccgctatttcaatatgttatctagctaacattcctaaacatgcacgctaaacatgtaatctcatatgcatatcattatactaatcttacctcaatcccaaattttagtgtgccggtcaacctgagtggaactgctgctcgacggtttataagcccctaaatataatatttacaaaactgataaatcatacgctaaatcactttctggggacttaaaatcaaaactaaaggtttccttatcgatggatagcatggcaataccctaagtattgctaaaatatgaaaaaccttggttccaaaacttctagaactagtaaattgaattctcaaaatggaaaaccaattattagggttctacatggggaaacgattaaccagttatacagagctaacacaaaccagctaactggttccctacaggaaaccctaaacatcccactaataactcaattttaccccaaattgtttccaactctctagaccacctaattaggtcacaaagagcattatttaatgaacaaatgcagatatagtctcctaaaatcgaatccaccatggaagagcaaagtttgagctctaaagctcaaactttttctaaactcaacaacaaacaacaattcaagcctaatccaagtcaaataactccaaaccaacatcagaaatcactctctaacataaactcgaaagctaacagctgaattctcaaaacagccaacaaacctaactttaaactttagaaaaacaaggagaagagagtgtgtgagcttaccttggattgattcttgtagttcttgctaaaacaccaagaaattgataaagaaaaccctagtttctactggttccaagagaggtcgagagagagagagagag

SEQ ID NO: 34201 - DNA, 1234 bp, Cannabis sativa
  modified_base (811)..(817): a, c, t, g, unknown or other
ttaagtcatcttcctaaacaaagaatgtaagggggtcgataaactcgagaaagaccgtcttcatttagcttagagaagaccgtctacacatagcttggagaaagactggctacacatagctcacggaagaccgtctacatgtagaaggtctcgacctctgtatagacctcattctccacagcagaggatcccatatcctgcagccgagacctcattcccagcctcaggaaatttctcgataccagagagaggttggcacaaaggtctccttgtgcaggcttgggtctggggatggttggattctttactaaaatccgaaaccacggcacctttcctcctggatttatcgtcagcattaagaggacctcaaagatttcctgcaaaatctatgtccatccctgtggagatagaaataaaagattaatggagcaacaaaaaataataatatgtatgatccagttcaaaccaccattcacaaggcataatacttaccctcaagaatcacttgtgaggatcgcccataaacaatctacggggttcccttgttttggattgattggaagctccttagccttggaatccttcatttccaattccaattgagggttgaagtccttgggaacgtatacaaaagaaaagtggttggtgcattctggtgttatgagtttggaggggtaaatttctgaactcagatgggacatgttagcaagagaatgacaatccaatctaaagatggattttaccaaaaaaccagaagtgtgtggaataaggcaagcttaagccactattttatacacaaagtccagtgacnnnnnnnccaaaggttgggaaatctaacagttgggagtggggtggaagaagagaagacggttcataatgaccctcgaaaccgtacaactgccagaatcaaaggacgcattttgccaaaagggattatgacgaaaatgccctctgcaattattaaaaagcactttttactaaaaaaaagaactttttaaggggcaattgttatactcgaaatttggctaccatctaattggaggacaagtgtcaagataaagggaatatggatcgatgaaatcacttttaatggaataactcattaattgcataagtagcagagcatactggtaacgcgttgactataaggtcttatgcaaggaaaagatatgcaaactgttgtttggtatattaacgagaaaccatatgtcattgaatgcataaagcgaggcat

SEQ ID NO: 34202 - DNA, 1675 bp, Cannabis sativa
taatgagaagttagtccatagcctaaaaatggatttcacaaatggccttctactccacacatacatattcttcagttcaatttcgttgaattgcttgcatcagaaaataatccatttaatactccattaggatctgggactgctatattctgataacaaatttcgttagtgtccactttttcttctgttttaccattagtttttggaacatctttccattttttgtcagctcctcataggtttcttccgccgtaatggtacagtcacaaagtagaatgattctatcaacctgtggaagaaaatgtagctggttttcccttgtaattcttgcttgatacacttgttaaaaacctggagaggaaagtgacttgcataagtagaaatactaattctacacatacattttacttacaaaaaattaccatattacttaggctgattactatagtgtttgaatatcagtataaatatgactgaaatagtaacaatgattaacttattagctgaataagtgagtacacggctctagctattaaaattctttgcttttgtccaccgctaatatttactcctcgttcacctatctctgttagatcgcatccctgatattaacaacaaaacaagtattttaagttaactattagaacattccatgttaataagagcaataatcccttatgtcaaattttgtaagatacactcaactggaagtgtatagtagagtcattatagattttagttttatgtattatgcttattacttgctgttcatctctttagaggccttagcatcagaaagggaatttgttatcatgcacaatgattttgcaaacaagttcttcagtctcaacctagtcttataatatcgtataaactcaacaatacccttgagttttacagctacactgtgagtggtatctactctgttttggaaggaaagtaaagctatgtgtaaacctttcgtaacacacttcatttggcagatatcaaatttgctcgggagagaaactgctttatttggtacactctctggacacatatttgatgtgagtaaatgaatataaatagatttcacatatttgataagaggttgaattgagattagtcatatatatgtcaagtaaggtaatgaaataggacactatagtcccatgcttatgtgagttcaaagcactacaagaataggcacacataattttgtacttatcacaaatgtatataaaatatgtgtctgtacacaaggtgtggtatttttttgtctttattttggtatctcgtcagaaaaaaaaaaagcaatggaccaaaattatttgacattgaaacaacaatttgaaatgcattggtttgagtactttttactagcttcatactttccatttttacatcttaagtaaaatgagcagagttgcagtcatggaaagcctccaaggttacaccgtacttttccttgtctggttagtctctaccatgcttgttcgagccatgttgacaacaagtcagaccatggttcgacttccaccgagtccatttgcttttcttgtcattggacaccttcacctacttggcccaatacaacaccaatatttccaaaaaatctcaaacacatattgacccttgatttaactctctcttggctctattccctccgtcatggtttcctcccctgaattagcca

SEQ ID NO: 34203 - DNA, 3586 bp, Cannabis sativa
tcaatagttcgaggggaatttttaacggcaaaaaaagttcagcgggcacgatttagtacatgtcaaaatccaaggggaaaaattactaattagccttcagtttatcatacgtattcaaaaaacttcaaacctattttcgacactgtaaattattcgaaattttttaaaaatttatagagattgtgttgtaactataacgaatactgaaaaatttaaaaaaaaatttcaacatgtgtttttaagtatggagattgactaaaaattgtaataagaagttaaaaagtaacactgttctaattttcaaagtaaaaaaaagtgagtttacttttaccaatgagggatgggaggggatagatttttttgaggatcaattatatgggtttgtgttatattattgggataattttaaaaaacacaaaaataacaaaaaagatacaaaaatacagtcagttcggaattttaatatttttacgattttttaaattttatttacacaaaatatagtcttttggtatattttccgttgtactctagttattttgttattgattttttttatttatttctatattatttttttatgttgttttgttattgttttgatattgtttcttgtatttttatagaatactgtaaaaatatataaaaaaaattgaacgtaaaaatcttacaaaaattagtgttttatgtaattattcttatattatttatttgttaagtaatatactatatagattaaatataaaatgtaacaaaacaattaagtataaatatttgtaatataagaggtgaagttaattacattttgtgttgggcttcgttcttccactttatcgggctgctacctcaccttgactctcacattagtatccataaggcctcatactaatggagtagtatccatccttatatacccatgttatttttcatttctagccaatgtgggactttgtttgataccccaacaatccttccctcaaactaaggaccacatacttgtggcctcccctctaacgaaaccaccttatgtcagcgttatcaccaacgaaactcgtcgcccgaccatcacctttgttaagaagactttcgacacaggtcctaacaccgatctccatcttgtaccgtcgtaatcatcaataggacacgccacatgactacctcaatatcaggtagactttcgatacaagacaccatatagatcttcaatcgcgaggtcatcacattgagggcttctcccacacatcgcaaacgcagcccactatcttagtgctcctaaaccttcctttggctctaataccacttgtttccttttttttttcttttaattggttcaaacaaaatgggccttaagcccttaaatggtccaagcccacaacaaaaggggcagacctaatattttgtaacctctatattcactaattaagtgtgtaaagagagattacatagcttaattatttaaaattaaaagttaaaataaaaatatatagttgttggggatttatttcttatcatttataatgtgtgtaagtgatataaaattaagtggaaatggtttgtaatgctttggagatgtatttacaaaaattgaaaattttggtaactagtaaataattactgttttttttttagctttattacttgaactttttttttacaatgaggatgcttcctaacaactcccataacttttaaatcactattttaatctcatttacacccaattaagatatagtaatagttagtcatgggatttagggtgttgaatttcaaagtgtgtgatcttaactactataaataaacatctaatgtgttcgtatgatgaaattttctattcacaagtacttgctaaaaaacacaatgctttataaaataattgagatatttttaccatatactaactttcctctaaaatttatatttatactttgataagataatttttatatttatactttctttacctatttatttatttattgataatcggaaataaagatttgaacttgagacatcctcttgtgtatttattaatgcttctataaattttttttttctttcttatttctttttgtattttttttattaactatttttttttactgactttttttttctctttcttgttttttttttatgtaaatttggctgatccttttttttcctttctcctccctctctaatattattttttttccaactctctctctctcaaatttttttttactttttcatttatacttttattatatatataaactataaaaatatatataataagtgtacatctttatatctttttttttttctaatactttttcattctctcacaaaattttattttattatatatatttttttaaaaaaaaataaaaacacttattatattttttttttctctttttttacattttttttttactattcacactcaaactattttatactatttttctttgttcacattttataaaaagaaaatcttaattaatttcttttaacttttactaacatatgattcttttactttcacacttttttcccatatttttttaacacactttctctatcttagaaaaaaaattaagagcactcttcctatatctttctctcttttacatgattaattaaagtaatatttttttttagatgttttgtagtttattcagaattgatttgtaatgactgcttagatcttgattgagagtgatggtatttacccttcgaacttgctttcttaagtgatctttctctttccaaatacacttcttctatcttatattctttctccaactgtaattcgaaatctttcgacttaagtgcggcaagaacatcttctaatgtaattacgtctttgccatacttgatggctgccttgatttcttgatatgtgattggaagtgatctcaaaagaatgatggcctaacttttgtcatgcatcaaccttgtgatttatattagccaaacctacaataatctcattaaatcaatcaatactttcatctaaagaaagggaaggaatcattctaaaatcgtataacctttctagcaaattaatcttgctatcaattgatggctttaagtacaattcttctaatttatcccaaactcctttcagcatcttctctgcaattagttttcttcgaacactgtttgatagatacatgatgatcgtgtagtatgtcatctcctccatttctatttttcagcatcttctctgcaattagttttcttcgaacactgtttgatagatacatgatgatcgtgtagtatgccatctcctccatttctatttttcctctagtttcttttctaccaacaacttttcatctctaagaaccttagaaactttctggtgcacaaggatccctctcagaccttctctccatagaacaaagtcccaagtttcatcaaatttctctacttcgaatctcaccattgatgacattcaaagtttcttcaagattacagtggaaagaatcttaattctgcatttttaatcgattaccaagctctgatttgtgggaaaattacgactaaatgtgcagaatcaaaataactaaactttaaactaggggtgttcattgga

SEQ ID NO: 34204 - DNA, 4097 bp, Cannabis sativa
ttcaatgttagaaatgagaaatataaagttgtgaatttgacttctctaacttcatagatcttagttattgtgaaaaactagatagatagccgaaacagaagcaaaacaggataagcagaacccagcgcaccaggccattttgtcaacctgggcaatgggtactcttttctaagctcacgggatgtcgttttgacacttccaaggttcttgaacttaaggatgaggtaacttatcccatttttgaccaatcctgattcaatggtcgaatcaaatttggcatttgagtgattaaaaccagtgcaccacgttgattgtcaacctgggtgctgggccctgtctctaagagctcggtttgtggttttctccaagagtttgcttgaatcttcattattttttatgacgaaaaaaattcccgaaacactttttctagaatttgattaaaaatagtgattaaaaatagcccaggaaatagcccaggttgacaatatgtcaacctgggcactgggtcccagttatagcccttcggaagttccgtttggtcccctgaaatagtttaatcttaatcttttctaaaaatagagaagattcttgaaagagttcttagaaaacatcatcagaatcagccaaggttgaaaaaatgtcaacctgggcgctgggccttgctctggcacccaagaagtgttatttcttccccgaaagtacatgttcccccgtttttgatgaagacaaagaagatggaaaatttggatcgtcgatctgatacttgaaaggcacctagattgataaattatcaatgtggaagctaggtgcccggtcactgggtgctctggtgctcaaaaataaactttctctaaatctgatcatgatgcctcaaatatgtatatggtatatctttttgacgtatcaatgcaaattttgatccattttcactaatatggtcctgaaacctagttgggaatgtcaacttggacgtcgggtgaaatcttaggtgcccaagttggcttctaaggtgcaggttcatgtaattttagctcccgaggcttaggtttgattgctccatgtctccatggtacataataccaaaagatagtgggttggattcaaattattgaagtcttaacttccatctcgaacctttagagtgaacctgggtgctgggctagggtcccctcttaggtcgactgctatgactcgggtctactcaaccctgtgatgtcatccttcttactacgtgtcaaatattgatgtccacatcaccaaagaaagttttggggttaacatttgctccctaagtcaactatacacttgtgtggagttgacttgataacgtgaactaagcctacttttcttaaatctaccaaatgggcatcaattttgacattcttagtccttgaaatttgttgaaaatcaattagcaaagaaaaatagaaaaaaacttatatttttttccacttatcttttatctttttctttaaaaatttgaatttttcttatatttgttatggcattaggattaattggatttgaatcctaatcataattgatgatgccattcaaaaataagagtgagagagaaatgagaagagaaaagacttttgatcttttgcttatcatttatcttttttttttaatctctgatttttccttaatctaagtagcattagaaattgacgttaccttttaaattaaaattcatattcctatatctacaggaatttcaaaatttagcttgaaaagagaagagaaaatgtatatttatatcttttacttatcatttacctcttccttaaaatgtttaaatttaaaagactcacaattgctctaagattaggatattgaagtcacttataaataagagatctttcaatcaaattcttcacacttcctattcatatagctcatgcccaagccttagaaaagcctcttatttatcttcatcaagccttcaagtatacttgacatgctcttcaaaagataaaaatggtggaaggaaaatggtataaaatataaatggtagaaagatgagtaaagtggtgtatgagatgaaaaatttatggaagaaatgtttagggaggggaagagatgtgtgaaaaatggtcttccaacattctatttataggcaaaattgagtgattaaattaatcgaaataaaataattaaatgattaatttaattatgctgggagaaaatagataattaggatatgtgtaagagtattagaaaaaataaatatttggttcgatgaaaaagtagtgaaaaagttagggtaaaaataaaataggaatatttatttaggtgaaataaattgggaagataaaatggatatttaagtgtaagttgtgggaaaaaaaaatggatttcttggcttttgtgtgtgattttcatatgtgaaatagtcatttttttcttcctttttttcttctcagtaggacacttggtgcgctgttgttagatctgggggctgaggggcgcttgcgtgtcatgctacggttggtgcagagctaacagtctgggacctgcgtggaaggtggcttggcaggtgggtctagcttcaaacacttctggtcgggtgtgggagacacgccctagcagggcccttggatcagtaggcagacaacttggattgggtcaaagagctgaccgagagtgagttttgcaaaggacctcatttgattttcttttgaaaattgcacttttggctccatttctctaatatttcttcaatttaatcccatatgttgtccaccaaatacacctaaaaaatataaaaccaattaaaaaattaaaatacaattataattaaataacaaaataattataaaaatacaccaaaaatttataaaaataaaataaaactaataaattcaaaaataattaaaacttactaaaccaattaaaaactcaagaactgagctatgtttgcttaataaaaatgtgataaaataactctaatttctagagttattatttaccattaggaatacttctatacccctattcttccatcgagacacataaccttttgaaaggttgtccctttcaaaagacatgctcctctgattgacatgaagaggagagccgatgttatgctattcaaaatcaaagcacgggagagagatgggagaactctattcaatactgaaaaatctttgaaaggttgggctaataatgtcttgccaacgagtatatgctgacacttgctttgctgacgaatcctggacaatgcaactctagcaggatgatgaggatgctcaaagtgaaaccgtcatcttgtctcacatagtgtcagaagaagtgacctcagctcgaagtgacatagagtattcagggagaatatctgtgttcttagaccaagaagatggagaagttacctccacttgaactactccggagaaggatggggaatcaacaggtggagaatatctgttgttttttttttttttgtagacaatatgagctccctggctgctatggtatcttattcaaactctaagaggaaaattctaatgttgaaggcatctcaacctctagttagggaagttgttcaggggatccctgctgtttttatttcttaaaagaagaaggttaggaagaggagtaaacctgttgatgtcgctcctcctgctcaagacactaccagggagaatttaatacaactggtattgatgaaggatctacgatcaatatctttgaagatgaggataagaatggtgtttcaaactcaggttcaaatttggtggagcagttacgtgcacagggatcctagcttcttacacatggtgatgtcttgattggttccaaggctgaaaatattccactgcagaagttagttagcaccaagcctccacgtgttattgctcaaagatgcttcaccgacatctttggggtaattgttttttcttatctccttctagcttaactttcttttgcttatcatcacctgacaatgttctcttatcttcaggcttgtgttggttatgcttacagcatggataacaaatacaagaaggtggttgagcttactaaaaagcttgaagttgtagaagatcatgttgttgctgtaaaagactagatgactgctttgaaggagaagatca

SEQ ID NO: 34205 - DNA, 5140 bp, Cannabis sativa
  modified_base (26)..(29): a, c, t, g, unknown or other
tcatgggtaatacccattaagaagtnnnncatatatatatatatatgatacatgtgtctattactttattttttagagaattcaatataacaatttgatgattattatacatgttatggtgttaaaacttaaataagaactttttgttttgtattattaaagctttattagtttgatttttaaattttcattataatatttgataactatgatagtgtaaactgctcaaaccgcaccgtaccacactgtattttctcggtgtggtttttgcagttttaagatctcgcggtgcggttgcagtttgagaaattataaaaaccgcatatgtagtttagtttgaaaaaatggctacaacccgcaccactcacaccgcgaacacccagtgtcgatggctgggatagggaaagaaaccaattagaaggagacaacgagaagtgaaaaaaagggctacttagaatatttgacgctgctgaatttatatcaaatcgtgtctccgaacttttttaagtcattaaaaaaatttaaattattgagattattaaattcaaaaaaaaaaaattatctaattttattcaattttactaatgtgaggattcttcatgtactaaactgtaccccgacccttaatttatgccaaatcataccattcgaattttgacatataccaaatcgtgtttcctgaatcattcgttaataaaattgaataaaaatcttttaatataattaaggtgcgtattcttattttttggaaaatttaatcaaaatttgttttttttttcttttttttttttaatatgttttgtttttaaattttttaaaatcacacatataaatgtataaaaataaaaatatgtttcataactatttttatttttttttatttttaaaataaaaaataaaaacatttttcataatttatttttattttttcttattttatttaagtgagaataaataacagaggtaagagaaagtggatcggaatccaaagtcaggctgcacgatttaggatctgagatccgagatccaagtccaaaaataagactcaagatcgagggtcatagccaggtcgaaggtccagatacgagttcgagggcaaagtgtgaacaaatttatagtaaaaaattatataattttacacaacctattaatataaatcaatattaaacattgtattgtattaaaaatactacaatacattattaccaaatagatctcatttatgtaatgagatatgttaaaaatcacaagtagttcctaacactactaatgtgtaatatcgttattggtacaactaagtattaagttacatataatttaatgtaataacttttaaaaaacattattaaccaatcacaagacaaacatatcagatgctaaatactatgttggtaattatgtgtttgcttgtatgttgcattgccaagtgggcgttgaagttttaaggttactggttgcattgatgtttcctctttgccctctaatcttggattgtaatgacctgatttatttatttttgctgaaaacttctggtcaatatatctttgatttttcactaaaaaaggtctaatattttcacacctaaactttaattcaaatcccctcccctgtaaaaaaaaatggcaaaagtaacataataagcacaaggtgaattgatacaaataatgtagcaactaccaattgaaataaacaaattttaaacttattcaagaaaaaaaaaatgcataataccctgaaatagcaataataacaatacataggataaataattttaaagaaacaacctatatatcttcaaaatggtgtgtattcatgtaatgttttgcaaatattaacttcgaacttgacacaagattagcacagaactcacttacaatcgaaattgtagcttttcaatggctgctgacaaaatgtttcccatttatgcttttcaatgacttcagcaatataaatggaagctcgaaatcaccaggcgaaaatcctttctcagtgaacaaaaattttgttttaacgatctcatacctcttattgacttcctttgagctagagttttcggctgtggttgtggctgagctgtagaggcgtcccagggagaaccgaagactagactgcgaagaaggttttcgaaatctgacttccacatactaagttatatccattgtgtttctatattcatctcatttgtctcagtggtatgaaacaaaagcacaatgacaaactcacctttaaccatattgccaaagctgctgttgacatttaaatcaaatactcaatagaagttgtgagataaaagaacttggcagtaattggcaaacaaaagacctaaaataatgaatataaatttcaaaacattggataggagaaaagccagatacataccacaacagcttatcctggagcatcatcatcaaagagaactttataaaaccgctttctttcttctggatcaaataagccacctagcttgtctccttgcacctgatcctcagaatcagaaacgtctgagtttttatcttcgatttcgtgcaatctactcaaaaccatgcctgcctttctcttcttttctaaattttgggagcaatgccttcgattatattcatgaagcccttcctgcatcagctcaccaaacttctcctttaccacaacgaggggatccttatcaatcaactctgatcccttataaccttctctaagaagtacagtatagagctgatacttattcgaaacatagaatataccaaggtgcttgagcaacaaaacattcaatttgtcaggtaatcgaaactctctcttaaaatgtccaagctttaatattgacactttcttccacagagtcaacgacaacagctcatgcaccaaccccactgtcctcttctccatttcctttgttccttccacaagttggccagggtccaaatatggtgatacataaggagtcgaattgaattcatgaaatctttcccaagacttcacccaagttgaaggcaatgaacaagagaaacaaggttcaacaccctgctcctgagctgaggtctcaattgcagaaaccgccaaatcagagttccaagagacaagttcaatatccattgaactccgcctcccaccataattgacaattcgaaacaaatcagagtacttgggcacaatcctaatcaagtaatcatcagaaaacccgaaattccttttcagctcattaagtttcacaacattgagtctgtgatttgcgctcatcatcagcaacttcgccaatcgctgcacaagcacctgttcctgcatatccttgacagtttcttcctcctccaccaaagccatcatccttttggttaaccgacagtaatactcatcatgttggagaaaaacctcaaagcaacaagggtattttttgacccaattcatagcacttccctggagatcaagggtcttgaactttttctggaggaatctcagtggtagtatctgattcgggtatcgaaggactatattcttaatttgattattgactatccatctacggtttctagagagagctgattcaagatcagggtccttcttcattgaccatagagaaaaacttcgacaaaaatacttaatggagggtttatgaatcaaacagttcagatttctgatatgcatcaattacttatcacaagactgtctctgtaaaatgcacaagaacactgtcaaataaagtgtaactacaaattagcttctgtaactcattcataactgactatgaaaaacataaaccaaatcaaatttcaattgagcgtaataaaatttcatcaccattaaaagaaatgaagcaatacgactaggctatataccagtaccaaactccatagatgaaattgccaaaaacctcaaaacaaaaagtaaaatttgaaaaccaacaaaatttaaaaaagtgtcaatgttggcctaaacacatattttttcgtgatatatcgtgatcgtgcctctcggacttgggtcggtttcatgtcgtatcaaaaacccaacacatatcagagatatcacaacaacaacaatacgtatattatatgtatgagttcaaaaaagaaaaattacatatcagaaataccacaataacaacagcaacaatacgtatattatgtgtatgagttcgaaacaagaaattgcaaagtatgatagtaatggcagagacggcatagatgatgcaagttgttatgatgagtcctagatgttctaacatacgagctattatgggaaacttggaggcaatgcatttgcttatcaatactaaagcaaatgagagtaagatggtcattgaaactaaatcatttatattgaatttaaatttgagttaatttgggaccaaagacacaacttcagaatctcacacaatgaacaaaaaagaatccataaaaaaacaaatattcatctctaaaatcaaaataattaacaactcaaactggaaaaatggaaagtgagataagaggagattgaacctctagtttctgtcctgcagcgcgagtgagtccgagtttctggatcgaaaaggaaagcgattctcctaatttgaaaaaaaaaaatgaacacaatcaatcaataatctctctgtagaactaaactaaactcttacaacaaaccagagatagaaagaggaatgaagaagaagaaaaaaaaccttgatttttgtgggaacgaaagagaacatcgacttgtgtacaaaacatagggtttttgaaggagagagataagggttcggattagagagatctgacaggagctgagaagaaaggagcttcaacttggactctcatactcatagtcgtctgaaatatttgagccttaggtattaatggcttcttgtttttcttttgtaaacgacaatgtttgaagggtattatatatattgtcttaaattaaaatgataaaactaattggtttattagacactaaaaaaaagtaaaaaattcattttggagccaagatttttttttttttttttttgattaagagccatcaaggaagcaaacaacaaaaactaaatcaacaacaacaaaaaaaccaaatagagagccaagattagctctacataaaatgcatcttttcccaaccgtttgggtaaacttaggtgtcgtttggcaacactttattaatcagttttctattttta

SEQ ID NO: 34206 - DNA, 1319 bp, Cannabis sativa
cacttatagttgttttcatattaccaaaaaaaaaaaaagcgaaaaggtactaatagtgtctagtatttttattggtgtcatactattattggtgtaattaagtatcgaatttcatataacttaaaaaaataacttttagagaatatcgttagctaactggcatcacctataaaaggtgttgggcaccactagtgtccaataacaatgctcttttaaaaattatagtttccattttgagattcaattattttcacttttcgatgttaaattgtttctattttcaatgttagttgtttctattttttaagatatttattttcaagaaatggctagaagactctatgtttatcttcaccctttctcgaccctagctagaaccataggaaatcagctcaattcccttcaattttttgagttagagcaaaggattgaggtgtttccaagtagaggtaaactctagagctcttacctctttgttgtttaagctttaattgggtttgttaatgtatttttgagaattagtggctgtttaggtttaatcttgttcttgtatgttctctgagtttattttgaataggaataagttgtttatggctggtttagttgatttgggaggagaatgatcaattttgagtttagaatctcaaacttgattcattaatgacatttcttgattctgtgtgtgtttctgggttttattgcttgggaaatgttatttgaagttggtataggtgttttggaagttttcgtgcagtttgggatcaaattgagatgttggtggtgtttttgatgtttcctgcactgaactggtcaataggacatgtaggaactggaactccggttagtccccaagaaatccaacaaactcggtcttccggttggggaattggtctgccggttgaggtagttttgggaccctagtttttcctatcactactacaaaaaggcttttttgtttcagtttttcagtgacataaaaaatttgcatcagattgtgtaaccgacgttatgagatgcaaatactattattttttcttcaattcttaaccgaagcaaaaagtttgttgcttcatttaatatctgacgctaatagtaataacttttagcgtctattattaagtgaagcaaatacctttgtgtcaaagtataactgatgtaaattgttattttacttcggttatgaaacgacgccaccaaaaaaagaaaataataataataaaaaatactagatctgttgtaaataattttgatccagttctgtcatatttgtaccactttacttctaacaacattatttattccatgatttttcttcaagt

SEQ ID NO: 34207 - DNA, 2059 bp, Cannabis sativa
ctcataaaaagagtgtatcggtgcaccccatctgttttgtaatctaaaaaaaaattagttcaatttttttttttttgtaattgtgtacgttgtagttatttaatacattttataaaattttaaaaaaatcagaaaattaacacaccaaaaatagggtttaaacaatcgattgcacgtgtgactcttttattctatttgagtgtaaaatagattgtttgaacactattttttatattgtaataatttattctaaatttctcaaaaatttgtaagatgtcttaaataactataacgtacacaactatgaaaaaaaattagattaaaaaattctcttaaatgtcaaaacaaaaaaaaaaaagtgcatcgatatacttcttttagggagtgcattataaaatcactcaaaaatatatattataattaattaaagtatgatcgagttgggtggtcatttcttgaggctatgcttattcggatgggtttcaatttgcattttgtgaagctaatcatgttttgcgtttctacaatgagctacaatgtcacatatggaggaagaactatgggtcctataactccggggagaggggtcaggcagggggatccattaaccccttacctctttttgctctgtgctaaaggtctatcctcaatgttgaaacattatgaaagcagaagttggttaacgggatgcaaagttgcaaggggtgctcctcgcgtctctcatatgctatttgctgatgatagttatatttattgcaaggctaataatagtgaagcttcgaatgtgctacgattacttcatgaatatgaaagggcgggcagcaagttaattatgccaaatcatcaatatttttcagcaaaaatattgatgaggagactcgtaatagaatgtgtgttgcgttgggaatggttgaagcttcggataatagcttatacttgggtttgccttgtaccatggggagaaataaaaatgtaatgcttggttttctaaaggataaaatgcaaaagaaaattttcagttgggagagcgaatttttgtcaaaagcgggaaaagaagtcttgttgaaatctgtggctcaggcattgccttcctatgctatgagtgtgatcttacttacgaaggaaatttactctagtttggagggagtgatgtcaaaattttggtggaaatctaagtcaagggctgctaccaaaggagtgagttggatcagttggaagcgtctttgtcgacataaaaatgtggggggtattggctttcgagaccttagagactacaatcatagcataacaaagatgagttccaataagaaaccacttcctcaatatttactacatcaattttgattccctctgtgttgttatcagccctgtttcccgacccccccaaattttgaactcatgttctgaattaagtgattagagtgcaacaatttacctaagttcaatttaggtaatgaaccaaattttagaatgggaggagtgacagattgaccagaacggagcagcttggatctcctttcagaggcttcaaagaaatttgagaagtcttctcgtaggtcttgaacatacagcgcctttagcagcgaagaccttggagagataacatcctcaacagtaggttcttcttcagcattcgcctccagttcttcctctgtgaactctgcttcgacaactccaaggattttgtccatagatttcgtcttcaggggagtcactgacgatgagggaccccattgtttcccaacctttccttccttcttcccctgagctttctttttcacctttgctaggggtgttcatggattggtttggtccgatttttcataagttttgaaccaaactagtataacggtttttttcaatattagaaaccaaaccagaccaaaaaatttctcaaaccaaaccgttaagaacagtttggtttggtttgaaaccacgatttatgtggaattaatatttattcatattttttttagtaattgtactatttttactaagtttttaattttatttttcaaaatatatatttaacatgataagtaatagatctataagatat

SEQ ID NO: 34208 - DNA, 1474 bp, Cannabis sativa
aaaaaatggtaaaatattaaaaagaataatactattggttggtcaacattcaaaatataatattaaattagtcaaatctaaatttaatataatattgttaaaagaaatagcttttggttaacacccatgttactttcaacattgatatacgttttttattattttttttttaattataatctgacaagaatgacttaaactaaaaaaacaaaaaaataaaccttcacaacgcgccacctgtcgcgttctcctgacactagatgcaagtgtagtctatgcgcgtcagtagttgtctcttaataaactaacaaccacataaatgtaaaacaagaacaaaaaaataaaaatgaaaaaaaatgtgtcatcataaaaaagtaaaaagcataagtttttagtcattttttgtaaatatttctttaattaatatcatatttattttttaattcgcagagagaaaaaaaatgggaagaaaaaagaaaaaatagaaaaaaagagagaaagagggagttaacatgtaaaagagactaatttttaccatttctcacttcatcatttcttctgggttgttgagtaatgggcttaatcgactgttttacatatttttaatgtgaataaaagtgttagtattagattgcaatagtattctttttgccaacctttatatcactttttctcagcttgagccctaatctttgatcaaatgatcgataatatcgatgtcgatggattcaaaattttcagtggtcgatttatgtcatttgatctgttcattaatcaatggatgtcgttggtctgttattttctagagaaacaaattatggcaagaaccatttttcattatgagttttaagtcgttctcttctctctttctacgcctcattctccttcatcgacgattccctctctgtgttcttggggatttttcctctttctttgaatatattgtcattggccatggagttattttcaccacaattgtttgtgatttcaagtgaatcacatagcaagttttgtggagtagatagtgaagaaaccaaaacaaaagaaaagaagcatttgtttctatgctttcaggtaccactatccgggtattgtggtagtgtgttatttcaaatctgagtgtagttggtgtggtgatggtggttgacggaggctacggtgatgtggtgttgcggttattgtatggtaacattgacctcttgcagttattttatttttaattattatttatttatttattttaaatttcatatttttgttgcatattttttacagttatttttaactatcctctatagcttttcaaggaagttataaatttcaattattcttattttatttattttttatttttttagtagttattttataatagtattatgatgatttcatttttttatgaattaattattgtaaattggtgtaattttgcgtcaattattttatttatcaattatttataattatttttttt

SEQ ID NO: 34209 - DNA, 2922 bp, Cannabis sativa
atgttgagtgaaggttctggctcaactcaacaacatcaacaatgttatctcaccaccagcttgatttcccccagtcaagattctgcctattataatgatgctcaattctttgattgtaacaatactatgagtcctactacttgtaatcagttacatatcaataaagatctatctcctttttctgcacactctaccttacataattatgcctctaataacatcaatacttggcattgcaaattgggacacccttctacttctaccttgtgcaaaatattatctcatgtaccccacaccggttccttaaaaacacttaaattttgtcatgcttgtcaacaaggtaaaagccacaaattacccttcccaatttccacttatagagccactaaacctcttgaacttgttcatacagacctttggggtccttcccacatacaatccaaagatggattcaagtattacattcattttattgatgactttagccgattcacttggatttatcccctagttctcaaatctcaagctcttgagatgtttcttaagtttaaaggcatggcagaaaaacaatttggacttcctattaaggctgtccaagctgatggtggtggtgaatacaaaccctttaaaagattcctcagtgatcaaggtatcttattttctcatccttgtcctcatacacatgaacaacatgggagggctgaaagaaagcatcgacacatcgtggaaactggccttactttgcttgctcaaagcaaattagatttcacttactggtggcatgcgtttcaatatgccacattcactatcaatcggctgcctacagttgttctcaacaacattagtccctttgagtgtctctttggcacaccacccgattataatattatgaagccttttggttgtgaatgctttccccatctcaggccgtatcattctcacaaaatggatttcatgtctgaacaatgtctatttattggttattcgtcctatcacaaaggttttctatatgaaaatgctcaaggtcgaatctttatagctcgcaatgtggttttcaatgaaaattgctgtcctggatttctttctcaatatgcaccagatcaggtacaattttcttctacttctactcctactgctagttttactaccaattgtccattacctaatacaaatcttgtgtctgatgctgcaatacaaccatctggtgctgaggcattaccaaccaattcaccacatttcatagctaccgaacctgcaataccagtttccactactccccatataccacctgttactgaaactgttacccctactacatccgctccttcacaaccccatattacaccctcaaatctcatcattcctccactagtgtctcctcccatcagcaccaataccataaacactgccccgttcccagaaattcctttgcctaatgtctctgcaccagaaccatatgctgcatctttaccatgtgcaggaacaaccataccagctgcctctactcgcactcatgccatgatcacaagatctctcaatggtatagtcaagccgaaatcatatttggctacaaagcaccctcttccacaatcactacttcctacagaaccgagaacattaaaagaggctctcatgaatcccaagtggctcgcatctatgaacactgaaattgcagctctaaaaaaggctggcacatggtccttggttccttacaaagagggaatgcatgtcattgataataagtgggtgcatcgtctcaaattaaatgctgatggttctttagatcgattcaagtcgagacttgtggccaaaggatttttacaaaccccaggtatcgactatgctgaaactttttcaccagttgttaaaccggtaacagttcgcacagtcttgtctcttgctgtcactaagaattgggctgtcaaacaactagatgttagcaatgcctttctcaatggcactctaacagaaactgtatacatgaaacaaccacatggcttcctcgattccagcaaacctgaacatgtatgtctcctacacaagtccatttatggacttaaacaagcaccccgtgcatggaatgacaagttgaaaaacagccttttaaactggggttttgtggcatccaaagcagatacatcattgttcatttatcattatgcacaagactttattatattactggtttacgttgatgatatactagttacaggtctaagtgactccctcatcaacaaactcatctctgatctaaaccgtgacttctctctaaagaatttaggtgaagtccattacttttttggggtggaaatcttcagagattcaaccggaatgtatctttctcaaacaaaatacatcaccgatctacttacaaggctaaatatggaaggagctaaaagtattcccaatccctctagtgcttccaccaaactgttcctcaatgatggtgaacccttctgtgattcgactttgtacagaagcactataggtgcattacattacctgtctttaacaagacctgatatagcctatattgtcaataaactcagccagtttatcaaggctccaaccgtgtgtcactggaatgcttgtaagagacttttacgatatctcaaagggactatcactgaaggtttggtgcttcgacctacatcagacatgacacttcacagctactctgatgccgactgggcaagtagcattgatgatcaaaaatcaactggagggtatgttgtttttctagggggcaatctaatatcatggactacaaaaaagcagcaagttgtcgcacattcaagcacggaaagtgagttcagggcccttgccaatatggctgctgaactcgaatggatagtgtcactgttgtctgaacttcatattccacttcaacattgtcctattatatgggtggataatcaaagc

SEQ ID NO: 34210 - DNA, 1406 bp, Cannabis sativa
ttcagccaacatacatttatcagtgatcattacaactctatgtatactattactactatcaatgtaatctgacatgcgtaaacaacatgtacgctaaacatgcaataacatatgcatgatattatactaatctttccttgtttctgaatttaggtgtgccggccaacatgggcggaacaactgttcggagaattatagccccctaaatcacatcgatcataacaaggataagtgacacgctaaatcacaactggggacttagattttaaaccaaaaatatacctacttaaagttaacatggcaataccctaaactaacagggaattaaccaatcaaagctctgaaactaacaggaatcgacaacacgaaaaatctgaggaacccagcactgatccggttaaccggttttacagggcctgtaaaatcggttgaccggtttacaccaaaaaaacaaaaaaaaatcgaaaccctaaccaaaacaactccaaagcttaccaaaccttccagacctgcatattatacccccaatggacaaattgcaagcaacagaacaacatagcatgctcaaaatcaaaaatcaccattagacagccaagcttgagttctaaaactcaaagtttgctcaatcaacacaaccactaaaattagcttaacacaacatttctaaccataatttaacttcagaaacacaaatcaaacatcaacaacaactacatgcaaaattcacaaatcatgcataatttcataactttaaatttaataaaccaacaagggaagtactaggaactcaccttgaacttgaatctacttagaacctgctggaaatcactaagattgaagaagaaaaccagaaccctagctgccctagggatttggagagagaaagagggagagagtttcttcttttttctaattttgcttctttgaaataaaaatgagataaacatatgttttatttaattaatatcatccataaaattatattataaaactaaattaaccttcactaaaagacaaaatacaaatatgcaaaatgaccattttgcccaccacctagccaaaagtcataaaatcacataggggtattttggtaaattcttaaatctcaactattcccgatattccaaatgtctaactatattgccccactatcctaaaaatattgagatgtgattctaatagccaaacaccgcgttccaagattgcttggcacaaaacatgaaatattataatttcctatataatatataaaatgtattctgaatttaaatatcaatccgtaaaatgataattcataactaacatgcaagtttcataattaaacccttattatcggctaatttccaaattcaagttaagtagtttttacgattatctccccttaaaagtattttgtccccgaaatc

SEQ ID NO: 34211 - DNA, 2292 bp, Cannabis sativa
cccccccctaagcatttcctataaaattgctatggggaagtaggaagatcaaaaagtgaatttatgaaggagtgcaaacattagcacaatcccccataaatcatgatttgaaactgtcataataatggtagacgtgggagcctgaataatgggtgagccgtcaactctgcatgaaacattcaccaaatccgatcatgcgagactcacacgcatgtcaacatctgggcaaataccaaatgtccccattcagacaggtgtttgcacggggacttggggcaatgttatcctaatttttttccacctgacgtgataattacatgtggtctattcagctggcccttactaacatggggcttccaaacaagatcatgccaaacatttccccgcacaaggctgatattaataaattgtgttaccttccaggaagcacctggctagattactaatatgacggacagaagagagacgatcaacataccttgcaagattgcatcataggtaatcttgtaaaaaagacaagtctcaaagaaagcttggctgggctgtcaacacaccagctagggaaaatagaccaagaaatttcaggcaggactaaacaggcttcgatttattcctcaacaaactccatgaatatctccaatgcaaacacgagtttgactcttcaacccgaaagtataggtgtttcaaacaaattttaactctaccctagaatatagagatatttactttttgttgctacctttaaggagcttattgtaataatcttcccatataaatagttaatgaatttacagaaggaagggacccagaaaatcattatctcaactctgagagcacttttgtgaataatattctcaatatcacgacattatctcaatatcaatacaactaaaaggggagcaggtcattacaaatatttaaggggatgaacctctataatttatgttgttctttctatttacttattatttctaactctttgttggtggttaattaacgtttattagactctaagtctattggcaaattctccagttaacatctatcaagctgagattgaaggttcctggtcttaatcatatcattataagaaagaggaagtttagagtaataagtattaagattattgtcaatggtgttaattttggttttgagattgtcaaaagagtttttccaattcttgatagaattaacacaattattttgcttgagaatgaacttattcaaatggttagaattactacagtcaaaattattattccaggatttattaacagtatcaataaaagaagatttagtaagccagtgattttcaaaaataaaccttttattactagaactacccatacaattattattaagaactaactttaacaccctatgatcatagccataaaatttcatgtgataaagagtagcattcgagaaaatatcaaaccaactttgagtagcaatgctccaatctaagcgttcaaaagaagcttcgtatttccaagtaaaacgattcccaacaacctgaacaggttgaaggtcaaagttgttaacaaaattctgaaaattagtaatagcataggaagggggttaaagttacacttcctatcgtgaattgaaagataattgttaatgtcacctataattagccaagaaagaaaatgtgtatcatcaaaaagcctacttagcaagttccaagtatgaacttcctacaaataaggggagccataaaagcaagagacatgacatttcacattatcatcaaacataataatatactcgatatgatttaaaacgaagttgaaaatattaacactaatttcttgattccagaacaacaaaagaccaccccgtaaacatttcctaagaacctcaaaagcatgatcaaaagaaagcttgaccctaagtttttcacaactacctaacataagcttagattccataacagaaaaaacataggcttattcttatttacattaagggagaggttaggaaatgttcggggattccccaacccatgagcattccaatttaaaaggctcatttttctgaatgggattgcttagcaacacccgcctgttcatgagaatcagtatcagcagatgtagtcacaacagtaatagagctagctcgagctcttttcagcatcttcctcacagagtcaccaaccagagataatgggaggtaaaagcaaacctctttgcccctaaaattgccttatccttggactttgaggggagtttggtggcttgaaccttaagagcaaagataccagaattcagagacagattggcaccagta

SEQ ID NO: 34212 - DNA, 6441 bp, Cannabis sativa
  modified_base (558)..(559): a, c, t, g, unknown or other
  modified_base (587)..(588): a, c, t, g, unknown or other
  modified_base (618)..(619): a, c, t, g, unknown or other
  modified_base (1437)..(1437): a, c, t, g, unknown or other
aactctcgggatatttctacagcgcattatccgtctcgagttcccaggttgcctcttctacattactattcctccataatacatttaccagtgaaattgtcttgttttctagactttttctctctatcaagtatttgcactggctgttcttcatattatagatctggttttagttccaatccttcataactcacaatatgggacgggtctaaggcatacttctgaagcattgaaacatggaacacatcatgtacaggtgcgagcgcgaggggcatagccaacctgtacctacttgccctatcctctcaaggatctcgaaaggtcaaatgaacctcgggttaggttttcctttcttaccaaagcacttgatgcccttcataggcaatacccggagaaatagaatatatctaatctagaaatcaatatctcgctgctttggatcagcataactcttatgtctgctctgagttgcgagcattcatgctctgattttatcaacttcctcacttcttctctgaacagcctcaacgcctaagaactttctttcacctacttcannccagtgaataggtgatctacactttctnntgaataggtgatctacactttcttccatanntctacactttcttccatataaaatttcataaggggccatcccaattgttgcttgaaagctgttgttgtacgagagctcgatcatgagaaggtactttgcccatgatccttcaaagtcaagcacacatgctcgaaggatgtcttttaagatctgaatagtcctcttagactgcccattcgtctgaggatgaaatgcggtgctgcactttaactgagtacccatagctcgatccagactctccaagaatcttgatgtaaactttggatccctattcgaaacaacagactttggaacaccatgaagatgaataatttctctaacatataactcagcacgatgatcaatggagaagtttgtccgaataggtaagaagtgcgctgactttgtaaacctgtcaaatatgacccacacagagtcgtactctcccgtggttgttacgaaaattataaacaatacgcaagtgcacgtaatcaagtagtaaactcacgcgagtgaggtcgaaccacaggatactgaactgaataccactaaattagacttatgattctatttggttgataaataattttgatatattttaaaataaagaaaaacaggaaaattaaataaagcaataaaggtgtttaatcaaggatgaaaaattacggaacagagtcctgttgatttaattacctagctcttaatgctaactactattctgtttctcaatgtgaatgacaaattataaaaataaacttaactcttttcagatcttttaggtcctaaataatatgttatctaatcatctctgagatagattaacatataatcagcattangcaataatctaaatgtcacaaagactatgcaaaatgcaaatacttttgtaatacttttgtttcacacttttgtttcacatcaaagtttcacatcaaaatttcacatcaaaacctaatatcaaaacctaatttaaaaacctaatttatcaacctaatttatccaataatttatccaattttagcattctcaattctcacttttcacattttgaattgagacaataaagcatgtaaaaggtgatcaatcttaaacatgtaattaaattaaacacaaatttggataaattaacaatcaagaaaggagaaatagcaattatcattaactaaaaataatttcaatcaacattcaacatctccccaaataggattttagttcataaaatccataataacatccttaatcaaaactaaaacagaaattaacatagaaatcaagagtttaagaaagaactagttggtgattgcattccggatcgccaccattgcttcctctgcctccttctttcacttttgggtccaatttttgcctcatttccttctaaaacacgagcccctgtaggcctctgatgttcagcttttacttggtgacaagttaaacacttagcaacaaactcaacaatataattcttcatggctggccaccagaacatggcgttgaggtcttgatacattttcgttgatcctagatgaactgagtaaggagtcgtatgagactcattcatgatttctcttttacatctccgtaggcacacaaacacgattcatcaatcgtggcattctcgtatccattataaagtaactagtcctcccagcataaatcctatatcgggatttcactaactctggatctcgcagttgtgcttctctgattcgctccaatagagaagatttcagggtaatattagtcgattccccacagccaagtcaattttagcttgggtcatttcatctgctaactgctgggagatctttttcactgtatttatcttactctggcgttttctactcatggcatcagcaacaatgttggccttaccggggtgataaaggatctcacaatcataatccttcaccaactctagccaacgtctctatctcatgtttaagtctttttgggtgaagaagtatttcagactcttatgattagtgtatatctcacatttctcgccatataagtaatgccgccaaatatttagtgcaaatactactgttgcgagttctaagctgtgagtagggtacctctgctcgtactcttatagctgtcgagtagcataggctattacctttccagattgcataagaacgcaactcaaaccctctcttgaggcatcacaataaacaacaaaaattttcttatctgaaggaagtcttaatactggagcggtaatcaaacgctgctttaactccagaaaaatttgctcacaccgatcagtccaaacaaacttcatgttctttttggtcagctctgataagggtacagcaatctttgaaaaatactcaacgaaccaatgataatacgaacctaaacccaaaaagcttctaacttcaatagccaattttggcgttggccaatcccgaacaccttcaatcctggctggatcaaccatgatcccgtctttatctactatgtgccccaagaaagagacacaagatatcctgaattcacactttttaaacttagtgtacaacttatgatctcataaccgttgcaatactgatctgagatgcagctcatgttcctcttgtgattcagaataaaccaagatgtcattaataaactcaatgacacacttgtccaggtaattcttttatacttgattcatacagtccataccaagtacggaacgcagccttggcccgacgttcaccctgatggtgtatcttgcatactggacattctagatatgatttgaaggaggatccgtggccctgacaaccatctctatttgcccaaaacttcctattaccccctgatgttttggaagcttcaacctttcgcttatgatcagggttaccaccgtcggtccccttactgaaattaccacccacaggaagattcgatgatgtagcagcatcctttgcattctactccttagtcacatgttgctctgcctcctcagctaacaaggctagttcgaccacttttttatacaaagtgtcttgagtagtggtaatcttcaagtcctgactggttatggaattaagtcctctcacatacttttgtttcctggtgaaatctataggcaccagaccaccaacaaatttagacagtcaatcaaattccagagtgtagtcggccacatacattttcccctaagtcagtttcacatagtcctccatatgagtcgttctcacagcgatgttataaactttttcctcaaacagacccttaacatctcaagtctgccccactatgtcccaccagatgcgggcatgatcttctaacataaaagggacccagttcactctttttgttcccgtcacccctgtattatctagaatacaggtgatagtactcatccattgctcagcttaaattatatcagtgcctcctagaaacattcgaggttccagcttcacaaagcgctcaaatactgaatctctatgcggcagcatgaacccctggttacccacaactggcataggagctggtggtaagactttttctacagtagctgacgatgccggttgcctcaaccgccgtaattcatcctcttcacaaagtataatactacacatttcttgaaatatctgctgccattcagtaggcagattactgttgccaacccccgcattatccccaaaatttggcgaagccacaggccgtgtcagtggaattggttttggggtctacacaaggctctactagcgctggccctgtggtctagatgattgtggagaatccatttccataaacagcacgataatcaacaaacctggcgttttagtcaccaataccacattgacgcacttcttgccctaaacaccaactcaactatttcattctaattaaataaaagtttatcatataacattctaaccatggcatcatatatcacataaatactctagatgctcacatactgccttaagtggaaaccggtaaataaatgatcatataagcaataaagcatttactctcaacacttactgcactatgagtcgagcttgtctctgacaatgattgtacatgttcggtcggtttacaagaagtttaaaaaccttggcgctcagatcccaaactgtaatgccctaataattaggcaccctatgctaaccaataaagaaaccccaatccgctaattcgcgattactagataggtaagcgcgggaaaatttaaacttttatctaaaacagaatgaaaataaaacttgtaataactttaaactttacaataaaaaatgatatctttcgggatccaaaaaatattttacaaaatattagaagttcttttcactagccgacctaagtggcaaaatcaaagttacaaaagtgaaacactggtaggccccaacccgcttggtctagtgtggcctaaacatgtacaagcaccaccaagctctcgaactcgtggcagatcagagattgatttaccctttcctgcacagtcgggcacccttgaggcaagcccagcaagacagtgtaaataactatatgcacaataaatatttaacacataattaatggtgccaccgcattatttgtctataagatatagacctccgtgttacgctcacatgcctatatatgtctatgtggcataaacccacgtgttatgctaacacgtccatttatgtctatgtagcatagacccacgtgttacactcacatgcctatttatgtctatgtagcatagactcacgtgttatgctcacaagactatttacaataaggccttagtagaatttatctcggttatagctatcgagtctaaactgattatgccttgcctgcataaaactattcataaataagtaattcatacgttatgttctttcagttgtttatcatgatgatatgtatcaggtgtaacacaataatgttttacacacataactcttgacatatatgcgtacattcaatatatactataatatttaaaatcttagggtaatagccctaactcgcataccaaataattactcaaataacatattatagcatgctcaaaataacacctatagagaataataaccctatttcttgccttcacttgattagcaatattaggtacatcattactttcttaccttcacataaattctagggtagtaagcataaaccgcattattatcaaactcaaggtactaatttaacgagtctaaattaattatgccttaggcagatatttatttactctgacatatttaccgtgcatacacgaaaaatcatttaattactagggtaataaccctacaccatataaccgctcattttagggtaataaccctaattatagttcgcaaataatcacaaccataatttaaaatcatgagcgccactgcgcttaactctacgtgaaaactactgtcttacctattgtcccaagtatgtggagattctaaatccccatgtgccggtaatcttagtcataattttcgagattcacgaatagggttaattcctaaattcatcttcacataattataaaattggcattcaaaatccacataagaatataaagctcggaatgggctttctgaggatataaagaacgtcctacatggagttccgagtccaaagttatggcgaaaaaaaaaacccaaaataattaataaactaccattgtcatggtcgcgactagacctacgataattgcgaccactgtgtttaaaaacccagatcacccactttttagcttcgaaaattatgcacaaacacaccaaaattcagtcaaaagcatgcaaaataccagaattaatcccacaatacttatcaacataacagaaagctaacacacatattttaagctctaatccaccataagcatgcttcaaaattca

SEQ ID NO: 34213 - DNA, 2203 bp, Cannabis sativa
ctgattctttgagtgtgccattgagaaatgcattggagacatcaagctgagtgatgtcccaattgtgtaaaatagccaaggttagcagtgtcctcacagtagttggcttaactacaagactaaaagtttctatgtagtctatccctagagtttgagaatacccttttgccactagtctagatttgaatttgtctattgagccatcatgtaatatcccgaaaaattattatgataattaattggatatattttattgaatatgtaatagaattaatgttagggtaagattgtgatcttacttaggctaattgtgtgataattagagaaaaattaatatgtgaataaataaagcgtaatttattaattacagagattttattagatttagtgggtacagtagataccatttttgaaataaaatattttcaggcccggcgaccgtgggaactcgacggagtggtcaaagatgtcacgacaaaataaaatggattgagttggaaatatactggactagtttagagttctaagttattgatttggcgggattagctagaaaagaccaatatgccctaggttattctatagcttaagttttaggaagaggggtaaaaaccctaatttgtttttatgtggttttctagtaggtgtgggctgattaataacttgggttttatttatgttccttaaattttaatcagtttttagaaagtttgatcaagaattgaagttctctaagttgaggggtaagttctctagcttttcttaattgattttcttgatgtatgaattgagttttgggttaggttttatagatttcaggactgtggtgttaaattaattttagattgtgtttattggattgaatcagggaatccttgtgcatgggttatgtgattgttgtggctgttagaattagagttggaattttggtttaagaacttgatttttggttctaacatggtgttttgcataatttgatgaattgtggtgaattgatgatttgaataccttatttttatgttattgaactgttctgtgaagttgggaacaattggttaggtttggagcaagttttgggactttaaagatctgaaatttttgagtttctgctgtagtgaaccggaattctggatggtcaatttttaggaatcgctgatttttgtattttagccataacttttcactcgggtgtccgttttagacattctatacaccgtttcgaagcttatgaagagctttacagtatgagtcatagattagagccaaaagatgtattttattttagggtattttcaccataagattcgatagaaaaccttaagttatttatacgggttttagacagtgttttggaatagacccttattgatttacttttgtcgtgacattggaaccaagatcgtcgagcatcgttccactcaggccagctcgcatacctgactttggacttgaggtaagaaaagtattaagcactgtttatggttaatgatatgattgttatagtctcgattatgatcgagatcccgatatgtatttgttgtgactcgattacaatcgagaataatgatatgtaattgttatgactcgacagcgattaaggtgatgataagggatgattattatcgtttgtgactcgagtataatcgagataatgatgagaaacgattattatcgtttgtgactcgattatgatcgagggaaggcacgattattaccgttattgtgaataaagaaagatacggtcattactgttatgagtaattactcctgaaactgcggataagttttttacttatcgttcactgtatcaagcaatgatagtgacatacgtagctcgtggttaacgagtggtagaggtactttatgaagtacccagattgtgtgattacaatattatgaaattgatgaagcatgttattatgtgatgagtgataatcaaatatgttttgttatagtgtgactatacgaattttaaactgcttatgaatttagtcacttttcttacagagtctcagtgactaacagaaggtaagaatacatgtttataggaatgtaagattagagtgctttatgaagcattgagattatatggttatggtaatatatgaattagtgtgctttatgaagcactgaaagtgagtgtttataatgatgtatgattagggtgctttatgaaacactgagattgttgattatgaatagc

SEQ ID NO: 34214 - DNA, 3034 bp, Cannabis sativa
ccaacacagaaaaccaaacttatttctgctcggatagtccgccttccaccctgctcgggtaattagaagttatacatgcagatgtataatatgaagtctgttcgggtcattcatctccgcccagatacgaggaatgcacaacatgtgtcacttgtatattttgccacgtcattgtgcaaaaaataagataacataatgtactagtttaggcttacaaaattttatattcagttccaattctatcatcatcaactttgaagcaaaaaaatatttacaaaatgaaatacactctttaaatcctaagatctcaacttcaaatatcgtctagtattgctccaacgaaagacttaacgataaacctacacattctaaaaaaattataaataaataagcacgttaaacttgtaaagaataacctaccatattgcaaacacataaacacaaaaaattcaaagtttttaattatttcaatatcaaataaactttgtaaaattaaaatttaaaattaaatattacctaaactatactaaagttataataaaatactaaactttattttcttaaactattaaacttacactttttttttttaactaaaaaacaacattacatatatttttttaataataaattaaatattaacattaaaattaaaatgctaaaaaaaatacttatgcatttttactgcaatctaacacttttcttctaatatttatgcatttttagagaaatttatcttaattctatcgaaatttcaacagcaaaacaactgtaattggacgttcctgaaaattttaaacataaaaaaaataagaaataaaacatacacgaaactatgcaaaacaaataaaataacataaacaatataaaattatccaccaatctgactgcagtacaattaatcgtagaatctacttgactaaggacgaatatctaagatattcaaactccactaaataaagaattttaaagttttagtgattacatttttctccaataaagctagctacttttccactcttcaatcaacaccaagaaccattcttaaaaaataataatattgattaaattttaaattttaccactactatcaatttttatatatatgtgtgtatgcactaaaaatacatacatacatatatattaccgataataaggagcctctctcataagtccgccaaaaagggaggaggagctcgacaaagtttgacaacgactaaaaaagtcaataatatatatatatatatatatatataaaatttcaatagcaatttaaataaaaacaaataatctaaacataaatttttttcataacaaattaataaaaacttaaaggaagatcaaactaatagctaaatatttaataaaaaatatttttttaatacctaaataattaatattaccgaaactaaatattttttattacctaacaactaataatctaaataatttttttattacataacaacaaataatctaaactaaatatttttttaaaataactaaatctaaaactaaataattaaactaaaccaaatatttttattaatacctaaatttaaaataaattaaacaattaatctaaattaaatttaaaaatacgtattaaataaataagtatatgtatatgtatatataatcgtatatataaaatatttataaattaatttaataaataattaaaatatacacctaaaagaggtggtgggtgccggtggccacgaggaggacggagaccatggttgggaatagttggtggttgagtgaacagactgagagaagatagagagaaagcatcgttggtggtggagctcgaatgggggtttcttggtggttgtccttcgtcgatggtggataccgctcaaaatggggtttcttggtggttgtccttcggtggtggatatggatttcgtcttcgaggatttaaagggagattaagagagagacaagtgagggagatcatgggtgggtttcatgggatatcggcactgctggtgtgtgtgatagagaaaagagactgaacgcgagagatgtagcgagggtttgattttatattaattagttagctatacgcggcggtttaaaaccgtctggtatactataggcgactgtttaaaatcgtcgcctatagtatacctaactgttttaaaccatcaggtataaataactattaaaaatcacgataaactcataaaactgtcgtagattgccctcccgagtgttctaaaccgtttgaaatagccaattttttccgacggtttaaaatagtcacttaatattattagcgactgtcctcaaaaaatatcctttttggaatcgtcacaaattctaacttttgtagtagtggctcttgaatgcaaagaataaaaaagtatttttttttctctaagtgctcaaatttgcggatccttttcataggccatgggtgaccccttatataggcaaaaatgtcaatatttctctcttcaagagacacgaccaacgcggagctatctcaaccgtgtccttggtttttgaaggtggttgaagtttgatttttgtgataatatctcgctatttttgtgggtttgtaactgtccttgagcttcttgcaggatttgaatatttgaatttgtcattgatgatgagggtctcgcgagggtgtgacatggtcgttaaccaccttcggggatagaagctagtactaggggtgacacccctaagacccaacatgaggatggtgtcaattaccatctttgggtgacccctaaacatcttcaacgttgtgggtaatcatggtatcatgagaatgtactcatcttcttttgaggatgtcattacgtccatggtgggggtagtgtcatctaataccccctagactaatttgacctgttggggtgtggtgatcgtttatctcatctgtgagggtgttatagtgtcacgacccaagccctaagccatgagagatatgtaatatccataacttgggtggtcaaaggtcacactttgacccttgtaggaagataaaacttataaatgatcattttatttatat

SEQ ID NO: 34215 - DNA, 2221 bp, Cannabis sativa
  modified_base (1187)..(1199): a, c, t, g, unknown or other
ctaagtgttctaataaccaattcaatttgtcaatacctctttacatacagcgaggtagatgcctcgctatacgttgtctatgtctcccttgggattatgccttctgatgcgaaatagtttctggtcaatacgtgaatcaatagtttgtacatcctgatctcgcttaagattgtggagtcagcgagttataaatatactctatcaattctgcatttcacgacttattccattttgtatttaatgatataattactgttatacccgaaattcagccatcgtttcaaaggaggacacgtgtcaaactaagaagaacatggatcaatgcatgaaacagtaattatatttgaaaatggaataacgcattaaatacagaagtgacacagtatatttacaacctcctgactataaggtcttacgcgagataaagacatacaaactgttgcctcaagtattaacgagaaaccatacgacattggatgtgcaaggcgagacttcaacctctttacgtatgagtagacgtaagcaagatatgatgactgtgaaaatacttagcgtataatatacaaacgaagtttaacagtaaggtgaacccaaggaactaatagcaaggcgcctatctcgctataggaagacacgctcgatcagcttcagacatcttttactgaaatttatagtattgacgagtctgttctctctagcagaagctgacattcaaatgatgttaactgctgaagtactctttgttattaagaacttcaattatcaaaatgaagcgttgtaccttcaagtgaagaagtgacaaggcgtacattatcaacctcggagagataggagaaaaggctccagctcgctatcaaggtcattggtattgagttctcgtcgagacatcccagagcattgtgatttaaaacgtgtttaatacacgattatcttgactcagtaaagcgaattaatcacagctgtgtgatattcaaataataaccgcattatattacatgatatgtaatcaaaccccacggttttatgggataattgttgtaaagattacactgtaatttactgcctgactaggtaattataaatagaggcaggttagactgaaaaaggggatgaaaagaattcatgaaaaaaagaaaagcccaagaatagtattagaaatctgataagattgacttgtggactatgtnnnnnnnnnnnnncaaaaccacgtaaaaaaacctttgtgttcatcatttcctttttatttctttactgtttttatttttctgtgcaagtttatcactattcaggctcaaatttggttaacgaaaagctgcgttaacagtttggtgctttcattgagagcctttgtgtaaaagctaagaaaaaaagaccctccttacatataaaaaacaatctacttcatggctgaaaacacagagaacgttaacacgccacatgaagaaatgcatcaccgtcatggaaaggatcccatgggctccaaaaggcttcccaactcacagtctaaacggaccactcgctccagaaggagccaacctgagggtggccccaacactcagaccactcgttccaggaggactcaacatgagattggtcccagcacatgaacaacattttcaaggaggactcaacatgggaatggctaaaatcccaaagtgagagatgaatgggcccgtcgtggaggtgctcagcccagaagtgagggtacttatgatttgaaaaactgccatcttaggcgccgcctggaggagacaaaccgacagatggctaaattagagcgcaatgcagctgcagctagggaagcacaggggaataacactcaaaatcagccaaaacttggagtgaaaagaccacgaggcagacctcctggctcacgaaccaagagacaggaaaatgctcaggaagaataacctggggaaaatgagattccccctaaaaatatgaatgatcagccaaaagcctctcatagaaatgagaatgggaggctactagaaactaacgaacaagaaattcctcgtggaaacgaggaagatcctcggacacaacccggggaacataggtcaccggcgaggaatcactagcactcttctcaaacccatagagagagggctcgtacgaaccccagtggggaaaatactgttgggattttatgccctaaataaaacccgtttcaatctactctgatttgttatcaatgtaagattagaagtcatttatgttt

SEQ ID NO: 34216 - DNA, 3992 bp, Cannabis sativa
  modified_base (1698)..(1711): a, c, t, g, unknown or other
atctaaaatagatggtgggatgggatttcgatcttttgagcaatttaaccaagcattgttggcaaagcaagcatggcggctgttggagaaaccagattctcttattggaaaattactcaaaagtcattacttccctaaaaatgattttctacatgctcctcatggtcatagcccctctttaatttggcaaggaatcatttggggacgcgagttgctccttaaagggttgcgttggaaaatcggtgaaggaagacaaattcggattgcaattgatccttggctacctggtcgtgatactttcactcccactcttttttcgggtcctgctgatgcaatggtcagccatttaatcactgacgaacgtgtttggaatgtccctcttctgcaacaatggttctctcctttagatgttgatcgaattttgacactggcacttagctttttcaaacattctaatgctcttatttggcactatactacatcaggtgcatacacggtgcaatcggggtaccatcttgcaacctccatagatgatgctagtgctaataattgctctagttcggtttcacaagcttcttggtggaagtacttctggtctttgcaactccctcaaaaagtcaagatatttgcttggcgagttatccacaatgctcttccaattgcaacatctttggtaaggcaaaagatcattacagactcaacatgttcagtatgcaaaacagcgtgggaatcaattgggcatgctctatttggatgcaaatatgcaaaagctgtatggcgccacatggatctggtttttgactggagtaaaacttctgcaatgtacaagggagactacttggtacatctctcaacaatttataaactacaagagatggaacaaattatttgcacgctttggtcaatctggacaagaagaaacagagtggttcatggctcttctgcaaaaccagcatcgatacttgcctcctttgctgttaattacttatccaatttcatatcagcaacaaagaagtatcatacagcagcaacatctgctcctacactgcctacatcagcaccaggtgccacgaaatggactccgccaactggtttgaatctgaaattgaatgtggatgccgcccctgatgctaaccgaaacattattggagttggggttgttgttcgtaattctgctggtcatgtcctggctgctatggcgaaactgattattggtaattttgcatctcatattatggaagctaaggctatgtttcatagccttaattgggttattcagctgcaattaccaattactattgtggaggcagatgcccttctggttgctaacgctttgcaatatggatctactgcaatttcttcatatcatgatattttactagatggtactagtcttctttcctttttcccacaagtgaatgttgtacatgctaaacgctcagccaatatggttgctcacagcttagctaagttcgctttaggggtggaagagacttgcttttggttagaggatttacctctacctttttactctgttgttgtaaatgacattcctgtttaatttataataacaagtaacttttcctcaaaaaaaaataatttagaaaattcgactctcaatataatttaccccataaattatccaatttgcttgtcgcccggcctctttttggatctaatttattattattattattnnnnnnnnnnnnnntattattattattattaaatttagaaagtattattatttagtataattctaaaagtagtcgttgaaattaaatatagattaaaaatcaataaaatttaattagtgaagaatgacatttatttttataacaaattattataactacagtaaacaaaaaaaaatatataatacattataagttaactaataatatttaaatatttgacaaaataatatgttgtatcaaataaataattttacacaaaaaaaaaaattcaaaaaaaaattaaaagagagttatgtttattctccataaaaatataatacatacattatactttttaaaatacataccaaaaattatttatttaggtcttaacttttgtaaaaactcttctcataaaatcactaaatattatgatagtatttagtatgaataggaatgagaatagaattgacatttcaattctttaagatgcaactcaaaaaaagaatacaatgaaaattattttgttttctttaaatttcattacctataattaaatgccacctaaatatatatataatttaacacaatatataatccatatactaatacatgcacgccacctaaatatacatataatttaacataatatataatccatatactaatacatgcgaagcacgtcatatttcactagtattcatatataatacgttcatcaccatcaaaaattataataataatatggctttaggaattacatacataacactaacatgtttcaacttaagtggcattagtattattcttcttgtaacgccctgatacttaggcgcgctacagtaattttccaattaccgtaccacctttgctaatcaaaggatttttcttgaaaattttgacaaattaaaacttttaatttaattgctaaactttataaattctcatacctttatttacaaaagccgagatcgcgtatttaaacttttacaatattatcaaaatatatttataatctggttgcacaacgactataaaataaaattccagatgtcccgagattgaacacactaggtcgcgtcaccacgacatgcacaatcaccacccaagcctggagctcactcctgttcagccttcgcctttcctttacctacgcatagaagtagcaactgtgagtcaacagacttagtaagaaaagcatataacaaataatataataccgacttgtatcttggctcccatacacctaccacaagccttaacagatatgtaagaacattctttactagggtacaaccactgtaccacatacactacgtaccactactgtacgagtgttgtagagtttattttgtaccacgagtaacactaagtgttgtaccacacacacctcgtacctatccgtacttgtgctagtaacaccgtaacacactttttaaacattatacactatgccaatgcactctgtatcgctaccgtactagtgttggtaatgtacgaatcataacaagcatgcatatatatcacacatacatacattcacatatatacaatatgttttatgctatacttaccttgttttcgaattcaagttagttagacggcctgaacggaaaaccttgtgctggatggatgccctaaccactatcacataaacgggtaaacaacacgccaaaaccctaatttggaaaactcaaacctccaactaaaagttctgctattgataactaatacaacaataccctacttatcaaggaatcactcaaccaaggccctgaaactaacacgaattgatgaatcaaacaatctgtttcggtcaactagttttttataggacctctcaaaccggttaaccggtttgcactaggtttccccaaacaatttgaatcttgctcaaaatgtgcccaaacattctagaacacctataatgacctcaaacaacataatccaagaaatagaatccagaaacacacaaaaaaccaataatgtcattgttgagccaagtttcagttcttagaactcaaacttgctcaacccaagaattaagctccaaaaccaataaattcaagacctagaacaattccattaatccttagaaaataatcaagcactaaccctaactcaaatagtagcaaaatcttaattttaacatgcttgaactaactaacaacttaaaaactccaaaaagagaaactagagctcttaccttaggatttctctacttgatttcagccaaaacctctccaaaatcactctaaaaagttgaagttcctgttggttcaaggaatgcacggagagagagagagagagggagag

SEQ ID NO: 34217 - DNA, 2095 bp, Cannabis sativa
aatattatacctaaaattaattttatttataaaaatacttttaagaaaattatttgcacaaatacttatgtgtcacgtcagcatacatactgaaattcaaaataactatcaaaaattgaaaaaattagaaaaatcttgtttctaaaattttttattttttgggagttttgaaaaaaaaaaataatcatttagtcgcttttgatgtgaataaaatatcaattagttacttttccattaaaaatttattttagaattttatatatataaataataaaataactattttaatatttgcgaaatatatatttttctgtctccaaaaaatgacgactaatattaaaagtagcttttttgtttgataataaaaaataataaaattttaaacttaataatattcaatatatcaaataatatcataaattattgtaaattttttttattatattgtatttaaaagttatcatatagtatactaataaaatactatgtggtaacattttttaaataaaacaaaaaatatcttttaataacttatgaagtcggctacttatttaagatatgtttatgttattttcttaataactttttatattgactttaattatatttaataaattagtaaattgcaattagatataaaaaattaccattgaacaataaaatatttatatgtataaaaagttaccattaagattattagtataataatatatagatatttatcattttgaaacataatttatttttgagttaagtaaagaaaaacttattttatagtatttaaatttctatttggtatttatataaataattttagaaatatatagaaatcgctctattaacatctaagcttatgaggaatataaaaaattatataattttattagaaaaataaaaataataaaaattatataatttgttataattttatagtgcttaaatttttatttggtatttatataaataattttaaaaatatattgaaatcgctttataacatctaagcttatgaggaatataaaaaattatataattttattagaaaaataaaaataataaaaaattataagaatgtgaaagagagatataatttcatttcattaagagaaaaagacaaaagacaactctcttttgaaaaataaaaaaatatagacaaaaagattaaaaaaaattaataaataaaaggtctcatgcattgacagtagagagattctaactcttgatggctggtcagtagcaaaagaaaaagttgagttccggtacacatttaccgatttattataaagagctcaagtattaacagtattaaaatatgtaacatattttcataaatattttcaaaagtatgtattgtgaggtaattatcttataaaatatctaatctaattcgcacgatctaatctaatttaatccgtacagtatggattggattagaaaatttgaaattcccacttgtgcggattgcatgttagttgacatataaaagtaactgatctaatctaatccacagacatttatatatatatatatttaaaaaaaatgtatacaattaatattttaatgtaaataatagtaatttaaaaatttaacacgcaatacaaatatatttcaaaataggatagtatcgacaatactacctaaactataagttttgtaacacttaaccctacaaactaattgtttggttccaaacagacatcgcgttttgatatttacttttccatccaaaatgctatgttaagtgccaagtaagataggtgacatgtataaaaatgtacatttgtcatgttcttcttatttgacataattttaattattttaacattaagtaaataattataaaatagtaaaaataataaacaaaattttaattttttttccttatttttttttctcttcttctctttcttgtatatttttccttgtaaccctaatttcccaactgcactccctatcccttccgttcttcttctcacacaactccgacaaggtcacctccacccaccttttacccaaacgaaccctgaaactcgacttcccaaccttgcaaacccaacctgtcagtctccctccaagcctcgaggcctaaccctta

SEQ ID NO: 34218 - DNA, 6551 bp, Cannabis sativa
actctctacttgatttagcattttggataaacatttagaatattttttaattttttttattttataattatttacgttatagttttttaaaattatttgtaattttttttaaaaaaaatctagacaatttaaattatcaaaaatattattcaaataattttactatgtgcataagaaaaaattgtcacattatttaatttttttaaaaaatttactagtagtattaaataagtccaacacacaattatgaaaaaaaaaattaaactaaactaaaagacagagatctacgattataacccttgattattaaagaaaaatgtgtttaatttaaacaaaataataatcattttaagatatgttattttcaattttttccaacatgatcaatttgtatttaaattgttagatctcctcggtgaaacactattactattataaatttataattagctttaaattcatatattagatataattacattttgacaactcttattttttttactagactataataaatttttcaaactcactttttataatagtaaattactaaagaacaccaatagttattattaacattattatggagtgttatacttttattaactaattgtaaagtatcccctcatagtgttgtaaatgttgttagactaaatagcaatacataaaattattatagtacaaatgtaaatgcgtttgtttagccaaaaataagattaaattgaagccatagagaatagagatatgggtccaaaactcatagtaataattgaggaataggcatgcaaatgttcaaagccaaatatgttttcacatttgtttgttgattccttaaagtctcataatcattgttctttttaaacatttttaattttcccttagatcatgccaccaactaagtttgagtggggacaaaactcaaatattggctaaccaattgttatggttatgggaaccaactatcatctatcaactctcatgccaagacaaaaatcttgtttttttactattaattaattaaaaggattgcccctattgtaagtagaagatatttaataaattaattaaggtccaaatttcatcccatgaaaaaaataattatatggttattaattcttcattaattaaaacctactaaactctattagtaacttatgtgttttctactcaagatatgcacgtatcaaattaatgatcatgattgttgacatgtattgctatatgtatttaataaaaatgaaaattgtgattcaatataactatgttagttactttgatgtattgttttgtgcatttaggtctcgtttggtataccgtattgtattatattgtattaataagttatgtaaagttataatatgttttcaataaactcaaccgcaacactgattacggtccggcatccagggtctaggttcgggtccgtggtttgggactcgaattgggtctcgatccggtctgagtcctgggtctgggtccgaggtctaggtcccgagtctgagtcttggcttcgggtccaggtttggggttcagatctaggtccagtctcgggtccggatctgggtccgagttcgagtccggtctgagtttgggtccaggtttggatagggtccaagttgggtttgggtttgatctgggtctgtgtccggtccgagtcaggtccctggatttgggtaagagattagggttgaccccgaccatttattatgtattaaataatacaacttacattatattaaaaaatttggtcgtaataattaatacaatacattgttttatccaaacatagtgttatttactatttatatacgacccttatacgacttaccaaacgagcatttaatacacattatatatacttaactacataatatcattaatatattatacattgtaataattaatttttttagcataatttgcaaccaaattttctgaactttgaagtttggcacgatcaaccccttagactgaaataattagggatgaactctccaatctacaaaatcattttgctctgtactcctttcgtccccttgggtacgttaagtgtcaaagtgaattatcattgtgtacacaagcgtacatgtgctaaaatttaattatgtcatctaatattgtaaatttgagctatgagatttgtttagtgaaactgaaaaaatcgtgtggtatcaatctgcttttaattactagatttttaaattttttttgcttcagttactggtgtttttacttcggcaaaacttttttttaatcaatgcgcgtcgtttcataatcaaagtaaaaaaatattattatttgcgtctatgatgcctatagcgtcgattataccaatgaaaataaattctttatgtgtcacttaaaaccgaatcaaaaagtcttttttgtagaagtaacaataagagattttacattttataaaattttcaatatgaattttttattgataataatgtgatggtcctagaaatcattcactcttttaagcttaaaaaaggtaaagagaatttgtttgctattaagattgacctggtgaaagcttatgataaactcagctgacaattcattgaccatgtgctcaacagttttaaggtccctaaaaagttttgcaattggatccgccagcgtattttgactacttcgtttgatgttcacctcaatggtggtaagatgagcaacttagttcctgagtgtgggttgagatagggtgatcccctatcttcgtatctctttatttgggccgtagatatcctctcgtgtattctagagaaggccatcgattctggttctattagatgtatcaacttgagtagagatggaccaatgttctctcatctcttctttgcaaatgaccttatccttgtggacaaggcgactattgcagaggccaaagacttttggcagtgccttgagaaattatgtgattggtctgggcaatgtgttaataagcttaaaatctctattttcttcagtaataacactagtgagggtatgaaaagatgtatcatgcaggagcttgggcttaacatggccactacaaacattaattacctgagactcccgttgtttatatccaagcaaaaagaagttgattttaatttcattcttgagagccttgtctcgaagcttcatggttagaaattaaaaactctatcaaaagcaggtcatgctacgttgatcaagtcagttgggctcgctatgccggtctacactatgcaaactactaagctttcaaaaaaagtagcctccaaaatcgatggtatgatcagagatttctggtggggttgtgagcaaggaaactgaggtatctactttaaggtgtgggatcgtttatgccttccgaagtctaggggtcgccttgggttccgtaagaccctggaaatgaattaggctttgcttgcgaagtggggatgggcccttctcaatgatgagcaatcgttgtgttgtaaagtgttaagagctaagtatcttaaatggaaacctttcttggagggttattataagagttaagactcttggttatggaggaatgtggtgaaatctaaagaaatcctgaagaaaggtgcttgtaaatttatttctaatgggaaagataccaatatctagactgatccttggtttttacatggaaaggatttctatccgaagcccatgaccccagacctgagggggtgaataaagttgcgaagttactcctgaataacggggattgggatattcctaaactccaagccctgtttgactcgaaaacaattagtaacatcattaaaagagggaaatccagtggtcttgggggtggcatgtgggtttggacaaaagagctgattgatttattcactactaagtctgtttagttgaattaataaatattttattttactaagttattttaagaatttaaatttttactagcagtcgtgaattatgatatagttatatcataaatttgttatactgggtaattaacttaaataatataaaatacgagattttttaagtaaaatatatttatttaattaaatatttagtcccaattattgaaattattgtacaaaaagtagaagattctacactaaattagtgtaatttccacattaaattagtataactattgaagttcatcttagtaatacaatatctagtaaacatgattgttgtttttttctttttaaaaaaaagtactcaacatatatattaaaaatgacactagatttagaaattatagccttctaattaagtaagatagattaattatttgtcactaatattcaaaattacaattgtgacataaaaagaaaaatattgacaattaaaatatttagcctcaatccttttcaaaaaaaaaaaaaaaatagtcctcaacaaataaaaattaaaaacttctatactactagaatggtcactgaaaatgcataaaactatgatattataaaaaaaaataatatcttattattattaatttgttttttcttaaataattacaaaaattgttgttgcatccatgactccaaaattataaaaatagactcatcttttatacacacgcatggaagaattaattattagtacttttgttatgtgacaagtgcgatgtgataatgtgtagttttggctctttattttttttggtcacaattatgccacgtaagcataattgatatgttgacgggtaacctattaattaaggagtataattagtggtgatggagggaagggaaaaaaggaaaggtcatgggttcgaatttaggatcttgaaactattaagctattaaatgattgtaaaatactattacgctacactaaaaaaaaaatattaattaaggagtattaaaaattaaaaagatgttttttttttatagtacattgcaaaaaattatgacagagaggcaaatcatccatcataacagaggcaattactattggaaaaataccttcattttataaactaaaagttttacaatacaaaatattcttaattataaaatacgccactttatttacaaacgtgactgaaaaaacgcactcacaataattattctccattatcagtcgtacatccacaaccagtagatcccatctcccatggagcttaggcaacttatccaacattgccacaaccaaactacaatcagaaaaaatcatacaacgctttatagataatagaccacccaactcttttattttttgaataaaaagcgtgtatatagatatcaatagatctcacggtcattacagaaaagatttgtcggaatggaagaaaatgggatacatccaaaccgctggtgggtaaaggcccatttcgtcacattatgggctataaaattacaggtcctactaatactagagaaaatacaactaacacacaaaggagatagtctattacaaaaagagacatagttctcaagcgcccaatgaatctccttccgattaagcgcattgatggctactctcgagtcgttatctaccaaaataaacttgcatctaatatccgaagctacttccaacgccaagcatgcaaccgcttccccacatagagcattcaaaaattctaacaaatccgttccaagatggtttcttactaccactgcagtacacatgctttccaaacccactttaacatcacagttcagtttaagccactcctggggagggggatgctagatctctaaaggcctcaggaggagagaaaagagaagcatgatgctacataagagatacgaatagaatcaatgcaatgtttaacattatctagcttattagtgtgaaccttgtcattttggacccgccagatagaccactcaactcaatcacatattttatagctaacaattcaacaacaataagggaaaatgacctattaaaaaaatatacatttgcgctgcaataatctctcccaaatgatatcgaaccaccccaaatgtactacaacactcgacaacctcataaatcgcaacatcgacattaatcatcaaatcacccaccacaggaggttgccatttacattttggcctaacctcattcagacgtccacagtgtttcgtatcccaaaactaatgcaaataatcagatacctaatccaaatcccgatccacaaaaagcacaaaagatttatgtaagacagtttcacataaccttccacgctaagacaataaagaaatcaaacttatcttttggcatcagcctttcaatgcagcttaaaaaaaataaggtcttcatcaccacattttcgaaccaccttcccaaaacctgcaacttttcaaaaaaaaaaaattgacctgaacacaaccctaaataacatggtaccaatcttcatcttccttccgcaaaccacattacaacaccccaccacctccctcattccactttctgtagcaccttagaagttggcaaccacccatgacaaaaacgccaaagaaaatgtttgatcttcagtgggaccttcaaaccctatacccgtctccaccactgttccatcccatccatatcctcctccacctctctcttcttgatcgccacttgatacccactttaaacaaaatactcaccat

SEQ ID NO: 34219 - DNA, 1282 bp, Cannabis sativa
tttttttgcatttttacggaattccacacagaaatccttatagcaactaagggagcaacctaaatcacaaacaaaatctgtatagtaagccacataaaaactaccaaagaaaccaccagaacaactcaaatcataaatttaaaaataaaaagttaaaaaatagtatatggagtaattctcctttaatttatatatatacatattaatagagtaggtttcgatggttacatcaaatatgtaattatgatggttacatttatttttagccatttgatcattattgaatgattctgattaatttacaaattaaataaaaaataatctgtaacctgatagtaacctaatattttatttccttataaagctttaattaagactaattttatttttaaattaaattaattatacttattaatttatttattttttttgcaatttgtttgtaaacaaggtttttttagcaattaatttttctccacttaaatcactttaatatttgtagcaaaactccttataatttgaaattataacacataatcttatactttgaaataatttcacaaataaccctataatttgaaattattacacttataaccttaattttaaattattagacctaaatatttagttttcatttaataatttatttaaaaatttaaaaattatatacatacaagtttaaaatctaacaaatattaaaaaaataattataaaactaatgaataatgctcaggtggaccctaccccctatttttttataagttgatatatttatatttcattttactttttaatttataactttattaattttagctagaattaatgtattttcatcttttacaatattacacacccacgtgtcagatctgtctatttcttcctcactgattggtattatctatcatctccataattttttttaatggttatctacatttacaataaatgaaattagtaaaaaaaaaataaataaataaatatgtagacttatttttcctctcatttccttaagtgctctctcaatcaaaattgttatcccgccaacaaagattatctaagatccatactcacaagctaccagatcactgagatcgggaagaaatagatccatatatattagttctactttatcacatataatataaaaaatattaaatttattatttgttttaagctgaaaaaattttgatcttattttttttttattttttcaaatgaaaatatttttttactaatcaaatgagatttattattttttttctaaagatagaagtct

SEQ ID NO: 34220 - DNA, 1557 bp, Cannabis sativa
  modified_base (882)..(890): a, c, t, g, unknown or other
  modified_base (956)..(963): a, c, t, g, unknown or other
  modified_base (1127)..(1131): a, c, t, g, unknown or other
  modified_base (1333)..(1334): a, c, t, g, unknown or other
ctatgcatggtagactgaagacaaaagacaggctgataagaatgggaatacagatagatgaaggctgctgcttgtgccaggatgggaaagaaacgactcaacatctggtttttgagtgtaagtttgcagtggaatgcctcaacagacttaaggaatggttgggacggaatgtaagaagtaagagtttgcctcacatcatcaggtggatcggaaaattaaaaataagtaagggtagaaagcaaattctggctgctgcaacaacctctctggtttatcatctttggacaacaagaaatgctggtatttggaaaggagaacaggcagtaataggtcgagtaaatgaagagatagaagagaagttgaagatgagattaacaatttttcaacctcaaaaaatcagcaggcaggacaaagaatggatccaatctttgtaaaagaaattttgcataccaatactggtttatctaatttgtaaatagagatgatttttagggcctctatttgaggtgcctttcgtctgtacgaatgattggttttatgcaatacaactcactgatttatctaaaaaaaaacgtaattaatgaaacatatatgcactatacctaaggatcaaaatacatttagccattgattctttaagcttcagtcccacacaagctttgatctacaaaagaaaaaaaacgaattagtgtgggtaatcgggcttccaagctctctctactctctttagatggatttaatgtgttttcacaaaatgagtagagagatcgggggtcgagaccttatatttatatataggtgagaccttacatcaaagtctctgtcacattatttctattaagccaagctcaaaggatatcatcattttacttctatgtccannnnnnnnntatagattctgtatctatgattagtgctcccatcaattgaactaccatgtccttaatctatatgtnnnnnnnngatccattggtcgactttaacaaacacattgaagaacagaaataatacagctaaacgggaacctaatcatctcaggattgagatcatttatccaagatcaactaggtgatattgaattgaatagatattacaatatgtttattatatcttatccaagttcaatnnnnntcccttccaatgcatactccatacattcaacccaagcttactttaaccaatgccttggaaagtacataacacttatccaaggtgcaagtaaactccattgtagattatcctatcagttaaaccatgtgtattgataaatcataagaatgcatttaatcacacaacactaagaatcagcaaccaattccccttgctatggctnnttcgaagagagagagagaggaaggaaagagatgtaaagactcggttttgaccgagtcaaatgtttatatatataaaataataattaaataataatatatatatgtaagaaaaaatttatatatgtaatgaagcagtacctgtcgtctctctctctctctctctctctctctctctctctatccatcgatatcattttctctctcttcaaacacaaacccaaaa

SEQ ID NO: 34221 - DNA, 1336 bp, Cannabis sativa
tcacatctaaaaaagtattagactctgtggtgaaaaacatattatgcgattggacttttgcacaagattgtttcagaaaatggcaaacagtttgatagctagatgtttacagatttctgtgtgacacatgtaatcataagaagtttctctgcaatagcacaccctcaatcaaatggtcaggtcgaggtagtcaacaagacactcaaagacaccatgaaaaacgacctaaatatgctaaagggaattatccggaggaactaccataagtattgtgttcatcttaaacaataaagaaaatagcaaccggacagacaccatttgttatggcctatggttatgaagttatgctgcccatggaattagagcctttgtcccataggagattaacctacgatcaaggagctaatcatgcccttctggtagaatcacttgaagagattaacctattcagcgtgggacttgacttcaggtcaaagagccaattagtgtcatgcagggacagctcaccccatccttgtgtggcgtagaggatgaacacgacggacaaatactagaggcacttgtgggtgaattgggtcaaacttatatgataataccctgcagtccttttgaagtagggaagtaagggtaacattaaaccatgctaggtatgaacgcccgaccaagtgcagtaaccttcccttgggttagtcgccacctagatgggggagggaatgaagcattcaacattccctaagtaacaacaattgagcaaattcttcatctttgccatggtcaccacggatggtggagagacccatcgatctcctagtgcaccttgcctcgtcaaggggatatccttattgtattcttttacagcatagtctttgctggcctacaaaacttcaccagcctcagacacgggttttccttcttcattgtagccacagaatggtagcacccgagctactccctcttcctcatctccttcagcctcaagaggagtagcaagatggacctcaccttggtcctccatctcttggacttaaacgtcccgaactttgtcctcctcttcagtagcaggtcgtgccttttctgccctaggcaaggtggcaagacaaataatgtgtgtgtcggacaatgaaggtttccaaatagtttgcttggttcgcgccatcattctacatttggatggagtttatttgcgtgcctagcaaaagtcacggaaaaagtggcaacatgtaataccctaaaattaaggaaatggattagcaaagccctaactagttaattgagtattattgtagaattatattatattataatttattatatgcgaattaatatgagaaatgac

SEQ ID NO: 34222 - DNA, 3625 bp, Cannabis sativa
atatcctaaacaattagccttcccatataaacttagaaatttccaacctcggtccaaattggaagtgaatgatgccaaaattagagaccatctgattaagtcgaacagagaagagactgccagtcgttataggcgattcctgcaagagattttcgagggcaatcattgttttttatgggacacagcctggcctgaacccacaatattaacttctattccactcgggagaccaatgtttttacccaaagtcactgttgcttttgaaccaggtgacctaaagtttgacattatgtctcctaagcctcgcaaatcaaagaccccacaggatcccagtgttactttcaaggccgagcttatgaaatccaaagttaggtcgattggggcctatgttggcagtttcttaaagttctgctgcatcaagcagaggaagggctatgtcataaggtccgtggcacctaaggaattcaactattttcctccaaaaaagggtaataggagaggagtgcagtgggcctagcacgagtaattcctcaggcattggagcctggagccttgaacatatcaaggttgggacagtcctttccctaagagattactttaaggagttctgctactatctcggggttgccccattccaactgaaccccatttcgtataggatccttgtgagcctgaaggtcctatgccatatcttagaatgggagtgccctactcctttagagatagcctgcttttactcagtgaaagcagtcatagtgaggaagaatgctgcgggaggcttctactatcttgggacttacactggtgattgaaagatcatagttaggttgccaaacaagacagattttaaagaagatttattctagatgacgggcctctctccaataaatacaaccacctttggcattatacgtaagttcatttccttagaaacttaactttaatttttacccttaaaggtcgcttactaaacttttgtctatttacagcggttcctcagagaccagttcctactcctgtgagatagccgagcgcgccacaaattctgttaagtcttccatacgggctatgagcatcagacttctgattaaatgagaagaatctgaagaacgttggccttcttgcctcaaacaaatttacttgtgattacaaaatacccaagtattctttgtggtaaaaggttctgtctccaaccgaggaggaaatcgaagactttgtggctcacgcacactatcatgagagagctgcccctcgggaagaaggagcatcccgaggtaatcaatgtggatggtcacccacaatgcttagggtggaatgtaacaccttagcatctttctgagatagtcgatataacttttacacttcgaaccccttcctcatatgtcgcataactcattggtttgatagttggtacccgaagtttcacgtttagactagttgtactagttcttattatgggattgtcgagcagtacgggaccatgttggataggtcgggtcacatagattcaagctgggatttagatccactgaacccttataatatatttatgatcacgggatctaggaagtttagtgaatattatagtcctccctcatcatcttctaacgattatggtaaccttctcaagtgggagactttcccattttcacctatttattttgtttaagtgctaatgaactcctcttgcctcgcagatatggatgtggattgggagaacatcttcaagagtcctcccccagccgaaaagaagtctaagaagagaattgcctaagctggtgaggcctcgggttctgccaaagaacccaaaaggactaaaaccatgaccaacaagaagaagtcctcgagccagctaagtctctcgagaaagagaatgaggtctctactgcgggggttgtcgacgagccacccactgggttagtgcaccgggtgaaattctctagttctcgtccagagatggttctcctcgagccctcctatcccctacccctcaaagttgggactgaagggtcacaactcagctcgtagcatgctaccaacagttggcgcaacctcttaactcttgggtccagcgactgggatcttactatgcgaggtagctctgaggatctggctaaaaggagcgaacttttgcatcaggttaattcccctttcctcttgttctcacttttcatcattttaccgtttttactatctttgatttgtcttctcctcgcaggcttctttcctctcccatgtcacacatcatcagtcgtctaacgggttgaaatgctcgagactgagcttcactagtctgggagcatagggataccttagccaaaaagtggaacgactttgtggcctaggtctctcacacaaaggaggaggccaaaaagtagcatcaggccgactgaaagaagatcaaagaacttgaggattccctcaagtccttccaagctgatcacgagaagaaactcaaggagttggaagctgaaactaaagatagggttaacagcatcagttggaggaccatctatcaaatctggtcagccaaccttgatttggaattcagtttcttgggtgataattgaagcatgcttgccttctgcgagaagactcagagaaaagaactatgcaaggaataagagattgaagtagaacaagaatatccaaccaagtctcctacaatgtaggcttggtttttaagttggttttttgttttcatttaggaaaatggccatatggcccagacaatggttccccctttgtggctcttttcttttataaagacaaatttgcatcgttggatgaccaactttgcttttattttatttattgccacatattttgcattcgaacttaatatatttgcttacttgtgttttttctcacaatttaaacaattatactttgatcaaattttaaaatactttttccgttgctcttattttcctttgatattatttaagtagttagtaatttactatgtgcgcgagcagttattatctgctatgcttttgatttgcaagcagttatcagttctgcttcgcgtaaacagttatgatctgttttagacaaactttaacatacttttaataattcatctcgtgaatcactttgtatatttttaattgcatgtatgaatagttaagccttctattcacaccttaagttaggtatttcttcaaggtatcttggtgcctcattttaatacattcctataaaatgcgagtcgttaaacaatcagctttgcatgtagcttatcgttgtttttatgagttaaatctcatttacaactgctacttttgactttgcatcatccacagatgacttcaatcaaccacttaaaaaactcagatttttttttttaaatggagggtttgcaatatattatgtatttccagataatttctaattgatcatacacatatatatatgcccttcaagtaactttaaaaaataaaactttgtaattacttggaaaataattcaactttattaataatcgaagttcaaaatattacatcagaaagagagattgcagcattaatttactggtagtagggtcgcaaatgctccacattctagtggttctttattagtgagccgttaagacgagctaatttataaaccccggttccaacta

SEQ ID NO: 34223 - DNA, 4174 bp, Cannabis sativa
gtttacatttgagtttacactttatatttttattgggccacacgctatattttaaacaagtgaccacgaagttggagatatccacacttctcatctcacttggagggataccatgcctagctgtgtgtgcccctaaaaaatgtacagtgttccacagttaattattttgtttattaacatacacgagttctataacttaaattaaagcttaaagcaagatgtgttttcaaccaaattacttaaaagaaataacacttgaatcccttcttaaagctaaaacaaatgtatattttgaaaatagaattattttcagccaaaattcccagaaaagggaagaacttgcctgaattctttcttcaaagttttgaagtgttgcttaaaatttaaaattattaaaatggaaaggccttgcttgaactcctatggacttcaactatatcataactaagagatatcgtctaaagttcatagcgtgtaaaaccggtctccaaaaattgtaaagaagcttaagtagttgaggctccgcaaccatgcagtggtccgggaacagtctaaaaggcttattcgtgttgtttatttgcattgtaaaattttttagtctgcttaagtttggagactttataaagggccaaggccaagaccaccctacttgaaaataggaagtagggagaagggttggaggtcgagcgaaatccaaggtttgaagtagtgatcattggaaccacacgtttctaaaacaaccaaagaaaataacctttaaaatgacctaacaggatgacacgtaaagacttaaaactgaaaaatcaaaagttggacaaaacatgaatgtctgtaacaatgcctcacgacaaggcaaattaagttgttcctgcacaaaagatgattgtcatacacagccccacagactaggaaaaaataaaaaacaactctgcaaaaaaagaaactaaaatgtcttaagaaaagagatagataatgaagaacggaagtggtccctattggtcttgagtgggagaatggaccgttaagtcgacttggactgagtcaccaactatcttccgtggaagatctggattagactcaactacatcttggaaaaacccctttccagccgcccagaggatgccttaacttccgcaaggccttgaggacttaagacttcatcgtctgactcctcgtcgctctcaatggtaaggaaaaattcctgaagatatgtgtcgcgctgtatggcaagcactctcttggtagtatcttctctctcttcatcaccaagaagccggagtatggtaagatcaactttccataagttataaatgaccatggcgtaagccctctctagggaacgaaggcagtatctctctaccttggcttccgccttagattctttagtgagagtgtccagaatggtctgtaggcagtctctctcattctttgcatagcagccagggcaatgtatgctttcacaccgttcaccagtcgtcgttcagcttccttttggaattttttgatagtctcttgacgaaggttactggtattgcaaactccttgaaagagcacgtctagattgttgtacttggtcatccaagattccttctatttcttctcttagttataatcatcatgcaaaccctggataagtaggtccttttgttggatgtctccctagagggtgttaacttcttggatttgggcagtgatagttgcagactagagcatcacccgggcctcagctttatctttctcctcatgggaaagacaaagtgccaccttggtctggcctaactcttcttgaagggaacgtatagtctcctcaacctttttcatagcctaggccttgtgttcaagatatagtttttagtacttggagtctatttctttctctttaaccaccagcttggcatcacagtcttctttgcccttcttaatgtcaagtgtagcctgggtttggatttgctcaacttttgcgtgtaaggccccatttttagatgttaaggattgaactttggcgcgaagacgactcagttcaatagtcatgttgcccacttctttggctgtcgtctccgtaaataaacccatctgatgaagaagtagaaagttaaatgaccttcaatacttaggtgttatagcaaaaagaaattttttttagaaggttgaggcttactcctgctgcctgttgtttggtggccactaataaagtgtatgggtcaacactactgcttacaacccattttttgaacctgagctcactcatgctaagaaacacactatccaacatctccgtagcaaaaagagctacgactctgcagctttaggcactaaggtctgactcaccatagccatgtccaacaccaggctaggtgaggagggtagatgaattccttctgtaatctcagctgtcttgatggaagacaccgtttggcccatttttggagcatcatctgttccctctcatgatgcctctttaaggtggtagtagattacccactttggtaaggtagtcctgacccagaacaggaggcctcatggggaaagaaaatcccagttgaggaatcttccccaaagtcgtgcgctgagttgggtcactagaggtagacttaggagttgaacccttaagatgatgttgagaggctggtaactgagactggcgtgaagtagactgcgatggcactatttggagctagtagggagacaaaaccgattgtttttgtgattgttgtagttgttgttgctattgagggtgttattggtgttgtggttgtcgcagttgttgtcgttggtgttgtgtttgttgtcgctaatgctattgttgttggattgggagtggtgcaatggaggatttgttatgtgccgtcaagttcgggaccaaagacttgatcttcttggcactgtgactcggggaagagcttgatccgttgcgcttggacttggtaaaagcctcatttgagagagaaacgacccatccaggttgtcatcagaatcccctatgtttggcacaatgtcacaaattactccatccataggcaaaacttctttcgaggttcgctctcctggagcgactggcacttcaaaagcctcccaagaggcagggggctctttcctaccacctaccagagttgaagagcccggtactagagatacaaccttggtgggaggagtgatctgccttatatcaaatgatgaagaggtagagggaaggcgtggcttttggatcctggaagcccaggtcttagacttccccttacctcctccctgacttttcttagccttggccagagcagcgttgatttgactacccaaagatttcaacattttgaactctggagtacctgcacataaaacaacaatatatgcaaataagaaccacaaaactgatcgatctcactaaaggaaataatgacagcaaaatgagaaatctactaaagaggctcgtgcatgagtgcagccatttagtgagacgctataagattgcccacaagcaaaagcagctattcccccatgaccaagaaagctaccagattcctcaaagttgggtagagacatacacattaaagggtccactgtaatagtgtctggaagtgctcctggattcttaaggctcctaacgatttgatctactttatctatgtaatccttcatggggtatctacgacagtttatgcctaagaaattttttttcaaatcctccatgattcccttgggacatgtggtatagactggcggtacgaagaatgcagaagagtctattacctcttctcgaagtactagctcccagagtccccacatcggggtacgcggcaacgaacctcactaaaatctcttcctcctctgacaaaggatcgagatggtgtgacaaccaatgagatttcaatgtgttgtcatttctagctgcctcagtgatgatagcagccaactcagcgaaaatgacctctttcccctcctttggaggttaacgttgccctcagaagttgacaaaactttataatcagactagcctacgaagaagtttggtcgtcactaagccctcaactttaagttgatcttcggaggaggccctgtattgagcctcctttttagctatctcttttgtcctagtgctctggggagggagttctactgaatatcatgcacattagtgaaactataaaaatgtagcagaatcggacccaaacaggaatta

SEQ ID NO: 34224 - DNA, 3176 bp, Cannabis sativa
aaaaaaacgataaaaaaatcttacatgcatgggattatttatcccaccctgctagatgggataaataatctcagacagatgaggttagctggactagttatccacttctaacatgcccaaaaactggattggacaaattagcctgtctaatccaattcagtccagtcctgcgtaccaaacgggccctaagagtattatttatgctaaatatgaattatgtaattattataatttttgctcggggacgacgaaaaatgcgatgaatgaccgttagagtcacatgagtaagtttagaacatatttcttagcaggacaaacatttaagatatttagaatattggagttaggcgggattataattttggacttactctatttctctaaaaattccactaagtggaaaaataaataaaatcttaaggctaaaatttccaaaatgtccattacttccttcataaataaccttaatgactagaggtaaaatagtcaaaatacattacctcacaatcacataatttcgacatacgaaatgctcataagtcttttcccgctaattctaagatactaaactatatctaagtgactttaatggtcaaatcgtcaagttctactattatcgggcataacaaaacataaaaatattaaaatttataattaacatgcatgacacaactaaaatacaataaaatttccataactgaaaaattattttacaaatgcttattttttacaataagtcttattttgtactaatgtacgtatataacataaatagtatttaaatcactaataaactactaattttcgtatctaaatatgcggtaattgtacaagatttgggtaaagttctatttgttaaaagaaaaatgctaacgggtactttaaagtgctaaacaatacaagaaatgatatattgctattgatgtaaatcaatatagtgagtctcacatattttaatttaataaataatataaaaaattactaattacttaaaatgtgacacatcaaggtagtgttaggtaccttgctcttattaaaacacttctctttcttttggctattttgtaatttgtgagtttctgatcaatcaattattgtctcggataagaagtattttgttagaatcctctttgatttcgatgttataataagaaaaaatatatatacataaatagtgaaattatctggatttagattttaattaaaacatttgatagagatgggcagtcaccggccgtttcgaaaaactattctttttgccgactttatttatagtatttcattttccttaataaacataaaatatccattcattttcttatttttaaaataaaaaaacaaaagtgacgacttaggacgacgaggcactaaatggattgacaaaaataaaaataaagatgaagctttttatgtttgaaatctgtcttaaatatcaactcaaatccacctaaaataccaacaagaaggccccagcaaccatgatattttcactcatttgttatcggaattatactattttctattgttaatttatttgctttcaaattaatatatttatatctatgtgatatttgtcaaattattattaaaatatttctttatataaaatttgttttaaatatgattaaattatttatctatcaaatacataatatatttcatgcactaaaaaaataaaaaatatttaactaattctaatttttttaaattaatatttaatttcttgaaaagctaagaacaagaaaagaaatgaaaccattagttttctaacttttatatttttaatattaaaaaaatagatttcaattattagaaatttattatttaaatttgttattaatatataatatcttacctaattgttattttataataactgaaaatgtatttcattaaatatttattttcagtatgtttgtaattaacataatattttgacattaattaatgagaactagtattaaaaacaaataataaagtaagcactttgtcattatttaattagagtttataatatttttcaaaacaagtaactattcaacacttttaaaagcgtcactcttatttgttgtttttaaattctataactaataatcaataaagtgcttatatattattcattagttatgccaataagatatttgtgtattttactttttaagttgtgagatttgtgtgattttttacttatctgttgagatttgttccgtttaacttttaataaaattttatctttaatatcaatatatactctaaactaatcattcatttagtagttatattttcatgagacacaattgtacttgcaataaattgttttaatgtagaggtaattgacaaactatattgtaatattctataattggttaacaatccctatattattcactaaattaaagtatgaaaaatttaatattgaaatgcaccaatattactatactattttgtgatgattgacaccttaaagtgctatatgctaatgtgtgattttatttttgaggaatgctaatgtgtgaactttatttcaaatgttatttaattagccctaccaataagatatttgtccactttgctattttttaagttgtgatattttgttatcaaaatgttgagtccacactcttatggctattagattgtgaaatttttagtagagttttgatattgtaattgagttaaattgactgtattttaatatgacttccacaagtaactcttaatttttgtttacaacaaaaaataaacattaaagcacttctaatagatgagctaaaatagttcaatctttaaattataaagaaaaaattataaaattgagcttccaacaagtaaggtaaaccttagttattttacatattttttagaatagtgcgcttagctaaatgtagagataactattcattaaactaaacatattttactattattttctttaacttttctatatatgtgtgtaatattatatgaattattaatataaaatgaataaaatatattaaaaatataatatttaaatgatataaagaaaaaatagagaaattagtgtatgatataatgtaaaagtttgagttaaaataaataaagtagaattttagtgatgtattttaaaaaataaagtgaaaaaactgttggaacttggaagtgctagaaaaagaatatatataataaaaataata

SEQ ID NO: 34225 - DNA, 1556 bp, Cannabis sativa
  modified_base (1501)..(1507): a, c, t, g, unknown or other
gtttaacctgtgtaatttgaaactaacatttgtcaaacatacgaaacaacagtggaacaacccaaaaacaatattagaaaaactatgacaaccccaatattaatagttctaatatttctgcttaatgtcaccatatttaatggttgtttttcggatgttctggtgttgctgttgtggttctgtctgttggtgtggaagatggagacctcatttttatttttggtatttacagtataaaagaaaaaaaaagtcccaaggaagtataaaagttatttttgcagtatgacagtatttttgtaaagattgggtcaaaattcagtatttttgtaagtttccctttttaaattggatatataattacacctaatttttaatatttaacttaaaaatatgaagaaaaatacgtaaaagttaaatatcattatatatttaactttaatactccataaaaatattatcgttacaagtgtaatgtaactaaaagtttgaaataactaaaataataatattatcaagtaataataaaatagaacaaacatcatgagaataatcaagtgttacaaattcaattaaaaaaagccactaaaaatataactaatatatatatatatattttattttattactttttattatataaatcaatacaaataattttttaatgtatataaatataattggattggatcaattatcaattggattttgatattgaaatccaataaccaatccaattcaattagaatccagcttttatcatccaacccagtccaatctcaatgtgccaggccatagtagtgagttgttaaatgttaaaatattacatatttcttggtgtaaatatacaaagttaattaaattttaaaaaatatttttatgaaattaaagttatatatttgtatgttgaaaatattttatttaaatttaattttatctttgtttataaataataattagtatttatggcataatggagaaaaagatataaaaattaagaaaatgtattatttttattaaaagaattacaaattaattagattttaaataaatatttttaatgaattaatgtgatgtatttcatgttgaaaatattttgttgaggaaattacactacatacctcttttaacttgatgattttaatttttaccctcactttcaaaatttattatgtttatctattttttcaatcattctataaattttacccctatcacttcacaataattttcattcttctctaatcaaaaatttgcccaaactttcacacaaacccacattgaaattatgtcttagttatgtgagtgtgtgaggataatttgggtaaaatactcataaaaagaggtatatttaaattaaattttgttaatgtataaaaaaaatggggtatctcgctattttatttgtatttaattttgtttgtgtttgattgagataatagtatttgtaaaaagaaagaaaagatattaaaaaggagtaagttaaaaaataccacttttattnnnnnnntaatcaaatttacctctaattttatatttaattgaaacatacctctttt

SEQ ID NO: 34226 - DNA, 1683 bp, Cannabis sativa
atatattaaaccataaacatgagaactacatgtaaatataaatgacttctaatctttcattgataacaaatcaaattagattgaaatgtgttttatttagggcataaaatcccaacacataacaacacaaatagggaacatgacagttgccaagtgcatgatcgataatagagcctcttcaaatatacttttcaagtcattctatgataagatggggctccaattgacaaatctagaaccctatacacagttgatgtatggattctttgcccaaggtcttgcacgtttcggatacatctaattgcctttgaaagttggagaaagtcccacaataagaacattgatggctcagttcatagtgatcaatgtgccatcagcgttcaatacaatgatagggcgactagccctatacgacctgaaagttgtgacatcaatctaccacctatgcctaaagttcctaacaaggcatggggaagggtgcctaaggggagatcaaaagaatgcctgacactaccatagcttagctttttccaaagccaagaaagaaaaaatgccttctaagagctctagcaaagagtctggccaggggtaatgaagttcagcccaaagtgaggaagcagacctagaatctcgctttgggaatcctgcagaaaactttggaccaatagaggaattagaaaaagtaaagatcgatcccacccttctgaccaggaaattaaagattgagaaaggtttagcgctagaaataaaattatcattgataaaatttctaagggcaaacctctatgtctttgcctggtcgcatgaagacatggtgggaattgatctgcccataatttcttatgccctaaacataaatccaaactttcggcctatacagtagaaaaggaagttattggataaagagtgagcacaagttctgaaagatacacgccaatgaattcattattaaagctttctacccgttttgggtatccaatcctgtcttggtgtccaaaccaaacaacaagtggcgagtgtgcatagattttactgacctgaataaggcttgtccaaaggactgtttcccactgccaaggatcaaccaattagtagatactatgactggtcatgagatcctaagcttcatggatgcctattcaggctacaatcaaattaaaatgcatccaccagactactaacatacaagttttatgatagatgtaggcttgtactgctacaaagtcatgccttttggacttgaaaaatgcaagggccacttatcaaaggatgttcaaagacctgatcgatcataacatgaaaatcaatgtggacgacattctggtcaagtctaaaaaggttaggggcatatagaggatctaaatgaatgcttcaagatcctctgagagtacaacatgaaactcaatcccctcaagtgttctttcagagtaggctcaggcaagttccttggcttcatagtgaattcataagtaatagaagcaaacccagataagatctaatcccttttgaacatgaagtcacccataaagataaaaaaaagtgcaaagcttaactggctacatagtagaattaagcagattcgtgtcaaagtccacagacaagtgtgtccccttcttcaacatacttagaggaaataaaaagtagtatggatagaggagtgtgatgttggatatattttaccag

SEQ ID NO: 34227 - DNA, 5348 bp, Cannabis sativa
  modified_base (5300)..(5307): a, c, t, g, unknown or other
tgttagtaaatctagaacctggtaaaataatttccaacactttatccccaggtatctcaaatactgccttcttgacttcttccttggtgaatttgtttactaatagagctgattgtgaggagtctacaaccggtccttcaagtatcaccctttttgaaattcccgttctattgttcattcaggacccaagcaaggacttataataggtgatgaacacctcagtaatttgattaggctcagtaacccgcactccatcttctctaacaatagacaagatctaattttgtctctgcctctgcttgatgctcgcatgaaagagagcagaattgctatcccctttttgaatccaagcagccttggccttctgctggagaaaggagaaataattcttaacagcagcattatacttctcttgggcatttgattctgcttcatgtaaatcagcattcaaagggtcatgtgggagcttatcttgcaggtcattttgatcagcttttgattgttcaaacaatgcctggacatcagagaatccttctctattgatctctttaagtgtagcctttaactccttcaattttcttatcaactggtacatcctagttcccctcatttccttgtgccaaacttccgaaaccttattaaaataattaggatgagaagaccacatcctaaaatatttaaaaggttttttcccgcttctccatcttggatgtaaggataaaatggctggagtgtgatcaaaagtcccttcatttaggaacattgcctcatcatttggatattgatccaaccactcttgattggctaaaattcgatcaatatttgaacatattctgtctcttccttgttgtttattagaccatgtaaagtagcagccagttgctttaacatcttcaatttgacactgttaaacacattgcatgtctgcatcaggatgataacaaactctatgtcccactctttcttctttggctaatatggcattgaaatcgcccattacaagccaattttccttagttctcaaaccacacaggtcagcccataatagtctccttccctcattatcattggccccatacaccactgtcaaatagctctcaaaactaaggtcgcagtattatttggatgtcttgggatcgactggctgccctaaaggaggagcgtggcatgatctttagacacttacatgattttaatcttgctatgcttgcaaagcaaggtaggcgcttgttgtgtaaacctaattctcttgtgggaagagtgtccaaagctaggtattttcctaattctaatttcctttcagatgaacttggacataacccaagctttgtttggcgtagcatttagggtgctcaagacttggtttgtttaggtgttgttcgtgtcattggcaatggtgctactactaacattcttggacagccatggttaccaagttcggacaactgattcattacctctacacatcttggtctatacaataacacagttagttctctgtttcaagttgatgatcaaagatgggatcctaatgttattaatgacctgttcttggttcaggatgttggtcttgcgcaaaggaacgatcgagactttttactgtctatagtgcttatttgctactgcaacagcaaaaaccaaaaaatccaggccccaataaccctggtttttggcaaaaattatggcacttgaagatcccacccaaagtcattaactttttatggcgtgccatctctgaatgccttcctacatgtcttaatctcgtcaccaaacatgtgcaggtttcagctatgtgccctgtgtaatactcatgctaaaacaaccacacatgtcctgctcacttgtgattttgttaaggcttgctggtttgtgttctgtacacctctaaaaatggatatctcagcgtcgtttggtacttagtttgagctctgctgcaatcactgatattggcctaatttgtcatgctgccatgctttgttgggtggtgtgcaaagcctgtaaccaagctgtttgggataaacgaacctccattgtaaatgatgttataacttcagcttctgttaattttgaccattggaagaaggctcagaaaaattctactctattatcattgttgattgaaaataatagtgatgggtctgagttttggataaaaccaagtttgaatcaaatcaacattaatattgatggtgctctttttcatcaagagtgttcatatggttttggtttagtggcaagagatagctcagggaggttaatataagccaagacatgctttcaaggaggcatttatccagctgaggttgtggaagccttgggaattaaagaagctcttagctggattaagagcaagaactggcttaatatagagattgaaactgatagtttactttctgtccaagccattcgaagtaaccaagccatgtcctccaattttggtttacttattcaggattgtcagtctttgttatcttctttacataatgtgcacttacgttttattagatgatcaacaaatcgagtacctcatgctattgctaaatattctcaattcctccctggttgtagcatctttgagcataatgtttgggctgatttaaaagcccttttgtattcaaaatgctaatatttcaatgaagttattatttcataaaaaaaaaaaaccccaattaaattaatttatgtgatgtatattaataattattttagtttttatatatgtttatttactttgtgcaacaacaaaactagcttgttgaataattaatattttttttctttgaacttgttacattattaagttgtgctctttatagtatatgatttgttaataatactattcgaagtataacatcaacagtaacgtagttcttccatcatattctatttaattttatcgtgaaacgagtgatgtgatggatggtagttgataaatggatgcaaattaaatattatttttggataatcagctcttttgcattgatctcaacaaatttacaacttacaacttgaaagcaaaactattaattacaagcttggtatgaagttcccacccattcctatcattagcacttatttttcccatatttgtattttttagtctaaaccattcaacttagacattttattgttcatacctgtccacttgcaacatgttcccaacaaaacagaagaaaaatagcactaaaagaaaaggtgctcatgatctcctctttaacaccgcaattagacaatcaaacttagaacaattccaaaattcattagcctatctatcgtagctagcctctttttgatagtgaacaacataataaacatgtgcttgagagaacaatagtggtcccaaatcagggagaactgccactttggggaaggattcagattcaactttgaacaaaattctagcaatagagaaattataaagctaaaactctaaccttgagaacatacatttgatattttgcttggtttgaacaattctcttccaataccaactagcatctaatggagcatcatagtcaaccaatccttcttttgttttatatacattgagttaacccatttaacccatatattgtctttcttaacggaaatcgctcatacatgctttataatagctccaagattctaaagagctatatccttgaatccaagactacccttcaacttgcataaatctgtccaatccacattactaggcccatttgaatcctttgaacttttccaaaggtaagcccgccaaatctgaattatcctttggaccactcactttggaaaaataattatttaagcccagtaaaaattatttaatgtgattcaaacaatcacatatatgagaatcaagaaattaagaaaatcaagaacagtagcaaatcaatctaaacaagtaataacaacaaaattgacaaatcataaaacaagaacttaattgatgctcgatcaagttgcagaaaaatattcagccatggaggtacttcctcccattcatgaaaacttgaatttgattacaagttgatagcagctctcaagaacaatggagataactccttacaattaattctctcactgtgagtaactggatcaaatacatcaacactcaatttacaaccctcctctatgaaagaataactcttctatacaagctaccaacttttctaagaacatgtgacatgagtccaataactggatctctaactgtattgagatctctactattatgtctatatataggcataactgtattaactaactatctgtcgagacagtggtagtaattagatgagagaatgtgccaactaagcaatactatgacttagtttctagaccatattacaacaattttaccttggtatagacactaagacttagataacaagtagagggtaggctgactcttgtacaaggaatgataagctcatctaatttcattgatgttgaccaagtttagacagtgtctaaacttggtttgagtgatacattttatgaaaatgtcagctggattataatcagtacagatctttcttcacttgaatctccttctttgcaatgatatctctaataaaatacaattttatgtcaatatgctttgacctatcatggaacataggatttttcatcaagtgcagggcactttgattgttacagtggccagttatgtcatctgatctgaatacaagttctttaatgaggccttttaaccaaattgcttcttttattgcttcagtggcaaccatgaactctgcctctgtagaagacaaaactactactctttgaaggttagatttccagctgatgcatccacctagagctgtgaaaatgtagcctatgagggatctccttgtatatatgtagtcagcataggctgaatctacaaaaccctcaacttcacaccttcttcttctgtttgctttgtagactaagcctaggtttaaagaccttttaacatatctcatcacccatttaacagaatccaagtgctttagtcctggatcagtaatgaatctcctgataatgctcatggcataggcaagatcaggtcttgtgcataccatggcatacatcaagcatcctgcacagctagcatattgtatgctacccatgtgtctcctttcatcctccatctgaggtgcttgatattttgaaagcttgaagtgttgagccaaaggagtcacaactagcttggcttcatgcatctcaaacttcattatgactttctttaagtacccctattgtgtcacactaatcagatcaggcttttttcttttgatttctattccaagtatttgttggaatatgttttaccnnnnnnnngatttactaccatgtatgttgtataacatcctaaatatgaa

SEQ ID NO: 34228 - DNA, 1631 bp, Cannabis sativa
  modified_base (1392)..(1393): a, c, t, g, unknown or other
acccgaacatggaacaagactagggacccagaattgggattgagacccggaactgcacccaagtcttagtcccggaactagaccgagacctagaccgggaccgggaacatgaaccgaagctagattgggacccgtgattgggatcctgatcttgtcccgggatctggaaattggggcttggacaagacccatagtcggtgtcttgatctaggactcagagaaggacccgaagctggactaggacctggacccagacccagacctaggacacgaaaccgaaacttgcactagagcgtggccaagaccctaataggagtggggtcgtggccaagacctacacctacacctggagctgaaactagaccagaacccagccccgaaactcgggcacggacaaagacccagaccaacacctagacccggtcccgaacccagactaggattgcgactcaaacttgaacccgaacccgaactagagacttgatcccagacccaaaccaatcccctaacctaaattgtgattcagaccatgacatggacacgaacctagacttggacccgaataccgacccagacccagatccagaccaggatcgaaacacgggacctggaccctgtcctagccgcatatccagatccaaacctatgacccagacccgatcctgggatccagacccaagacccgaacctggacccagattaggattaaaaaaacccatacccagactcagactaagactcggaccccaaccgcaacctggacccagacccgtacccataactaaaacaaaacccggaattagaactggaactgtgactaggacccatacttgagaccaaaaccgaacccaaaccataacccaaactcataccagaaccttggccgagaccttgactatgactgggacttgagacttaggatacgaacctagactagcacccgaaccgtgaccttgacctgacatggtcctaaacccgcactgagaccttagacccgtgacccagaccaggatccagaccctgacaaggacccacacctgaactcgaaccaagactaggaccgagacctggactagaacccagactgggatctggactaaaaccaagactcaataaccgaacccgaacctaggcccagactaggacctacgaacccaacttggatgggggacctaggccctagaacccagacccagatctaaatccgggactcgaaccataaccaggacctaacctagacccgaaatctgaagtcggacccaaccccgtacccaaaaactgcataggacccagaccaggacaggaacctagacatgaacccataccaagaccaaaccagaacccagaccaaaacgcgggacccaaactaagacccagacccagaataagacnnaaacctagtcctgcaccaagacccaaattcaaacacagaccgggatcagaatcaagacttagacctaaaactaaacccgaactcaaatcgagataaaaacctagtactcagacccgaacctggacccaaacccagccccctaacccacaccgagagctcgatccagacctagaccgagattcggacccgaacccaaagtcggaccaagactccaaccccgacctaacatcgaacccaa

SEQ ID NO: 34229 - DNA, 3173 bp, Cannabis sativa
  modified_base (494)..(504): a, c, t, g, unknown or other
  modified_base (769)..(780): a, c, t, g, unknown or other
  modified_base (1240)..(1241): a, c, t, g, unknown or other
  modified_base (2029)..(2039): a, c, t, g, unknown or other
  modified_base (2702)..(2708): a, c, t, g, unknown or other
  modified_base (3005)..(3013): a, c, t, g, unknown or other
ttaaccacttaccttaatgttttcaacattgctagaaattcatgaaatttctcaaaaatttcaattttcttggcctaaggtgaaatctagagtgatcatctaggaatttaacgataactcatatccacaccaaaatgtacatccatatgtgcaaatacagatgatcatacttttaagtggatataggcattttttttctttgcagagaatgatcttgtcaaaacaactatgaataagatgctaatgtcatagatatattagaatgtggttgtgatcttgatgacttaggtctagttacatcaaagaattcttagaatagtccaagttgatccttgtcacagaatataaaactcatatccaaacatatacatacagttcgaatccattgagaaaaaatagatattaataacttgtgaaagtcatactatattgtccaatgtattctaagaaactggaaaaaaaaattctatttggaatctaaaatctaaagtcannnnnnnnnnntataccaaatatacaatgagtgattattctttcttgtaccacaactactaatataactttaagtctaagttgcgtaaagtaagcatatacaagtaggagatttctaaggtcaaggatttatatcatttttggttagaatgttgggaatatagtcatctgtgccattcaatttcatagaagaaaatagaaggacatcatcagcagatgatttataagccattcatccaatgatatattatctaagcaaattctaaatgaaaaagcnnnnnnnnnnnnaataaaggataattttgaataaaataagaatccaacaatgtcccagtaggcgagagtcaaagttattcttattttataaatcttttcattgtttcatattgtaaacactattctaagttgtcatctttggatgtacaactagatgttgcatttaaaaatacgtatctgtcgagatctaacactattatgcttgtctaatggaagacaatccttaaagatttctcccattaaaaacactaagttaagttagaccaacaatgaagactcaaaatttataactacaattcataacagaaagcaacatggttcaatataaattcatacacattaagaaattatcatacattcaacaaataacaaaggcatgtgaaaatacaaaacaaacgcctcttaattaatttccaagatttcctacaaactgatacaatgtccccgtaggaaagagtcaaagatatcattnnttgaatagagtagtcagctcatcaaaaatagacaccactctagcaaccttttattcgatcaaagtaagagtcaaacattgccccggtatgaatttataaactattcatccaatgatatactatctaagaaaattgtaaatgaaaaagctaagaggaaactaataaaagataatttcgaataaaataagaatcccacgatgtcccagtaggcgagagtcaaagttattcttattttataaatatcttcattgtttcatattgtaaacgctagtctaagttgtcatctttggatgtacaactagatattgcatttacaaatgcttatctgtcaagatctaacactattatctttatctaatggatgacaatcctttgggatttgtccctttaaaaccaacaagttaagttagaccaacaatggagactcgaaatttataactaaaattaataatagaaaacaacatggttcaatataaattcatacacatttagaaatcatcaaacattcaacgagtgacaaagacatgtgaaactacaaaacaagcatatcttaaataatttcaaaggtttccaacaaactgatacagtgtccttgtaggcgagagtcaaagatatcattcattgaatggagtagtcagctcatctaaaatagacaccattctagcaaccttttattcaaacgaagtaagaatccaacaatgccccagtaggcgagagtcaaggttattcttattttataagctttgaccattgtttcatactacgtaaatttatctctaagtagtcannnnnnnnnnnagtctaatagagacaaaaacttacaaaatatttatctttcaagatcattacggtgttaaatgcttcaacgaataaccatccataagggggacgaagtctagcgtcttgagattatattgaaataattaaccatgtaggaccaacaatagagatcgaatatgctcaatatttgaaagaattgtatttttatttgatacttattttactctatttatttcattatatatatttattttattaaaattacttatttagatgaatctaaatataaattttaattaaatatatataaaattataccctagaagatctaaaaaataaaaatttattttctattcttagtattaattttccaataaatattatgacaattaattaatttgagttgaccaaaagttaattaaataatcaattttcaactcaaatttaattttctatatatataagtatgatagaattcaaaatccaatgtataaaaattattcattttcgaaatctattaaaataaaataaaataaaactagagaaactattctaatttatgtttgtctaaaattaataaatatattaattttaaacttaaatataaatttcccatttaattaaatttctttagaaaaatatcaaatatttaagtgtcttgaataaaatcaacttaaatannnnnnntctaatttaattaaatatatttagaaaaataccaaaaagtctacctagaaaatatctatatctatataattcataaactaattacttattttctaattaatatataatatatttaatctatttattttaataaaatcattaatgaaaattacttgaattcaagttgatcaaaaattaattaataaattaattttaaacttaatctaatttttaaaattaaaaaatttcaaaatatctacatttaaattaaatgtatttcgaaatataagtgggaaattattattaaaataaaataannnnnnnnntgaaaattattctaatttaagttagtttgaaatagaaaaatttctagcttaaatataattttctatttaatttcatttattgaaatggaaacaaataattaagtatcttaaattaaatcaacttaattattaattttaatttaatatctaagaaaatatt

SEQ ID NO: 34230 - DNA, 1335 bp, Cannabis sativa
agttcctggtaaaataacttccaacagaagctgtgtggtaatggtgagtgacgactcaagtcgactggtgtgggtgtgtcagacgagtcgagtcagtcgattggtgtggacggtgggtgtgggacggtgagtagtgtgggtgtgggcgtggtgtgtgggtgagtgatatactgtgtgtgatagtgatatattactgaatactgatattaatgaagattgaagaagaatagtagaatatgaataggcagtgagactctcattcattgattcattaaaatttggacatgattaaaattttaaaatagtatttacagaatacgaataggcagttaggcacggcagcagtaaattaattactttaattatttaaagtattaattttttaataaaaaaatatttttatatttttggattacgggttctcactcgatcaccgaaataaactcataagtgacccgaacctgaaacccggttacagtccttttcaagttgaacctgacccgactggacgggttttcagttggtcatttttttcgcatcgggtcggggcgggtgttcgggttttccaggtttgcgggtctgtgcagccctaactgttattggtgtaattaagtatcaatcaagtctcatataactaaagaaaatagcttttaggaaatattgctaaccaatcgtagggtgtcacctataaaaggtgatgaacactactcgtgctcaataacaatgtttattttaacaatgctttattattagggtattgctatgagacacctattgctaaaaagcaccactaatgctaccactctcctcaatgtcatactgttattagtgtaattaagtatgaagtcctatataacttaaaaaaataatttttaaagaatatcgttaactaatggtaaagtgttatttatagaaggtattgtacaacactgatacccaataacaatggtcgaggcaccatgacaccacgataaaatactttatcgccctataattagctattagcttagggctgcacataaacttttataaaaccgcctacactgaataatctgcctaaaccaaaccgagataacccgacgaaatatataaattgaaaaatctgacgaaaatataacctgcccaatttttatattgggcggctaataccaacccgtccaattaacccgaactaacccgactaactatattaatagggcctttttgtatatatttataagtttttattatatatatttatatatcatataatttatatgattatttaaaaagtataaaattgaaactaatatgtttttttttttttttttttttgagataaaatggtgacatttt

SEQ ID NO: 34231 - DNA, 1376 bp, Cannabis sativa
  modified_base (403)..(410): a, c, t, g, unknown or other
aaacacttagcttcttataaatgatatttcagtaaactaataatattattactgaaataagagctcttccatttatatatgttaagccaagctcaaagacaatcatcattttcacttctgtatcattatagaagctatagattttgtatttatgattagcgctctcactcaattgtactatcatgttccaaagatataagtatcgggaagatccattcggtcaattttaatgaataatttaaggaacacaaataatacagttaaacaataacctaaccatctcaggattgagatctattgatctaagatcaactacgtgatattgacttagaaagatataacaataagtttatgatgtcttatccaagttcaatatcgatccagtccgatgtatactccatannnnnnnnactagtatactttactaatgccctggaaaggacataccactcatccaggtgtaagaaaactttaacactgattatcacatcagtgtaaatctagtgcactgataaatcatgggacttaaactttgaagcatacaatcacaattactttctactgtgatgacatcattgtgattatgaataactatatattttagatttatcaaaattgtatattaaactataaagatgaaaataacatgtaaacttaaatgacttctaatcttatattaatagcaaataagattacattgaaatgagttttatttagggcgtaaaatcccaacaatattatcactaaaataatattgtagatcatatgttcatgagggagagacatattcaagtaggactctttttgtcttagttcaggctttgtcctactgagtttttctaagaaggtttttaatgagaaaacttgcaaataattatggatattagtatgaagatcagatatatgcgtattgcattatttttgttagctcaagttttttcccattgagtttttctaacaagatttttaacaatgtaactttaaattatgctaagatacttgcaattcatgaaaataaagaatgtgtgcaactaaaattaatgacacaacatattcaaggaaatgtgtattaatgcccaataatgaagtatcaacagttctctataaagataatactacttgcatcgcacaactaaaaggaatgtacattgaaggagatagaatttaagccattttatcaaaattcctctttacacacgatcatcaagaggtggtaatatttgactgatgttcaacaaattcaagtgacaatcttgcaaatatatttacaaaattattaccaacatcaatatttgagaagtcgacatataagatcgaaattcgtcgattaaaagatgtccacgaatgcataaataaagaggagttaattcgcgctg

SEQ ID NO: 34232 - DNA, 1565 bp, Cannabis sativa
caccaccactctttggcgacccatatccggccactgtccgaccccatgcattggaccaatcgaaacatcaggtgtcggtgacctcaccccccaagcggcgctgcttctttcgccatcgttagctcgagatcacaagtcaaagtttggcagttcaaactttgaacggattttttggccactttcggtgtccgtttgacgagtcatcttcaccactagactcaactcgtcgaggaaaacaacctacactaagctatttcgaacaacctacattaatatagtatttattgttatttaataaaatacaactcttatacagccaacaaaactaaaaaactacgtaataatatactgcgattaggtggtgtttgctaactcgcagcccctttgagtgtattattctaaggtggtatattttctaagttatttttctcaaatatatataaatatatatgctgctagtgctattagtctaacttatatcagattttttactttttatatatatatttcaatttgcatttagtctattcactgctataatatgggcctttagaggttgtttttcaatcagatttataaaaagggaagctaaagggtgtgaaattacccgcctaatttgaaattgacatttagaggtggttttttagtataaattgtaggtatagaatttaattatatctataccgttggttgggggttggggtaaaattaagagttttttatgaatcctatggcgtcggttagttggtattaatcgacgccataagtgcactcgttatacgacacgtgtgcacctatggcatcagttaataccaaataaccgacaccatagggtaatataagagaacccatcagagcttcgtctttctcatttcacaacttgctgaacacgaagaacagcagccatagtagccacatacccacgaaaaaaatcctcgccaaccacccataaaaaagcctcattctccttcatttcttaaccattttattccatttttgttttaaaatcttttatgttcaatacctaaacctatactaaaaaaagttttgtttatttccctctatcactataaccgaacctattatataaaaaggtggtggtataactccggtcaccgattttagcagagaaaacgttgaatttcaatgtccattaaggtataaatatgatttctatttattttattaatgtgcattgctattatttcgtttttataaactttttttgggatttttcaattttattaaaattatgttagcttgatatataattaattatatatgtatatgtatatgttatttttttttcaaaaaaaaaattaatctatagaatttagtaactagtaacgttacaatttttattataactagtaagtaattaaataattaaaattctaattttgttgtattgtattatattgtaggttgtgagctaatttttgagattcgacatatttcggtattgattagattttaacttgctctaggtatatacattcactaacttttaatttttataattaattatcaatgcatggttagtggagtttgaatatcttaaaatt

SEQ ID NO: 34233 - DNA, 3506 bp, Cannabis sativa
  modified_base (625)..(629): a, c, t, g, unknown or other
  modified_base (737)..(743): a, c, t, g, unknown or other
  modified_base (770)..(776): a, c, t, g, unknown or other
attgtaggaaattttactaatgatcaatcttatatctttggggtagaactactgatgggtaatattgggtcgaccaacccgcccaccaacccgaatttgggttgaaaaaactttgggtcgaattaatagggtcggaattgggttaagccatatgtggcccgttgaacccaacctagctcgctgctacatagaatatcaaaaaatattttaccaactcacattttacttcaacgcaactcactagctaatacccataccacatgtgaaaaacacagattatcctactgaaccttcctcatttctcttttctctctcaaatgaaaaataaaaccctaaactaacggttttacctctctctctctctctctctctctccaccacaccggcgccgacaccactctagaaccctcactaagcgaaggctacgatagaccaccgcactgcttgctcctcactcccgcaccatgcaccaggcacagggccggtcctgaaaatatatgggcccaagacgaattaaatattcgggccctaaaaaatatatataaaaaaaaaattaaaagaagagtgttataagatttgaacccatgaccttaaacattatgccatccaccttaaccaactaagnnnnnaatatttattgcttataatacacttaaattttacttaaataaaagccaaataatttttttttatttttttattttgggccccggaaaagtgtgggccctaggcacggnnnnnnnaagtgtgggccctaggcacgggcctannnnnnntatgcctagggccggccctgaccaggcaccaccatcgccgccagccacaccatttgccaccaccacaaccagccggggctatttttctcaccaggtagtgtctcatttcatctctttcattttttgatgtgtataatatatatatagggatatgattttgtcccgtaattgtactttcacggaatgtattccgtgatatatggcagccgtcagatgggggagttatttgatctgacggctgagattgatctatgggtaattagggttaaaaagtaaaaacgtactctgacactcatttaatgtaccttaagacccatctaatgtactacgaaatacattccgtgaaagtacatcacgggacgaaatcgtgtccctatatatatatatgtataataaatgtatgtaatatttatggtattgtattttttttttcaactatatgacatgagtttataaatatgtataatgtgtgtattattgtattgtatattttttattttagatttttgagatgaatttatgtgtattattgtagtgtatttcttttatatgattatggttatattatttataagaatgtattattgtgattataatattgtattgattcagattgtaggaaattttactaatgattttgctagtatcatttatatttatgtcaaaaaataagttgttgtactaatttttttggctatttgttggtactcattttttttttgctattgtgtaaaaaacttaaaatattggacaagtttcttgattattaatagttattggtttatattattttttatttgtagataacaaatccaaaggatcccagctaaaggagaagaagatggacattgttaatagatagtttaaataatttaaataactttcaagacatatattttagacttcaactttgaactttacatttttctttcttctaagtatgaatttgattatgataaaatctttttttatttaatgtgaagtaagaattacaatctaacccaacctaaaatatatgggttgggttgtgcaaaaaaaattgttaatgggttgaaattttataagccgatgtaattaagttggcctactaaagtagcctcaatctgccaatccaacccgtgaatatccctactttaaggttgttatttgcgttgaacacgtccttaactatgatgtcttccttagctcagttcattattgatttgtcatgaggccattctcttatagtcacaattttagatttggattttaaagttttattttaatttaaatttccttttttggatagcaaatgattttctaatactagaagaatctcaaatatgaggacaccacgattttgtttgtttagatcttgtttatatgttttagtttgtatggttactgaaacaaaaaagaaaagaagaaatctaaaagtctgggttaatgttttatgaataattttattatgttattgttgaatagtatacattttaggtgccctaaaacttgaacctatttttttttttttttaacgaacctagatttgagggaagcctagctaaggttgtcgtgtaaaagaagctggaaagtaaaaaagaattaatttttcattattaatatttgagtaatttgcggtgcaaatactaagtttaactttcggttacatataaatatttaaatttaatttttgacggtaataatgcctaagttatatttttagaacttcttagtacctgaccgttaagtgtcaaatcattatccacatgtcattttcttattggtacatttaaattaatttataaataaaaatgaaaatttaatgacctaaactaatcagggactgccacgtgacaatttatttgacacttaatgactaggtacttacttaacttctaaaattataacttaggtgttattaccgtaaaaaattaaacttaaatattaatttacaattgtgagttaagcttaagtatttatgtcacaaattactcttaatatttctatttttttaaatattatttgtttgaccaatatagcaacatcctaatgtacaacaaatggagcaatgagagtgagtattagaattttaattttgtatgggcctattttttatcaaaaaaatagggaaaactgtagcaaaagtttctaaaaacttagagttgatgcaaattagtcaccaatctcaaaaattgaccgtaatagtctccaaagtccccattcttgaaagtacgttactacctattttaactagtccgttagttgctatcacatttgccacatgttgaaatattcttggtccatctcataatttaaattaaaattataaaaaaatttaattaaaaatttcaattttaaaaaataaatatatattttccttgtttttttttttcatttttgtttgctcttctttcccgattgacctcttcttaaattttttaaatcaattccaaatcacaaactaaaaaatttgtattgagaaacttcaaaaactaaacaagaaaaaaaaagcaaaagctttcttttaatatcaccaaactaattcaaattaatcaacaaaataataataattaaaaaaaaaactcataaagcaaatatacccaaaaaaaaaataataataaggaaaagaaaacccaaaaaataataataataaaattctaaatatcattcctgaaaaattctaaatccaaattaaaatttcagctcatatatatatataaatagtgttacttagatatatatatatatata

SEQ ID NO: 34234 - DNA, 1293 bp, Cannabis sativa
tattttaattaaaaaattaatttattttaagtaagtaattaatttaagattagttgcctagaatttctcccaaaatacgtggcagtccaagagcgagccaaatagcagtaggatctaccgaacaagacacatcaccttaattactctcagagtctaatatttcgaaagagtaatggcaaaacaattatcttctggagggtcttgctggacaacgagtatcttttttcttttcctctccgtgagtgaagtctgcctagagaagggtacgagaagattgatgaaacataacacgtccctcgagaatcgaaacactgtacacgcatttaatgcagcatggggaagagcatctgataacttactctgacaaacgtgtttaagagtttaaacccatcattcccagaattcacgagacctcatacatcaatcgacgactgtataaatgagtcgtcaagtcataaatgagggataagtcaaatcccaccaaacacttatggacaacccaaaacccatcacaaaagtaggcaatcatgccctaagatcatatttgagaaattgtaaaaagtatggtacaaacaaacacgacaataatggtattttaccaccattatgagcctataaatacctcaataatacggaccagtcagaaaaaatttatgtaataaagactcttatcaatacagtaacttgtggactaaagctcattaatgacctaaccatgtataaatcttctcttcaaacattcattaatcaattcatgcaactctaattattggttacgaaaaacttcagtcaatattttggtgttttcattgagagctgcgggaagcttaccaaaagaggaagtcgtaaatagcctcatagtacaatggtaaagacaagaaacacttcacatccacaacaaccagatgagccaaagtattcagatgacgaagaggggggttctagggtggatgctgaaggagaaagagacactaataattcagagtattcaaaccaaaagaagaatatgaagactatgattaagacaactatacagaattaattgagctaacgcaaaagggtgtttgaccatgctgagttggcaaagcagatggaactaaccaagagaatacaagaaatattgattgccataaaaaggaaaatagaagatgcgggaatctaagtagatccaactgcaatcccattagtgcatgagagaactgaggaggagtcccctcagcctgaggaaggctaaaaatagaagaataggaaaccatgtcccattaggtttcctccaagttaaaaagagaaaat

SEQ ID NO: 34235 - DNA, 2004 bp, Cannabis sativa
  modified_base (1737)..(1741): a, c, t, g, unknown or other
aggtcatcattctaagttctgttggcggtacgcgaggtatatgtgaaaatctttgacatttatcccatttcttgacaatactcgtgtgtgtccttattgatcattggccaataatatccttgtctgtcgatttttttagacaaacatggccaaccagcatgatccccatagaactcttcatgaatctatctgatgatttcatttacttctgtagggagaacacaccaaagtaggggcattgagtaccctcttctatacagtttgccttcaatcattgtgtagtgaagcactgaatacaatagtttttatgcctcatttttgtctatcatctcgacgttttcagtttcacatatacttggctcgctcaacatatctaccggaactaagttcaattcatccaagtcattctacgaggctagttttgctaaggcatcagcgttggagttttgttctcttggaatttgtttgattttaaaataatcgaatctttccaagttcttctgaactttctctagatacctcgccatttttaagcctttagcctagtattccccgaggacctggttcacaatcagttgcgaatcactacgacatatgaggtttttgactttcaacgcctcagctatctttaagctggtgatcaaggcttcgtactcatccttgttatttgatgcgtcaaattggaaccttagagcatagtgaaacttatagccttctggcagtattaatattacccctgcacccgaaccctgttcgttggacgcaccatccacgtataattcccaggtttccacgtgtcactgaataagtggaatttcctttggagttattccttctatcgagaagtcagcgaaagcttggcccttgatggaggttcgaggatgatatgttatgtccaactgccccagttcaattgaccattttatcaatcttctagaagcatctagttttgataaaacttttcttaagggctcatcggttaacacttttatgtggtgtgctggaagtatggccgtagcttatgagatgcatggactaggcacaatgcgagtttttctagagggggatatctggattctgcccctagtaaccttttacttacatagtaagtaggttgctggtgcttgccctcttctcgcacaatagctgcactaaccgcatctttcgagatggctcaatagagaaacaccgtctctccaggtattggtttcgccaaaactagaggcgttgctagatgcctttttatgttctaaaggcatcttcgcattcttttttccactcaaacttttttatgcctcgcaatatgttgaaaaatggcacacacttatcagttgacttcgaaatgaatcagttaagtgtggccattcttcttgtcaaggtttgtacttctttaggctttttcggtgatgacatatatatcaatgccttgattttttgaggatttgcttcaatacctctcgggttaactatgaatcccaaaaactttcttgaggaaactccaaaggaacatattttcgggtttttagcttcatgttatacttctttaatgtcttaaagcattctgcgaggtctgaggtatgatccttactttttattgattttaccaacatatcatcgaagtaaacctccatgtttcgatctatttggtttgtgaacattttgtttaccaatcgctgatacgttgccccatcattcttcagtccaaacgacataactttataacaatagagtcccatnnnnnttacgaagcttgtatgttcttgatgtggaacatacatttttatctggttatatatagaatatgcgtcaataaatgacataagctcgtgcccaatagttgcatccactaactggtcgatcctaggaagtggaaaacaatcctttggacacgccttattcagatcaaagaagtcaatacaagttctcgaagttctgttaggattcgggaaaagaacaggaatagttatccatgagggacacaatacctcgcgtataaagtcgttg

SEQ ID NO: 34236 - DNA, 2120 bp, Cannabis sativa
agaatcaagcgtaaaatagtcctaaaactagaaacaaagagtgaaaactaaccgaaaatacgtcccgaaacttagactaattttagcctaacagatatcgaaatttatttctatctcattatagcataattgacactcacttctcaaatttcacatcaaaatcataaatatttaattggtgatcatgtaattaaaagtaattaagtacgaataaatataatacatataaattgggagaaattaaatcatattaaattcatgaaccaatgtcaaacaatatccatctaaatcctaatgaattatttagcaactcatgttcatcgtagcaatttcacacatattaattcagactagaataagaaaatagagaagaaaagaatgttgaaaaccctattgaaaaaagcctttcgctattgattttgctctctaaatttcgtcctcctcaattgcttgctgaaaaatatcgaagccctactctttttatagctagaaaaagataaaaaagataaaaaaaaaaacattttttttttttaaaattaaaggggcaggccacgacatggaaatagtatgcctaggcagaactccctttatttgtgcagtgagctttctactacgttgactaatagtatgttggtcatatctctcttgatattactcggaattggacaattcaaaatcttccggagagataaaagagagagatctacagcttgtatgctttgactttctccaaatatgatcagaatatagtctaatttaagtttgaagtttcaactttattttcttgcacaattttctctattttatagattatctttttgtgagatttgaccaatttatacatttcaagtgtcgaaccttaaaattaaaaaaacaagcataattctattcaaaaaagtgatttaaaagaataaaattaactctaaaaataacataaataataggctaaaaatatcctaacaggagtcctctttatcaacctcgtcaatctggtcaatcccaatggtccagacccaattgaaagaataggatttaagcaataccttgtcctcacccaaataaaaaattgagaaaactttgaattcaagtttgggggcagcgagcgtgctgggaagcgagagaagggtccaatttcggtttgattttctttaatttatattaatagattcatttttttttctaatttgggtttttatttgattttgttgggtttgcgatctgagaacatgtttcgataatggtgttggtggtagtggttggtggtgttgatagattgaagaagaagaagatttttgggttgggggttcatgggtgggagttcatggctcaggggatcacatgattggggtaggggatcacatgattggcgtttttaggttcgtgggccaggggaaaacggggttggggattttgggtgggggttcgtggctcaggggatcatgagtttgggatttcgtgggtggggattttcaattgctgtcgggttaagggaggaagaagaagaagaagaaagaaaaaagaaaaaaaataaaagaaaaataagaaataaaataaaaaagaaaaaaatatattttttaactatttttattattttataatatttatttaaataaaatgacatggtctaatgaaatcataccacgtgtacataattacatgtttttgacatttaacaactaaaaattaataaaaggagacgattgtggagattggaaagtttaaccataatttttccagtctaagaatttaatcgtgcaaaatttaagagttcaaagaatttgatcgtaaattacctatagacaataataaataatagaaattattataataaaattaaaagatataatatttttaaagtgtgtaaacaaaattgtatatgtaattatgtaggtcccaacaaaaaaagaaaatgtatatgtaggtaaacacttaccaaaaataaaacaggtatacatatttgaatatagagagtaaagacacagtgaatttaaaaatttaaacatatttaataaattaaatagaattaataattggatgagaatctgttttctcatggcaatttagcactaaatcaattcttattactcttaagggaattttgtggtccctacttatttttt

SEQ ID NO: 34237 - DNA, 7405 bp, Cannabis sativa
  modified_base (1571)..(1581): a, c, t, g, unknown or other
atatgtttggactatagtcaagaaggaggatattttgtgggtgaaattagtacataatgagtatgtgaggaaagaagaatggtggaattatataaagtctcagtttaggcaactgatattggcaaaagctagtaacaattaaagaaaagtaagaatttgattgatacaaatcatttcactgctagcatgttcaaaatttcccaaggatatcaactcctttgcccttcaacaactagagtcacatagagtattattatttggagtcgtcttaacattcttaaatatagttttatcttgtggttatctgtgcttaagaggatcaaaactaaagatcggctccaaaagtttagcattaccgataatgctaattgctaatacttttagccacgaattttttagttatagtataagaatgatgatttataattagtcttaactatttcactttttttgctgagactataaaagttaaaaaaaaaaaattatagtaactcctttatctttccaaacatgtctagaaccttcaaagcattaattaataattattgtctgattttttttagaatttcatgtaactatatcatatattgtcatgtataataaaaaaaaaatgaagttgcaacttatatatgtatataacgaaaatataaaaaatatctatatatatatatacattgttgagatttatggggttttatcttaaaactaattggtaataagtgatgtaacgtctccgcttcaagcctcaattgggcccttacacccacataatgatgactcttatatacacgagtacatcaatccatgaacggggaatgtcacccatcctgaaattatcctaggtcaagcacgcttaaccgtggagttctttcgtgatgagctattagaaaaataagatgcaccttgttgacataggcagtaccaatcaatccatgaataggggacgttacaagtagagtagcatatattcttatatacgactcaatactttactatttattttatgtgggacaatgtccacaatatagatgatgataattcttaaaaataatttataactactaataatagtaccatcactactacaagaaatgtcacttttgccaatacatttttgtgctagaaaaatttggtattgcgctggtaaaatagaatttacttgtgatgtgttggcaaaagggggttggcaaatcaatgttggtactagaacttttgccagtataaaatgaaaagtgctggcaaaaataacttttctcagcacgtaaatgcgctggtcaaagttagattttagccactgcaaatgtacgctggtaaaattttgacctctttgccagtgcagtttgcgaaatacgctggtaaaagttacctttaccaacacaatagcgaactatgctggtaaaagtaacatttcttgtactgccttattatttcatttctacatatttttatattcgacaaaataaataattatatgcatgcattccaaattaagaatataacgtacgtaaccaaattttatgtgaattaagatctttttctattcctctctacttcttcttcttcttcttctnnnnnnnnnnnttcttcttcttctttctttttctttttctttttctttctagctagtagtagactagtagtggttgcttctttatatatcctaatcaattaaaagaaattagaataatactcaatcatgatgattatattgacatagctaatcaatatagtcaagttttttccatatagatactaactagtctttaagtcaaattaatcttatattttgggcatttgttctctctaatatgggaggcccaatactaattaagtggaactactttcatatatcttattattctttttccactttctacattcttaaattacactacataatttccatttatatatacatcaagtactataatcaatataaaaccctaattcaatattttgggcttttaataagttgctcttacatattaatcacctaataatttttctgagtattcttaataatctttcaaatttcaataatggtttctgctgatgctgctcgaacttttgttggtatattaggttggtataacttattattaattcatctattaatatatattttgcatatgttatataataaatatatatatataatataaactctactacttttacacttaatttggttttaattagtaattaatttatagttaattaagctgattattaatattaattaagtttatatgtttatattaatttgcaggaaacatcattgcacttatcttcttcttgtccccaatgtaagcttaataaaataattaattaatttaattattttattgtaactttctgcttcattttgatatattcataaacaaacgaagacagattattaatttctttgattaaaaatacataaatattaaaaaatattataatattaacataagaagaaaagaaaaaaattatgtcttgaataatttttcacacttacggtaaataaatataaacttcaaaattctatatgtaaatatatactaataagttaattaattaatctataatttacgtgaattcacagcaagatcgtatattatagagaatataaattttgatatattgattaatgagaatatgattacttacatttacattatgttagttttggtttttagatagaactcaatattattcaattctaataattcaaaataacaagtctaattaattaaaaatacatatgtacttgtgaaacacaactattaaagaataaaactcaacaaagaaatcaaaacataaacaagtaaacaagttaaatgaccaattaaaaacaaaaaataataaaaataataataaacaaaacaattacgaggttcgaataagagatgatgaatcactcttatttactcttccatcaaaaacaactacaaggacttgagatctttatttgagttgaaagaattagagagaacacagtacagagtgtgttgcacaagacactcgaaaagcaaagtttctttacaatatgaactcagttgtaacaatgttaatcaggcgcacaccatgtcattaacatctaggctagtcctaagcatataggtgcactagacttgtgcctagggcctacctagtccagaggcccaattttttttttcttttaaattatatttttcttattgatgttgaataatatcacatttttttctaaataaaggcctaaaattttaggatcgaccctgttaacatccctccttgtctctcttcttttctctttaaactctccctgtttccctcactaaattctaggattgtgttacaaaatgactctaagacttggctataaataacttttggttcagctcgagtactaaccattataactcacagttagttagttttatctaggtatacattagagaaatgctaaaagatcttcctggatgttatgttgctcttggtgtaattaaatatcgggtctcatataacttaagacaataactttcaagtaatatccctaaccaattgcaaaatgacacctataaaaagtcttgggcacaactagtgtccaataacaatactttttatattatatgtgagtatttttctttgtataatacatgagtatctattaggcgtaggtatcatccaatccaatctaattgaaccgaacagatccaatccaatccaattacaaaaagctggatatccaattacaattagattggatgctaaaagttgaattctaattttctctctatatattaatgggtaattttgatgcaggccaacaatgattgatatatggagaaaaggtagagtagagcattactcagcaataccataccttgcaaccctattgaactgcatgttatggggcctatatgggctcccaatggtgcagccaggaagtcttttagtgttgactatcaatggaattgggattgtcatcgagtcttgcttcatcttaatcttctttattttctcagacaagaaagcaaggctaaaagtacttgtggtccttattttggagctcattttcacttctcttctagcatttttggctttaaaccttgctcatactcatgctaaaaggtcactcattataggcattgtttgtgtcttcttcaatattttgatgtactcttcacctttggccatcatggttagtatcctttttctaatcttttatatatgaagagggattatcctcatattttctctaaaatatggtatttttaaaaagaaagttagataagataattaatgttggttacaagttactataattttgccatttttttatgcatcttatgtatatatatcattacaattttctttcaaataagtgaaaaaataggtatttttcaattttcgaacatggatttttattacaataattatcaataaaaaatgaccgctctagattgtttgtgtgaaaattacacattttataataattggtgtattttagtattaaatcttgtatttctattttatattaaaatatttgatatttaagacaaccaacattcgtctttttaaatgaaaatggcaatgatcctaatttagtcattattatatgcttttgttgtttttcataatttaattatgatgatcaaatgaacaatgcagaaattggtgattagaacaaaaagtgtggaatacatgcccttcttcttttctcttgccactgttgtcaatagctctgtttggattgcttatgctcttattcggttcgatcccataattatggtatttatcaaattcacatttcgtctgtgttttacagaagttaccaattgattattcatataacgatatactaaacccaattttggtcaaactttttgtaagattagaattagattagttgtgggccacaattgatagggttagggttaagaagagatatttccaaatattattatatacatatattggattttttgcaacacagagtctgaattatcatttaataaatatagacggaatgaataatatacaaattacaaagtccaaatatgatctttttcaataaaaaattatttaatgaaaattgtttaccttaacaaacccaactcatcatgtttcatttcagtcattttttgttaaatgatgaatcttgcaattgcagatacccaatgggctgggcttaatgtttgggctggcccagttgataatttatggtttgttctacaagtctacaaagagaattatagcagcaaggaaagagaaagaggttgatttgtcaaaggtggttgtgtgtggagtacatgaagtagaagaaaagcccaataagtccagtactattgccctttaataatgggctggcccattttaggagatctttctttactacataagtaagcttcgaaatttataattatagtaatactagaacaaaaaaatcataaaattactaaaatattgattaataaatagttaattaagcaaatttcaataaagaaaactagtaaataaaagttcaaatataattgagaaaaaaaaatggaagaataagaagacgagttaactactacgtaagcctaatatattgtattaaatttcaaaaaatgatatttgtaatgactttgcttaattaatttgtttggaagataaataaatccacttaaatttatattctctcaaaatcaaccattatattactcttcatttttctttttaataaattaattttatggaatgaattgaaatgattggtactctatgaaaaatatgtactttccatttatgtaaattaaaatggtatttttaaaactttagatttttaggtgcattatgggacagtatgggcctctcgaatactcatctattcttttgattattattgaatagatactcttatctattattctttcaaatttggctttacattgaatatatgcttgaatttctctaaagatataaaatatattcataaatacatgtagagagatctagaagagttatgtaaagtgttggcaataatgatatatattattgggcaactaatgataccgttagaggtagcgctttaagattggttaacaattttttctaaaaattattaccttaagctatatataggatctaataatacttaattgtaccaatatatgacatggtgggtgctagtcaatactaatgctttttagtatttctcatatagttactcaagtagtgtatatttttcttagtatatatcaatatatcatattgttattagtataattaaatatcagatcttctaatttaatttattaactttaatagtgtattattaacaaatagtgttaggtagtaaaggtgcttaatgtttttgattagtataagggggatataattaatgcatgtaagtgaaggaggagaaatttgaacatggatgcaataaatttaagtcaaatttaaatgatcattttagaaccccatttttaggatgactttacccattttgtaattttggcaacaatcccaatgttattagtacgtatcatttttttaataaatataattatatattatatcatatgatgtattctcttttgtttatatacaattatgtactttctttaaaataaatcatcttatttattatctcgtaaaataattaatcatatatatatatataaatttatatagactaacatattggctcctaaattataaatgtagtgtttgtttcgatataattttagggtttcataactatgttcttaacaaaaatagaaaaaaagaagaagaagtaaataagttataagcacccacgcccatgtgccaaagttatttgtgttcatcactttaattataattattttaattaataattaattagaaaatgcttcaacacatatgatcatatggcctccaaattgtaattaaatatataaaatcaccgacatacacaccctgatctccccataaattttaattaatgataaatgaaaaaaataaataaaaattacgtgaatattaaaatatatagtaataataaatagataattaaaattaataatattgttgatataacgtacgtatatatattgtgtcttaattaattatcaataaagccagaaaaaactggatatataaatatttttttttctaagtttaatattataagagagatcgttacataatgattaataattatctaccttagtatatataatttatttcttcaccttaatttacgagatgaattaatatgttattataacttcttatataaattatgcatgaatgtgagccatgcacgtacgtacgcgtatacgtacatttatttgactagtcaacacgttgttaatttccatatatatatttcatggtatattatatatagtaaataatttgattaattaactgtaacttataagttcatgaaatatattaatattatcat

SEQ ID NO: 34238 - DNA, 4620 bp, Cannabis sativa
  modified_base (675)..(697): a, c, t, g, unknown or other
tttgtacaattttagaaaatactgagttcattttatcatttaacaaaacagatgatccaattagtaacttttgcaaaacacatggtctaaaataatatttatcctgttctttattatttataaataaatataaataattttttagtgtatattaaatgtaattagattacattggtttttaataattaaattttgagattgacatctaataaacgtatataattagaatttaacttttaaccttggcgtttggttgagaggaatgaaaatatgagaataggaatgagaataagaataggaataggaatgcaatggaataaattttaaaatgtataaaaaaattgataaaaaaattattaatttttttttcttattacattggaatggtcattccttcctttttaaaatagaatagtcattctattccattagaatgtcattccagtactttaaaatgcaactaaacaaaggaatgaaaattgtttattttccattacattctatttcattacctccaacgaaacgccacctaaattcaatttaaatttttacaattaaattgaattggattagttggcttaaattaaagagaaatgttaaagggcaccagtggtgcctagcactctcctatgtgtcaatatcttattggtacaactaagtatcgggtcccatatnnnnnnnnnnnnnnnnnnnnnnngagtattgctagccaatcgcaacacgacatgtggcaaaagtgctaggcactattagtgtctaatagcaatgctctaaattaaatttgggtggcatatttttcatccctaatttcaagagaagaggatgtatattaaaatttgctaattaatttttttttttattattggaaaatagtaaaatttgattggatatgatagaacttagaaggttgaaaagagagagaaaaatgtttatttttgtatatatataaaaggagagtttgttgtttttttttcctttcatactctaaaattgggataattaaatattagtggtgtagggagtttgtttctcctttcttttcctctcttaacaaaattgagtcctccggctccgatcgtaaaaggaagaatcaagaaccaccgtcttcggcggcggcggcggatcatcaccgcaagaacagagataacaaagacagacaaaaaatctcttctttgaacaagaaaaagccgaaaatggcttcctctggaaaccaagtcaaagcttctcacatactcatcaaacaccagggttccaggagaaaggcctcctggaaagatccagaaggacgcataatcaaaaacacaacacgtgaaaccgctgtttctcaactcaaagccctccgtgaagatatcgtttctggcaagtctaagtttgaagatatcgcttctcgtatctctgattgcagctccgccaagcgcggtggtgatcttggtatgagtttttatccgtattgaatttgtttaatttttgtttttggatcatgaaaaaccctagcttttgggtttttgtgatatagctggtccgtaactctattagagaatgttaattgattagggttttaggttcttagaatagggtttgacaagagtgatggagtggatagctaaaatctgaaggttctttttgttcaattaattaaattcttgctttgtgaatctgtggtttagggcttaagtcctaaaacaaaggacttaattgatctgtcaatggaagctttatttaggatataaaaattaaaaataagaataatctcaaaccgagaaattgatgaagctttcacctttgaagttgagatttggaccataagtcttaatagttctctcacagaatggtagcttagcatagattattgattttcttttgctccattttagatgctagaaagccttttggaaactgagagattagattggccaagagctatatactttattacttaacaaatctcatgaagctagaagttataacctatactgataaaaatttgcttcttttggtgtcataatatgagcaagatgtgacaattgaccaaccatcttatagatattctatttttggttatttttattactctgttatctgacaattgaccattcaaaataaatgaagcaaagaagtttatctttatctccagaattatacgtttcggttcgaatgtaaaacgttaaaataatttaggaataacagccgtaaatgatccgcttgtcctgaaatgacctggctcgatagggaaatcgcaattcgttggagccagatgctgtatattaatctaaaattgaaaataaccgatcccgggagggaccatgattatcattccttttatgacatacatctttccatctgttacacatgctgtgttgctaacctagttgctgttttgttaaaacttagatcttcctgcattttacatgtctcgcgtaaatggtatttgaggaacataaagaatataaaaaaaaaaagactttgttttttttttgtgaaagaagaattatttatcagattttgtaaagctttcacgtatttgggatgtttaggttctgtagcttttttcaatcttatttaacatcttaatttttttttaccaaatccagacatgtttctctatcctacagagtacctagtggtttttttgtcaaatacgtgaatatgattaatttgtttctctatcctggtttgacatttgcataaacatatccaacttgttcacatggacaaacctaaaaatggctgaacactgaattgtatcatctaatatattttagtcctaaaaccaatctgttctcactagtcagtggtcgatggactcgtgagcttgaccattcgaactacatcttgtttcttagaacgtcattgatgtctgtgtcaacctttggtttttcagaaaaatgtccttggataggttctcctaaccaagtgttaattatcattacaggtccatttgggcgtggtcagatgcagaagcctttcgaagaggcaacatatgctcttaaggtcggggagataagtgatattgtggacaccgacagtggagttcacatcattatgagaactggttgaatttagagggcagctggagaaagtatgaagatatttctgaaaatgattctgaaatattaccaatgacagttcttgctgcttcatgcttcgtattaagttggtttgattgatgatgacaccttctaaaaacagatctaattatttttcaactgacatttttgtttggggaaaaatattgctgtggttgttgttttgaatatttcagagctaataatagctcgtaacgatttcacatgatcttttatagatatgttgatttccatttttggacttttcatggtcatagtctttttcttttttatctgtatctggtttttactgagctatatacataatcgcgtggtcatgattattatgagagatggtaaaatggcaaagtgatcatgaagatcattttttttttgagtgaattcttaaaagatcataataaatagattcactcggaataaatgtttatgagcaccctataataggattttaataattagataaaagttatgtttggtttatgcttgatgcattagtttttttttattattattttttttaaggagcatttggtttggtttgaataatatttctagcactacttttttctttttgtttttaaataattccaaattcatatatatatatattttaagagaaatggtaaattctttcattcttaaataatcatctatgttaaccttaaaaaaagtagctatctattctaatattttcactgatttggtaaagtacaatttgattgatattattaattaatttaattgggtcaaaaaaatataatttaatcaaaaaaaaaattaagatttcaaattaatggtagaaaaacatttatttattagtctcaacaaaggtgaatttttaagtcttattagctttcaattgatgacttttagagatttctaagctaacataattccctcattacattcattcagcattgaacatttaatctcattctcttagcattatgagtctctaaatctttggtaacactccattgtgttggtggcacatcatcgtgttggtatgggcatttgtccccatttcgacacccctttgaagttttataaaaaatgcatggtttcaatttcttccatcgcaattctctttttggtttgtaattattaagaggttttgattttggatcactttgttccttgtgctcatcaactttttcacaaccatgttgtctaatgagattcctatagtagttcaaatccttcattgggggcattggatttgtggtagtaaacaagtctttagacactgagttcacatccacataactcggggcgggggcggggacgggggctgtaatggtggtggtggtggccggtggtattagtccattttgtcttaacttttcaatggtttgtggatcacttaagattttattgagcaaattaaaagatggtttggttgaagaggtttggtcacattgaacttgggaacttgtggtggtggctagtccattttgtcttagcttttcaatggtttgtggatcagttaagattttattgagcaaattggaagatggtttggttgaagaggttt

SEQ ID NO: 34239 - DNA, 1284 bp, Cannabis sativa
agaagtaactttttattgtgattttattgtgactaaaagtctttattgtgactaaaagtcatatttagtcacaaaaaatttatactatgattttgtcactaaaggtagatattttttgtagtgaatatatttcacacgcgtataaaataaaaaaaaaatcacgcgtgcaacagattttttgaactatattttcgacgtattaattttttttcgaattttttaaatttttgtagaatgtcttacatattacaacacgaccatgaaaaaaattagactatataaacaattcacccgaatgccaaaatagataaggatgtaccgatatacattccttttaggaagtgcattgtagaatttttcaaaaaaaaagtagtgatttggataaatattatggaaaaaatctacaattaatgtaccctttgaaaaggggtccaccgatgcacccttatctattttatcatttagaagaattttttagtgtagattctaaaaaatttaacacggtaaaaatagggtttaaatagtcgatatttcacacaagtataaaataaaagagtctcacgtgcaacaggctatttcaaccctgttttcggcatattatatttttccaaacctcttcaaatttttaggatgtcttaaataactacaacatatacgactatgaaaataactagacgaaaaaattctcttagatgtcgaaatagataggggtgcatcgatggatcccttttaaggggtacattataaaattatcatatgttagtattacttagatagtgatataaaaaacttaaggaaaattctataatccaccatcttaaaaaagatgcactgatgtacctttatttgttttggtatctgaaataattttttcgtcaatttttttctcatggtcatgtacattgtagttatttaagacaacctgtaaaattttaagaaatttagaaaaatttaacacaccgaaaataggattcaaacagtgtgttacacacatgactattttattttatatatatacttgtgaaataaattgtttcaacactattttctatattgtaaattatttttaatttctaaaattttgtagaatattttaaataattataacgtatatgaatataaaaaaattaaattaaatattttttctagatataaaaataaataaaaaattgtatcaacacatcttttaaggaatagtttgttgaaaaaccaaaaacttaatgaagaagatatacggagaccgccgtataattctttttttttttttcttttaataatttaaaa

SEQ ID NO: 34240 - DNA, 2548 bp, Cannabis sativa
tagctcatctattaggagtaagtacggttttatttatcttattatctaattaaaataatattttattgtatgagaagggacaaagatggtgatatggatgtaatttattggatatgattactttttttcaactggttaaatttattaatgcaactaacctaatgctcattttagaaaattatactactatctcactaaatgctttataactaatatatagttttatttaacgtctcctataaattcatttctaaatttttagctacttaatttaataccttgctttcaaagcttatcttactaaatcaagcaactctctgttcaagcctgatttattgctaaaaagactatggtagccacagaaattgtttactctatgagcaagaaaaaaggaaagtcaagatttatgatatcaagttagatttggaaaaacttacaataaaatattgtgggatttcatctcagaggtgcgtcggtgccaaaaaaatcaaggggatgatcaataaatcttgttggcacctttgtcccatggtgtgctctcaaacaaggagatccattatccttattaacccgaaaattttctctggtgacgtggacattaatatttgacatgtggcaagaaagataatatctcggagttgagtagtcttgagtcatagcggtcaaactgggaggagtccctagccttacttctaggttgactctaagaactctgaatgggtgtttgaatttcgataagtcatttccaactcactatctttaagtattttgtactatggacacatgaaacaactaagaccaggccccaggagttaaaaatacacgaattagcacctcgaaaatcaaccattagcacctcgaaaatcaacctagagcacctcgaaaatcaacctaggcaccctcgaaaatcaacctaggcacctagggtttcacctagcgcccaagttgatgaccccaactagggtttcaaattctgggaccgtcttactgcaaatgggtcaaaatttgtattggtacatgaattagacataccatgaacatatttgaggcattagaatcagattcggagaactttcatttatgagcacccaaacacttagtgcctggggacccccaatgcctaggttgacaatctgtcaacctgtgacacttccaagcatcagatcgaaaaatccaactcgtgcatcttctttgtctccatcaaaaacagggaaaacaagtgctttcaggaaagaaaacaccccaacatgggtgccaaaacaagggaccaatgcccaggtttacacttggtgctagcatagcgcccaggttgacattttgtcaaaactgggccaatttcgatgagtttttcagaaaaagtcttccatgcatattctccgttttaattaaagattaatattcaactatttctaaggaccaaatggaactttcaggtggcctgaaactagacccagcatccagattgacactaggcactaggcatagcgcccaagttgacaatagtgtttccaatcaattttctaaaaaaagtgtcctgacattttttccatcatcaaaaataataaagatgtaagtaaacttgaggaaaaaataacaatcccaagggcatcaaaactgagctcagtgcccaggttgacctggtgctaggcccaacgcccaggttgacctggtgctaggcccaacgcccaggttgataatcaaactggtgcgctagttttgttcactcaaatgccaattctactctaagaattctctccagaatggtcaaaaattgggtaggagacctcgcccgcaaattctagaaccttggaaatatcaaaacgacatcctggaagctctgaaataagcacccaatgctcatgttgataaatggcctgatgcattgggttctgcttatttgattttgattctgtctcaaccatttgtttagtttttcttcataactgagagccattaagtcagaaaagtcaaatttacaacttcataattttaatttttcgataaagttgatttacttggaaactagtagtttcgtgtctcccaattccacaaaacagcaacatttccaagaactggtaaccagcttcgtcaaaacacataaatggactaagtgatgtcgaaatattacttaggcatcaaaaaacacatccccatcgcattttcccactcacccaacatccaggttaacatcacatgacaaccttggcactggatgtcaacctgggcgttgggcccagaataaccttcagtagaatggttataactcgctcaatattgatctttgacacaatttaacttgcatttcaaagctattttaatgctagtcatgtctcacatttcaatctcaattctgaagttatcgactccaaattttaccccaagagagttatgaatttaagctacagcttacccgaagcgggtcccacagacgcgactcaagctctaaaaattgacgaccgacttctatagttaattccaccgttagatcaccatctatgggcgaaaataacctaaatatatttttccatattttttggattattttatt

SEQ ID NO: 34241 - DNA, 4454 bp, Cannabis sativa
tgccaaaaatggaattaacaaaacagtaagtgattcatctctctattttcttatatgctttttatttcacatttttgggtttgattactactttcttagtttgcatctttgtcactttatttggttttagcgatttagggttgaattttctctgggtaaattttagggtttaggcagaacatagatttttgggtttctcaaattaacaagcttctagtttgataaatttcatccaggaattgggattgctttctttttgtaataatgtcccaatctggttctgaagtttatcgtccagaatttttagaaacagagtgccccagtgaactagccatcttatataaacccaatatttcaaaacctgaatccaaattagagatgaatgatgcaaaaattagggaccacttagtaaaaacctaccaaaagatattgctagtcaccacaggcgcttcttgcaagaaataacagaaggcaaatgtcgtttcttacaagatgctgcttggcctgaacctcctagtttataatctattccgttggctaggcctttatttttacccagagtcacaattgcttttgaactaggtgactttgattttgaaatcatgacttccaagccacgtaaatcaaagactccccaagaccctaacgttaccttcgaggctgaactaatcaatcgaattgagggtgggtgcgagcgagccatcagagattatgtaggtagcatcttaaggacttgcggtattgaatacaagcaaaactatcgggttagattagtagcccctggcgagtttacttgttacccaccaaaacgaattactcacgaagcacccgaggggaccagtggcgaggcgagtacaagtggctcgatagggatatgctcttagagcctcgaacacatcagggctggagcaattatccccttgcaagattactttaaagatttcctcaaccatcttggaattgccccattcagttggttcatatttcatacagaatccttgcaagcttgaaagttctgtataatattttaggatgggagtgccccactcccctagaaatagagtatctatactctatcaagtctgttcatgcgaggaagaatactggaggagatttttattatcttgggacatacataggtgatcgtaagatcattattgggttgccaaacaaaacccctttcaaagaggacttcttttggacaactggcctctcccccatcaacacaaccaccttctgtataatacgcaagtgattatttgccttaaacttggttttaaattattccatgttttcagttttagcctcactgacttgtaatcttattattttgatagcggtctcgaaaagaccaactcctactcccaagatggctgagcgatgcagggtcttactgggtctcccatatggtcttcgatcggctaagttccttttgaacgaggttaacctgaggtccgtggacctcctcgctgagaacgcgtatactagtgattacaaatatcccaagtatgcattgtggcagtaggttccagtcccaactgacgaggaaactcaagactatgcggctcgggtgcactacctccacaacgcagtccctcgggaagccgaagaaggagcatcctaaggtaatcaatgtggttggtcacccacagtgcttaggagtgagcgaaccacattagtgtctttttgagatagccgttataatttctacacctggaatcccctccttatagatcgcattatacatagatttgatagttggtacccagaattgtacgtctaaattagttgtactgactcctactatgggatagccgagtggtatggaaccatgctggatagggcaggtcatatagactcgagctgggatttagaaccaattaactcctatgacatatttaggatcacaggatgtagagactttagtgaatattatagtcctcgttctttgtcttcttatgattatggtaaatcccttaggcgggaaattgtttcccaacttcccctttttcttaatttcaaataaatgttaacacattgttttgtctcgcaagaatggatattgaagacattcttcattgctcgagcaagaagggtaagaagaggttaactacatcggagacttcctttgatgtcaacatgaagcccctcaaaaggcccaggaagacaactgctaacaagaagcaagcctctcagtccattgacctcgatgcccttgagaaccaagttcaaactcacccttcggcccccacacatactgaagagcccattcccaagacaaatcaggctattgcctcttcgagccaagcacttgagacattgctcatcgaggctgggagggctggctcggagtatactgtggagtatgttgcagcttgttggcatcatttctgatccttccttcccaatgactgggacttaatcaacaatggccacctgaaagagatgctttagaggagtgtcgcctttggcctctcggtaagcttctatacccttctcattttacctttctttttaacgatctccaaaaatacttatgcatttttgtttatttgttttcagcaaactttcatctcctttgtcgcccaatgttggggtctggaaagatgaagtacctggagagcgagatccagtaggtgattagtcagcgttaggctatgtccaaggaatggaatgatgctaaggtggagatcactcgcttaaacaaggaagctgaggaggtgaagaggaccaataaggctgactttgaagctactcagaaggaggtgaaagacaagtccaagctatgtcagaaactccaagaggaactcaatgcagccaatgtagcgctcgaggcaaaagaggttcacaccaaggagcgatgcaatgtcgtttccatgcgctccatttatcgagcctagatgacgaatccaaaaatggatttgagttttctgggtaaggccatggaggaagtccttgcttactgtgagcaagctaaaaaggcagaaaaggaagtcgaggtattaggagaagttatcgaagaaggaccatccaagtctcctactatgtaggcttgatttttaattattcacttttttttaatttttaggaaaatggccataaggctgagacaatggtttgccctttgtggcacttttgtaaagacaaattttcaaggatggatggccaactttgctttattttatcttttatttaatatttcgtatttttatatttgaacttgatatatttgcttgtttgcgttttcattcacaacttaacaattatattttgatcaaatttaaaatactttaagcatttccattgctcgtattttccttcaatattatttaagtagttactaatctactatgtgcgtgagcagttattatctgttatgctttcgatttgcgagcagttaccaattctgcttcgcataaacagttataatttattttaagcaaacttaaatatacttttaatgattcatcactttgtatatttttgattgcttatatgaatagttaggccttgtattcatatattaggttaaagtattttttcaaggcatcttgtgtatcgtttaatactttcctataaaatgcgagccattagcattcagcttcgcatgtagcttaatgttgttttatgagttatctctcatttacaactgctacctttgaattttctttcttgcgagaaaagttttttaatcaaaaacttttaaaatttaaaaattttaaagtgtagtgggtttgcaatgtatcatgtagatccaaatgaattccggttaatcatacgcacacacatatatatgcccctcaagtaattttaaagaatgaaactttgtaattacttaaaaaatgattcaactttattaataatttaagttcaaaatattacctcaaaaattgagattacaacatcagtctactggtagtaggatcgcatatgttccacgttccagtggttctttattagcgagtcgttaagccgagctaacttgtaagccccggttcctactattgcctcgatcacataaagttgaaccagggttttattggcagcgtccaacttctttttgatagtatccttcaaggttttattaacaacatctacttgcccatttgcctaaggccttgacactgatagagctcttaataatcttgttcctctcacagaatcagtgaataattcaccatcaaactatgttccattatcaaatactatcttaatgggtattccaaacgtacaaattatgttcttgacgacaaagtcgagaactctcttccaggttatggaaaccaaaggttcagcctctgtccactttgtgaagaagtagacagccaccactgggtactttgatcctcctcaccctatggggagtgccccaatcagatcaatcccccatattacaaatgggtaaagcgaggtcatcatcctaatttcctttggtggtatgcaaggtatatgtg

SEQ ID NO: 34242 - DNA, 1689 bp, Cannabis sativa
aggaatagcattgtcaggagaagacataccatcttgagataaatttttaatgggaaacatagaaggcatggatggagtagtagtagtttgaggattggcaggacacacatcaacagccaatccaagaatactcatactaggaacaacaggagcaggtggttcattggatgatgatggatttgaaaagagagactcaacaatgtatgtaattggggcaagagggatttcacttttggtgtgtagctcagaatgacaagaaatgacacccttagaaatgttggcatagggaaacttggtttcataaaaaatgacatctctagagatgtacaacctaccactagagtcaagacacttataaccattacgattaagactgtaacctaaaaatgtacatggggaggatctcaaatcgagcttatgttcgttatatggcctgatatttgggtaacaaagacaaccaaatactttgagactagtgtaaacaggttgtatattgaaggagttttaataggtgagtgttggtttaagacatgagtaggaaatccattgtgtaattagacaacacacctaaaaaagcttcatcccaatatttcaatggcattgaaacttgagcaagtaaagttaagccatgctcaactttttgtctatattttctctcaactaatccattttgttcatgagtagtaggacaagggtgcctatggagttttctaacttgtttaaaaggcccaaaaaaatttctattctcatcaccccagttagattggaacaccttaattttcttttctaattgaaattcagtttcaactataaatgtgtggaaggttttaagagccgtggattcatttttaagcaagtaaatccatgtaaatctactaaaggcattaaaaaaattgatataatatttgtagccattgtatgacaaggtgtgggagggaccccataagtcagacacaatgagttgcaaaggttctgaataaactatattggaaaagtttggaactggcaacttatgaatcttgcatacacaacatgcttggaaaataatagttgatgatttattacagggaatattacaagatttcaaaacaaatgaaacgaccttattggaaggattgccaagtctgttatgccattactcaaagtctgaaacaagagacttagtacagtgagggaatgacatggagcttgattttgatgtatctgaatcactagtgacaataaagacagactttaggcttgaggatttaacatcttgactaagagatgattgggaatggggtaacatcttgaactgacctggatcaaaagtatacaggccattgtggaaagtcccagtcagaagagtgtctctagtaacatggtccttaacataacaaacatcaacatgaaattcaaagaagacattattgtcaagagcaaatttggagacacttaatagattcttagtaatctcagaaacatgaatagattattgagaataaaggtttggcagagttattcgatgcaacaagagtttgaccatagtgtttgattgacaaacctgtgccattacccacacatatttgatctgaaccattttaatcggcagtactcatcaagttttgcatgtgtggtgtacaatgatttgtggaaccagaatcagaataccaactgccatcatcagcaagagtgttctgagccaaatta

SEQ ID NO: 34243 - DNA, 2568 bp, Cannabis sativa
  modified_base (29)..(51): a, c, t, g, unknown or other
actaaataagactcattgtcgttggctannnnnnnnnnnnnnnnnnnnnnnctttcattgagagcagaatcaagaatcgctcttcattcaaaatctaaatacaagttcgatggcggtacaaactcgtaagggcctagttgatccagcgaatccacagacggtggatcatgcattgcagaacccaggaaacgcaagggttccaccaacacttaatcctgaacaactggcaaacgtgggtcacagtgtaatgactcctatagatgaaattgcgcttagtgtggaagagactgggaataacagtttagcacccaaccagggaattcatagcacagccattccgcccgttaccaacactcaacgaccattggagatgataccgagttacaaaatctccgtgctgctcttggactcgtgcagggtcatgccaataccctacatcatgatcaggaagaactctgcactacggtaaatctcgtgttctaggaagaaaggcgtatgtttaccaagtggagagacaaagagatggaagcgttaagggctcatcatacaaacattgaaaatcgtaatcggcaagctaccgtgctgatacaaaaagcctaccaaactgtaggtcagtaacctccgagtgtcatccccttgggcaagacggatgaagatccagcgatgaatacttgccagactgcaaatggtcagccaccaaatccccggtcatgagttccacttgtgggcctagttgtaggcgggcagaccttatctagtaattcatcaggagaggtcatacctgatagttccaaccaggttaacagtgccattccacctgtcaaccaggcaaatcaattgctaagatagccaggcacttctgtattcgaaaggttggggatgactcatgacctaaggagtgacctgaacagaaggagaggagtatacgatcagattgtcacaacaatcgtatagcccggagcccgtgctcaaattcccactcagaatgataacgatgtgattcaaatcgaccaaaatgtggagcaggttagcccagccgtacaggcacagctagaggaactgaaaaatatgttccaaggcatggctggacagagaaacaatgatctcgagctagactgagcacacagaactcctttctctcgtgagatcaatcttctggcattgccccacaagtttaaaatgccaccatggaaaatgtacacaggaagagaagatcctcttttccacctcaagtatttcgagatgcaaatggatttgcaagggatacgaggggatgtgtgttgcagaatctttctgtctaccctgtcggaagccacctagccattgtatttcaagttggcccttggaaagttcaattaatggaaaaccttctcttcggaattccatacacaattctcctcctctcgccaacttccgttacatctgggagacctcgtcgaagtcaagcaaagaccacgcaaacctctccaagcatacatcagcagattcatgacagaggcgaccaaagtttcacgggtaactgaagatggaaagttgtccgcgatattgggggcattctcggtgaactttggaaagatataaggaagaacgggctggtagactcaatgagtgattttcttgaccgtgccgaaggcttcatcaagctcgaagaagtcattcaacgagtagaaggtgagcaaaagcctggtaagtcgaaagctccttctactggaacgtccgcccaactcccccattacccaaataattcaagctcaagttgtaaacgttctaacaacaaccataggcaagggaatgggaagaagggaaagttcaccggtaaatccgaacaagctccccaggagaatcaagcaaagtacactgcattcactatcttgactgaagacatagaaattatttacatggcaactcagtcgctagccccatataaaaagcccgggtcaaaagatagcaaggagagatatgacaaagttttgtcgattccacagagattacggccacgacacaaatgcatgcaacaacctgaagcggggaaattgaattcctgataataaaaaacaacacacacttgcaaaagtatgtcaataccgatcagggtcagaggaacaataataacgaagatttactacctccactggtagatggacatctgcaagtcatcattggaggctcacatattgctggagattcaggcaaagctcgggagaggtatgcccgatcagcgcaccacgagcaagaggaagttatcctggccgtagaagaaaggaagcccaaagttccacgagcaggagggcctaccataactttcaacgatgaagatgctttgaaaattagatttccgcacaacgactcgctggtcgtggaagtccagatagccaataaaatgttggccagaaccatgattgataatggagcctcttccaatatcttgttcaaaactgcttatgaaaagatgggactccagctcaaggagtcgcacctcgaggacaaatccatctacccctcactgttggacaagctccaacaagcatgactatcatggcacagttcttgatattggatgttccttca

SEQ ID NO: 34244 - DNA, 1490 bp, Cannabis sativa
tctacatcattggctcaaaaaatggcgccttttttttgcatcttgaacactcaggataaggtcgccatttcttattctcaccttgattgctatttaggtcaccttggaacctttttgttctgtcccataattagtggttcatttagtttttgctccctgatctgctggtaagttggcttcatatatctcaccacacccagtagtacaacaaaaaatgttgatagtacaagaacagacacaagatgagactgttgttctttcatatctcggatctgttttctcttattgtctaatcatatcctgcgtaacagaatttacatgtttccagtattacggtaataaaagattttcttccttaccgtttggcgtgagcccagacagctcgctaatcaggtaattcaattgcccttactgtataacttgtcacacatttaatccacatcttccaaacacttaaaactcaaatagatatcaatatcaatatgcatataccatacatatattcttattatagataatcaatacattacttctccccatcatacactataattatctaagcaggtaagataatagcaaatagcataaacacttactataccatgagtcgacctatcttcgtagcaaatgtacatactcgaccagtcttcaggacctttaaaaatatagttgctccgataccaagttgtaacgccctaatctataaggacgtcatgcatgtgattttataaactagtttaatattaatagaataattaattattaaaaactatgataatactaaaaacttgactaaaataaaacattaaaagtggacatcataatgacagtaaaaatgtgtttcaggggatccctgctataaaagttttacaaaaaaactatatatgatgacacttcaaaaatataaaaccaaaatagatgatagatacagaccaaaacaactattggcaactcagcacgcaggctggtaaggttaatatgtgcattgctagaggagacgatcttctcatggctgctctaacttttctttacccttacctgtgcacaaagcactcgtgagtcacacagactcatcaagaaaagtaataaagatgggtacattaaataactaattttacatttcagtatcataaaataattaaaccataacatgcaacagtagataatataacccggcatatgcatataaatagatatgctcatatatttgcattgccaaatcaggcaagccgtgtcataatgcaatatcatatataatatcattgcaccacctaatcaggtgagcccgtatcacaacctgacaccaatatattgcatcgcctaattggacaagcccgtaccatagcctggtactcacatgtcactcccgcccgtacctaattaggtacgctgctaggaggaaacccaacaatggttttgatctatgccataacttggcattcatatgttactgccgcccgtacctaataaggtacgccgccaagaagaaa

SEQ ID NO: 34245 - DNA, 1308 bp, Cannabis sativa
accgatgtgatactgtcggatagtacaaaagccaacatacatatctaatgtaatctaacaggctcactaacatgcatgctaaacatgtaaatacatatgcatactggtatacgaatcttacctacctcgattccgaattaaggtgtgccggtcaacctgagtggaaaaatctgctcggcgaattacaggctcctaaatcacatcaatcgtaacacgcataagtgactcactaaatcacaaccgggactaaggttttaaaagcaaaaccctatctactgcaacttaatatagcaatatcccaaactagcagggaatcaactttctagaaacctcaaactggcacgaaacaacaaactgaaaaactagttttcacccctattgcaaaatccgggtaactggttttacaagcactgtaaaaccgattagccggttttacccagaaactgacaaagctcaaactcctaaccaaaacgtctccaaactcaaccaaaccttccagacctgcatattaaaccccaataaacattttccaactgataaaacaactactcatacacaataatcaaaactacaattgatgagtcaagcttgagttcaaaaactcaaagcttgctcatccaactaactagctatcaaaatctgttcaaaacactccataaaaacataatttagcttctgaaaacaataacaaacaactatagcaactacagcaacagaactatcaattcatgcaaaaatccattttctgacaattcaaggaaacaaagaggttgaagctaagaacttaccttggctcaagaacactaaaaccttgttgtatcaagtttgaattgaggaataaaatgtcaagccctagctgctttaggtgttcgaaaaaaagggagagagtttgagagtgaaatttgcttttccttgattttttccttattttttaataaatgaagtaaaaccttgttttattaaatatctcatcccaaaagtttaataaaaatttgattttattacttaataacaatccactaaagacaaaagaccaatggggcaacatgaccattttgcccctcccacactaaaattcataaaatgatactaaggggtattttgggaaattctaaaagcccgtctattcccgacattctaaatgtctaactattgtcccgctatactaaaaatactaagatgttattcaaaaagccatacatcgcgttctaatgttgccggtcaccgatcatgcaaaaatatgaaatttcactatatgacatataaaatgcattctgaattcatttaatattaataaataattttcat

SEQ ID NO: 34246 - DNA, 1786 bp, Cannabis sativa
gtggattttgaccgagttagagttggactgacttttctttctttctctttttttttgaaaaattattatttttatatattttttcatagaaaaaaaaagaaaaaatgaaaagaaaaaaaaattaaaacaacatcattgtttagaattagtttttttagttttgttttaagtttatgttttcaaaaaatatataaaaaaaactatatatatacaggtgttggggtgggttcgggtataacccaattttttcgagttttggattaatgaaatttgaactcggccaatgatgaaccgagtttaattcgaattggatttacaacaattgtaacccgattttttcgagtttttcaggattcagaccgagtgggtttctaatgtaaatgtgcacccctaagcatgacatgacacaatactataaagtgatataacacaacacaaaaaatatatacttaagcacgaccggtaagcataataaactagcttgaaaagcataatacaaaacattaaaaaattctataatttaataattataacaataaatcattcaaaaaaaaaaaaattataacaataatatatatgtatttgttaattataaataagttaaaataattattaaacttaaatataatactttattttacaggatgtaatataaaaattaaatatttataagtaaatatttaaattctaataattttttttatatgattgtaaatttactaaaaattgcataaatataattgaaactataaaatatgtatatagtttaataacgaactcattaattggaaaaaaaatgaaaaaatacaacatgaatttgagcacggatatgaaaacgggttgattagtttaagaaaaacggactaacaaaccaagcctacgagccttatcagacctactttttgaaaatgttagcacaacactacctattctttttagtgcagagcacaacactactcatattttagaaaacataaaaaaaaaagtgtggatcggccaacacgacactcatgaattttcagcactactctccaccatgactttcacaaaatcctacttaaaaccttcgccatgtatctcagttctcagcatatttttaaagcaatatccctacatccataaagttacaaagacatcatctcatcactaataactaattaaactcatataaaaatatatattttgtaagttttatgaatcatgttttgttcagcaaatatagttaaaaacaaaaacaaaaacccaaaagaccagcaattatatgaagaaagtggacaagtcagttaaaaaacaataatttatcttaattattattattattattatcatattgtcacgttgaaccatattttctaatgtcaaagtctatgctaaccatgatcatgatcatgcttggaagaaaagcatgccatgccaaagagaaccaggcttaaagatatactcacctaaacaaagcatatatattacaccacttcacttaaaagctacccctcaaaatacacctatatatatcattctctctaaatcattcaatatcaaaatctaaccctgctttttcttctcttgaatagtacccaaatggctttctctttgctttctaagctttcaattttgcctttgttatctttgtctctctttgcctgctcttcattagctcatgatgatttttcaatagtggggtattcttctgaacacctcactagcattgacaaacttgtccatcttttcgacaagtggatctcaaaacatggcaaaatttatgaaagtatagaagagaagtttcaga

SEQ ID NO: 34247 - DNA, 2003 bp, Cannabis sativa
  modified_base (1302)..(1302): a, c, t, g, unknown or other
ctagacttctcaaaacctacaggttgagtcatgtacacatcctcaaataggtcaccattcaagaaggcagtccttacatccatttatttgagttcttgatcaaaatgggcaactatagcaacaatgattcgcaacgaatctttggtggaaacaggcaaaaaagtttctttgaaatcaatgccctctctcttactatagcctttagccacaagtcgagccttgcacctctctacttgcccatttgagtcacgtttgatcttgtacacccatttgcagccgatgggtttacaacctttgggtagttcaaccaactcccaaacttcattttgtgacatagaactcaattcttctttcattgcatccacccacaatgcagatttaggactactcactgcttcttggtaactgggctggctcaaaatcatctcccacatcaacctcatgtttttgcatatagacaagatagtcatcacaaatagtaggcctacgggctctttgtgatcttctcaccataacctcatcgcccccaaaatcaagattttcatcttgtactggatcttaaggttcaccatgagcttctactagaacttgttcattcacaggatcattagtcggattagaagagaaagcggaagcaacaggtacagggaaatagacacactcttccatgaatacaatttctcgtgacacttgacttgaaccaattcatcctcaaaatagacagctcagtctgattccatcaccctgatggtgtgagagggaaaatagaacctagaacatcttgaacaaatagtgtagcctacaaaactcccattgattgtcttcagatccattttcttagatttagaattataagcccttacctcaactttggatccccaaatgtgaaaatgacgcaaactcggttcttgcctgaccacagctcgtatggcgtctttgggactgacttgctaggcacatatcaggaagtgtgttctttcagcaattccattctgctggaatgtacctggcattgtatatcttgcatcaatgccacattcctgcaagtatttggcaaatggcccagggttccttccagtttcatcataacgcccataatactctccacctctatcagaattgacagctttaatcttctttctcttttggagctcaacatttgtcttgaaaatcttaaaggcatttaaagattcagacttctcacgaatgagctcaatatgactatatcgggaaaagacatcaatgaaggtaatgaagtatttatagctgcctatagcaggtggaacaaaggacccacaaatntcagtgtgaataagctccaatacatctgtgcacctgtctgacttactctttctagccttagcagttaactttccttttatacaatcaacacatgaaatgaaattagagaaatcgagatcttgaagtacaccacctttcaccaatctctccattctatctctagaaatatggcccaaacgtttatgccaaagcatggaagatttcaattctaatcttgcacgtttggaaccaacaatagcattaagagaagaagaagaagggcaagagggagaagtaacagaaacatcatgtaaatcaagcttatataaatttccacataaacttccattaccaaccaacataaagtcacgatacaaagtcaaatttccagttctagaaaaaagactataacttagtctatccaaaatagatacagaaaacaagttcatcctaatagagggcaagtaagcaacatcttgcaattccaaaaatgtcttgtatttaactgtagtctaacagtcccaaaaaacactattctgactttagtatcgtcttccatgtatacgcactcttccgaactattcgaccttcttcgatttgtcactgcctttcttctctaagtgggcttttggtcactagagttgttggaagtggaccttctcttctaagaattgcttgggttcgttaccatggagatgcttcttgcttttccctttttcaag

SEQ ID NO: 34248 - DNA, 6046 bp, Cannabis sativa
  modified_base (2551)..(2557): a, c, t, g, unknown or other
tacccatttatgggtaatacccattaagagtgcacccaattatatatatatttaatttattgtgaactcaaaataactcaagaattttaacaaaaatttatttactttaggcagagactcaagctaataacatgttataaaaatattatgaataatataaaatagaaaagaaaaataagaagaagtaaatgtagatgtagaaagaatgcaaagtgaagaagagaattttcttagtgatttatattaatggagtgatcttctatttatacaaatatatgaaaatcatagattaaaaacggagagaaatagaaattacaattaatggtaattaatagaaaatatttagacatccatatatattattttataattatccattatttataagtatttaaataaaagtaattagggatatagctcccagaaagaaaaaatatataaatataacttcttttgtaaagaaaaatattagtttcaaaatattcatttagggtgtgtttggaagcaattgtataattattatgtagtgtaattactataaggtagtaattataccgtatagtaattacattgtatatattttaaaatacaatttgtgtttagatgtaaagtggtaattacatgtgaatttctattgtcatgttgggcaagacagatgataattatatagtaagttaatattgtgtaatatttaatataataattattatcattttgtaaaaaaaatatttaaaataaatttatctattaataatatttaaaataaataaaaatcttatcataaaataaactcaaattttataacaatttgtaacaagaatttaaaataatttttatacattaaaattatctaattgtccttgtgtttcatatattttgaactattctatttgttgtataattttttatctttagaagtttgagtatttgtcattctttaattgattaaaaattaataataaaacaaattaaagtcattaatcaaattttatgctgaatcatgaataaatttattaaatatctaatttaaaagagaatttaaaaattgatgataaaaaaaatcatttatcatgtattcgtatatttttttttattattatttacaacaatataaaaaaaattacattaaaaatatattatgaagtagcattataggcagtacaaaaaataaaatatgtatataagaaaagaaaataaaaataaaatactaaatcatattaaataattattagattaattaaataattaaaattatttttagtatataattattcaatataattataccaaattttcattaaaagtatgaaaattggagaaaataattaaagtctctcaattacttttattacacaattattatataattacatcattaaataaataaatcaaattatataattaccttaaatacattaaattatataattaccttaaatacattaaattatataattacctttaaatacatcaaatttacattctcggtatatttccaaaggcattaataggaacaaagtaccctatattcgatctcccacacaatatacaacacaataattataaataataatcatgatgaccatatcctacgaactagtgactgaattttaggggattatataataataataataataactaagcaaatttaccacaaaaaaaaataataattaagcaaaatttgatgtgtattattagtttggtgggatatatgtgatgtgaataatagaagaagaataatttatggggatcaccccgtcaaatggtgaactctctctcaactcaaacctacctataataatattaattactcaagtatatatagtagtaattaattaagtatatatatggatattaaatgtataaataggtaatctatattattagtgtataaatagctataataaatataaatataagccggcgtggggtttatattaattactctctctctcgtgacctagctaggtaggaactagcggtggcaattacaaacacacacatgcaccaacaaaatcacaacaaccatttatattttcaacattgctattagtggtgtttattagtaccatcaaaaagtgatattttataattgattaataatattttatgtataattattaaaataagttatatgagataagatatttaattttataaataataatattaaatatttaaagatattagacaccacatgtatcttttagtatttctcttatattttgaagaatgaattaatgtcacctattcatatggagagaatactaaaaaaacattagtaccattcaagttattatattattatgggtaaatattattttaaatcttgtgttttgtaaaagttactgataagaccttttattttgttaaatgataaaatagatcctgtattttccaaaatagtaaaaataggacattgagcttaatttttgaccattttttttaatataaccaacttgaagacaattcttaacacaaacagatatagaaaatgtaaatagttttatcataacacctttcaatcagattattattaaattttatnnnnnnnaaaaatcagttcaggatcctatttgtaccattttggaaaatacaagattcattttgtcatttaacaaaacagagggtctaattggtaatttttataaaatacaggatccaaaattgtatttatcctattattattggttcaattaagtatcaggtctcacataatttaatttaatctttaatagaatatcgataatcactcataaagcgtcacctttaaataatacactacaagaaatgtcacttttaccagtacagttcgctactgcgctggtaaaagtaacttttaccagctcatttcgcaagctgcaccggcaaagaggtcaaagttttaccaacgtacatttgtagtggctaaaatttaacttttactagcgcatttacgcgctgggaaaatttatttttgccagcacttttcattttatcttggcaaaagttttaatatcaacattaatttgccaattcccttttcccaacacatcacaagtaaattttattttaccagcggaatatcaatcttactagtacctaataacaatgcttgaatctctcttatatttaattagctcattaaataaatttcatcaattctaaacacaatctagggactatacatacactataaaaaattgctacctttagtgacaaccttttagtcacaacatagattttctgtgactaaatgtgacttttaatcacaacaaaaagttacttgtgactaaaatatagtatttagttataagttatcactaattgaattttagtcacacaaatattgtgactaaaaatacgtttagtcacaacaaattttaatttttatgactaatacttttagtcacagaccttttagtcacaacacaataatgtaattataattagtcacaattttttatctttagttacaaattttattgtgactaaaagagattttttatagtgatatgtacgtatatatttgcatgtatgtatgcttaaactcgtgaattatgatcatgtgtgtttcgttttttaaaaataaatgagtaatgatatatataagtctgtttttgagtaatatatatatatatatgtatatatatatatatattgttaggaatttatatgaatgatatgtaatatatatgactatatgaagtgcagaattaaatagaatatatatacactgtgaataaaggatcgaaatagctcaagtcattaattttttgagcttcaatcccacacgagctttcaaaagaaaagagaattgattagtgtgggtaattaggctttaaagctctctttactctctttagatggatttattgtgtttcacataatgagtagtgagttcaaggaccgagatcctatatttatataagtaagacattccattaaagtatttgtcataattaattgttagaatattttaacaatcaattacgaaattaaattaggtaattaacaaatcaatcaattataattaattgattatgcataagtgtgaataatatattttaatatacactgcatatatatccaataactatgagtaatatattttaatatacacactacgtacagatatatatccaattcatatacactaaacaaaaaaatatatacatgtatatcaaatatatgaaaattggatcttaataaaagtgagaaggacactatagagaatgatatagattattattattccaccaatttgatcaaatagatttttggtaatgaataagaatagaataagaaactttacttttgacctctagagattgaaacttaataagttataaaattaaatctagttttttctttctttctttctttgcaaaatgttctaagctattgatcattgtttataaacaaacaatctcatcactactcttaaaaatacaacctaaaactacaataatgaaagattatatacatacaatagtcacgaatgtccgttaaaattgatgctgccaatttactctgactaccaccatagttatcaaaaaaccctaaatcaaacacccaaacaaagaattaaaatatagaaataatgcaatgtaactttaaaatacataaataagattgagtcctacctcaatgcaagctattcaagaccaccataccgcttgcaatcgcgatttttcgatcgcaccaaaccctaaaaccgcctcataaaattttatttttcaatgtgaaaaccttaaaaaaaattagtatgtagaggtgtttatcggtcgataaaactaaagatttagaaaaaaaatggtaaaaatggtagaaaatcttgaaaaaagagtagatcaccgagaagaatggtggttgtcatacgaattttcaaatgagaaagaaggaaagaagagagaaaagtgaaggcgaagagactttacaattattgaagacctaaatttttaattattaagaaataactgaagacataagaattcaatattatggatctcggttgctttagctaaaagcgttaataccactattaaaatttatctctcttcgatttttcaattttttaaatgttatatttgtagaagtggcccactttatatattttctcatgaaacaagttgttttaaaatatgttttatatgcttatgaaataaattgttgtaaatctattattagaaattttaagaaaactggtaagagatcttcaacaactaatatacatgttgtaatatgaaataaaaagattataattataatttctgacatgctaaaacatttgcagataagctggcacattgggtttcggggttagatgaagttgcaatctaaattagtgatgacccctgtaattttagtgattttctttccctctagtgggctcgctttccctaaaaaaaacattatatatttatagtttctacttttttttttctttgaaaagcatatagtttctacattcttaggtttgggctgtaactacatagctacctaggtttaatgcctgtattaatgcttagaacattattaatgatacaaagtatattttatatgatatatatgcctagcctaataaagctctcatgtgtcctatattcccctgtcatatatttctttctattttgtaaattcattaacaaaaaatacatttaaattgtataattatataaggaattatgaagtagagttctaaatgatcaggtgcagtgagatacactagtagagttgtactctacagtgtggggcccaatctgcctgggtcaggaggaatgacaaagatgacgtgttacatacctacatgcatgccaatacgtaatccgtacgtagacacgtgcgcactcattccctaattatactacttaaattccaagaaaaacaaaatattatcaaaatttaagattaattttttttagaaagaaaataaaaataaaataaagctccaatatgtcttcttatagttccttcttgtttagtcttattcatcataattaaattgacatccaatatggcaatacccaaattattcatgtcataatttatttctttttttttt

SEQ ID NO: 34249 - DNA, 908 bp, Cannabis sativa
aaacaagtagagggtaagtagagggtgcatagtacatccatttttacatccattttaagggggtgcattgtagaatcactcctaaaataatattggaattaaatatatacaattaatctcttaaaatggatgcactgatgaacccctatttgtttcggtattcgaaataattttttagtcaatttttttcttatggtcatgtacgttatagttatttaagacatcctgaaaattttaagaaatttagaaaaacttaacacaccgaaagtagggtttaaaagtgtattttacgcatgactattttattttatacttgtgtgaaatagacggtttgaatactgttttttatactgtaacttagtctgaatttctctaaattttgtagaatatcttaaatatgtataacatacacaattatataaaaaaataagacttaaaaatatttttgaatgctgaaataaaaaaagtgcatgcattggtgtgaacatatttataaactaatatgaaatgtttgttgtactgaatctgctttttgggatttggttgttttctgcaacaattttctgtttgtaaatacatctatttttcgttaaaagaaaaagaaaagaaaacaaatacatctatttttatgtaactgaataaagtaggaggcaggatctgctattatatttggaagatatcagcaactagtatttttaggacttaagatgaaatttataattaagatcataagcagtttgacaaaatgaatagacaaaacatggattcggttgaaattatttgagcaaattatatggtatatggtttttttttttcttatcggtatatgaaaatttagtatctcaatttcaattcaaacataatttgattcacaatatattctgaaaaatatttaaaagaggaaaaaa

SEQ ID NO: 34250 - DNA, 2829 bp, Cannabis sativa
  modified_base (57)..(68): a, c, t, g, unknown or other
  modified_base (636)..(642): a, c, t, g, unknown or other
  modified_base (1286)..(1292): a, c, t, g, unknown or other
  modified_base (2370)..(2370): a, c, t, g, unknown or other
taaaatgcatctcagaattcaaaattaacagtgtaaataattatttaaatagctatnnnnnnnnnnnntaattaaacatgattaactgctaacttccaaattaaactaagcggtctttacaacacactacccttatcgactttcaagtgaggaaaattattttcattaaacaaacatttcttgaaaaaatcaccttaagtttcccattctggtttatgcatattctataaccttttgtgcctataggatatcctagaaacgtgccttcaatagatctagcatcaagcttatcatcagattgatgtacatatgttgcacatccaaacactttcaagtgtttcaggtttgctatcttaccatacctcatctcataaggtgtcgtcaagtctataattatattaggactcctattaacaaggtaacaagcagtagctaaagcctctccccaataaggctctcctaaccccgaactaagaagtaaacacctcactttgttcaacagggttctattcatacgctcaacaactcccttctattgtggagttttcacaactgtcctatgcctagttatcccatgctcattacacaatctatcaaacttagtgttgataaattctagaccattatcggttctannnnnnntaacctttaaatttattttgttttcaacctgagctttccatatcttaaattgttctagatactcatctttggtcttaagtaaataggtccaaacacatctactgaaatcaacaataatagatataaagtagtgtttgcctaaatgtgttgggattctacttggcccccaaaggtcagcatgcacatactctaggactgcctttgtgttgtgagttactgttgtaaacttgatcttgtgttacttgccataaacacaagtctcacaaaatggtaatgcacatgtctgaagcttttcaatgactcacttcttgtacaattccctcatgccttgttcactcatatgtccgagcctttgatgccatagttgtatctgccttggccacaagtacagcttcacccttgagtacatacaacccatgtactctctttcctttcatcacaagcattgaaccttttgtgatccttaggctcccattcaaggacttatagccataatcttcatcttccaaggttccaagagatatcagattcttcctcaattctagaatgtgcctcacattatgcagaatcttcacttcaccatttaattgccttatagctaccttaccaattccaacaaccctgcaagaaacatcattacccannnnnnntctaccaccattattggtttcttgataatcaaagaaagattctaagttgggacacatgtgataagtgaatcttgaatgaaggatccactctttactgttattattttctgaaatagaaaaaaattctccatctgaacttccatctccactggtctcagccacaacttcagtcttttctttgatttccatgatcattagattttgagtactggttctggtttctgttgcatcttttgtcatcgtagtttgatttgaaaccagattgtgtcttcaattgactgcagaatcttttaatgtggccaatctttccacattgataacattatcgattgtctttggtctttgtctttgatcttgatggtgactggctgttccttgatgatcctctctttggacttcttccaattgcaagataagcttcgtctttcctagtctccttcccgagttacaattcaaagtcttttgactttaatgccacatgaactccttccaacgagattacattccttcgatagttgattgctgctttaacttcttgatatgcaattggcaatgatatgagaaatatgattgcttgactttcttcgtctgccttatgatcaatgttagctaaaccaacaattatttcattaaatttatcaatattatcatctaaggaaagagaagaattcattctaaacccatataatttttcaagaagattaatcttgctcgatattgatggtgcaatgtacatctgctctagttatttgttccacaatccttttgcagtctttttttgaagtagctttcttctaactccattggacgggtacatgatgatggtgtagtatgccatctcctccatctctgcaatttcctctggcttcttctcagccagcaacttttcatccccaagtaccttcgccaccttttggtgcacaagtatacccttcaaactctctcgccaaagtgaaaaatcagttgatccattgaaacctagccatcgacatcctccttcaatctgtgttcttgtagaattccttgatgaattcttgataagttcttggcgcggaagcaagtgatctttgaatctccnttgatgatcgaagaaccaagctctgatttgtagaaaatttagctctgatacatagaaatcaacctctgtaatttaagcttcaagattacacttaaacaaacaaaatttaaatcaaaacaaacagaccgagaacaaacaaaccaacaaacccattaaaccagaaaaatataatacaaatgaatctaaatggctgtcagacacaataacacaagagatttatactggttgcgatcctaagttcaatttgaacttggtcatactccagtttgaaagcattgttaccaatctttattgataatgataataagagatatcaatcgcatgagctataaggacataatcacagtaagtcatcgatagtgtaatccctcaatactcattaactcactaacctgagccaacataatcaacaatgttgctcaatacaattttccaatcccagctctctctctctctctc

SEQ ID NO: 34251 - DNA, 2101 bp, Cannabis sativa
agttgggccacttcttttctttgttcctgggccgcctcaacatccaattggattgggcctagtgcttgggcctcgctaacagtaatggaaggatcaaaggagaagctggatgagcccactgcaagaaatgatgtaaaacctgtaattttgactactcgtgagatatatattgtttgcttatcccatattatatagattaattattactcaccttacattatatttgaaggctaattaattctgtgtattacaaattttttcactataattttttttttcctttctaaaacctcaactattagtttaggtcgtgactcttcttcgttagcttcatctttttaattattattattgttattatttatttatttgttttacaatttcttttttcttcctcttttgatttttttttttatatatttatataaaaatatattttttcattttgtgaaacttatttcttgtatcagatacctcaaaagctcttgctcatgccttttttagtcaacaattaacttccaaggtgcttgaaacatagttggtaaaataactctttttaaagtacacattgctagttttatattgtataaatattctgttgattttactgcctaatttgaacctaaacaggtaccaaatgttactgatattgggctgaaaccaaggcaaataaagaaagttgctgtcattggaggaggcctaatgggatctggaattgctgctgcttttcttcaaggcaatattaatgttattctcaaggcaactaatgctgaaaatcttcacaaggggataaaattgattcaaggtgtatatacatatattttcttaacaaaagaaattagaaaagaagataaaataagcaattagataattttcttaactaagtttgagaaagattgagaattttttatgtactttctttttagatgtaatattaattagattactatcttagggagagtaacaaggaaaattgtttttttgtattaattaataatgcagcaaatatgcgaggcttagtagaaaaaggaaagttggcgcgggcaaagccagacaaggcactctcattacttaaaggtgttttggattacatagaatttaaggatgtggatttggtcattgaggttggtacttattaaaggtctcctataaaactaaagttcatcattgttaaagttgacatatatattatctagtatttagttaaactataacgaagtataccttgtaatgggtagtaattgattttcatgcttttagaaagtagtctgatagattcctatgatttcttaatttgcagactgtcattgaaaacattactcttaaacaagcaatatttagtgaaattgagaaagtttgcccttctcattgcatattggctactaatacttctacatttaatcctcaagtaataggggacaaaacaagctctcaagatcgcattattggggtacatttttacaggtaaatagatacctcattcatgtcttaaatttttgtgttagaatgttgtttttctaaaaagtaatatggtgtatagtaagatgtatttggttaaatttatcaaatctaattagtgatggatgaagtaactcatacttttataaatggtattgcgctctcatacacaatcaatgtaatactctcatatttcctcgaaatggtagttattttttctcactaatcttgaatggttttattactacaaatgattctttttggctcactattctcgagttactaaagtggcgtttagttcggaaaaatgaaaatataggtatatgaatgagaatgaggatgtgaacaaaaatggaataaataaaatttaaaatgcacaaaaaaaaatgatgaaaaaattattaatttttttcaaatcttgtattggagagagtggtctttctttctattttaaaatagaataattattttataatatcttaaaatgtaaccaaacaaaaaaatgaaatagaataattttcattctattcagtaagaacttcaacaactttgtaccattttagaatttggggataagatgaatggggttctatctcaaaatcaattagcaatgggaggagtagcccattcctcttatatattc

SEQ ID NO: 34252 - DNA, 1727 bp, Cannabis sativa
ttataattcaattctattcaaaccctaggagttagggaatgttttttgaggttgatttaagttggcttaggcttagttggttagatttaagggttgtagttggtgttgagcaagtatgagttcaagaactcaaacttggctcaactatggtggattgtgtaattttgagtgatacttggttttaccacatagaatgatttatatggataattacaggtattctagaaataacctatcgtttttactggtgtaaaacccaaaaaatggcctgccattctttagaaaatagcctatcgttttttgggcagtttcctcgtttcttatttttttctcttgtttcctccatatttagggctttgccatgctatttatcgatagtggaacttttagtctttagtttagaacctcgtgtttccttcgttcaatgcgtgatttttcattcatgtcaactaacacacttaatttaaaaaatgaggtaagattagcatagaacgtatttgtatatgaatatgcgtatgagtaagatatggatgctatctgtgattcgcatgctaccaacactagtatagtagtggtactgagtgcattgatgcagtatatgatgttcaaaaggtacgatctggtgttaccaacactagtacgactaagtacgtagtgcatgtggtacaacactcagtagtactcaaagtacagttcagccctaccaacactagtacgagtctagtacttagtgcatgtggtatagaggtcgtaattctgctaagaacgttctcaatcatctgttaagccttgtggataggtgtatgggcgcctaaatacaagtcggttatatatattgtatgttatatacttttcttactgagtctgttggctcacatatatttctttcatgtgtaggtaaagggaagaccaaaactaaaagtagtgagttcagagctcgaggatgattgtacatgtcaagagagttcgacctggagagttcggtctcgggacgacttgggtttcattttgtagttgctgtgtgacatgtttgtaaaacttattttgaatataagttttaaaataacgggatcccaattttgtatatatatgtatatatttataaaattttaaagttaaatcaaaattttaatttatcacaatttttgagaaaactctttgattagaaaatgtttgcactgtaattaaaaagtcatcgtagcgtgcctaagcattagggtgttgcagacttcgatcatcttctcttcttgtagcacactcgcactttgatgttaactttattgcctttctcttagtgaattgtaaatttatggtaatgaaagatatagtatcttttcttccacagtcttctcttcttggattgctctcagctgcagttgcttctcatttatggtaatggaagatatagtatccctgttattagatttctgcacatttttgtcggtatcgtggatataattaatcaattcaaaattataatatttacaataaaactctattaatttataaaatttaaactttcaccccttctaaaatatatttttgaattattaatcacaaagtctaataatagtgcgaaatactagaatatgagaattcatgatttatacatcatatctaaaccccaatttcatctgtatatcttcaagttacatgttttagacacaacttaaaaaacaaactgatactgcatattttttcgtccaggccaaataatctaaaacttg

SEQ ID NO: 34253 - DNA, 2071 bp, Cannabis sativa
caccattttttcacctcgagttgtatactcgcctaggacttgatttatgactacttgagagtcgttgtatatgtctaggtggtcagcccatatttcgtgttctagcttgaggccagcaattagggcttcatatttagccttattgttggaggccttcaaaccaaacttgattgccccatgttgttgttgcccccaggtgtaacgagggcaatgcctgtaccagacaggtggtcaatacaacttcagtcaacatgtaacttccaagcttaatttttgtgctctttcttcttctcttgctcttgcttcttctctagctttttcttttcttccaaatcatgagatatttcagaagatatgtctgtacattcagccacaaagttagcgagagtctggccttttatggtcaatcttggttcgtatgttatctcgaattggccaatctcaatgacccacttaagtgttgtctatagcacctacgacaagggttggtcagtgtacacccttactgggtgagcttggaagtatgcccttaactttcttgatgctaagagtaagcaatatactagcttctccataagtgggtatcgactttcagcgtcaatatgccttttgctgacacaatatactggatgttgggtgccatcatcttctctgattaggaatgaacttacaacatattctgtaatagccaagtatatgcctaattactcattttccaaaggctttgataggatgggaggttgagctagttatttctttagctcttggaatgctatttcacactcctctgtccattcaattttttttcctctgagtatgttgaagaaagggacacacttgtcgatggattttgagacgaatctacttaatgctacaatgtgtccagtcaaacttagtaattcttttatatttgtgggtgacttcatgttcaaaaacgcttacatctagtctaggtttgcttctattccccttgcattgactacgaagccaagaaattttcttgagcctactccgaacaaacacttgagaaggttgagcttcatattgtacactcagatgaccttgaagtattcatttagattctccacgtgccccccaagctttttggacttgaccaacatcttatagtagtacaaacctaggtctatcatgaaacttgtatgttcttggtctggtgggtgcattttgatttgaatgtaacttgaataaacatccatgaagcttaggatttcatgactagttgtaacatccactagctaatcgatccttggaagcgggaagcagtcttttggacatgccttattcaattttttaaaatctatgcacactctccacatgttgcttagtttggataccaacacagggttggatacccaaagtgggtagtaagcttcatagatgaattcattggcgcttagccttttgacttcatccttcagagcttgtgcatgctctttatctagcaacctcctattttgttgtacaggtcaaaagttcgaatctatatttagtgcatgagtcactacagatgggtctattcctaccatgtcattatgtgaccatgcaaagaggtcgaggttttctcttagaaattttatcaatgcttattttatttctagcactaaaccctttctaatcttcaattttttggttggaagagtggggttgatctccacctcttctaattcttccacaggtccaaagctttctacaagatccccaaagcgaggatctattgttgcctcccactcttggcagacatcttctctttcttggctttagacaaagccaggttgtaataagtgttgggtatatttttgatctccccttaggcatcccaccccatgccttgttggaaactttaggcataggtggtaaattattgttactgccttcaggttaaataaggctagctgacctatcattacattgaaggtcgatgttacgtcaattaccacaaattgtgccataagcattcttgttgtgggactttctccaattgttagagggagtaagtgttggaaatattttaccaggatctagatttactactaagtatgtttgattaaca

SEQ ID NO: 34254 - DNA, 1626 bp, Cannabis sativa
atcctatccgatccgcacctatattgatagtgaccatgtccactctgatacggttcaagattgatgagcaaaaaatagccatcatcttgaaggggggtattgtggacattgtcccacatggaataaatggtaaagtattgagccatatataagaacatgagctactccactcatcaccaattagtttttagatggaactccatgattctccacatggtatcagggccatatccccagcgagctttagatccacacctatctagatggttagccgcacgagatccagagggtgaaaagacgcctgagatccgaacaaaaataagcgagcaaatggcagggcctgtgataaggtgattcaacattggtgaacaaaaatagccaccatcttgaggggggtattggagaacattgtcccacatggattaaatgtaaaagcattgagccatatataagaacatgagctactccactcattgccaattggttttgagatggaacctcatgattctcaacaatatatatataatataattttttttagaaacaattcaatagaataacttaattagtatatatgttatgacgtaacagtaattgataagatattttttttaattgttgaaattttgttagactagtcttttaatttttattgtaatgcatggtaatgatgatagtataaacctcttaaaccgtaccgcaccatatttttgcaatgggtttttcacagttttaaagtcttgcggtacaattgtagtttgagaaaaatacaaaaactacatatgcaattggttttaaaaaataacctaaacctgtactacccacacttcaaacacccctatatagcataatcagctagctatcaacaaaagctatagtgtaatcatttaataaatttgaacattcgtaatcattgatatgattaattattagtccactaactcaagaatcatttaattatgttgatattggtatacttgttagggttttatgacctaattaattctaattcatttgtaatatttattattactattattatcactaaaaaaatataaatttatttaacttggtcaattacattacttacgtgtttacttttataattatttgtttaatattaaatgtttacttgtaaactgatcctgataacgtggatattaaaatttgacacgtaacaagaaggaaaatatttatgtagttgagtagtgctgagtcatagcaatcgacttgggagggatccctagccctgtgcctaagttacacatgaaatttctttctttattagttgttggtggtggtttttgttgtgttattttgcgttttgtgaatagtgtagtttatgcactagctaagtccgttacaagttttgttagagttaatatttggactgatgcttattctaaatttttaataataataataatgaatgaatgaatgaatgaatgaatgaaatagtgattagagtgtgcactgtgcgaaacaaccttaggagaaaaaaaaaataatagttcatatgtttgagtacatcttattaattatgatttgtacattaattataaaataatataatgtgtgtgagtcattaattagtgaggtgtataagttttgtttgagaagcatgtg

SEQ ID NO: 34255 - DNA, 1246 bp, Cannabis sativa
ttgaaataccattgttgggcggcctctgagagggtggtaggaaaaactctgcaacatacatctcctcgcgctccttgcaggtccctttgcatttcaaaatacttaaggtgggataagggatcttccttcccagtgtacatcttctaggttggtatcttaaacttgtgaggtaattctaagacattaatttctagggagaaaggggatccacgtgctcggtcccactcgaaagcattgttcctctgaccgaccaggccttggaacatattttttagttcgtccaactgtgcctgcacagctggactaacttgttcagcttcttggcccgaccagagtcgtgtcagcatctctttgagcgggattttgagcgcgggttccaggctgtacgattagtgtgtcatgctggttgtccacccctctccttctcttcagatcatcaaggagatcatgaactgcccccaatcaagtaaatacagaagcaccttgttgtctcagtgactggttggtttggccaattagctggccgacaccattaacttggttggaattattaggtataacttctcgtgacgaatcgctagacaaggtctgcccgcctaccgcttggcccacagatgggacctatgactggggattggacggctgaccatttatagtcagagaggtgttcattgcttgatcttcgttggtctcacccagggggatgatggttacaggctgttattcggcaacttgataggcttttcctataaacacggtggtctgccgagttcagtcgtcaatggctacatattgagcccttaacatttctatatccttgtccctccattcagcgaacatgcacctctgctcttcaaatgtgagatttactgcggcgtagagttcttcctgatcatgatgcaaggtgttggtatgaccttgcatgactctaagagcagcatggaggttttggatttcggtgtcatctccaatagttatttgaatattggttacaggcagaatgaccgtgttaggaatgccctggtttgctgctgaattggtatttccagtctcttgcacaccaggcacgattccactcacaggagttgtcacaccgtgacctacgatcgagggttgttcgggatttgtggttgacggaaccctcgtgttccccgggttctgcagtgcaggatccaccgcctgtggatttgccggatcaaccacgcctctacgagtctgtaccaccatcgtacttgtgattagattt

SEQ ID NO: 34256 - DNA, 1336 bp, Cannabis sativa
ccttttgaggacctcttgctccggaagctttgaggaggtccagttaagcttgcggtaggagcagagtgagacagggcttgtccactcatccctgaggggttacttaggggattcttgtaatgggacgatgtgggagccaaggttgggctctcgttgtatccaggggtgtcggagaattgtattccgctcatttgaggagtaaccggagatagggcccctgagagctttgctccgggtacatagcctgataccccagttggatagtaccctctataggccactatttgggcctcttccaagttgatgtacttttgaaccctcttctggaagtcttgaagattggcagctccctcctgttgtaattgattccaaaatggggtccctatacggatcccagcttgaagaaatgaaagctgttgtccgtcgtcaaccttcttagttattgaggcttcttctttgaacctctttataaaattcttcaaggtttttgtgggtattttcttgatgttagttatggcactgacttcgagattaatctttctcgccacgacaaactgtctctggaaacttacttccaacctattccagcaatccacagatcctggttctaactttttgaaccattcctctgcggagccgctcaatgttagcggaaagcataaacatttggcgtcattactgaccctcatgattgtcattacctggttgaaatgagataaatggtcgctggggtctgagtctccagtatatgttgccattttaggcatcttaaagtttttgggaagctctgcctccaatatgtgccgggcgcatgactcccggtcctcgcaatcggcgtctgagtcatcccttttttgcgcaatgacaccaacttagctaaaattccttcatttagtgtccccgcggagactgctagtatgtgtttctttttgtccaggtgatcccgcaaatcaccgtgcttttcgttgatttggtgtcttaaatcaacgggagggtatctccggtttccccttcctctcccccaggctcttggtgcatggacacgctcttttagtcctctcgatcctgagggaaaaaactccctttttggagttttcccctttgcggacctttccctttcgagaaatctgagcggaccttttgcggatctgcgcctttttctttctccctgggatagaagtatggttctttctttggttttctttggaagggtagcgtataggacttggttccctattgttgtgtttctgggtacttggagaggattcttccagcgtatcttcgggtcctgccgggatggccttagggtgtatatgaatccctgctgtctccatgg

SEQ ID NO: 34257 - DNA, 1971 bp, Cannabis sativa
gtttatggacaactgacctgtcaccactaatggactagcatcagcgacagcctcctgagtcatagtaaacagacgcccggattctgattgttgttcttctttggttcttctttcttagcccgcgaatagtctctaataaagtggcccaccataccgcactggaaacaagtcttagcctagcactcaccctgatggtgcttcttgcatttgggacactctaggtatgatctgaacgtagacccacgaccttgatagccacctctatttccccaaaagtttttgttacttcccggtgtctcgaaatcttcagccttctatttgtgatctggggtgcctctatcagtcctcttactgacattaccacccacattagggttcgatgttgtgatgacatccttagcagcttgctctttaattacgtgttgttctgcctcttcaacaatcaacgctaactcgatcactttcttgtataatgtgtcatgatcggtggtaattttcaagtcccaactgatagtggaattcggtcaccttacatattttttttctaggtaaagtctgtcggtaccaaatcacccacgaacttggatagacgatcaaattccagggtttactcgaccactgtcttcttcccttgggtcagcttcacaaaatcttccatatgtgaagttcttacatcaatgttataaaaaatttcttcaaacatggtcataaactcttcccaagacatggtactgacatctcgggtctgacccacaatatcccaccagatacgggcatgatcttgtaacatgaatgcaacacaattaactggtccctccccgtcaccctcatgttatctaggatgcgggtaatagtgctcatccactgctcagccttgataatatcagtacctcccaagaacgttggaggttgtagcttcacaaaacgttcgaacacagaatctcggtgtggcagaataaatcttgggttacccaccagtggaacaggagctggcggtaacacttgttctactagagctgccggtgtcggttgtctaaactgatgcagttcatcttcttgacgaagtataatgcttcgcattttgtgaattatttgctgccaatcagcaggtagattagcattattaacccccgcgttatcccccgaattctgcggaggcgcaggcggtgccagtggattggcttggtcattaccaagctctatgtgctcgccttgtggtctagatgattgtagaggatccatttttttacaaatagccctgaaatcaacaactctggcgagtcaggcaccagtaccacacttacgcacttattgccttaaccttaacttaaacttactatttctcttattaaagtaaacatttatcgatttaaacattaatcatgcttttcatataactgtcacttttagatgctcatatactgcctaaaatgaaaagtggtaattaaataatcacataagcagttaagcatttactctcaacacttactgcaccacgagtcgagcttgtctttaacgatgattgtacatattcagccagtctacaggaagtttaaaaaccttggcactctgataccgaattgtagcaccctaataattaggcaggctaccgttttcagataaacataaactaatcccgctaaacagaaattactagaaataacagcgacattaaactttaaattatttacagaatgaaaacataacttgtaactatttaaactttacaaatcattctaaaatattatacatgtttcaggatctcgtaaatttttttcacaaaatattacaagtcattttaacttgtcgacctaagcggcaaaactgagaatataaaatacatcagctggtagacccaacccacatggtctagtgtgccctgaacatgtacaatcgaccgccaagccctcgaacttatggttgatcacaaccaaatttaccctttcctgcacagtagagcacccgtgagcc

SEQ ID NO: 34258 - DNA, 1102 bp, Cannabis sativa
gagtgggatttgattgatgtgtgatggggatggcacacgtgtctgtgcatgggaatgatgagtaagtggtatttttgtaataaaataaagatggtaagtaaaaaaggtgatgtaggcgtgtaggggtaaaaatgtaataaaatgtgcaaaatagatttttggtgtaaaaattaaaaaaaaaaaaagaaaaaattgaaatgcatgttgttaagatatttttcaaaaattataaatgttgtgaagttgttaggataatttgagtaaaaaagataaagaataattatatatttgaatttaaatttgattggatttttaattatggtaattagttaatttaataattattataataataaatattttttagtttatttatgcttttaatttttagtcgtaactatcttataacaaaattaaaagaatttatttttaaaaatgggtttggtaaaattttatagtatatattcttatatgattaaattttaattctgtaatatatattaaaatatatatgatacctatatattgttaataaaattatttatataataaaaaatacattaaactaaaatattaatttacttatgtataatttaaaatctttatacaaactctatcttttttctccattcttattttttaagtctattatgaatactaaattgttataagatttttttttgtgtgtgtgttatgatctctaatttaagttattttgatcatttttttttggtgtgtgttatgatctctattttgagctattttgatcaattttggcatgttttattagtatgattttgtaaaaagttattatataataataatttttttttattctataatgacttagtgaatgttgatattgagtcatgtatatcataatttagaatatcgagttatgttataattgtttcctttactaataatgatttgtatttttttaggagtcacgttgaacaacgagtttgcaattgatgacaaaaatatatctcgagaacaagaagcatcaatttttatatgattatttagattatggcactttgtgggacttttctgttatgaacttgggaaaaaaaatctggtttatttctttatttttcta

SEQ ID NO: 34259 - DNA, 3902 bp, Cannabis sativa
cgaagcaaaggagttgaacccatctgtcaaaagtcgatctcagagttgggcagaggaggtggaagatgaaaagatgatgaattcaaatgctcaacagtcaccgaaatcagctgggaggatctgggagacgtttacgaaggaaaaaactaataatcgagatcagcggcttcttttcacagaaccaatgattagagatggaataaaaattgctcaagtagatctagaggaggtccgagaagaggaaaattgctggatattagcaattatatgcaaggtatagggagctaatctacccatgactatattcgaaggctttgttaaaagggtctggggccatctttgagttattcaggttagtaaactgtaaatgggattaatcatggtgcggtttaatgatgaagcaactcgagatcaggtagtggaggcaggagtggttaaattcgatcgaaaaccggttatagtccgtccttggtctgcgaatttaaacacaatgaatctggttcgcactgttccattgtggaccaaattacatgacctagggcttcaatattggggtaccaaaagtctaagtgctctggttagcacaattggaaagcctgtcatggtggaccaacacaccaaggatcgaactcgtctgcaatacgccagaattctggtagaaatggaagtcacaaacgctccaccctgattcattccttattttaatgagtttgggcaactccaagatcagattgtggagtgtgaatggttacctgctaagtgtgctcactgctccaagtatggccacaccaaagcaacctgcagacatgatgaaattgtgaaaatgaagacagaaaaacagcaacaacatcaagataaaagtaagcagaaggaaaagaagggaacaaaggacaatacagcaagaaatattcaacaacagaaggagtgagagataccaaagaaaactatagttctgcgacaacaacacaacctggaatgtcaaaagagaatgcagaaaacaccaacagttccttcactgtgttgcaggaacaaaaggaggatggggtagcatctcaggtagctactgagcatactggttttgttatttctgtagctgcctaaggagaacaataatatagggtgttggaatgtgagggggttgaataaaatggagaagcagaacacagtgtttgatttgtgttgtttgaataaaataggggcttgtgggttattggagaccaagttaaagagtagtagaattagagagatgatggataggaaactcactaattgggaattttaaacaagttctgttattgttgagaaccgtattctgattatttagaggaaaagttttactcggatgattgttgttagagaggaccctcagttgtttcattgttatgtgaaaatggctggccattcaaatgctatgagcatcacttttgtgtatggttttaacacaatagaggaaagaaaagggatgtgggattgattactcaatcttaatttctctgctaaaccttggctagtaacaggggatttcaactctctttctgaattggaagataggaagggtggcaaagaagtaactttggatgatctcagggatgcaactaattcgctagctcaaagccacatggaaagactccttaagataggatcaggatatacttggaaaaataatcaagatggggaaaagagaatttactcaaagattgatcacacatttgtgaatgaagattggacagatagttttccttcggctaaagctcactacagctgggagactgtttctgaccactgtttatgtgttgtttagatggccaccaatgagaaaatagggttcaaacctcttaggtactataatttccgggctgagcatccagactttaaagaagtggtccttgaagactggtatagaccgatgaaaagagagggaatgacagctttatgcttaaagctcatgcgattgaaacacaccatcaagagatttaatatagatagaataggggatgttgggaagatgtatcaagaagtcaaggatcattatttggaaaccagaatgcaagctcaagagcatactaatttgtcttaccaccaaattgagaaagaggttgccatgaactttaatgcccaagagaagatgtatcatagtttcttaagacagaggagaaagttacttggttgtgtaaaggatatgagaacaatgcttatttccatgcttttctgaagaaaaaaaaaagaaggatagaaaatagcatagttacttatacaaatgatcaaggagagatcgtagatgactttaataaagtggtaaggcactttatagtgcacttccagggctacatgggaactagttcaaatcctactcagaacctgagatttgactgtatggagctggggagcagactcaatttggagcaacaactgagtttgatgaaaccgttcacaagcaaggaaataaagaaggcattcttcagtactccagattcaaaatcccctacgccggatgaatatggagctagttttttcaagacgatgtggcctcaacttggagctgaattcaccaaagctgtggagaaatttttcatgacaggttcaatgcctcaagaatttcatgcaactatgataacgctcattcctaagacagaaaaccctaccaaggctgtggattttagacctatagcctgctgctcaactgtgtataaatggatctctaaattgttgtgttccagactctctcaagtgcttcgtgtgttgattaatcagaatcaaggagcatttgtacaagggagatcgatagctcataatgtcatgattcttcaagaccttttaaagaattataaaaggaaaaacatatgtccaagatgtactctcaaggtggacattagtaaagcgtatgacacaattagttgggagttcttggaaacgcttctgaatgactttaaactgcctgccagatttgtctcgtggattatgacttgtttgaaagctaccttttactcggttttgatgaacggaagagtgcaagggagcttcaaaggcaagaaggggttacgatagggtaatcccttgtctcctttctaatttttcatgataatggagtacttgaccaggagattactgctagcagccaatcaatccaagatcaggtatcatcctttatgaaagaatcttaagataataaatttgtgttttgcggatgacgtgatgttattttgtaaaggaaacttaagctctattcgggagataaaggaggttttggatgaatttaatgcaacttcaggccttgcaatcaacaccaacaaatctcatctttactttaggggtgaaagaggaagataaataggcaatgatgatagaattgtctcttcaaaggaacttatcctcttaagtacctggaggttcctctaagaccaacaaaatggaaagttgaagattgtggcgtgataatcaagaaaatcaagcaatgactccatacttggactactaggcatctctcgtttgcgggtagggctcaacttattcagtatgttttacttgcgcttagaaactattggatgagcatttttatattacctcatagtgttacaaaggaggttgaaaaactttgtaaaggtttcttatggggctggaatgggaatagtagtaaactcgatgtggcatcatgggaaaacgtgtgcctcccaaaagcttatggtggcttaggcttcaaagatggagtcaaatggaatcaagccattcttgctaaatatatttgggccatctcctctaaaagggtcatctttgggtgaaatggatcaataatatttatctcaagaacaagtctttgtggaactatgagcttaagagtgatactagttggtattggaggaaattatgtcatctaagggacaagttctgtaacaccctaactagca

SEQ ID NO: 34260 - DNA, 1785 bp, Cannabis sativa
  modified_base (798)..(810): a, c, t, g, unknown or other
aaaattcaaggagcatgatttggtacatgttaaagtttaggaagaaaaaattctaattagtctaaaatcaattaatagtaaggtgaaattgccttactactcaagtaaaattcattgtacaataattaagctaaagttgtagttattaccctaagtagggattatgatggtccaattagaaagaaactcaaataaataatttagggaattgggagtttggtatttttaagtaattatttccttttctttctagaaaaaaaaagtaattattttcttttatttaatgttatcgttttatttattttctttccataaatgataacaacatcttttaaagttaaaataaaaggtaaatactattttgaaccttatgttttgtaaaagttacaaattggaccctttattaaataacaaaatggaccatgtattttctaaaactgtacaaataggactatgaactgattttttgtcaaaaaaaaaacttaataataatctaatctagagatgtaatgataaaactggctacattttctgtatcttttcatattagaaattatcttaaagttggttatattaaaaaatataattgttaaaaattgaactagagtcctatttttaccattttgaaaaatatatgatctattttgtcatttaatgaaacagattgtccaattaataatttttacagaacacaaaatccaaaatagtatttaccctaaaatatactcatttatttgttgtgtcatagaaaatggtaatcatcaattgttaactactcttattattattattattatnnnnnnnnnnnnnattattattattattatttgagcttccttgaaataaatgttttaatataatcaaatttagaaaatggaccataaacatctactttaatgtttcaaacaaaaattgggctcaaatgaaacccactccacctcttaccatgggctaaggtgtattaggccaaatcttaaagcctctaagcccaatagttccaaaattaaataagaggagaaacaccattaaggcattaaaataggagattttttttaaaaaaaaaaaaaaatttacaccaccacatactaagattttaaattttttttattttttactgtaaagtagaatttttttaaaaaatattgtgtattatgttaagtttcatctgttattttttagttgttccactattttttttaattattttgtttagtgttttaagtttgtcttataaaaaaattcatatgacagtaaaattataaacttttgcctaaaatctaataattttgtaaaaacctttttttttttatactttttttttctaaatttttgaagtaaaaactataaattaattctaaaatactttaaaattttaattataaaaatttcttatcatgttattgaaaaaaaatgcttgaattcttaactaatatgtttgaaattatatttttctcgttttacactatttaaattaagatttaaatagtttattatatgtgtgactatatttttttatatatttatatacagttttaaaaaatattattttaaactctaattttaacattataaattatttaaaattttcacaaaaatatattatgaatctaatatagctacaataaatgttgtcataaaaattaaaaatattaagagtgtataaggtacaacattttggtatgttgaactatacaccttccctaagaagattatcacaataacattatagatggagatgtaacatcaagatttagagttctaatagaaatgcaaaacttttattaa

SEQ ID NO: 34261 - DNA, 3577 bp, Cannabis sativa
gaagcggctctgacagccatagttgcagaagaagagtccatgggagagaaagagagaggttaattggctgaggaggaacaatggagagtggagagaggagtggcaacaccaataccaatacagattaccaattcccaaagaaatgaaccaaaaacagaagtaaggcgcgcatagctctgaaattggtgtcctggtaaatgcatgggcccattattgtgaatcaccaacgaaccccaatcttctatttctttctttttattttttgtattattataaacactacggtggtgcaattacaaatgttaaaatgggtatgggtctattgagtatcacacccccacataatttttttttttttttgaatgaaaattataatttattaggcagataattctgctaatacaatagactgaagagcagaaagaacattactcttagtaaaaagactgtcagaccaataacaagcaccacgtgtcattcagtgtgcgactttgttagcagaccgtttaacatgacaaataaaaacattatctaaaaaaaaagcataagttggatattcttgaacaattaaactaaatatggatggcaatgagacagaactacgaatggcctgaactgctaaactgcaatcagtcttaatgatcacattcagtttattcttctgcttgatccaacttagcgcctccttgacgctcaaaatttctgcaacagcaggttgacaacttgtggtagaaaccgttgaaaaagcctcaactaatctccgtcactattgcgagccacaaagccagtaccaacctggtttgtagcttcaaaaacaactccatcaacattaattttgagcttgcctactgctggtttgatccaataatcgttgctgtcaactagtgaaagctctagagcaagagaatgtaagcggttcgactgtgcaaagctccattgccggtgagtatttcgagctaaccaaacaacatccgatgcagtacaatgttttccattccatagcagggcattgcgtgttttccattccatagcaggtcattgcgtgttttccaaataacccaactaaccatcactgcttcttcaagtacaccagaattaccacttgctgccaactccataaaccagtcaacatatgttgttgcagcagagacaccaacaccgagtgacgaacggttccagcaagagtgagcaaaggaacattcaactaagacatggaatattgattcctctgcaacattacataatacacaaataagctccacaaggacatgcttgaggtggagttgagattgagttggcaagcatcccgaaagtgattttcacgcaaaatgcagcacattaggagggactttaattttccacagcactttccagaaatcagcctccatattagaacaccaattaccattaacagtttgtaagtaatggtaggagcttttgacggtgtaaaaaccagatgcctctttgttccaaaactatttgtcgtccatcacagtagaactcaaagggacctgcaatataagatcaacatcacggggttcaaacaggtcagaaacaacctccatatcccactgtttacagtcagttcgcattagttgggatactttacaataagctaatgcgggatatgttgaaataacacaaggattagcatcatctaacaaccatggagtgttaaggacatcagttgaagcacctgacacaattcttctcctggcacccactttgattagctcttgagactgaaagatacttcgccaaagaaactcggattggaacccaaatccgccttaaggaaagaacatcgaggaaagtatcgagctttataaatttgacccacaagcaagttctgatgcaataatagcctccatccctgtttccccaataaagataagttatagtctcggaagcttcagaaccccaacccaccagtatttttagttttacacagtttcctccaactaaaccagctaacacctttacacagtgccaagattcaatctttttcaactaaaagctatacattcacctttcctaacatgctcgtgcaactgtagagggtaggttttccctaaacctgtggaatagaggtttcattcaccactaacaatggtgtaaattcaaaaaattatagaaacaaagaattcttaaagaaaaaagagagaatttaaagggacttactcactggtgaatcttaggtgaggttagacggtgaagaaagcaactgcaaatttcttcctgcacggtgagaagaacacaaggacgaagcttcaactttcttggagtgttcttattttttttctctggttttcttttcgggaaataaaaaatgaaagtaaaaggcttgaaggaaaaggatggcctttatataggcttcattttaagtcccccaaaaattaatcaaatggaaatgaattcccaataaaattattatggggaagtggaaagagaaaaaaaggaccataatgggagtgcaactatcaacactgtttcccacaaaatatactttaaaaattgtcattatgagtattgacatttaatagtcagctgaagagatagaagtgtgatagttcatttttgcatggtacaatcgccaaaataccaaccacgtggggctcacatgcctgccagtacccgtataggtattaaaagtccccatccgtacagatatttttctggggacttggggggcaaatattatcctaaagttttcacagctaacggggtacttacacgtggcatgatccaatcaactctttgacctagcagagaaccttcgggcagaaatatgccagtaggtccatataaggagtatcaaccataagctgtagtagatgtcccatgaagcatctggctgtatcatctacctgctggctagataagatgggagcaacacctttcaaggctaattctacaagctaatctcataaataagacaagtcatgtagaaggcctgaccaagtagtgaatatgctggccagaagagatgttgctagggataccggacaaggatatgtgagacttgatttcatcttcaacaagcttccacatatctctaactgaatcctacagacttagatccaacaaatctatccgagaataaaggagcttcaacaaatcgtaactgcaccctaaaatatagggatatttattatttgtttgctcttttttacggagcccaatgtaacaaccccctataaatagtgaaagcattcaccaagggaggagaccgaaaaatcaagagctaaattgatactcacacatctaagagcacttcgctgaaagagatttttagtaaacactttgagagccgaagctagagaacactttgtgttccttagtgatctgctcgatattatctcaaaaaagtaatacaaccaaaaagagagtaggtcattacccatacataaggggaccgaacctctaattctatgtgttctttatttatttgttatccttacctccaccttgatgattaatcaacatttatttgattctgacttaggtggctatttttccaatcgacagagctattgattaagtgtaattttcaatagaagcactatctcaataacaa

SEQ ID NO: 34262 - DNA, 2577 bp, Cannabis sativa
aatgaccaaacaaaatgttgcttgtttggttatactcactgtaagaatttgtgagttattataagtaatgagaatttggttggttataatacactctcattattataagtaataattaaaatggatgaaaggttagatttttgttgttattttagaaaaaaaaaaagtgagttaatttgtttggttgattaagtttaattttatcattgtatgttgtatgtattgtaatattatgaaaaatcatagcaaagtataaatgctaaacaataaagttaactgaaacaagtcaatgaaattggcatagtcgtcggagttgctgtcagcaccggaaaaattactggagttgctatcggcgccgaaaaagttatcagaattggcattattgctggaaaaatcacaaaaaaaaaaaatcacaagctagtttcttcaccaagaagctagtttattcatcaagaattggtaatttttccagtaatttttccggccacaatgccaattttaatgaatttcccagagtttgctgtcggtaccgaaaaagtcactggagtagctgccgttgtcgaaaaagtcgtcagagttgctgccaatgccagaaaaatcattagaattggcattatcgttagaaaaatcaccgggaaaatcaccaagaaagtggttttgtcatcaagaaattggtttcgtcatcaagaaactagtttcttggtaattttttcggcgactataccaattccaatgacttttccgaagtttgctgtcggtgccaaaaaagtcgccgaagtagctgccagtgtctaaaaagtcgtcaaaattggcattgtcaccggaaaaaatcaccaagaaagtagtttctcattttcttagtgattttttcagtgattttttcaacgacaatgccaattccgacgtcgacagcaactcctacgactttttcggtaccaaccgctacttcagtgatttttccagcaccaccagcgaaatctgacaacttttccagcatcagtgacaaataaaactacctaaacaaaaaaaaaacattaaatatgggatttaaaaatctaatttacatatatatatgacatatcaaataccataaaaagacctaaaaataaaaaataaaataaaataaaaaaaaaaccatataaattggttaaacttaaatgtgtcatatttatcataagaactttcaaaatctcatagtaagtgtaatttcctcttttttgaatttgggtttgtttgtgaccttagatggtgatggttttttggccaaaatgtgattatcgatgggttatcgatactttatcgatagtttttgtttgtgcttcgctattttgtgcacaaacataaatcatcaataaactatcgaatatcgataacttatcgataaataccaaattgataaaaactatcaataacccatcagaaaatgccatcgataaattatcgataaactatcaataaatgtcaatttgacaaaattgtgttacacaaacataatcatcaataaattatcaataacctatcaataagcacgttttggctagaaaacaccataaacactagcatctaagctctcaaacaaacacaaatcaatataaaaaacaacaaggcgaaggcagaatatggtgggcttctagtcgggctcggagacaaggtctccttcttgttatggacgatgctcatagacgaagatggagacggaggttcaggggctctttattttgtcaatgtgagtactgctatggaggttcgggtcccgggcctttgggtttcatatgggtttttggggcttctagggtttcatcgttatcgaggttgaatagagcggggctttcggtagtggcgccaagcaaatagagagaaagagagagaaaagggaaggagatagagagttgtgattttttaattgaaaggggtagaatagggaggggaaccaaaagtaggcatatattggtataaaattattgggaagctacattttaatattgggtaaagttttaagcattatttataaaatttcctattattattttaggggtgtttagttatataaataatttgtagggacacgattttgtcccgtgatgtactttcacggaatgtattctatgatgtacgacagccgttaaatggggaagttatttgatctaagggttggggttgatctaggggtaattaggattaaaaaatggtaacgtaccctgagacccatctattgtaccacggaatacattccgtgaaaagtacatcacgggacaaaatcgtgtcccataatttgtatatatgtttgctactgagtttgagtatgtaatctcaattttttttagtcttaatttttgtattctatttataatttttttttctaattgctattattgtttaataataatgttaaaattgctaaatttaaaaatatttttataaattaatagtcaaaaatatgtaaaatatttttcttcaaaaatataataataatataaatttatggaattttaagcccaacaaagctagacgtgatacactaatcccaacgagtcccactttcatgtccaacaatgttggacatgaatttttttcatg

SEQ ID NO: 34263 - DNA, 2019 bp, Cannabis sativa
attaacgcttctacttgcccattttcttgaggccttaagactgtcgagaagctcttaataattttgttcctctggcagatgttagtgaataactcctcatcaaaaactgagttccattatttgatactatcttaatgggtattccaaatctgcaaattatatccttgacgacaaagttgagaaccttcttgcaggttatggaaactaaaggttcagcttttgtccactttgtgaagaagtcgaccgctactactgcgtactttgctcctcctcgccctgtgggcagtgccccaatcaaatcaattccccatattgcaaatgggtacagtgagatcatcattcttagttttgttggtggtacgcgaggtatatgtgaaaatccttgacacctatcgcacctcttgaccaattcatgtgtgtctttatttattgttggccaatagtatccttgacagattatcttttttgataggctttgccaaccggcattgtctccgcaaaagccttcgtgaatttcctttattatcttgcttgcttctgtgaggagcacacaccgtaggagaggcattgaataacctcttcaatataatttgccttttactatcgtatagcgaggtattgaatacaaaagctttcgtgcttcgtttttgtcagtaagaagttgtcccttgagtagatagttgactattggtgtcatccatgttgacgaggcttcaataatcttaacttcttccttttcatatatacttggttcttttaatacttccaccgataccaaatttaagtcatcaaattcattttgagagaccagttttactagggcatcggcattagagttttgttcaattttaaaataaataaacttttccatgttcttccgattattctccaaatagtttgccatttttaagccctttgcttggtattcacctagaacttcatttacaattagctgtgtcactttagcacataagattcttgacttttaatactttagctatattcaaaccagctatcaaggcttcatactcagcctcgttgtttgaagtgtcaaattggaatcttaaggcatagtgaaacttgaagttttctggcgagatcaatatcacctctgcacccaagccattttcattagatgctccatccatgtacaacttccaagtgtccgcatttcactggataagtggattttcttttggaacgatcccttctatcaagaaatatgccaaagcttggcccttaatggatgttcttgggtgataggttatgtcgaacttccctagttcaatagactattttatcaatcttccagacgcatctgattttgacaaaacttgtctcaatggttgatcagttaacacctttattggatgtgcctggaagtaaggccttaatttgtgagatgcatgaattaggcatagggaaagtttttcaagagagggatacctcgactctaccctttgtaaccttttactaacatagtaaacaggttgctggtgccttccttcttctcgcaccaatgctgcattgattgcattgaaggcttcctcgcactcgtctgtccattcgaactttttatttccttgcaacacattgaagaatggtagacacttgtcaattgacttcgagatgaatctgtttagggctgccattcttcgtgttaaggcctggacttccttcgattttgttggtgatggcatttctatcaaagccgtgattttcttaggatttgcttcaatgcctcgcgttgactatgaatcccaagaattttcccgaggagaccctgaaggaacacttctttgggttgagtttcatgtcgtactttctgagcatttcaaagcactccgtgaggtcctttgtatgatcttcacttttaactgacttcaccaacatatcatcaacgtagacttccatgttcctccctattttcttttcgaacatctcatttacgagtcgctaatacattgcctcaacattcttcaagccaaaaggcatgactttatgttggaatttatttta

SEQ ID NO: 34264 - DNA, 1072 bp, Cannabis sativa
tactatttcagtgattgtttatgtactaaatcatgctccccgtactttgatatctaccaaatcatgcccctaaacttgcatctatattagacttttttttttattaatattggacaaaaattcttaaatccaacaattttcatagttcaggggacatttttaatgactttaaaaatttaggaacatgatttgatacatgtcaaagtttaagggtaaaaatcttaattagcttaacaaataaaagagatgtgcgtagtgattatacatttaaattgtaatatttcttttcaaataaaaacaacatataatcacaactaatatagtatataaatatatattaattaaaattgattgaaattaaaatttaaaaaaatattatacatgtgaatgttataataatggatgaaacggctttcctttcaatgaagtgatcagaaataatagaccaactttttatattttttcataaaattttctttctttacatgcaaattgcaatgcttatcaatcttttcaaaatacattattaatcattaaagtaagtagctttgctaaatttgcgcaaaggagctaagttggtctggcctacaatcatcacatgtttagaagttgtgtttaatacaaataaatgaaacacttatgaaagtgtactctcatcattttatttatgtatgatctcttaatttataattaagatctaattgatattaaccaatctctctctttttttttttattttttattttatcataaccagtaaattttttaacaaattcaaaacaaaatgtctgtgatggaaacaatggtttcatctccctcaaaagaaaacaaccaaaagaaacagtagaactagaaccatttttgtaacatcataagcaagcagctctattaaattctctaggaatccaaaaaaaattggcattagacaacaaatcaaagtctgtaaatagattcaagagcaaaactccatcctttcaagttaggcaatgagagaaaaaaactggatttggctgttagacatttatatgtataaactgaaatatatatgtttatgtataaaatgcggaattaa

SEQ ID NO: 34265 - DNA, 1419 bp, Cannabis sativa
gagtgagcactgagctgggatgaggttgattaggatgagagaagtgtttagtagttagtcatgactttttgaagggattcaaatgaagaatggttttattttcccctaaaatatgttaattttgtttctactttttaaattacgaagaattactactttttttgggaacttttttcctcttcacttggtggattgtggatgctattaagatataagatatttacattgcatgtttaatgttgaacaaaaactaactaagtaatgtgcttgaatgtgaaactataacatgtcaataccaatgtaattgatttacgaaattagttacttgtagtaatttttaatgtgaagtagatcaattacaattttcgttataattacaaccttttgattttctatctttcagatcataatgcctatgcttaactacactttgaattacctttacaattacaggcattgaaagacggaaacctttatagacacaattgtttctatttatccgtaagctataaacggttgcagcaatcatcctttaaacttcctattctggtttttaaccaattctgccaactgacaaagtcaaggtgcctagcattgaaacctaacaagcttaaaaatattagcaacaatttctttgaataacaacaatcaaagtaaagatgcttgtggctctcctgctgcaaaccacaaacacgacagctagaatctgcaacaaagatgttaaatcaagaaagtcgatcctttattttatttgtcttataaatttgttatattttattaattgttattgtttatttatttatttttttttggcagaatgaattggatcggagatgtaatttcattatgtggatagaggcaagtggacgaagaagtagaaatgatttaagcggcttgtttaaaaggcttgaggaaattgagaccaatgttaaacatttagagcttaagattcaaggaagagatgaagaagttgctagaataattaagccattgaaaaatgtcaaatttgctatatatgtttgtgttggaatattatattttctattgtatatgttatttagtgtttaacaaatgtagctgaacaatttaacagtttaacaaatagtgtcaattggtaatgtgattgttcttcaaaagtattatcagttttagtattgaaatggttgtcaatgtttatattgaaatctatgtttgaaaaattatagcacagaactcagttttagtaacaatcagagaatattgttccatctagtcaagtgtaaccttctaattataaagggattatatgtctagtttagttattaagtgtgttacaatctttgtttgtttatcaagttaagctggatgaagaagacttgaaatacaaaaattgatcttagagttctcaaaaaatttcccttttcaattcatttagtcaag

SEQ ID NO: 34266 - DNA, 1171 bp, Cannabis sativa
  modified_base (384)..(389): a, c, t, g, unknown or other
aatatttccaacactatagtacttagggcccgtttggttgatagtaatgggccagaaaagaatggaatggaatactaatgggcttgattcttttgtttggttgaaaaataccaattttggaaaataattccatagtaatgcaattccccaaactaacggaattgcttttccatttttcatttggtggaattataattccattccacactttggcatatcaacaaattatatctctcttctactaacaaaccctaaccctagcaaattaaagattaatctgctgccattgttgtgactgtcttcttcgtcatgctcactctgcaagtgtcgggcttccttgattggtggtagcgttgtcggaggtaattctctctctctctctcnnnnnntctctctctctctctcttcattctctggtttggtgattttgaatctattcttgttgttttgtgtatgaatgtgtgaatctgttctaaatcattctcattctcttcggtcattataaataattacattatgaactaaatcattctgtcacagagcttgatttttgcttcacattcattgacaaaatttacagagacaattgcgattattatgccataaaaacatgtaacagcactaatgggtgcgctggtttagtggtttgctttaatactttgttgtctcattggtttgacttatataagaatttgtagcaaagtttctatatgacaaactaacattaaaaaacaaacataaataacaagctgggattgggaactgtagtaaatgatgagaatgataatgttgttgttgttttggctattcctgccccaaagggcttttgactcaacttatgctgaaggacttgctctcaaagctgctgtaaagtggtgtatggcaattaaatttcccattttaattattgaatcaaactcaaagttacttgtttataaaatcatagtgctaagtaagttaatcattcattatattgttgggagtttagaagaaaggaatacactccaacttattttagatgaagtgtgaatctctgtagttcggtgtatatatcttttatttattgttttacttcctttaagtttgtttgaattgtattattataacttgttcttatttttgtggctgtactttttgatttatttagggatttgagattgggtttggattg

SEQ ID NO: 34267 - DNA, 1465 bp, Cannabis sativa
gagccatgatccggcggggtggcggcggatgtattatatccaccgccagcgttgctggagtcatgggcgggctaggcccgcacgcctataccgcctcgaagcacgcaatagtcggtttgactaaaaacgcggcctgcgagctggggcggtatggggttagggttaattgtatttcgcctttcggtgtggcgactcctatgcttgtgaatgcgtggcgatcggacggtggcgacgatggcgatgatggtgatgatgaatgtatgagatttggaggtgggaatgggatgccttgtagtgagagagaagttgagaaaatggaggattttgttagaggacttgctaatttgaaaggtccaacactaaaagcaagggatattgctgaggcagctctttatcttgctagtgatgaatctagatatgttagtgggcataatttagttgtagatggtggagtaactacctcaagaaattgtgttggtttgtaatttttttttggttagttcttcaaaaatttgttctttgatttatatatatatatatatgaaaattaagatagaaataattaatttattaatttatattagcaaattaatgtccaagaatatgggtattcttgattatatattaatttggcttgtaatgtatatatagttttttttttcttataaatattttatttatcttcgattttatgtatattatataccttggtgtacaatatattacttgtacatatattaaaaaaagaaaaaaaaaaagttggcactcgacagcactatattttaacatataaaaaacactttcaacaacaaaatataaaaaatacacaagattaattaaaatttttgctcttaacatgtactaaattatactcctcaacttttaaagtcgttaaagatgtttgcattttacgaccttaaaagttcatgcgatttggtacgggacaaaaatcctaattagccaaaatataacacaaaaataaatcaaaaaatcgtattttatatgaataaaatcttaaaaattataaaaatatttaaaatttcacaatcatatttttataatttttttttattatttttgtatgttttttttaatactcactttttagtaccaccacctagtgatcaagttgatctcgtatattttaagttaataattattgtaaaattataagaaaattgttactaataaatatgacccttttaggcattccttaataattaatgtggcattttataataattaattaatagtttctcatgttatttattaaattaaaatttatagaatctcataataaatatgattattgttattgagtattagtagtacttataactctctagcactttctataagtgactctccataattgaataataatattcactaaaaactattacactaataataatatgatactgaagaatatgttaaccaatagtaatatgttttaacaattctt

SEQ ID NO: 34268 - DNA, 7289 bp, Cannabis sativa
aataatttttaaataatatcgctagctaatcgtaaggcactacttataaaaagtactggacactattggtgcccaataacaatgctcaaaaatatgtataaaaggaattatacaagaatgtaacaacttgttcaagtgattatagcgtgtattaggaggtgtgtgtcgagtcatgtgatcgaatctgagttatataattctaaaatataatataaaaatgcttttatcaaaaaaagaaaattatgatagatagataattatatttatttattttgaaagaatctcaattcaattaacttcgaaagagatttgagattcacatggagaaatctctttcctttgcatttcgaaaaccgaattatatttatttaaatgggcattttttatttttaaaaggagcattatgttactaagtataatattatttttttcatattttattttgagtgtttatatcaatctcaaatacataacatgaaaaatgtgctaaatatgttaaaattaataagtaggtgtcataggggtatttgtttttataacttaaaaattattttcacaacttcaaaacgaaaaattgtttttttgaaaactgtgtttgaccacgtatattttaaatacgaatttctaaaaattaagttaaaacaaaaaatagagaacatcaaaatgtttgttttctatttttttttaaattattcttttgacaatagacatatatttacatttttttattattttttttatcattaatcttttacatttgtgttagtttagaatctttagatttattttgttatgttttgtttgttttatttattttgcttaattttaatattaatttattagtttggtatttttggtatgaaaactttactaaaaaaaataaagttgaaacgtcaatcctgaattcgactatttttctaatcaaattttggaaaaagtcaaaatataaaatttttatatctctttctcaattttaaaacgcgtcttgaatcagctcatttaaagttagtatgtaaaaaaagttttctctctagctcctggttcttgcagctatctcagctagtgctatggcaaaaacgagatcgaaggtgcaagggaggcaaccaacatctatgaagacgaggaaaattcgcaagaagggccctgtttctactgctgatgccaaaaaaaccaaatcaatggatgaggtgattggtatcgaaccgatccatttcacggatgaaaagagtgtcgacaaaggggatggtcgtgaacctgatgctgatctttttcaagcgcctttatctccaaaatccccacttcactcgatccaaaggcaagaagaaattagatctgacttcgccactttcatggaggcaaatgctcaatgtaaaagtaacatctcacaaggtaagacctctattcctccaatactgcgatctggtaacattcaacgaaatttggacaactcatttaagaatttggagaaggaaaaggtgaagataactgatgaggatatagaagaggaggttaacttatggaactcaacaatcgtttgctatgttcttggagctaatcctcccctttctattattgatggatttgcaagacgtgtatggaaagataggattgacaaggtaggaatgatttcatatggagttttcttgatacgtttttacaccatagaagacagggataatgtgttaaacggagggtacatcttcttcaacaagcgccctgttggcatgaaaccatggaattcagatggtaattttaaaaaggagaatctcaatgtgatcccaatttgggttcaattggaaaatctagagttgaagtactggggagagaggtcattattcaaaatcataggtcaattgggaaagccaataatggtggactcaattaccaaagagagaggtaaactaatgtatctgagaattcttattgaagtctagacacattaggatctacctgagcttattgattttgaagatgaacatggctacaacacttcggttggagttaattatgagtggaaaacagtgttttgtgagcattgtaaaggaatggggcataaagcgattgaatgtagaaaaagacaggtggtccacaagaataggttgtgaagaaaaagcctgaggagccaaatgggacaaacaggatgcaaatgaattcagcaaactctaatggcttccagccagttcaaaagggctggagaccaaaggagactcaacaacctgagatgactgaaacagacaactcataccagatcttagaagaagcagatatggaggccatcaatgagaccataaatgagaaggatgcttcgggaaagagaaaaaaggttaacataggaggagggggagatcctcctctatccaatagataaaattttatgttggatcgtctggggaatcaacaaccaacaaaagaaacacatggttagacagtttattagtaagaataaggttggttttgttggtctcctcgagacgagagtcaaggctcctaaattaggagacttgtacttaaatgtctttcaaggatggtgcttcacaacaaatatatcatgtcacaaagggggtagaattgtgattacgtggaatccaagtagctataatgtaagtgttctaaagtgttcaagtcaactaattcatgtggggtagaaacaatggatgggaatcatcaatttgcactaagctttgtgtatgcctataatgatgaagaggggaggaaagctttgtggaaagacttgcagcaggttgcacaacccgaaccttggttagtcatgggggacttcaatgacatgctagccaaggaagaaagaataggaaacaaagttaaatatcatccttcaaaggattttattgactgtgtttctagttgccttttggaggatgtcaagtcttgtggcaatttctacacttggagtaataaacagcaaggagataatagaatcttttcgaagattttgacaggggccatggaaaatcagagttggatgggaaaatttactaatgctggggtgaatttcatgaatgaagagttaatggaccatactccagctgttatgacattccataatatggttcctagtggcaagaagccatttaggtactttagaatgtggaatacacattcggattatgcagcaagagtggtagcatcttggaatcaacaaactcagggacttaaaatgttccaagtggtgaccaagcttaaaaggttgaaaggtgtgttaaaggagttgaataagcaagctttttcggacattcaaatgtctacacagcaggcaaaagacactttagctgagatgcagaataaattgcatcaggatccgttaaaccagatgttgcagcaagaagaattagcagccaggaaagattacacagccttgctaaagaactaccagacttatttacaacaaaaagctaaggtcacatggcttaaaaatggagataaaaacacagctttatttcatgcaagtattaaagccagaagaagacagaatagagtgttttcaatacagaatcaagatggggagagacttgaagaggaagcaaaaatttcagaggcctttctgtcatactataaaggtctgctgggcactaaaatgcaggggagaagaactgtgataacaagcttggcgcaatcaggggctgtattgttagaccagcttgctagttggctttgtcaggactattcttgtggagaaataaaggttgttgtctttgcaatactaggaatcaaggcaccaggtcctgatgggtattcaagctactttttttaggataattgggagctcattcaaggagatgtatgtgctgaagttcagaatttcttgcactcgggatagattttaaaggagattaatttcattgtgcttactctcatccaaaagttaaatgcccaaatactgtaagtgatttcagacctattgcttgttgcaatgtcatttacgaaattgcaactaagttgatctgtttaaggttgaaacatgtgcttcctgaattagtggctcagaatcaaggggttaagtacagggaagatttatagcacgtaatattatgatttgccaagatctaatcaggcactatgggaggagacacacaaagcctagttgcatgatcaaactggatttacaaaaggcgtatgataccattgattgggaattcctagaagagatgttgagggcttttaagtttcctatccatttcataaagcttattatgaattgtgttaggactcctaagttctctctaatgttcaatggaacaatgcatgggtttttttgagtctaagagaggtctaaggcagggggatccactatcccctcttctttttgtgctttgaatggagtatctctcaaggatcatgaacaagattgggcaaaagcaggaattccactttcatgatagatgtgaaagcttacaactcaaccatttgagctttgcagataatgtactcctcttttttcatggcaatttcaagagggtgtacttcatgatgcaaggcttaaaactgttctctctcacatctgggcttcaaccgaatccatcaaaattagctttttactgtagtggtatgcaagatgctgaaattcagagaataatggatgcaactggctttagcaggcgattccttcctttcaaatacttgggcatcccaatatgtgctaaaaagatatcagggaaagaatgtatcttacttgcggaaaagatggcagctaaaatcaaaacatggagttttaggaacatctcatttgcaggaagagccatactaatcaactcggttttgctttctatacacacttactggagtcagatcatgaaattacccacaaaaaaaagtaattacagagctggaagcaatatgtcgagcttttctctagaaggggcaaagtatgatgcaaggagcaggtttgttcataaaagaaggaagggggagttggttttagaagaatactggaatggaaccaagttgctctcttcaagtatgtgtgggcattaacaaacaaagaagataacttgtgggttcgatgggtacatagtgtgtatatcaaacaaggtgattggtgggaatataaattcctacaaaatggcagctggtattggaaacaggtggcggctgctaaggaccaaatcaaaagcaagatggatattcagcggtttgttggaacccgatataccattgctgaagggtataagttactttgccatgtacagcagaaagtcacctgggatagagaggtttggggaaggctcaatgttcgcaagcattgctacattttctagctagcaatgcaaaactggttgagaacaaaagcaaggttgaaagctcataacatagtgcaggaagatagatgtataatgtgtaatctgcaacaagaaaatgtcgagcacttgttttttgaatgctcggtgtcagcacaatgcctattggaagtaaaacaatagctgtaatggggtgcacaagctaattcaatgaagtagctggtgcggtagataggaagagccaagctgtccaagtttaggaaaaaggtaatttcatctgccatagcatctttgatatataacatttggaaagcaagaaatgaccatatatggaacatgaagatggtgaacataaaacagattatgcagcaaacaaaagagatattcaagacccgtgtattagtgctttggccgaaagagatcaagaggaaggatcaagattggttttccaaactataagatatagtgaatagtacaaatgtaaataattgtatgcataatatacggtttctataggtccttttatgaggatgttattttgtttgtacaaaacagttttatgagcaatacaactatttgattcataaaaaaaaaagttagtatgtaaaagtaatgtgtattttactaacctcttcatcctcaattggttgacaaagctccatattcacaaaattcggcacagaactcggcacacaatctaccacttcagtgcaaacacttcccgaagcagtaaataactcattgaaataatcagccacaactattgtcaaacccgaatcccatgaaacccagttgccattattatctctaagctgagtaatttgattattcttctttctcctactcgccgccttatggaaatagctactgttttgatcaccctctctcaaccagaattgtttggcccgttgtttccaataactctcccttcgatcaagggcttcatacagtttctttttaatctcatcatatctctgaaccgaattgatatcccttaaaccatggagtttttgcaaatcattcttataagccttgatacgttgattaagattaccagttaattcctttccccaacttaataacctttcgacacaaagcttaattttattagaaatgttaccattttgttcctgggaccaagcatctcgaacaatttccaaacaaaggggctcctttagccaagaattttcaaatcgaaatctatggctatgagtaacattattaatcactacaggttcaagaaacaatggggagtgatctgaggtagcaaagcctaagttggataacacagccgactgaaaaagttgattccaagtgttagaaactaaagctctgtcaagacgtacctcaatccatgcattcgtagctcttcctttttcccatgtatactgatggccttgtagctccaaatcctctaacccacaatgcaataacgtctgctgaaatcccgttaaaagccactgagggtagggctgcccacctcttttatcctcttgacaaataatattgttaatatcccctataacacaccacggaagagaggagcgatctcttaaactttgaagaagagcccaagaatcacttctccaattgcggtttggctcgccgtaaaaaccagtgagacgccaactcagagtggaaggagagatggatatttgtaagtcaatgtgattgtttgaataacccaacaaagtaccatcatcttgatttttccaaagtaaggcaataccacccgaagctccaataacatctaccacaaacacaccttcaaaatttaaagtttgggccaggcccacaactttagatttatgacactttgtttcacacaaaaagataaaatcgggtctcttttgaaaaacaatttctttaaggaattgaatagtccgttggttccctagcccccggcaattccagctcaaaatattcataattcttggcgggcttgggaaccagcacccgcctcgagaaagttttttgaagcatcattttggactgtgtctacattggtttctagttgagaaatatccatattattga

SEQ ID NO: 34269 - DNA, 2151 bp, Cannabis sativa
atatattttctttgaacagaacacggatctttaacaattcaatatttttaaaaaagaaaaagaaaagggaccacttgtcttagactgaccccactcgaatttattgaaaaccctcacttatggcggaggaaaaccgtggtaacaaaagatatgacacaaacacaagaaaacaaaaccgaaaacagttacaacgaaactacatcaatgttttccactctctacacaaatctaagaaaatatgccaacaataactatctattcgaggatgaaacaaaagtactaagtatgccaacaaaaatactaaatatgccaccctttaacaattccatatgccaacaaaacagttgattttgctaaaaaatagaaaataaccatatataaataagcttctatgtttcaataagatgcaactagcaataactatctattcgaggacgaaacaaaaatactaagtatgagccctgctaacaagcatgacaaatattttctttcccaatttgaaaataataatctattagcatcaatgatcctccacagaaggcaaacatatagtaattgcaactaaataagtagagcttgtcaataatttcctacatagattctaataattacaaatttaattttcttacttcataacggccaggcaatcaaagagtaaacttttcttttcagagagaagaaaaaaaagagtaaaattgatatataccctgataagagcatttcaaaagaagtggtaagacctcttttgaactatttgtctcactatcgcaaagcaatatcctcactttactcctatcgataaatccatcaccagggccagcaccaccaccgaggccatcgccgccgccaacaacatcacagtctttgttcaaattcagctgcttacgctccatatcaactcaataaacaacaccaatactgctccaattcacacgatcaacaatatataactctcctcgattgcaaacactgaactacgaaccagaacctccattaaagatccaaaatccgtcttctcttcccgctctcatcatctgtggccctccaactcatgattagggttttcaaaactgagctacgaaacagaacctccattaaagaagaccaaatacgtcctagcactcactcacactccaaaccatttccagccccattaagctccatgctcactcccttaccccaatccattcgcccttccagtaaatgaaaaactaaatatattatttatagagcaattaaataaactccaactcctctatcgatcgaaactgtccacaaaagagagacctcaatcgaagattcgacggccggagacagatcgctctccggcgagcggcgcaggttagcagtgagcgaatccctccgacacagcgcataacattcgggccatccaaccaatcctacgaagtcttttcctccgaagaaaatatatatgtacaagctttacaaatatcaagcaacccgatgataaagttagttgtttattgatattttgagatatttgtgttttgttattttaaataaattttatttttctacgagtaaataaatgcgataccgaccctcgctaatgtgcgccttggaaaggagggatgctgattggatgaagggcatagacaaagagggtgcgtagtgtttccgcagtgcattttagtaaaagtgaagaggtggtggatgtggtgaggagagaacggagaaaaaggccataaggagagagaaaaagtgcaagagggaagagagagaggcgctctggctagattgtctggatagtttggtattgatgggaaaaaggccacgtcactctgagatcttttctcattaaggaaaaacaaatgtgatccaaataccccatttgtaatttttattttttaaatcatcaataataatattaatatgtattgaaatttatacaagaaacagaaaaaaaaaatctctttctttcgacaaaagaaaataaaaataaaaatcttttcagtgtagattagaaagagatgtaaacaccaaacgtggcatgccagctggtcaagtaattagacctagtttttttctttttttttttatggaattgcaccaatagattaggcacacataactttaaaacaaaatagattaggcacatatagaaaagtgattattcaggaaaaaaaaaaa

SEQ ID NO: 34270 - DNA, 1762 bp, Cannabis sativa
aataccctattcatcagatccatagaagttgtgggagcatgggttaatccaaaagacataaccaaaaatccataatgcccatacctagtgcaaaaagcagtctttggactgtcctcctcttggattctcaagtgatgatagcttaatcagagatcaatctttcagaagaccgtcttcccctaaagctgattgaaaagatcatcgatcgtaggtaaaggatacttgtttttgacaatcagtttatttaattctcggtagtcaataaacatgcgtaaagatccatctttcttcattataaaaaattaagcgagctccccagggtgacacactaggccgtgaaaaccctaggtcaagtaacctttgaagctaaattttcaattccttaagttctaccggtgccatcctgtatggtgccttagaaactagttctgctcctggtgctagatcaatgatgaaatcaatttctctctatggtggtaaacccggaagttcatcaggaaaaatatctaaaaattcttgaacaaccctcatatcctttggtcgaactgtctcaggccatgtggtatccaataccacggccagaaactcaaaacacccgtcttgtagtaaatctctagctgttaatattgaaatcactagcatcagagatccctgaaccgatccttcaaatacaaactgttcctcgccctcgagttggaaaatcaccatcttccatttacagtcaatactagctgagtacttggataagaaatccattccaagtataatttcgaaatccgctaaaccaatttctattaagtcagcactcaactccctatcctcaattctgatcggcatagacctaatcagccttttggagatgactaattctctgccaggcaatagggttccaaaccctttatcataactatcatgcagtctatccaatttgtgaaaaattttgtatgccacataagagtgagtggccccagagtcaaacagtacagagaaataagaattattgaccgagagctaacctctaacaattgagaggctaatttctgcatcaacctgtgttaaggcaaacacccttgctaaagcgggttttgaagctgtctgatgttcttctttcagaagctacgagcagtctcttttatagtgtcctggaaacccacactggaaacatccttgccctttacactcacccaaatgatgcttcttacaactgggacacaccgcgtaagtgtatcgggttttggagccaccctggcgattgcctcgaccttggttccctcagaacctcttattgtgacaagagacaccaggtgcaaatggtgcctttcgtttcttatcaatcatcgagccacaaccaccccttccaaaactaggggtaggaggagtaggggttccaccaacaacatgagtccctcgagactcctgagtgcactcaactgcgccctcatcttgtagtgcctttcccaccatgtcagtataggttgtgttgtcatagtagtgatcataagatcatgttttatcttcggattcaagccatccaggtacttttctttcttgcttaaatccgttggcacaattccttaggccaacctagctaatcgataaaactgagttgtgtattaagcaacactcatattctccttctgggtcagtcgggtaaattcttttctttttgcacttttgaccacttcgtcttagcgttaaataactccttgaacatttcccaggtcatagtagtaacatcataggtcagggacaccatgtccca

SEQ ID NO: 34271 - DNA, 6760 bp, Cannabis sativa
  modified_base (5285)..(5292): a, c, t, g, unknown or other
  modified_base (5872)..(5872): a, c, t, g, unknown or other
  modified_base (6546)..(6562): a, c, t, g, unknown or other
atcacaaaaggatgcttttaagtttttaatacaaaacaaattaaaagtctcacacattcaaaaaaactcaaaacagatcaaacttcatttatttttgtcaatcataattaagattcaatctagattcagaaacttacgaaaactcctcatgaaaccattactgtaaccatgatcattgttaccttcatattcgtggttatggtggtaattgttgttgatgtggtggtggtgaccatggcggaggtgacggtggtggtggtggtggcgaaacacagcatcttcttctgagctctgatctctgctaaattcatcggacaagatcatgtcgttaccgtacgatcggacggtcggatctgatcgtctcaaccgaaattgatggtggcgacaacggtgaccgtgacggtgacggaaagtcaacggaaacggacgtcttggaaattgacggccgttaatcggtcggaaagagatgaaggttaatttgggatcagattcatcgagttgagatacgacgagtttttgagtttgggtgttgatgaaattcgggtcggattcgggtctctgtgagggtaagaagatgtgattggattcgggttcttcaacgacgtcgtttgaggaggttagatctaaggaaaaacgagcgtgagagaaagtgaagaagaagaagagaagagttaaggttagagagagtttggccatggcgaggaaatttgcagagagagaagagattcaaaagaatgtgctgtgaatttatatgtgtgggatgaatgtatacgtggcaggatttgattgggttgtggaaaatggaggtttgaggtttgactttttttttttttttgatggagtgaacgacgggggaacgtggtcgttggattgggataatgggaagagtcttgccctatcgcgtggaggtcgggtcttttcgtttgtggaaattcatatttattattatttaaattttagttgaaaaaaatggtgacaaattacaaagatataaatggcatgaagaataatgacaagtaaattattaagaattttgaatttgttagggtttttcgttcttaaatttttagtcgagggaggttattatttttttcggtgaaatttaggtgtagtttggtcatgttttgtaaatttgctaatgttgtgaaaattgtactaagtaagtgcacgtatcataaaccaacatgcgttagttagtcaaccaacactaaatcataaaccaagattcaaaagaatttttaaaaaatttatatcacctttatagtgtcagttgataactgaaactaataacctctttaagtatcaaactggcaataaagagcatgtatagaaaccaacctaatctcgacacccctcactctcgttggtctctcttgccgctagaggtcacccattaatcctgaaaccccctgttgatgttgcccaaccctgatcgaccccctcggtccccattcgctctcggagagacccaacccaaaccttgatggcctccattccactccaagattctcactttctttctccatagatcttcttcatgcccatcttcttcttttaattttttatccacttccgtagcaacctttgtttgttttttttttcttcatctcaatcaatcctctccaatggctattgaagaaccagaaccagaacaagctgagagttgtggtagcagaccactcttctcttcttctcaccctcaaagaaagaagcttgacatgtataaggatgtgtgatattagaataatttaattcttatgtgtgtttcgtaaattatagtagtagaatcttaaacaattctacaatatactctcttaaaagggatgcactgatgtcatgccctgcagactaacacgaatatttctagcgtactttgtcctcactcgtatgctttccaggaagtcacccatcctaaaattaccccacgtcaaatacgcttaactgtgaaattttttcgtgatgaactaccagaaaacaaaatgcacattgttgatataggtaataccaatcaattcatttaagctctcttcatctgtgtaatctcatatctacacagtcttagaatcattacacttgacctttctcaggtggtgtgggattgtacagcttactcggtattttctcttacagatcacgggactactgatagtacccctatctattttgttgtccgagcaaattttttagtccaattctttaacacgctaaaaatatggttcaaacagtttattgcatgcacttttattttatactcacgtaaaatagattgtttgaacattacttattatattgtaaattattctaaatttcttagaattttataggatatcttaaataagtataacatacacgataataaaaaaaattgactattttttttttcaaatgtaaatatttttatacataatgtgtatttaattttagttataaatattatatagaatattgagagagttatattcttccattttgatagggttttctccttagatgacatagatttggtatttttccaattagcttcattaataaaatgtttgctctcaattatttgttgtaataatatatccttactatattataatatacacatatattaatgtttttactaattaatgtagcttttagttacaataataatgatcaggatcaaataactaatagaagaaaaattatttttagaaaatttaggtttgataatagtgatatttttcaatataactggcatgggctcatttaacttgaaggcctaagctaggtacaaataagttgaaaaatacatctttttttgtatccatttatcaaatatactcatattaattttattaaaatatactcaattttttgaatgagttgcccaatatacccactctctacttagatctagcatataatttacattaacctaagggatctaatagtaacattatctataaaagtgggtatatcttaaaaaatataaaaatagaggtgaaaattaaaacaaataaagtaaatgagtatacaatctaatttcttttacaaatctagtcttattatgcttgagcctcatactattttttttaactgaaatttcattcaactcacctcaataatgacataaaattagcatataaccgagacgttctaaccacaagcaacccaattaacagattatttgacgaaaaataaaaaaacatcataaagatttcattttttttctaacatgtgctacatactatatatgtaatatattataattataagcttcaaacatatattttttttttgagtttccattttgttttttgtttttctatattcaacttaacaaaattttataatttgttcttagtttctgattaattaaaattttttaatggttaccgaacactacctatataatctgtaaataaaattttaaaaattgtaaaaatatgtaaaattctgaaaaactgtgattataattttttttatttctaaaatactctttttaaaaatactatatatctattcttatatataataaagtcaccaaacaaattatttttctgaaaacccaatacaactcaggatcaagagcttggaagcattacaagtttttgacattgctttgtcttgcacaaattgtagatacatgtttgtaacaatatagtgttataatcaagattttagcttgctaatatgatataaatatttataactattatctcatattggtctctataattatttgaaattaatagtcttgctatttgtatatgcttatatgtaattttagtcattttgttgtattactattacctaagctttattattgatagtaaaaaagaaaatgacagcattgtaaaatcacaaaatgtcattaatgtatacaataccatatcttgttacgggaaaacgacactacttatgtaatacgacacaatctccggtaatgtcttaacatatcttgtgaaaaacgacatatttaatagaaaacgacattatttcaaaaaaagaaaaaatcgacacacaaaatccccacagttattcaatgggtccgccttgtcctctcgtgtgggttaaagcataataataataataataataataataataataatagggttaggttggaaatgtaactcccgtacgtacattatgagttaggttgaattgtattactatagtcggtatatactcttcaagacagtaccaatctctaattagaaaatttgtaattctcgttgatcatttcattcaccataattcccgtaacagacttcggccaatagtttttaattcttgccaatctatacaaattcaacttggataattattggctctgaaatttcataaatttactcatatagtaatttaatagggttgaatttgacttgggttaaatgagtaatcctacattttgtgtactcttaagtgtcgtcgttcagtaatattttttttttttaattttttcttgtgaaaatatttttattaaaactattttacttttcaaacttggtcccgacctcgaactttgccctagtcttggccccagacccagacccaaactcggtccttggactcggactccgaccacacgaactcgatcttggccctggaccccaaccctgaacctagacccaaaccctgaacgtagacccgaccacaaacccatatctcggccccaagcactagaccccaaccttgaacctagacctgaaccccgaacttacccggatcccaaactcgtatcccagccccgggcactggaccgacatcggccttagacctggacttcgaccctgaattggcatcggcctcatactcggactccgatcctaagcccagcctcgaaccctgcccggtcccaaccctagaccccgatcccgactccggatgccaccatggacctggaccccggacccccaaccctaaatctgacttaaataaaatcaaacaacgaaaacaaaaatgaatttcacataacacacttttattttttgttttataaattaaaaaacaaaagtagttatagaaaacatttttgttttttaaaaataaaaattatacttttatttttgtgattaaaaaatttaaaaaataaaagtgttaccaaataacgctatcttaataattagcagttttatattatttcattaaattaaaatatatgaaacctaatattaataaaatacataaatatggtatgacacctcttgtaacattcaatacaactcaaacatgcttcttagcatttgttagagagtgggtgtgtgggattagtattatatatataggaattttttatttttatactttannnnnnnntttttttttttgtaatttttatatttttacaagatatatactcatataacaattaacaaaacaaactaaatcacaattaaaatctacataacaacttacatagaattcacataagcatacttgaaatagtaaatttgaagaaaaaaaaaacgtaaaaaagtaacatataaaacaattcccatatatatatatatagccctaaataaggcacccaaggaggaccaccatgcatgtgactgctctctttctctctattataagttataaggaatctatctctttgtgtggaattgtccttattatatatatatatatacatatatatatatgtgttagatgtaaatgtagggttattggtcccctacttgggttccatttttcacttgatgatatatcgacaagtggattacgtaccaactttattttgtaatgttgtaatattttctaacatcatttgaaccatctcatctcagtgtatatatatggggatatgattttctccagttattgtactttcacggattgtaatccataatgtacgacagccgtcagatgagagagttatttgatctgacggctnagattgatctaggggtaattaaggttaaaaagtagaaacgtatcctgagacccatctaatgtactacggaatacattccgtgaaaatacatcccgagacaaaatcatatcccatataggctatctgtacaaataggctatctgatactaaataattcatgtggagtaatttgacacacgtgacaacatgtctgtacaaataggctatctgatactaaataattcattcttatttaagaaaaaaaaagataatatatatatatatatttatttatatatattcatgtcagactatactgctttcacattgacgatggaagaggaaaagaggggggggtcactcttacaagaactcttatcttcattggccattgctttgaaaataataataataataataataataataataatacatgcatataaagctttataattttatcaaaatccctaacacccatgcacatgcacatgcatgcatatcaattatatatacatcaaatacatataaatatatattgatttgttattagatatcatcaatcatatcacatttgtgatttttcactttaaaaaaaaaagatggaaggaatgctcttaaaataaaattttgcagagaataatttgtcgtataaatatttaagtttaatttttggttgtaaataaatatttaannnnnnnnnnnnnnnnnaataatacttaaattatatttctagaactttgtaagtacctgaccgttaaatgttaagtcattatccacgtgtattttttattagtatatttaaaatattttttcttaaaaaaataaaaatttaatgacttggacgccaatcaaggatcgccacgtgataatttacttaacacttaatattcaggaacctacaaagtt

SEQ ID NO: 34272 - DNA, 2737 bp, Cannabis sativa
  modified_base (1568)..(1569): a, c, t, g, unknown or other
tgctcttttgctcaaagttgctggagcaaggtttcaattactgctgtggcgcctgatgcaatgttgttctcaagttggtttgaagtgggtttggcatcgtggaatacggttgaggctcttgaggctggtatggtttgttggtcaatttggactcatcgtaacaatttggtctagaactccaaacaccctgatgcgggggaggtagtggcactggctcagttaaattatgttgattggtttaatgctcaaaaacttaatgtcacagatgtaagcttaagcgggccaactgaactatctatggagcaatggacaacacatgatttcccttttgtcaaagttaatgtggatggtgcactttttgccgaccaagggcggtatggtctgggtttgattgcaaggtctgctgcgggttgggttttgggggccagaagcttatctagggaaggtgctttgcaacctcatattgttgaagccattggaatcaaggaagctctttcttggaataaagcaaatggatggtcacatgttgtcgttgagtcggattgtttaagggtcattagtgatttgcaaaagttcaaaaatatagcttctccttatggccatattctttatgattatatgactctggttgctgattttgatattgtttattttatttttgctaaacggtctgctaataaggttgcacatgctttagcgcgatcttctctttctgagatttactgtacttttagtagagactctttactttttgtttttgcatccttagttttaggtgatttagtttaataaaatttaactattattcaataaaaaaaaataataataaattttatcgtagccctcatatcttgcgaccgaccttattttatggtcctgtatatgatattgcaaattattttttgaaacttttaaagcatttattagatatttattaagaaaaatatttttaaaaataaaagaaaaagtgggaccatgtgcctcatctcaccactactatatattatatattatttaccatggatggcatgtcgtaaagagtggttagtgaatttctcagtaccacatacttgtgtggtgaatcatcgacggctggggaatcataacaaccaaaagctgaatgtgagaggaataataataatggacatctaacatcttcatcaattgtgggccatctcatttaatagtgcttaatttacaccaccatacaatgacaccgggttgctctcttaaatacaaccaatgtatttgcgccactttttatagggccaaaattgttaaactttaaaagagaatagcatatttagggcattgttattgggtactggtagtgcctagaacctcttgacatatcgccttacaattggttagcaatactttttaaaagttattatattaaactatgtgggacctgatatttaattacaccaatatcgatattaatacataagagagtgttaagcaccactagtgtcttttagcatttctctaattataaaagctagagtggtgccaagcaatacctttacgatgaagtctagaaaatagttagcgatattttataatanntattaaattaaattatatgagacctattaataaataacactaattgtggcatgacactttaggtagtgctagacaccattagtaccttttaacatttcttactttaaaatattctctttgagcatctccaaccttgacactaaatttgatgacaaaatttttttccattctaacaataacactaaaaactacactacaaaaaatattatttattattacattatattttttaataaaataaaacattctttttattattatattaatttactaaaaacattacaattattatatctaattaataatttaactaatactatgaatcattttattaatggaaactattaaataatcgcatgacaataatactataaattattataattcaataaattaaaatatcatattacatgtagtgatacaaatattaaattattagagaaaaaaattagattcatgaaaaagaaaaaaaaacattgtattcatgaaatgttattgtgttctattgatgatgagaactcgacaactaacttgttggccgaaaaatcaaactctacttcaaactcagaaataagatgaagaaaaagatgaaatataaattcaagtggctatctcatctcaatgtagagagaaaatgaaaacttttcctaccctcaacatggtggttataagaatgattttccaaccccctctcacacttaagaatgagatatttataggctctaatggcctaagttacatagtggtcccaaggagacaagttgtcgcttttgggctgcaaaccacaggttcaggaggtggtcttgcacctcgtacccttgtctggtgtcaagtggtcccaggccgcagaggtggtggctgcagcgtactcttggtcaggtcctcaggccttgcaggtgcggtgcctccactacttataccttcttgctttcaaagcttccaaaaggcgtggtcgtaggcttttcccttggacgccttgtcctttgattcctcctccaacgacattctcttcaacacgtattcaaatttcatcgttacttcaccttacccaaacaacaatacctacaatacccccccacacacacactacacatgggcttgcatcccatgcactatgggctcgcaagcaagccctcgcacacccatacaacctgagacacatgacaca

SEQ ID NO: 34273 - DNA, 1113 bp, Cannabis sativa
ctagtatgtccaagatgtaactccctcagttccaaacaataactcaagtttaatgtagacagttcaccttctaactcgttgtaactgagactcaaattttgcaatcgagataaatggcaaacttggtgagggatttcaccaaagaagctattgtttattaggttgataaacctcaaaaatgtaaggtttctaatgtaaggtgatatagtacctctcaagttgtagtcttgtaacttcaagcctgttattctttgatgcttgtggccacatttgactccattccagctgcagaagtgagtggaatcattccacgatctcaacactccaaaagggtcattagagactgattctttgaatttgagcagagcaaatttatcagtttcgtttcctattgcattgctcatcacgacatcaaatgacaacaccgaaaacaggaacaaaaaagcaagccaaaaagcacaagtgatggggctcttaagtttcattgctaaagaattgtagaaatatgtatgtatatatatgttgtagcaagagttatatatgaaaatggagattggttattaaatcttagtatcagtatatggtttacatttttcttttccacaaagtcttcgtaccaattgatacgttggagcatatttgatttaattgagtgttgtggatagaacagaaaataatggaagaaatacatcgatacaaaatttctttgatagtacaagacatctaacaaataaagaccctccacgcaaatgaagtttcaatttgaaaaagacaatttataatagccagaaaggtgtggggtatactaagttgtaacacattattatctatcccaatattccatcccctcactcacatttaggtgcgtgtaactaatgtaattactcattaattacattctactttaataccctcttacctttcttagcattattatgaggcatgagccataacattggctcgtctaggcacaaaagaaaagtacgtatataatatataatagcagggaaagaagataataagtttttaatatgatatacaatatgagataatgatgatagattatttcatagtacttggctataaccactttaaatttttatgcatatttta

SEQ ID NO: 34274 - DNA, 5455 bp, Cannabis sativa
  modified_base (27)..(27): a, c, t, g, unknown or other
tagaacaacagtgaaaacttaacacantatactgcagtatgaaacttataaaaaaacacagtaaacaagtaaaaaatattgcctgacaatatttttgtaaaaaaagggcaaacgttagtatgccatgtaaatttcgcctacaaaattctaattaaatgaagtcactaacttgattatgaaaagtatatatatataagatcttaaggtgtatcccaaattaagtgaagtcctagtttgtgctaagttttgtatacataagtgtgtgttctaaagtattccaatataaagataaaattttttgaaagtgtgaattgtatacaaatgtgtagtaaaggtgtctagtagtaaaataaaagtgtgagtgctttgtgtagtgtgatctagtaaatactattcaagtcttggtgtaattacttaataaaagtaattacgtttttatgtgttgtggacctgtggtgatcaacaagtggtatcagagtcgtattaggttcattctaaaagagtcctttgttgagtttcttagagtgatcgtgtgtggtttagtactatagatcttatacgatgagatacttttgcatcattattcaccaagaagaatgatacaaggttgtaaaatttggagaacgcttctctcaatgaggcagtgcaatatgacgatcaactaatacttcactaaggtaaaatctctttgtcgaatttttgcattaaattctgctactagttgtcagatgctagaattagaagtattattattcatggattaaggtcggaatataaaacttttattgctgcaatataaggttggccaagccaacctctcttattaaattagaaaacttgctagctgaccaagaagaattagctaagcaaccattaaagagtgacgaaagagcactcttaagtagtgataagaaaggtcgtccccaaccaatgctagtacttattctaaaaaatatgataacaatgatagtcatcatggaagctcccaaatagggagatctcaaaagaaagacaaacatggtggctgatcaaagaataacactatatttgatgaaaatactttaaatgtgaaaagtatgatcacatgattaaaaattattggttcgagaagaaaattgcagaaggtaatacattcacatcaaatgtaaaaaagacaagtgacgaaggatgggatgcagaagaatcattcgcggtagaggaagaagaattagctctagcatctattattctaggaaagatcaactataataatgtttggatagttgaattcgactgctcaaaccatatgatagaagacaaagagaagctgcagaacatggcggaatataaaggtggttgtgtagtggtgatagccaacaacttaagattaccgatcgctcacatcggtaaaacaacaatcacgctgagattcagctcgaaagaagtttcactctaggatgtctaccatgtacctaggatgaagaaaacttattaccaatggcacaacttacggcgttaggccactatgtcgtattcagtactcaagatgtcaagatcttaaaatttctagaacaccgatgatgaaaggacaatgtttagagtctttctatgtaatgtcagcaaaaccgacttatgtagacaaggctcaaaagaacaaaataacatatttgttgcatgcaaggctaggacattttggctatcacaaactcaaggtgatgatataaaagtctatgctgaagggtctttctcaactcaaggccaggatagaaactatatgtgttggttgccaatatggtaaggcacatcaattatcgtacgaagatttgaagttcaaagtcaaagcaccattggagctggtccattcttacgtgttcggacgagtcaagcaaccatcaatcaacagaatgcggtacatggttccattaatcgatgaattcttaaggtatgtatggattttcttaatggaagaaaaatctgaaactatttcaaaatttgaagagttcaaagaaataatgaaaggagaagtcagcaagaaaatctaatgcctcccaccaaataaaaatggcaaatatacctcagatgaattttctgaatatctttgagaatgccacatatgtcatcaattcataaatataccacaacagaatggagtagctcagaggaagaatcgccaccttgcaaagacatattgaagcatgctacacataaatgttccaggaaaattttgggcagaaggtatgaagacatcatgtgatcaatagaattctgcaagcaaagctaaggtttctttcaccctttgaataagtgttgggttgtaaacttgtagtaagtcactttcgagtatttgattatgtgtgctacatattcgtgccaagccacatacatagaaaatttgaaaagaaggcaatacagtatatctttgtgggatacgaaaaccaacaactgaaaagtgttatacatcaaggaatgtggtattcgatgaggtgttattatggtggtcacctcaaaaggaagagttgccaattccaagataatagaagacaatttacagaagaagatgagggagaaaattttcgaagcacacccaagtccagagaatgatgatggggatcaaagtgaagatgaagcttctaggaatgaggaaacatagaatccatggtaaacaggtgtacattaagaaagacaaccacgagcaataagcccagaactttagagatcaacaagagcacaaaagccaaatcccaaacacgccaatgttgttgtaactgaaaaagagaagttcagagagcctgagtcatatgaagaaacacatcaaaactccaagtggctaggagctatgaaggaagagataagcgcgcaagagaataatcaaacttgggagctggttccaaaaccaaaggaagtaaaacccatctcgcacaaatgggtcaacaaggtgaaaactcgcccttagtagctctaggattctctcaatattatgggatagattatgatgagacatttagctcaattgctaagattacaacaatgtgggtattgctagcacttgcggccaataaaaactggaggctatggtagatggatgtgaagaaacacctttttacatagagaactagaccgagaaatatacatagtccaacaaagatggtttaaggatagagttcatcctgattatgtttgcaaattgaaaaatttactctatgaatttaagcaggcttcaagagcatggtatagtaagattgttgagttcttaaaggaaagcggttatgcaatggcacatgcagattcaagcttatttgtcaaagtaaaggaagcaaagatagcagttgttctagtatatgtcaatgacctcatcattactgggatgatgaagcaaagatttgtcaaacaaatttgtcaattcgctttcaaatgaaggagcttggagaattaaaatatttccttggattagaagtcgatgaactgaggaaggtttatttctttgtcagtaaaagtatgcaaaagacttgctgcaaagttttggaatgctagagtacaaacctatctcatcaccatggaagctcatgccaagctaagtgctcatgctaggaaggacttgcaagacggagcaatatatcgacaacttgtaggtagtctaatctaccttacattaacaaggccaaatatctcctatggagttggagtagtaagtcgatacatgcagcaaccaaagaagttgtgtttggaagtagtgcaacgaatgttgaggtacgtcacaaatactattgattatatgctcttttataagaaaggcgatggggttaagatcgttgactactgcgatgttaattatgctggagatcacgatactcgtcaatcaactactgtgtatgtattcaagcttggatctagagtaatatctaggtgtagcaaaaggcaaccaacaataccctatcaaccataaaagcagaatacagagcagcgacaatggcagctcaagagagcatgtggttaatgcagctgataaaggatctataccagtctttagattatgcagtaccactttattgtaataatcagtctactatttgattggcagaaaatttagtttttcatgctcgaacaaaacacgtggaggtgcattactactttcttaaagaaaaaataagagctagagatgcaccaagtaaaaagtggagaccaagtagcaaaataacttactaaaagactcaacacttcaagatttaagaaactaagataacaactcaatatgaggagttggtgttgaggggtagtgttgaagtcaccaccaacctctaaaattttctaagcttgaacactaaaagaattaagggtaatttttatttatatacaagtaaatacacaatattacaaaaaatgtgcaaaaaaaaaatatatataattacataattttatacgattttatgaatatttataaacaaacatatatgttaacaattttaacttgttgattactttcaattaattttgtaagaaaaaataaacacataaagttaaatatgtaaatataaaagttaatatttatattttgatatataacttaaataatacattgaaattaaaaaaataatatacaaatatatttacaatttttgtttatattttataaataatgtatatatatgtttattaaatatttaattagtattattaatatttataataatattattaatctagtatgcttattatgctaataatataatttgtttattaaaaaattataacaattttaaaataaaacacttaaatttatttatttatttgaataaataattttttttgtttattaaaaatgtaacacttatgcttattggttattgaaaaatgtgtttaaaaaaataaacgaaattgtaattaaatgtgacgatatgtataaatactatctttatattattattgataatgtttattaattattaatctaatatatttgttatgatatgtttttttttttggaccaaatttgtgataatatgttgatataatgtgtttactaaaatttaaatataaatttataaataaaatatgtaagtttattatttattttttataaatctttatatgtttattattatttttttatcatatatagtttctatataaaattaagaatatgtttcttatagtaataaaatgtataataaattgtaagtaattttttttcacatataatgtaattaaatactataaagtatataaagttataaatttcctaaaaattaattagaaatatgaaatatggagatgcatgcagacttttctacatacatatgaatgttgagaatggacatgtatcttcacaggatattgtggttttttggtaccttgacaaaatgtatcatacaaatagaaatattacataaggtataattttttgtaaaatatttacatttttacgtttaaagaatgttttttttacatttttacggttttttaaaaaataatacgaaaa

SEQ ID NO: 34275 - DNA, 1396 bp, Cannabis sativa
  modified_base (1152)..(1152): a, c, t, g, unknown or other
  modified_base (1347)..(1369): a, c, t, g, unknown or other
taaaaagtcttaaatgtgaaaaaatgccatagaagggtggcaaacctataaatgccatatttttgtaacttttttacaaaatcccatagttcatgtaattttcacaagttttaattaataatgttttgtaattagacaaaatatagatatatattatggtaaataggggcataagtacctaaagtttcaagtttgtaagtggtataaatttaatgtttatttttaacggcatatgtatccaatgtttgtaaaattataatttttctctaatttcgtcagtacaaactctgttattgtcttaaacagtgcatatataaggctcgaattctagatcattggatctacatagaaacatgtagtataagttacttccaaatgttcttttaataaattcaattatattaaaccactctgtgcgtaaactggaagaaaattacaattttacaaatactgagtatttataaatattgagtttatgccacttataagcttaaaactttgaatacttatgccgctatttatatcatatattaatagattaaaaaacattagacttgtttggtctagtggtaagatgttgaatagttttaattatgtcattggttcagacacttttgcactcaaatttattaaaaaaaaataaaagggtttttttttcttcagttttaaccaaaaacaataataatattacaaaaatactttcaattggccaaataaacaaatatacaacctaaataaaaaaaaattatacaaataccacttacacacaccttcaacccaggatccatacttcttgggcaaccatcgcgcaaccgcgcagcaacccaacgcatccaaaacaaaaaattcaaccagaaagaccaccatttattccggtgacttcatatgagaagacgactagaattaatcaaaattggagctattttgaattcattaaaaaaagtgtaaaaaaactattacgaaactaaaattcaatcggaaatctagtttaatttgcataaaactaatatcctgagttcaattttcagatccatgaaaggcagatctcaaaaagttgagttagagttcccaaacaatccaactcaaatataatccaaaaaaaaaaattacatcaacactatagtaaaatgtttatcctggtgtatttttgtngtttttcgaatttctaatggtgaatttgttcatattaaatcagaaagagacatgtagatcgagttacgtacgtggaaacattattctgatttttaatgttttacaataattgcattacagttgcataactaatctgattttcgttatacaactgtaatgcaattgttgtaaaacattttgctaacagttatttcnnnnnnnnnnnnnnnnnnnnnnntgcaaccttcgaccaaccacccagcaa

SEQ ID NO: 34276 - DNA, 1375 bp, Cannabis sativa
aaaaggtgctacatcagatcatatgatattataaattctttattaagataggatcacagaagatattgaagtattcggaagaatgcttcccttgcaaaggacagaatgattcttgaagttctaatctgatgcttctgctatttggaggcaaatgggaagcacgagcactccgggatgatcaagaatcgacaatcttaagaagcccttggctggacttcctagaagctccctacaacctaattcgaaactacacctgatggttacacctcatctgataccaagtcagatgttgtcccctgcgtcagaccgtggttgtgcacatacgtgcctttatagtgcttactgtccaacagcttgtctaggcaattacctttaaagaagaaacctttgaacgacatgtgttcatatctttacgtgatatcctaaatagattaaacaccacacaatggaagagctacctaccaaaccaacggtcagatggtcttgtggtattttcggcctttcttgtgtactgggtaagaaaccctagtggggtaaaatgtatgcccttacccacttatgtacttataaatacttctattttttatgtatagggggtgataatttttacttacaaaacctctgctaaaattcctagagagctttcttcttaaagagaaataaaaagaatgtagagattactattgtaaatatttataatactcaaatactttccaaagaaggctaataccactaactcgttgactaaggatcattaacgtctaaactacgtaaaattctatttggttgtcatttaatactttacattttcttaagctcttattaatcagttgttgaaaattttggtaaacaaataacaacatgaagaatgagtccttatatattactaattaaacttgtaacatcaagtatgttggttttataatattaaatcaagtatgcagcggaagcacttaatatgattatcattgtacatgttatcagcattttaggatagaagacatatggcaccaaaccaagattcaacaaaattttaggcctactattgggcccaaaaaggtttacacaaaaatattttttctttataaagatcatcctaggatagtgtaaacaactttcatacaacaatctgggttagtcaacttgctggaaacaacagtacggcatctttggtcattgaagtttataagaatactgaaacaaaaccccagcggtctatcaggaatggaagttcaaaagttatctgggacaaattatggtctccgagaatgcttacatagctcccctctcacacaatcctgaggaatctggcgaattgtcccctccgtcagattccaaaaaggcttacggtgaaaaggtggttacctttttgtac

SEQ ID NO: 34277 - DNA, 1173 bp, Cannabis sativa
acaaaaaatggtgccttatgtaattatttctatttattatttaatacaatacgatccttatacaatttaccaaacgagttctttaaaatttgaaaatgacatttaatgggattcgactgtcaagaatggaatttattttaagacttagatttagctgaacatacaatcacaattatattttacaatcaccacatcactattattataagattatctgtatgtttttagttttttcgtgagactatatgtaccaaatttaatagaggtatatatttagaaaataatagtaaaaataaatataatttatatatatttatcatattttataaaaatataagaaaataacaaaaaaaaaccacataaaagtaataagaaaacaatatcaaaacaaaaatatatatatatatacaaataacaaaaaattaacaacaaaataactagagtataaatataaaaagaatatattttatgtaaataaaatctaaaaaaaccgtaaaaatatttaaaattctgtacatgtagtatttttgtaaattgtaattgtttttgtattttttttttttttttcatattatcccttcccataaagaccaaaaatgggcattttaaggatccctccaggcccaactattttatgagacttacggcccaaactttttagtctttcaagaaagaagaggcccaaataatttttttcaaaaatttctcccacatggttaccattctcctaacgaattggttgtcagagctgtaaataggtgcatgtccgacccatattttaaaaatacatttatattatatttcatttaaatttacctacttttatggagacatcatctataaaagtgggtatattttaaagaatataaaaaaaaaaataaagtgggtatataatgcaattgcctcataatataggtcgtgtccgtctataaaaaaaaatataaattgtgttgtatcgtgccaatattttaaatggtaggtccagtatgatcagtaagtgcatattttcctattgtgctcgagttcttactgtattttactcgagccgatctatttttcataaataaatcaccccgttttctaatacgagctcgaattcgagctccacttttccagtattttttacaattaataagttaaactctatgtaaaaaaaataatcactaaattata

SEQ ID NO: 34278 - DNA, 1559 bp, Cannabis sativa
  modified_base (1020)..(1024): a, c, t, g, unknown or other
  modified_base (1267)..(1269): a, c, t, g, unknown or other
tgtcttatctacaaattcaacccgtccaggtatttctctttcttactaaatttggttggcaagatcccgaagccaatcttgccaagcggtcaaactgagttgtgtatccagtaacactcatattttctttctgagtcagctgagtaaattcctctcttctttgcacttgtgactgcttcattatagtatttcgcattgaacagttccttgaacttctcccaggtcattgtggtaacatcatgggttagggacaccatgtcccaccacactagggcatcttcttgaaactagaatggcacaggccactctgtcattgatagtgacgctcatgaaattcgaaattctggtaataactgttagccactgctcaaaatgactgaaggtgccttcttgtagaaccttccatatagtggttccatacggtttactacagcaaccggtcttgcttacacaacaggggcaggagctacctgcatttctagagccggcattgcaggagcaccctactgcctctagcgtctgatctctttctcttgtttgttgattctcttgcattgctgcaaacctatttcaccattcctaggacacctgaggtgggttaacatcacctcaaccgcgtgccctgcctctagggcctctgcctcaaccacaaacgtttgggggaatctgaactccctgaccgccactggatctgactgagttaccctgactcctagtgtttcgcctggcgtccatactactagaacaacccgcgtaaccaagagctagtctggtcagatcgtgatcaagaataacttactaattgccgcttattttggaaatttaaaacacgtgcctatttagttatcaggctactaacatgcttcctaacaagcttttcttaaatcatacgattaaaataaactacgaaagcaataaaagcttactgaatcatgagacgagctgatagttgatgatgattatacatgtcatgacgatcttcggaagacaacctcgcggatctgataccaaattgtaacnnnnnaactattttaggcatgttaacatgatttttaaatgaccatgcagctcgttgctaatcaactagtttattacaaatcgtgatcaattaaaattttttcttaattaattaaaaacataaaatataatacatacataaatccgggatcccgtttaccaaagcatttacaaaagtttaactgtacatatacaaaagtctgtcgactagcgactataaaaaatagaccctgatgtcccaaagatcgtnnnctccaggcctaaccgccccgacatgtacaatctccatctactctctctcacaactgctcaaccttagccttgccttacctaaacatggaaatagcaactgtgagtcaacagacttagtaagaaatgcataagtaataatataataataacctgggttataatcaggcacccatacacccaaccatgaacttatcctcgtgtctaacacggtactgagtctagaatgttcatacgacaaagtatgactaactgcgaatacagcatatactcagtactctagtcgtactgat

SEQ ID NO: 34279 - DNA, 1877 bp, Cannabis sativa
attttagtcttacaaattttcactatttgaaaatattttaaaaaatatgtgaaaatattttaatggaaatctaatagctatttaatggaaagtgataatttgatgtccatgttgctaagtgagaaaaatttattgagattatggtatgtaagttaggttacttaaataccaatttacataatgtgtatttatattttttcaagcgatctacgaattgtgtgaattatttggctaaagcttcagtttcttctgttgatcgtagctttaagaaatttttagcccctttaactttgcttgatgtatttattaagtgacgtttaatgaaattatttttccattaaaaaaaaaaagttaggttacttaagttagatattatgtaaataaattgatatttttggagtattgttatattttaaaaaaataatgtaatatttatagctcaataaatagtggttctttacatatagctaagcactattcatgagccgagtttttgagctataatagctcatttgatgtagcacaactttttactattttttacctctcagctatatttttttagttattagctattttaagtagtctattatgattgctcttagtagtttgatttgatttatgaagcgtgattgtaatttttttaaagagtaataaataaggtaaatactattttgaatcttatattttataaaaaattactaattggactctctgttcgtgctaagaattatcttcaagtttgttatattaaaaaattatcaaaaattaagtttaatatatactaatttaatcaatacaattgtatcaatttaaccaatcgattctcagatatatgtaattaaatatattcataaaattgaagagagtttgatggtattgataaatttttctcaaacaaatttgagttcaaggtatcaaatatgtatgattttaaaatatcaattaagtattattaaaaacacaaggtacacaatttatatttaaataaaacacagtgtgccaaatagggatggagaagataaaatccaatccaatccaattacaaaaactagatatccaattacaattagattgaattggatattaaaagttagattttaattaggttggatcagttattggataacaatctcaaaatctaattaaaaattgatcaaatccaattaaatctaatacatattaaaaaaaactatttgaaataattcatatataaaaataaaaagattgattatatttttactagtttatttatttatttattatggccaattatgtagtacctcagttgggctagaagtttttaacacctcaaaatattttaggccattggatgataaaaaaatgtgaatttttggaatctaatggttaggaaatgaccattgccaaataagggtaaaatataaaagaaaactggtaactgacattattttgtgccattatcgattttatattttaagaaaaaaaaagtaagattcttcactttatgttccattttcttgtcttccatatttttgcaattttgaaaagaattgtcaaaagtagcaataaacaagtgcgaaaaaagatagaaatcggtatcctctgtttttttggccaatggtatagcaatggagattcaatatttatgtttgacaatgatacagaatacgattggtatgcaaaatgtcagaagtttttttcccttatcttttccttacgccaacaacgatcttccatgtcaacatttctctattttttggtgtgaagagacgaacatcattccaccattgtagtagttgggaagcctagaaataaggtatcaaaaagaaagttctctaccactcatccatctatatattgatccttacgatctaaattctccttaaatttctttg

SEQ ID NO: 34280 - DNA, 1512 bp, Cannabis sativa
  modified_base (1461)..(1473): a, c, t, g, unknown or other
tctctcacggacatttcagctttcattgggaatctgaatacacgtgttcttttaaggaggaatctagtctcgagtttctaggtgagagaaatctcactataacaaccatgatgtctaaataaaaagtctctttctattttttttaataaacgttatttttcaaaattgatatgaaggtatttatggtattcaatattgttagagataattacataatacattatttttcgtaaaaaaaaaaaaattatatttttacatttaaaaaagctttttaatatttttatagttttctatagaaacaatacaaaaaacaagaagaaaattacataaaaataatatgaaaataacaacaaaaaataaagtacatataacaaaaaatcaataacaaattaacatgagtacaacatataaagatcgtattttccgtaaataaaatctatcgtaaaaatattttaaatttcgcaaaatcgtatttttataatttcttttattaattttgtatatttgtgaaataattccatattattacgtactatatataatattttgttaatagtgaataattaattctcatactaattattacggagtttttttatatatatttttataattaaaatatgtgaaattcaatattaatttatactaatagtaatataaactttttgatcatagtctttagcatatttctagtagaaacatctacaattagttggtttttggggtcatttaatgatgaccacgagtccacgaccaccgcaacctccattgtcatgtcatctcataattccctttgaattgctcttgattattcaatattggcattaatatttataggttactctttcaaagaaaatgaataacaatgaattatatattgggagagaattaatgaattcaaataacattaattaatgatctcagcccaaacttataataattcttagtgatatactgagatctagtatagattatatatatgcacaacaatgtgtatcttaatttttttaagtcatgataataagaaagcaaaaattctattaaaatagtcacaaacctaacaagatcataagatcaatacaatcaatcctcacggtcatggctttacatagagcgcggtgatcccgaccaccatacttgaggaacatctaaacataaaactaactgagcaaaagaatgagcaatgacgaccgctatacttgaagaagatctaaaaataaagctaattaactgagcttaagagtgagcaatgacgttattaatagtcccattataatgataaatagatatttagcaaaagatttctaaatatagaaataacattaaccgaactcttaataataattgcagcagacaacgaagacaatttaagaagatagtgattcgagtataccctaaacacaagtagaaaaaaacgtgattcttgtaacatataatattttttttgggtaaataccattnnnnnnnnnnnnntttgcaaaagttacagattggactctgtgttttgttaaa

SEQ ID NO: 34281 - DNA, 1474 bp, Cannabis sativa
tcagtaagaatcaagtctttcatgcgagaacaaagcacattgatgttaggttacacttcatctgagatgtcctatcaaatggcaaggtttaagttatcaaagttagcactgaagagaatgatgcagacatacttactaagtctctgcctgcaacaaaatttgaacactatcttagcatcttaaaaatctcagattcctagtctaaaatctgatacacattatctgttcaaggtggaaaattgttagatcatatgccctaaaatgtgtatccaacctgtcaagtgtaggcttctggttttatgttgtaagcccagctgtcataacttccatgtcgatagttatgacagttggtcctccttagtgtttaggttgctataaatactattagactctattttcttatatagagaaccaagtgtaattctcagcttgtaaagcttactcaaaatcaataatacagtaatttctcaacttaagtttgtgtggttgtgcttttagttttgtggagtacttttgtgtgtgttcattggagttcccttgctgtgtatgtgtgtgtatgaatacattttgtcattggtgtttctcaacatgaagagacctcacacaacccgccaaagcataccctataatatgaggattatatactattagatagattaactaaaggattatatatatagatatagataagtaataaaaaaaaatacttacgatttcaaatcaatatttctcaatcatattgatattagtatataagtttattattttttagcaaaacataaaataaaatcatcactgattatattttgtaagggcaattctattcaccccacaaaaaattatgtgtacgttctaatattttttaaaaaataaacttaaaataatttaaaaaattagtgttaatatcttttgaatttttttattatattattttgtgttaatttgaatgctaatttttatttaattttcataattttttttaaatcatctatatatcttttatatataaaatttgatataatttttcatttaattttttatcataatgtttgaaatataatttatttttgtttgataagtatattttttaagaatataaattagaaggaataaaattagtataaaaatataaatttatataaaataaaaaatagcgtgtatataatagttttgagagtctacataaaactctttgttaatattgctattaggcactttaaagtatccaacgttatatcgacgtggcacattatgagtgatagtagtttcttatattatttatcaaatcaaaatatgtgagacttgatattaaattacaccaatagagatatgtcactcttgtggtgcctagtaccttaagggaatgctaaaagacaccagtgattaggggtgggcatcatccaatccaatccaattgaaccgaaccgatccaatccaatccaattacaaaaagttggatatccaattacaattg

SEQ ID NO: 34282 - DNA, 1197 bp, Cannabis sativa
tggccagccaaaccctaacacattcagggttgtagcccattcaagaagggccaatcgaccaacggatcattctgtgcaagcacaattggatcaaataaggaacatgatcaagggcctagcttgcccaaaacttttagaccttaaaattagacaggtcaaggggatcacaattctcggcatatattaatgccttgccctcgtctaagttcaagatgccggtatggaagatgtataccgggcgagaagatttagtaacatacatcaagtattttaagatgcaacttgatatccagaaaattattggtgatgtgcggtgtttgatattcttgacaaccttgtcggaaacaactcagtaatggtactttaagctagttctaggaagatttaattcttggaatgagtttttctgagaattctacacacagttctcattctcgaggctaataccatagcagttggaagaccttgtcgaggtcaaacaatgacaagaacatttaaagtattacatccaaaggttcatggccaaggccaccaaggtcaaaggcctaacaaaagaaggccagtatacgactatattggggggcgtccttccattgggtatttttggaaagataactggaggatctcaactaacaacatgaatgagttccttgacaaagctgacgactttatcaagctggaggaagctgtctgacaagcccagacaaggcaagtcggcaataccagacaaggcaagtcggcaataggcagtctcagggcagcctgcagtcccacgacttgccagaagcgcatgcaggcgccagcactcctgtgcaaacctctagtggcaaaaattctaggggcaagtgcaacaacaatagctctgaaagaaatagtggcaaaatgagaagtataataattctctcacgccatgaaactaaaaagatgaggaggagaagtatacctgcttcaccctcttgatggaaaaacttgaagccatcttcatggccactcagggaactgtcccatacaagaagccccctcccatcaaaacagagatgagcaagagggacatgtcaaagttctaccagttcacaattacttcggccatgacaccaacgagtgtcagaatttgaagagagagatcgaattcctaataaggaagaataatccccacatgcgtcgttatgtgccgaacgactagactcaggcacaagg

SEQ ID NO: 34283 - DNA, 1142 bp, Cannabis sativa
gcaatctttcttgaaatgccccaccatgcaacactgaaagcatgtcttccggttgcactcacctgaattatgtttcttacaacgtgcgcactcagggtaagagtaaccctaacgtccacctctgccttggttcccatggaactgcttgctttgtcccaaactaccagatgtcgggttagcttttctattctaatcagtagtggaataaccaccatccctaccataaatagaagtaggaagagtgaaggtcccaccaacactcagagtcactcggggctcctgtagaaacttaaccacatcctcagctcgtagagccctctgaaccatcttcgcataaaatgttccttcattttcaaattcagacctgctaggtatttctcctttttttgaaatttgtaggcacaatactcgaagccaacttggctagacgatcaaattttgttatgtattcagttgctgacatgccttcactctgcaccaattctgtaaattctttttgcttgacactgcggactgcctcattgtaatacttggagttaaataaatctcagaactcttcccaggtcattacagtgacgtctcgggtgagggacaccaattcccaccacacaagggcgttttcctagaactaaaaagtagcacatgtcacctgatcatttccaactacccccatgaaattcaaaattatttctatcactgtgagccactgctcaaccttcatcacatttggaccttccaagaacacgggaggtgcttgcttgtgaaacctctcatataatggctccatacgattgccagcaacaggttgttctactggcatcacaggaactactacagcctaagcttgtagtggaggcactgtaggaggaccctactgccttaatctcataatttcttcatgttactggtggatacaatcttgcatttctgccaatctctgctcccaatctggagaagcttgagatggattcacatgttgaccaccctaaaacctaccatggcctctgtcgcgaccatggggattctaggaaattggatttccctgaccgcctctgttctagaccctattaccctgactctttgtatttcgctgggcatccatttaataggacttagcctgcgaatgttgggttttatgccct

SEQ ID NO: 34284 - DNA, 1036 bp, Cannabis sativa
aaattacaaacaatttaataatttagagaattttagcttcaagcttaaaaaaaaaactcgatcatgtatatgccaatattcttagagcaacaccaaggagtcggtatatatcatattatcccgtgcatatttgctccaacgagactgcatttcttgcagcattttgaggttttgtctacagtacacggtatatatgctgtgcactgtagtcactgcatatttttttttaaaaaaaaatttaagaatatttatatatatttatactattgcatttataaaattaagaattgtattttgaaaaattttatcatgcacatttttaaaaagtgatgttttattatatttttttttttatttttattagaaaattaaataataaaaataatataaatttaaacatattaaaattaaatacactagacatcatattcttattgatcaagagtacacattgtggtaatttttgttaattaatatgatattaatttttttattttattaaaaaattaatataataatgagaatgattttttagtgtaatttttgatgttgtggttagagtagaaatattttttgacgttaaatttggtaatggtgtaacactaaaaataatgtatcgttgtggatgctcttatacattttaacttaaattaccaaataacaatttaataacttggtcttcgtgatgctaatgcatacaattaagtttttgtcttttaattataaactcaccttttagcacgtgccttggtcccaattgattgagattaacacgaagagttatgtcgtgtgagagtttgtacatattaccttttttttttgtgaagagcacgaagatcaacacaatgtcaaatgcccaaactccaatgtcgcattatgctttatttaagtttatctcatctttccaaacaaaagctacaccaataaaaggcctaaattcaaggacaaatgcttaattaattataaataatggacttccaaattttgaaatcgagcccttcacttggtaatgtatttcatacaaatgtggaaattt

SEQ ID NO: 34285 - DNA, 1508 bp, Cannabis sativa
ttaattattttgttacaattagatgaactaagtatgaggcctcaagctagtcaatccataacaaaatttgtatatctatctatctatatatctatacattgatataattttaattttttaacatctccctttttctcctcttaaaattaatacatacattcattacctagtttatcattaatggttaatctatttggtaatttagtcttatctccctagctagatgttattcttactaaatcttttacaatttgaaagatttgtcaagttttcacttgagcaaaatttacaaaagtttaaaatgatattactttgaatttatttatttaaagaattattgagtatttttctttcttacatcatatgtctagacaaaatctcttctacgcacaatgtagttgaaccatcactcactctcacattattttcttcatgctttatgctaactttaagattaattcaaatacataatcttattataaagatattttctcaatatagtgtacttgatttgattcaagatttgcaccttgccataaagtttgttagttatttttttatatactacttcctgacatattctagagtaaaatttttgagaagctgtggttgacttttttcaaacagaatatatgcgtaaaggcttcaattctcaaagtattttgccggacaactcaaggcctagacaagtctcaaaggacttttcccagcaacaaactattccctcaataacactatgaacactatgagtacactctaaaaaaaaaagtgaccactttttatagagttcaaatactcctttgaatatttgaaaattatccaccaactccatggctatcacaaaatattttattggatgtttatgagcacaaataaaaagatcatacaaccaatcagatcaagcaataagttgcaaaacaactccaaaatagagttgttatatacctgatgacgacacatcgtctgatgcacactatgtatagacgcttttgtagattctgagaaaagggaagaagtcgcgagctactttaatgctgttatttggtgatttctttatgctcattttagttcttggttagaattgtttacttttacaagcaataaatccacagagtaaatttgagttttgcttaattttatattattaatggcctcagatatttttttcaagaatgtaattaattcttcatttgttactgctaatagtatagaagaaagaaaaaaataatttgttttgtttttggaatttaatatacttgtcgtattataatttttacttatttatttgttttcttgtgttaaaatgtggaggagttgttgtattattaattcttcaacaagtgtagctattttttttttctgaaaaatttttcaacttattttacgttttactttttaaatatttaaataaaaaaattaaatagttaagtgtatttaaattatgaaattatatgtgtataattttaaattataaaaagttttgctataaaaatttaaataatttaagt

SEQ ID NO: 34286 - DNA, 2448 bp, Cannabis sativa
  modified_base (2391)..(2392): a, c, t, g, unknown or other
ccgagtttggggttgtgtccttgtagtgaggtcctgggttccaagtctaaggtcgggtcctgtgtctcgagtctagggtcaaattttgggtctcagaccccggttctgagtcctagtattcggtccaagtcccccatctaggtttgtatcctttgtccaagtcttggtccaggttctggtttggggccaaagtccccatctaggtcacggttcagttcttaggtcccaggtttgagtcttgggtctcaggtcttggtcccgggtcccgagtcctgatcctaatccatgtttggtcccagtcgaggttcagggctcggtcctagtctgtgtctgtgtcccagtcctgatctcggtctgggtctgagtcttgggttcaagtctgagttctggtacgagtccgactcttggtcttggtttgggtctaggtctgggtccaatttttggtctgagtttgggtccgggtcttggtctgggtcttggtttgggtttgtgtctaggttctggtacgggtttgggttctattccaggtcttgggtcacgggtccagggttccagattctgggtcacaggtcctggcgcaagtgtcggttcgggttcgggtttcggtcttggtatcgatcctagtttgggtccgagttcatgttcggttctgcatctagatctgattttgggtccaggtccaattccagttccaaggtcctcattctgattcttgttcctatttcgggtcccgagtccgagtttggatttgggtcctggtgtagaaatggttccaggtttgggtcttggtacgattccaggatcgagctgattttgggtccaggtccaattccagttccaaggtcctcattctgattcttgttcctatttcgggtccgagttcgagtttggatttgggtcctggtgtagaaatggttccaggtttgggtcttggtacgattccaggatcgagaaactaactacgggttgggtccaatccccgagtcgtgggtcaagattcggatcccaatcttgggtcccggtctcgtttcgatttggatactgggtcctagtccgtgtctgtgtccgtgttagtgtccgggtctgggtccgggtcgaggactgaaactgaggtcgggtcttgggtcccaatcccactcctgggtcacgattttggctctaatttcaagtttggttccccaatctaggtctgggacttaggtccaagtctgagtgtccaatcccggcccggggttgtgcatctgggtttgggtccaagtccgtgtctgggttcgggttcgtgtcctgagtcccgatctgagttttaatttggctccgtgtcccggtccgtgtctggctcttagtcctagtcagattctcgtttcgggaatgagactgggtcccagtccctcggtcttattcctgggtccaggtacgcttacagtttcgcatccagtttcgggtcacggggtacgggtttaggtccgagtccgggtctgggttcaggtttgggcctgagtctgtgtctgggtccgggtttaggtccaagtctgggtctaggttttagtccgggtatggatcccagatccaaacatcgactatgggttaggtttaagccccgggactaaatcaggatccccctctcaagtcccaatctagttccacttcgggtgctaggtcttgatcctagtccgggtttaggatctgggtccggggttaggtcctgggtctcggtgctagtttctgaagcccggatcccggatccaggtccccatcctggtccgattcctaggtcccagtccgagtctaggactcggtaggcgttcaagtcctagtccgagtttgggtttcgagtttccgatcccggtctggctctagatctaggttcgagtcttgggtttgagtcttgattcaggtctgggtctgagtctcgggttccgatccgtgtctgtgttctgaggcccaggtcaaagtcccccatccagttccgggtcctaggtcctagtctgggtccatgtttgggtttaggtcctagtcccagttccgatttcgattctgtgtctaggttcagctttgggtctgggtctccgtctaggtcggggtttgagtcctagttcgagtccaaggttgggtcttggtccaagtccagatcccggtctggatctgggttttggtccaggtctgagtccaagtcttgggtcgggtccaggttatggtctaggtctcagtccgaatctaactcccaagtttcgatccctgtggttatgggtctgggtctgggttcaagtctaggttcgtatccagatccatgtctaggtccgagtttgggtttgggatcgggtcccaagttcaagtctgacctgatcccggacacaaaactggaattagactaggactgggactagaacccanntattggaccgtaacagggccaaaacctaaacccaaacttagaccagaacccatacc

SEQ ID NO: 34287 - DNA, 3660 bp, Cannabis sativa
  modified_base (881)..(882): a, c, t, g, unknown or other
cacgtagagagccttgatctctgcgcagagaccacctcattttctcctcctcacatcattagaagatcccatttcctgaagcagatatctctttaccagccttaggaaactcctctataccagaaagaggctcgcgcaaaagtcctctggtgaaggccttgggttggctggattctctgatagaaaccacgccaacttctctcctgggtctatttgaaaccatgccaaccttcttccgggattcctcgtcaaccagaggaggacctctaagatcgctcacaagatctctgtctattcctgtggagacgaaaaaaaaaggtcaatggagcaacaaaaaacatacaaagttaatgatgtgtataaaccaactcaaatctccattcacaaggaatgatactcaccttcaaagatcacttgtgaggatctcccatagcgggctatggggttcccctggtttggattggtcgaaagctcctcagccttggaatccatcgcaaccggtttcaattgagacttaaagttcttgggaacgaatggaaaatggttggtgcatcctggtatttaagtttgggagagtgaacttctgaactcagaagggacattctatcaagaaagagatggtccattctgaaaatggatctcactaaaagccagaggtatgtgaaaaatgacaagcttgagccgcccttttatacacaaagtccagtgacaagaaagctaaatattgggaaatcttacggttgggagttgggtagagtatgaagagacgaaatgaccctcaaaactgtacaacttccaaaattaaaggatgcattttttcaaagaagggatcttgacaaaaatgccctttgtaattattaaaaaataactttttaaggggnnattgttatacccaaaattcagttgccatctcaatggagtacacgtgtcaagataaagggaatgtgaatcgatgcaatcgcttttttatggaataactcattaattacataagtatcagagtatatttgtaacccgctgactgtaaggtcttaggcgaggaatcaatgtacaaactggcacttattatattagcgagaaaccatatgtcgctgaatgcaaatagcgagacatcaaggacagtacacataggaagacgaaagtgacacatatcgattgtgaaagcccttagtgtacaaactaagtgcaacagtcattttggctcaagaccaagtaagcgaggtgcccgtctcgctatgggaagacttcctatagcttcatccagttaacgtcagcgaggcttacaaccctggcgagttagaaaaaaacattcaaatgagctttgaagaactctttaagaaccacggtcgtcacaagacatgcattgacaacctcggaagaaaaaatagccccagctcgctattgagatcactggaactaagaatctgtcgagacatatttagatacaacagttaatgatgtgtttaatacatgattgttttaatccagtaaaagcgggaaaatcacggttatatgatttttaaatcataaccgcgtttatattacgtgatatgtaatcaaatcccatgattttaggagatggtcattgtaggcaaatgacggttaactttttaattaacctcccactatgtaattataaatagtagcaaacaagatcaaaaaagggggacgaaaaaactcatacaggaggagccctaaaaagaaacaatcaaatatctgaataagattgactcgtggactatgtagaattttaactgcaaaaccacgtaaaaaaactctgtgttcatatttttacttctacagcttttattttctgtgtgcattaacaaaaatttgcgttaacactgggcgtgccaaaatttatgttaagcaaaaaaaaaattcacatttagagtattaaaataaatacaaaacataatttcacctatgccaaatttacagcataagagtttattaatttacgttcgacccatctaagattataagaataatctcgtaattataatcatttttttaaaaggaaacaccctttgattctaattacgatgatattaaacttcgaggtaaactttgggaaaaattagggggaatttagaattgcagctgaactcagtaattttttgctaaccgagctgcctacatacattctttgtgaagaatcaagctacttgtagttcagaaaatagtatttttgaatttggatataaggattccggtagataaccactttcaagaatcttttgctatgtaaaaatttagaaaaattacattgtaagtagtttagaaattttgaggtcttctctttgaagatgctctttggttgtaaattggtataatgaatgaatatatttgctgatttctcaaaaaaaattagaaaaattcctaggtgtatgaccttttatggaattttgagatttatgtttcataccattttgtggtatcggcgattgtacttagtcttagcaactaagttgcctacgtatcctcttttataggaatcatgtcaaacgtagttccaaaagtgttaaaagattttgtatcttcgataactttgtggagaattaatgcactttgatattttgaggtaaatgaccacacttgggatttttgaggtgtatgacctcatttagaatttttataaaagttagtgacctcatttgaattttgctgagatgaatgacctctttgagaactttaaaaattgcgattatacttaatcttggcaattattcctgtatcttttgaaaggaatcaaatcgaacgtatatagttccaaaagtgttaaaagatttttgatatcttgacattaaatttctttgaattaaaactttcttttagtctttcaatcagcattgatacatatattaatatatatatctagtgttcctttagtggggcataatatatttcttattttgcttcgtacaaggaaagttgtttttaggtacaagatttagattttattggaataagctatatccctcttgtaaaccttattacctgatttatatataattatagcatgaagcgtgatactaaattttcattactgatatataccaaacatatatgcaaaaatataaatatatatttattcattaccgagatcactttgattatacttcttttggatttagattgaaattttctacgacaattaactttggaccatagtacgattttctcaaagttatttaatcgtaacttttcataattagatagctttttttcacaaaggtagtagataatttgttaatttggttttctttaattatgctgatttttaatgagaattttgacaacataacatttttatttatttaagatttttgttttcgtctttaattatgcacccccacattgacttattttctgtagtctaggaaattaaagagaaacataaaaatcatcaataataaatttgacagcataacaattctatttgtttaagatttttatttttatctttgattatgtgcaatccgcaatggacttttattttctgaagtctagggaatcaaagagagacataaaaatttatgaagtattgggcagcataacggcatgaggacattaaattctcttatttttcgtttggctatatctcacttttgaagatcttttgtggcttagaaagcctagatcaaagtggaccaaaga

SEQ ID NO: 34288 - DNA, 1588 bp, Cannabis sativa
aacaagattgaaataaaaaacttaaaacttgctagaaaaatcctaagcacgcttattaattaaatattaaaaaacatattaaaatttaagaatcctaaaaaaattggcaaagtttcgcctatttctacaacatttcccaatttaataactatctaacaatgcatgcaagtaaatcaaataacaagaaaaaataatcaaaatagcatttaacaatacaataattgccacccatccgaccgcagtacatttatatcgcagaacctacttcactacggatgaatatctaacatattcaaactcctctaatagctttataattagtaaaaaatttgttggtcaataatatacctttagctagcaattcaaaaaaagttcaaattaaaattaagttaaaatagtaacaagtaaccaataaatatataactagctagtgactacatacttatgtaattacacattatttaacactataattaatttattcttactctatattcttattacattacattactattcctatacaatttctattacattacaatgaactaccaaacacttaattaataattttagttcatgaatattcttactaagtattaaacgtttctaactaaaacttttatcactcattacattacattatattactaggtatttcaattaccattctattgtcaagactattaaaattactataactcaaaagttccaaactaagtatatatacgtaaatattaattttttgtcatagcaaaaatttctacaatttcataaaaaattctatcaataactcactcaaatattataaaaatcaaacctttaacaactagaaagttaaaaaatgattaataatccctaaattataagacattattaacaaaaataaaaaaaaaaccctcagatttttttttcttgaatccagaaaaaaatggttgaaaaaattgcaaaataggagaaaataacaagaaaaaatcatacctttaatcgttcaatagcacaggtcggctgtcgtttggttattttgggggatcgagtgcaacaatggggtttgggctagggtttctaggtattttggacagggtttttaggttggaggtctctttgtatcgtcgaggttaagagctttcggcgtagtgggtctccgcgagtgttttaagtgggacatttttaatcctggttttaagttaaaaatcgggataaaagggtttcaagtttcacactaaacccttttatcccaatttttaacttagaaccacgataaaaagtgtttcactaaaatattaatccctatttggctagcccataaaaatcgaatcttgaacttattttcttacctttgatattttttttaaagttctaccaaactgggtccttgtctaaaaagaattttgctgcatatttgaggcgccaaatctaaaagtgggataaaaagtctcaatatatcttttatccaattttttatttatgttaactaaaaaagtgggataaaatgtcccttttcttgtagtgtataggcggacctaggggtgttgagggagggctaaagcctaccctaagattagaaaatatattagggtaaatagca

SEQ ID NO: 34289 - DNA, 1685 bp, Cannabis sativa
  modified_base (26)..(35): a, c, t, g, unknown or other
  modified_base (1540)..(1551): a, c, t, g, unknown or other
tttaatcttttattaattagtaaatnnnnnnnnnntgaaatgagttttatttagggcagaaaacccaacaattgtctagtgagttgtggtctaattcaaaccgtgtgtgagttgtcaataaggtgtatattgattataaatacaccatatagtagttaggtcttgtatctctttcatacactttgaattgtattcatttttttaagaaaagagtgtctttaatttgtagagaagagagtgttcgtctcatactttgtttatatgtattttgtattgtgttaagtctgtattcaagtctgcaaaagaagaaaaacaacagtgctaccttcaggagaaggttctacaaagcttttgggaaattacttttcaagtcttacttcgggaggaagcaagcactcttcaaggagatcgaagggagttcaagcacttgttgtttcaataagattcaattataaggtgaaatacatcaagcttgcggcatacaataagagggagtctatctatgcataagtgagattatcctctacatgtgtagaagatgaaggaacatcttttggagataaatttgaaagcatttcctctaacagtacatcgatacgtggtttgaaatatttgatatattcatcttccaaaaaagtagtatttgtagaaataaacactttcttatattcatgactatagaatagtccacccatagtcactttggaatttctaacaaacatgcaacctcgattcgcagttttagctttctatctttctttcttaagacatgagcgggacactcccagattctataatgatgtaagctaggcatacgatcattccataattctaaaggcatcttagaaataaacttagatgggacaacatttaaaatgtcaatcaccattttaaggcatattcccagaaggacactggcaaagttgactaactaagcatagacctaaccatttccataagcgtgtgatttcgacgcaatgcgacaccatttttttgtggatggggcggttagatgggatgcaactttaagttcaactaaatgatttttaaactgtatatccaaatattctccacccctatcaggtcgcatgatctttaatattttacctaattaaaataataacaaaacttcaatagaacagtgaatattattgtaacgccctaatgctaagacacgctacaatgctttttcaattacagtgctgtctttgctaattaaagaatttacttgaaaaaagtgtcaaattaaaacttttataataaatattaaacttataatttacataaccatttataaatactgagatcccgtttctaaagcttttatacaaaatgtaccaaaatacataaccaggtcgcacaataactacaaaatactaaaccccagatgtcccgagactgaacactccaggtcgcgccgccacgacatgtacaacctcatctcagccaggctcactcctgttcagcttttgcctttcctttacctacacatggatccaagcagaactgtgagtcgccagacttagtaagaaaagcatannnnnnnnnnnntaataccgacttgtatctaggcgcccatacacctattaacaaggcttaataggtgagtatgaacgttctactaaggatacgaccatgtactatgtaccacatgcactcagtataccatcgtactagtgtaggta

SEQ ID NO: 34290 - DNA, 1163 bp, Cannabis sativa
gggggagggggggttcttgactgcaatttcaaagtcttctggatttttgtaaaattctttgaaatgtacatatctaacgttctttcttgtcttatatttttcggccatttcagctaacgaaatagctagtaattttggatgtctgtcaatttcgtaatagtactgcatttgacaaaaaaaatattatgataacatactaataatttcatttattaatttaaatataaattccaaataatttacccgaattttggatagaatgaggtgttcatactgctctgggacacttgcccaattgggataatgtccaggaacatgcaatgtaacctctccccctacaaaacgaggaaatgttttactctccaaccctacaattctgttagagacgttgtcaaactctaaaggcaacgacaccccagcttttttccttctttcttccaacttaaccaaaacattcctcccacgacctttcctaaattcaccagtacgatgccaaactatctccttggctatacgtcttgaactatataatcttttcaatcgatgagtcaatggaaagtaacgcatcaccttatgcgctactttttttccccttgtgttctcatcattaacccatctattggtcccacacactgggcagaaatctttcaatgcatgctcattgtaaaataagcaacgtcatgaattgattcgtaccctaggcctaatttacctgatttcttctttgcctcatagtgtgttgcaggaattttgttatctttcggaaatgcaaatttaagcaatttcaacaattcatcaaaaatataatttggtattttccccaaatttttcaagtgcattaactttgctataaagttaagggaggatatccaatcacaactcgggtacaactctgcctcgatctcctcaaacatttcatcataatattgacccctctgaataccatcatcgatggctctttcttcatcgtttataggagggaagaaatctccaattacatcaaccatctcatcaacatcaacattgttgttggcctcgactggttcatccgactcaccgtagtaaatccacctctcataactactttcaaaaccctttgtaaagatatgtgtctggacagtgttcaaaggatgcagtctggtattcttacatctaacacaagg

SEQ ID NO: 34291 - DNA, 3751 bp, Cannabis sativa
gattgataattttctaattaaaatatttctggttttttgatgttttttctggtggaatttcaatgttacaggctgaaactttagccctgttggttagtcttaattgggctcatatgtgtggtcttccaattcatgcagtctattcagattcattagctttggtgacggctatcaacaatgggaaaatatatttcaacgagttaggagcgttgtttgaagatgttatagctttattgtctaaatttccgagggcagttttgtcccatgtggctcgctctgagaatttagcggcccatggcttgggaaagcatgctctgcggttatacgatgagctatcctggttcgaggaggttccagccctggtggcggacttctgtgttgtaaattcatgagtgattctaatcactttgtcaaaaaaaaattgcatattatagtgaattgagtatacatatatttagtttttaatagatacatatattaagattattgttgtattgtttttctaagataatttgtgttttttaagttaacaccatgttttattgcctaataccttttcatattaaaatagggttgttatcaaattttttgcttgttgttatttagttgttcaaccacgtaaaaataaaatgagtatatatttaatttttcaagaggacattttttttttaagttaatgcattagtatttagtagttgcttttatttttttttcggattatttatgagttgttttttagtttctttttggttgatgcaatatgttgatgactagttaatttatgtattaatatgaagttgtcatttatttatttattaatatttatattaaagtgaagttgttatcaattacttttatttctttatatttaattgttcaactaatagaaaaatagtctatattttagtttttcatggtacatattttttgttgtttattagtttctttcaggttgtctacactatttgttaatgtccaactaatttacatatttaactagtattgttatctagttgttttttttttagttattattatgttgtttaaccacccaaaaaaatgagtatatgtttatttatttttacgattaaaaatattttttagttgatgtactcgtactttgtctttgtctttttaattttttttagattatttgtttcttatgagttgacataatgtgttgatgtctttttaatttttaaattacaatggatttatttttatttatttatttgttgttatttaattgttcaactaggagaaaataaagtatatatgcatatgtatatttaatttttcatgagtacatatattaagattattttttattgttatacagttatttgttggttgttatttagctgtttaaaaatgtattaagcttgggtgttgtgtttatatttttttaaagttgttgatagtattttggtgatgtctaattaatttgcatataattagtgttgtttgtgtagttaaatttttgttgccaaacaaagttaaaaataaacttttgtacatatataattttgagtttattatctaattatttattcattattatttaattatttattgttattaaatgttcaagtaagagaaaatatatgtatgttatatagaaatatatgttaagtttttataagtacacatgttaatactatttttaggtattttatagttttcgaatggtattacagtaaacaaatattaagttaattttatttttaatttagtttatttttattttgaatataattttatagatacaatatatataaatatatatttgttattgttgtctacttgatttttaattaagcatatttttattaattttttaaattaataataaggtgtaatttttataattaagtataatttttataatttagtgtaatttttatatgttttttttttttaatttacgtgtttcataattgtttttatttattgtccagaatttgtaaattttttatatgtttaattagttgttcttttatagtgttattgtgttatttataaattttaattttgttaatgcaatatatattaaaatttaataaatttgttttgaagtttggttgttgttaagtcgtttttgtgttgctaattagttgtttttgcataattgttgcattgagaaaaaataaccccatccaaggtcactttgtccaaactgccacgtggcagtcatagagtccttgtctcattctgatattattgttctacgcgttagtaaatagctactctctctacttgtgtgtgagtctcacttggccatatagtgtacatgtgtctttcactctttcattttgctcttcttccaccgtatttttgtaataaaaaaatttacaaatattatttttgtaattagtaaatagtataattgtttattcttttttaggatgatataaatatttattttaagtaattttagcctaaattagaaaaaacacctattgcatctctataacaacaatacttttatgcccattttcttccaaacaaaaatagataaaacaatttgagctcatttaatattaccgtaatttattatactgtttgtaatagatagtctcctcagtcaatcgaaggtcaacccattttctatatttatagaaaaattctccatgtctagtggcggagcacgaaatcatccatcacatgcattcaccgccccttggctttgatggtggtcagattattccacgattcagcttgggttccctcccatgatttaaagagcacggggcagccaccaaacccagttttattttgtaaataaataagactaggtgaattataatcctttgttttgcagcttttatctatgttgttggttgtttcaatttacagatggacatccaataaatgcacccaaagaactaggttgggtaaggttttgaggttaggagatatagtttgttaacgggctaagtgaggtagatagaatctggagcttaatgaatatttacaatggattttcatcgtctgactcggcgatcaggttgtttagagttgagctcagtgaagaaattcaggcaacgacaagaggagtaaaagagagaaatatattaattaaatttttttgaaaggaaatgtattaattaacttatttatcaaattattatttatttttaaactattattaaaaatcaatttaattcagtccaaatattaattattgttatatacctatcaatttgttacaattagatttattatatatgactataaaaatattcatcatataaaattaacatgtaatgtaccttaaataaacatgtgctatatatatatcatatagtatctatatataaattgatctctgcaagaagacagaacaaaatatttatttatatatttttatatattttatttgattttctttttgaattggttaactagtttttttgtacattgacgtgacaagagcattgagcgacacgtgtcctatatttttgatacttgggtagaggtaaatgtccctagcagcctgcacataattcgtcaacatctatgattgttgattacccgagcagagctgtagagaagacatctgaacaggtagaagcctgttatgtcgagcaacttgaaagagataattacttcagaatgatcttattatgtcccaacacgaatagaatccttataatcgtgagattgagttagagaaatatggcaacctgttctagtttcctattttatatattataattatgtaagtattgtaattttttattttatgcat

SEQ ID NO: 34292 - DNA, 1575 bp, Cannabis sativa
aacaagcatttgttatgctcttttcgggtgttcatatttcattttctttctaaatcaaataacttacttgtttggtattattttttgtattggcttgatttgtttcctcatcacccttttgatctccgacttgcattggggtttggtgatgtcttgctgcataaaaatggtgcctgggattggcacaacccaatgcaaatccacacccacaacgaggcttccacgtggcaccctctaagtggctatttgccgctggagaagcacagagatcgagaacagctccagtgttgcgaaacaatccatacttgtcaattgtcatcaagttctattatcactcactttactgtaaaaatcatctttacgcctttgattctctatacccattgattgaatgaattcatcaacaactgctatgtaaattatgagtttactataacaccaaaatgataataatccaagcacaatagtttaaatttgattcaatctaatttgtaaaagtacggattgtattggttattttggattagttactttttaatattaaattatttaatatttataagaaaattattttttttttcatataattaataacaaaataaaataagttattgttattttatgtcttcaataacaaattaaaataaagaaaataataaataataaattcaaaggaagaaaaaaattgtatttataaaaaaaaatgtttaattttgctttaaattatatgtagaaaaaaattatatattaaaaaaattgagttttaaaatataattatattatgtgtattagacttttaaattattattttttcttacattaaattgttgttaattgtatatataatatttttaattttttataaatatgtgcagattaaattgggttggattgaatcagctattttatgaactcccctaaatacatctatttaactaattgagcttgttcgtcttattaaaccttattccaatcatgttgaacattattaataactattatttaggagtgtgcataaatcattcaatccaataacaaccgaccgatctaactacagtcgactgtaaaacattggatatgcaatagtgatcggatcggattggatgttatttttgaatatctaatttgatcagatcagatattggatacatccaacatcaaatcgaactaattagtgtttttatttagtttggataagtaattatattttatattgttatacgtaaaatatacataaaattaacattaaaattttactcttttttttcagggactggatggatccaatctaatgcaatacatattggacttaaaatattgaatggatccgatccgatccaaaaaaatactaggtcttaaatattgaattaacttaaactaaatcaataaatatacatataaaatacatccaacggatagaaccgatccaatccaacatccaatgaatgttgaatcgaatggatgattgaaattaattggatcagatgatatggtaaaatctaacatctaatatataattaaatcaaatttaaattcgcctaaaaatattaaatgtggtcaaataaacatccctac

SEQ ID NO: 34293 - DNA, 1548 bp, Cannabis sativa
aaacaagctattcaattcaaaaaatggcttcaagcaatggacaatgaacttttggctctcatcaccaacaaaacatggaccgttgtccctctcccacaaaacaaacgtgccataggatgtcgttgggtctacaagataaagtacaatagctatggtagtgttgaacggctcaaagctcgcttagttgcgcaaggatatactcaacaagaaggattggacttctttgatactttctcacctgtagcaaagatggttactttcaaactcttattggctattgtcactataaaacaatggcatactctacaactagacattaataatgctttcctcaatggagatttggaagaaaaagtttacatgcaaatcccgcaaggcctcacccttcctcccaatctcatgggcaccaaccttgtatgtaaacttcacaaatctatctatggtcttcgtcaatcctcaagacaatggtataagaagctcacctatgctcttttgcaagaaggattcacccaatcacaagcgaattacaccctttttactcgaggaacacacaacacctttgttgtacttttagtctatgtcgacgatataatacttgctggaccaaacttacagcttctacaccatttgcaagatgctctacaagcacgattcaaacttaagactctcggccccctcaagtattttctcggttttgagattgcaagagccaactccaacctctttctctctcaacgcaagtatacacttcaattacttcaagacacggggtatactgacagtaaaccggccaaagcaccaatggatcctcgtcaacgtctaaatgatcaagatggcgaccttcttgacaacccttcacactatagacaagttattggacgtctcctgtacttaacattgtctcggccagacatcactttcgccgtcaacactctcagccagtttatgtcctcaccacgaacacctcatttgacagctttgcatcaccttctccgctatctaaaaggctcaccgggacaaggcatcttatattcatctacatcctctcttcacctacgcggcttttctgactctgattgggctacttgtccaatgacacgtcgatccactactggtttttgtatctttattggtgactgccttatctcttggaagactaagaagcaaccaaccatctccaaaagctctgttgaagcagagtatcgcgccttagctgccaccaccagcgaaatcacatggatacaatacttgcttcacgatctccacattgatcaaccagcccctcccttcatttaatgcgataatcaatcagccattcacattgcaaataaccccacctttcacgaacgcaccaaacatattgaattggactgccactttgttcgtgaaaagattgcaacttcagtcattcggcttatacctgtcagcagcaaccttcagcttgccgatgcttttaccaaacctctcccctctacaatccttacttcacacttgtctaagatggccatccatgatatctatggtccatcttgatgtgggggggggggg

SEQ ID NO: 34294 - DNA, 1803 bp, Cannabis sativa
tgccgtttggtcatggaccattctggactattcttttttagcatattcctgagtggccttgttagttcagacagtcggggaacaaagtctcgtaaataattgatgatgcctaagaattgttacacctaaactttcgtgagattttcatctgggaatttgagtagttcatgggctatatgtggttggacttcatattttcctttggataatttcatcccaaggaattctatttgcgtctgtcaaataatcatttttatttcagacaacatgataccatgggctctagttatcaaagcaaactgggccaataatgattgatgggctttcgcatcaggagaaaaaagcaaaatatcgtcaatatagatgagagtcttttctaatattgggccatatattttggtcatagccttttggaataggaaagggacatttttgagcccaaaaggtaggacggtccactagaaatgatgatttggaatgcaaaaggttgttttgggccgatcacctggtttgatgcctaattgccaaaatcctgcttttaggtcaaattttgaaaaaatatgggctttggataaaatgcaaacaatgaattcttatttggtattggaatttatcatctgttaagaactcatttaggggcttgtagttgatgaccaacctctgcttccctcgagcttgctctgatcgattattgacataaaatgcatgacacgcccatggagaggaagttggctctatcaaaccctactgctctagctctttgcactcattggacgccattttttggtgttctggattcatgcctgggtgactagcctttgtagggtttatatcttcattaagcttaaaagaaacgcttatgaagaactgttgatttttccaaagaggatggtcacatttcttcaggaactctgcatgattattggcacatgagactttgatgagctctttctttatccgatgaaatgggtcatggggcattaagaaatagtttggtattgcttcccatggagcaaaatgttatatgtaaccaagtccactagggagaatacgcaaacccttcttctttgtgtaaagatcaaattcaacaattaagtattttcctggtaatttttatctaatgactctgtgagtaacaaaacaccctgggaggaactgcaactgaatcgattgctgatgagctctgtgcaaaaaatacctctatttgcagcatgaaagtattgtttctctttcttccaatattctttaggaagaatatcagggttcattatcgtgtatgatcctcccgtgtcaaaaaatcctaccacttttatcggcttggcatagtttgttgaaacttgcacagtgaggacatgggatggttgcatcgtgtgaatagtggacatttgatagcattctgtaatgtctgaatcactccattattcgaatgcacaaagggattctgagttgaattcatcatctatggagaagattgactctatgtcgttttccttaagagacatcccaatcgtttgttgcatatgtgatataagattgactgtttttccttttgggcactgttttgcataatgccccttttttccacacacaaaacatcgatcagattttttataaaagttgtgcttctttcgcaaaatttttattttacgtcccttgtgctttgagaacttgaatgtcttgaacttgtttttgttctttagggttttgcaggaacatgaagattcagaagggcatttgatgagtaaatctcgtctgctacaaactttgcctagttttttagattgctttataaattcttggaga

SEQ ID NO: 34295 - DNA, 1833 bp, Cannabis sativa
gtttgggttgctctgatggttgctttggtaatttctatatgggttgtaatataaattttgtttgcaatttaggtttctccgtttgttgttatgtgggttgctatgtggatttccatacaaatgcaaaaaaagaaaaaaaaaaatgtttaaagtgtaaaaataaaaaaataatatataaaaaaaaatcctattttattatactaatatcaatatgacaatttaaatggtgctagcactattgatatttttaacatttttcttattttcatactcttacttgcaaataatgttataagttggagaagaaattcagaaaatattactaaattattcatttcctcattatgattgtagcacaattagcaaaatgacagattgacacaatttatgctcctgtatatagttaaatataagatattacagtaatacaaaatacatatttacatgacatttaccaaatcaagagtataagattttctgacaaaaaaggaaaaaaattgactgagatttacatttgcatatcaataatgttgactgtggcacacatgacttctgagattcagtacaagtataatagtattatagcaaatacttttggtaattgagtaaatgctcagtttggtatgattaaaatctatcaaaaagaataccaaaaaaaaaataacatttccagcaaatgtgtattatatgggttgaccaccttgagtgtgaattgtgcctctaaatatactcgaaattggtagaacaaatgaaaacccaagttcaaaaatgggctaaaactagaactaattcagtagaaaatggccagtagccacaatagtttcgatacataatgttggtttgaagtttggaacagcagatagaatacaagaatttattttataaccactctaaaattgttacctcaactttgccattctaatttctaagacagccataatggaaggctttgcctgccaaaactagagtttttttcttcatttgcaatgtattattatatagagaaccaatcaagtcaaaacttttagagaacaaagacgatcttgcttcagaaacaattttaatttcataagaaaccgacactaggagagatgaattggtgttgattggtgaagcctcaacatccatcttagagcatatccgggatgacagtcattcaccgatgcttccggctccctcggcagcctttttctcattctgtttctctcttttcttcttgtttctcaatgcgttcttgcttggtgttctgaaaaggttgaaatgtaagacaagcatttagtccagttgacaatcgaacagattaggaagaaacaaagaaaatgaagtgtacttacttggtagagctctgtccaaacaactacaatgagaaaaccacagaaatcatcagaaccatcttacaatcaataataatattaacagaatattaatcatgtatacctctgcctgaacagcagctgcagtcttagcatgtgggggtcgataagcagcaggcttcgctgccggaggattagtggtgggcaaactttttcctgaagtttgagaagctttagacttctcccctaaaaaatttccagatttacccatgagcaaaataacctcctaatccaaaataaatagtgtaattaaaaacaaagaacatggcatcagaccttggggtttggcttctccaactcttagtgtgtcaataacttttataagctcatcaatgtcaccatatctctctggtgacactggcttccaatcagcctgaaaaattgatagaggcaaacagaatcaaacattgtataaagaaaggttactcaagactgcttcaagatggatcctgacaagact

SEQ ID NO: 34296 - DNA, 1069 bp, Cannabis sativa
  modified_base (714)..(717): a, c, t, g, unknown or other
cccgagatcgtcaagcatcatttcacttaggtcggcccgtacacttgaattttgacttgaggtaagtaaagtaaattgtaccgcataccacgtcaaaattatgatacggtaattaccgttaatacgtaagagttattactctaattcgaaactgttgttaggtttattacttattgattgcttcattaggcaatgatagtgacattagcaactcgttgctaatgagggttaatgacactttataaaatatcgagtttggcttgtcttatttgacaattaattgattactagcatttgattatacagtgagtagagtgttaaattatatgttaatgtatgtgcattgttgttttaaattctatgatatttgtgttttttttttgcttttcttgttgagtctttttgactcacgggtgcattatggcacaggtaagggaaagggaaaatgggtcagaggtctccaaacgaatgagcatatcagtcttgccatcttttgtgcgctgttgacaggatctgtattttgtaatactttgaatatgtaacaatattttataacaaacaaatataatggtattttattaaaagtttgtaaccaaggggatccccaaataaggtaatattttggaaaagagtttaagttatactttaaataaattttttaaaagttttaattaaatcacattttatcttaaaccgttagtttattattataannnnatttataaaagcacacacgtggcacctttacgggtaagggtgttacaacatgatatcagggcaataaaggtttaaggatcatgaagactggttagatatgtatattggctataaagactcatttgactcatggtatagtaagtggtaattgattatttgttatctattaattacttggagtatttggttatttcagatgcatgagttattagaagagcatgatatgttatacataatgatgttatatgtgttggttcgggaattctaaatgttagaaagtatatggtcataggtatattatattatgcactcgaggtaatactgtaggattaatcgcgagctttctaggctc

SEQ ID NO: 34297 - DNA, 5145 bp, Cannabis sativa
tgatttgtaaaatttatattacatgtagtagctaccaagtcataaccacataataggattttagtaattggataaataatattttgtttcatagtagttagttgttaactatattttgaaaagaaaatatgagatatttagatttcaaaataataaagatgagaattgtctactcaatgaaattgactcgataccgactcttaagcgacgatcaattgtcagaattttatcgtgaaataacttaaacaagattttatatattttacctatctgtgtttatgcatcacatttatagtaattctaaaataatatttattgtttaaatataattattatgtcattttatttatttcaaaaatatcaatgagcttctataaaatagtttcagcgaatgagtcaatcatccactttagtatcttattaataaaaatggtgatattgttcactcagtgcttgacttttttgttcaataaaaaaaaacacaaagcaaaaccagttataggcaaaaccaaggtgatcgaacaacttaaatatttaacagaaataaaaagagtaataaatgaagatagataattgaagaatctgccgtttgagtatgtacataactaaccggtataaataaaaagacaaacactttaagtgatgaaaatattggtaaaaaagaaacgacaatacaaaattcttgtcgcacctaaaacagccagaacaacttataattaattatgtcgataatctattcccatgtaacagatatcatagagctggcaagcccagactctccaaatgtcatctctgtgtcataatccaaactcttggaagctcccggtataggctgtgccaatcgaaatggccttgtttcggcttcctttagttgagaacaacagaatgaccatagcagctgcgacacagatagatagatatatatatggcaatagtgagaatccattcattctttaaagcaaaatttaaatatttacagtagaagagagcgataatttagcgcaaaaagtattctcacctgaactgggtctgtacgaaggaaactccgccgcaccctgcgcccatctggaagacgaaatccaaccgtacatagaaggcttttatcgcccttgggttcttctggcaaaggtggataatcaggcttgttttccaagcatgtcttctcatcttcttcagtgagattcacatgtttatccttgggaatcacttcactggtctcctttatactttccatggaagcggccaatgctcgcgccacttcttcatattcattacttttgtctgcaactactagcgataaaagaactttagttttatcatttaacttaaaactgaatatctgcaaataagaggtttgtctgtaaattaatcatgacatacctttagttttttgtggctgagccgaagaactttctctgggtcgtttgtgtgacaaagtgacgtgatggtcctttggaccactatccatgaatgttaataaatcctatagttgaacagaattttctcaagtcagcaagagattacatcacgttctagcaaatgcgaaagtcttaaaatgtagaataaatccagggctttcataaaaattaatgtttgatcaactaaagcaaaaactccacttacctccaacaatcgttcaggttcgaccattccaacccatgagcgcattttctgcccagtgataggatcaataacgagtataacaggcataatactcaacttgtaataagtgcaaactttctggccttcagttgtttcatcgtaaacctaagttcaccaaccattgtcaaattgttgaaatgagccacattacaataaaaaaaaaaagcttaaaacccaaatatataaagatccctgcccccgaacttgtatatgtgtattatgttaatttaaaattctagtccaacaatgaccatgcatctactgatgcacacacacacacacacaacgcttactgctagaagtgagggatccttatagaagaacaaaaatgaaaattagtaatagatagtcattttgcaaagtggctttaataaataaaaaggctattttgccaaacacccgagaatattttataatttagcgtgaaaccccaaaaatggaatacatacctgccaaaagacaaagtttgtactgatggtttgagagacagcttcattggaccatgtatcgcgattaagcttcaaaatacaaatgaacatcacatttagtctctgtgttaaacaaacagaaatttcagacaatttaaaacagtgcagttaaacacgctacctaccttatgtgagctgaactccgtattagactgcaagtttaccaagagccatttgtcttgagaagaggcagtaccctttgcctgtagtagcacaaacagagtttcacgttaagaaacacaacataatcacttaacatgattgttctctataactaacaacagcaccatttccagctagatttaaaatatatagtttataagaaaaagaaaaatacagtaaaattaaaaagaaaaaataaagggataaagagtactaaaaattctccaaatgcatagaagtcccaccaactcgtggctggtgagggtaatactgtaacaagaaacccaaaactaaatgtgtaccatacaaaactattataaggagccgggatcagactttaaataatctcataaaccattcaacgatagagcctaaagagaatgcaaagatctcactttctcaaaatccttaacttaatataggcttcaatcactcatataaaggataagtctcctaataagataagaattgcagattaaaaagataacccttggtatactagtttcattcaacgaagtgtaacataagctcaagaattcaaagacatcttttcccattgagaatatgaaacctataatttcttcatttgtttatataccaaaaacaagacgatatgcatgaagaggactctcccttttagttgaaaatattattgtacttatacaatgtaatttatacattacttggaatataaaagggattgcaaagagcaaaactgtattattacatatttaaaagctcaggcacccaaataaagtcacattgtgatataaaccaacagcagtttttaaaagatagttaaaaggaaatcatcaaaatcatccatcaaaaaacagagacaaagcactaattctctaagatcaaaagaacttttctgcaagttaaggttagcaagaatactaagactattccaatacaacttcctctattcttagtgtcattcaacaaaccaactgccaaaaacaattacatcatgaaccaataaggccaacaaaaataattaattaccttctcaaatgatccctgaaacattatatgatatggagggcgatacaaggaggcaagattatcccgagaattttcagctgttgaggcaacaccttgctctggttcccaaaccccagggcgtttgatttcctcatcaaaattacgtaaaccaggtactgaacttgattcaggatgtctcattcttgatgccctaaatcaaaaggacacattccataagtagttgaaatgaagtggtgcataaaatgagcaatgccaaatgtacaatgcataatcaaattaaaagactcgtcaaactctaaaaaatagcagctaaaatttggcatgaaacacaagtgtccctgctaaaacatgagataaaaaagtatatctataaacactacacattagagacaagtaaaagtgctaaggtgatcgtttaatgtattagccaactatagattccttcaaatttcaacaatgcctcgtgtaaaacaaaaatttataagcaattgcatctcaattaaaaactaatttagttcaactgaaagaagagcttctgatatttactatgaaacaataaatcaaaagggaaaaagatataaactttatacccatacagtaaggcatcatcataaagagttcccctgatcacaggtataggggcgcgaacttcatcttcatcaaccacattcctttcggcttcactgagtcgaatcattctaaaccagcgtaaacaataatgtacaacgaaatacataaaacaaagataaataattacataaataaaaacaaattaaaaaaaaaaaatcgacgcatctaacacaccgagaagtctgttcagccaaagcttcaatattttccgcagctggaatttgagaagacgatcccccaacagtgccaccaccttcgttacctatatagaacaactgaatagcctcctcaagtttccaacttgtagcctattccccaatcaaaaactccataaattagcttccaaaccccaaaattacataaatcagaagaccaagggagataaatacaaattaaaagagaaacctgcaagaattgcctggcagtctcggcggattgtccaacggcgatctccaaaaacgaagagaccatactctgttgatcagtagcggacaacatcccagcctccataatagctgttgaatcgacttcttcgtctacagagcttcaatctagggttttcagagagattttttgtttgtgaaattgggtattttcagaaagaggatattttttgctttattattaattaagttactaaatttatatatacggtaagtgtgtaatgtactgtagaataatagatcttaggaagaggaagagtgtatatatagttatgttaacatttaattaaatacttataattctaatgggattaatagagtttcaattttataattttaaaataagatattattacttttttataaataaaagatattatttttttatttttttttttaaaaaaaaaaggaaacaaaaaaaagatttgttgatattcaataaccatgtaaggtatttaattttttttaggaaaggggtaatttttgcttccacgttgtcttttataattttgaaatattaattataaaaatgtaaacaaaatatttaaaaataataattaagaagatcttctaaaatttaattagaaattaaggaatcttttataaattaacaataatttaaaaataaaattctagaaacggttacatttatgtgtagttattttagtgaagtcaaaggcttttatttgtattttttctttttttttttttggataagttgaaaaatgattttttttttatccattaatcaa

SEQ ID NO: 34298 - DNA, 1206 bp, Cannabis sativa
tagttatgccgccaaaatttcggtttttgtagttaactgttacaaactgtaaaattcaggtggtttaattgccaatattcctattataaatatcttttatattattgctctagaataatgatacacaatacttgtaacgtccattaagtccttacacttacggaataatgactcttatacacgagtacgttactatgactgcttcatggactgatggctgactctacagaccaatacgagtatttccagcgtgctttatccttattcgtacactagttttctcaggaggctaggtcacctatcctgaacttgccccaagtcaagcacgcttaaccgtgtagttctttcgtgatgggctaccgaaaaacaagatgcacattgttgatataagtagtaccaatcaatcttttaagccctcttcaactgtgtagtgctatacctacacagtctcagaaccatctcacttgacctttctcaagcgaacaacttacttagtatttcttttacggatcacgaaactactaactgttacactgtaaatttatgctaagcagtagtagctaggccaggcttgcttagatttaatgtatcatatcatagagtactacgtactagctagcttctttgttgttcttcttcttaataaaaatatcataattaccaccgcttcattaatatcaatatttgaatggccgccaaattagaaatttgacttcgtttttatgtccataacagtttaaatgttgagaaaggctcaaacatatcggtggtgactaattttcttcagtttttttacattttattgatacaattaactaaattataaagaactatatatttttaaacttattcaaagagttcaattaataaaatatcttttaataaatatacgtatttcttttcagaatttataaaaacattcaatggtaatgttttaacgtttgagataaatacttaatatattatagtaaatttttataagtttaaatatttttacaatattctataaaaacaacactaaaataattaaaaaattataataaaaaataatatataaatatataaaaaattaacaatacaatataaaaatacatcaagattatattttttataaataaaattagaaaaatatttttatatattactaaaataatcccttaaaatgttcaatgacgatctattcaatagggtttttttttttttttt

SEQ ID NO: 34299 - DNA, 1263 bp, Cannabis sativa
aaaattatacatattattttattaatgatgtgtatttaatttttatcataaataatattatataatttttttttttttttaatttttacattaagggtaagcatattattattgattttgcactatgaactatatctttatataattgtcattttttctcaaatatatattatatgtgggaatcgtatttttttttaattatgtgatcgagattaattacgtatcattatatgatatgtagaaataccttgtacaaattatgtgtctcataattattatttaatattaaaacatatgagctctaatattaaattagattaataaataatgctaggcaccaccaaattttttattgattatttgattaacccataaaatatactttacatttttgtaacatttgattaatatgttaataaaaaaaaaaacatttgattaatattgtaatataaaagtaagggcatataggtaccctatttatcattcaaaataattaacataacacataccttttttaaaactaatgctcacacttttctctatttcttttctttttaatatgttaatattacatataaataaaatatagttttaatatttaaaattaaaacaaaaatatttataaaattttcttaaagttattttcttcaaatatatatgtatatatgaataactatatattatttttttttaaaaaaaaaaatatgaagaaaagaaaaggatagaaaataacaaataaaaaataaactaatgaatgtaaaataatgttcaaatttaattaattattttttttcttttttgacaaattaattattgtataatgtgaaagtataagtatttcttgtatggacaaatggacgaatgtaaaagtattataatttagtactagttgagtttattcttatttcaaattaaaacttttttttttttttggataatattttatcaagatttgggttatagtaattaaataaattttatacttttttgtgtgagatttttacaatattataataaattgaattgggtttgtgggatattgtacatgtgaaaggttttatgtatgatgaagttggagttggaagaactaagctaggtagataggcatagaattaatggtgaagtgggttgttggccgcgcacatacacttaagactttcaaggaaaggagttaaattaggtaataaagtggtgtttggctgttggagtccaaagtgggttgtccatagtggcctgggcccttataataatttagttgattaa

SEQ ID NO: 34300 - DNA, 1667 bp, Cannabis sativa
  modified_base (1551)..(1564): a, c, t, g, unknown or other
tgttttaggttatggttagggaagagttgtttttgacttttttttaaggataattatataatgtactattttttgtaaaaaaattatatatttacatttgaagatttttttatatatttttataattttttataaaaacaataagaaaactagataaaagtaacatgaaaataaatttcaaacaacaataaaaaattaacatacaaagaacaaaaaatcaacaacaaattaacaagagtaaaacataaaaatacatcaaaaaatcgtgttttctgtaaataaattataaaagtaaaaatatttaaaattctatacaattatattttgtaatttttttttattatttttgtgtatttgtaaaataatcaatttttttaaactaaaatgcatatacaacttttgtaattttctaaaccgtgagctcactaaaatttctcaaaattgcataaactacaatataaaaagaggaaattgcattgtatgcccactttattttatttgttttgatttttaccttcatttctatattctttaagatatacatacttttataaatgattttcctattatactccttaggttaatgtaaatcatgtactatatttaagtagaggataaaggtatattatgtaatttactcataaaagtgggtagattttaatgaaatataatatgaaagtatttttgattaatggatacaaataagaggtattcatcaacttatctcatataaaaatgcagtgtaaataattcaataattaaacattataataaatttgtcaaaaacaatctaataggagtataacatatgagcactttaatactaaatcccccataaatcttgaacaacatttcttcataatatcattttataattcaatgtatctaaatcacataaactttgcagtacggtgcgatttaaactactattttagaatttaaaaccgcataccacacgatctattaaaaatgcaaatcgtaattgcatcgcaaataatttcaactcacttatttttattcattatggtacaatatagatagtttttacgtgtggatagtttgataaacactgaagattaaggaccaatcacccataaataaatatgagtggcgtgagatttctagttagaaagaaccagccaaacttggattggatagtttaatagaaggcttacttgaatacaaaggctattaatgtatagtgtgaggatgagatttttctaaaattctatgtttctaaaactcaaatcattccaaaattgttacacacaatttaataattgaaccttttctagtaactactttcttaaaaggaacaaaaagaaaaagtaaaagtagatgaagagtttcatatcacacaaaagaaaaattgtgcattagggcacaatcttaaaatttattgggtaattcctgatgagtaatttatagtataaatacttatattttatttttgattgtaataaattttaaattaaatattttgcggtaataataatagctaagttatatttataaaactttacttaatcattaggtggcgtttggttggannnnnnnnnnnnnnatggaaaggaaataattttcattctattcctttgtttggttgcattttaaagaattggaatggcattccaatagaatgctctttccactattttcgtggaatg

SEQ ID NO: 34301 - DNA, 1611 bp, Cannabis sativa
attaaattatttattttattaaagtgaattatattttttctcaaaatagtattaattatgaactgattttaatttttttttatcaaaataatatttttctatctattcgtgctaaaaattaactttaaattaattatttttttataaaaaaaaattaaaaattaaacttatagtcctatttatactattttaaaaaatacaagatttattttcttatttgataaaatagttaatctaattaaatttttttacaaaacacttgatgcaaaataatattaactctttagaatttcccacaaaaaaaaaagtaagagttcatttctcaatagcaatataattgaatatattatattttgttgagctttgtttataaatggtataacgtaccaaagaatggggccaaaattatggagttttagtaagataaggattgattattgactttattggccatatattaaaataattatgttgtattttctattttatttgtataacaattttattaaagtcataaatttggactattggagacaaagagagataataaatgaatatgatatatatacttggattggatttctgtctttgtgtaaattaaaagaatggaaactagagttagcaaaagcagccagacaaaatggtattacattatgggtaattaaaccacgaatgtctgccatttcaagccactttaccaacttctttaatagtgtttttcataagacaaagaaaaatccaaaagggtgttgattaaaatgtagaaaagctttttggggtcaatactcaaatatcttaaagttatgtggtgcaaatgtgaggtgaatttattatggggaacgtttgctagctcatcttaagttgtactattacaacacgccctaatatcttgatttttaatagtgatttgtgaaatttcgaatattttatggtgttaaaaaataaaatttaaacagacattgcctgaattaagattagagcatcactattaagtactaatgtagtatcctacactattatgaggtgatacttaatgaataatgaatagttagtaatattttataatagttattaagttaaaatagtgagatttaatatttaattacatttgtattattattaatatcgcaatttgtagtagtgttaaacactactgatgtcttttaacattaatcgtaggtgcatgtttgattggaaataataaaatagaaaagaataagtttttcttttaaatctttgtttaattacattttaaagtatgaaaatatcattttaataacataactttttcattttaaaatagaagttccaataaaaaataggaaaaatatataattttttttaatatattttaaatttggatgcttttacaatgtacatccttaaaatagttgtagcaatacacctcttatttatttcgtcatctaggagaattttataattaaatattttatagtcatgcacgttataattatttaagacatcatgctaaattctaaaaaaatcagaatatattacaatttaaaaaataatgttcaaataatctatttcatacaagtataaaataaattagtaacacataaattagaccgtttgaataatattttcggc

SEQ ID NO: 34302 - DNA, 982 bp, Cannabis sativa
ttttttttttcatgttcaaaagaagatgcactttaagaacattatgttgagtttctaagtttattttttcttgttttataaaaaatttgattaatgagaaaatttaaataaagaaggtagtactgtctctttctctgagtactgttattcagatttttggattccacatgcctcctatgaccattaatttagcagcagcctttggagaattatgtaaaaataaaaaataaatgagaaaactttatgcatatgttttaatttttatacatttaattatttttttatttatttattttggcaaaattctttgagtttgtttttattttttttacaaatttaaaatgtgagttaagtattaccattaattactaactaaatgactagtgtatatgtgaaagtaaaacttcaagctaatacagtaataattcagttaatatttaacggtaatattcagctggtgccttaaatttataaaatatatatatataaaaagaattttgctatcaaaaaaaaaaaaaattaagtattaaaaatcaaaataggttttgctgcaaataatcttatatatatatatatatatatattattattctgttacactagaggagaaatgtaccaagaaaagctttgttaaaaatcaaaggagtactctttttaaaatttaaaaatgtaccaagaaaagctttgttaaaccctagaggaaaaatgaatgaaggctttcaaattttgcagctgttttaatgtctaaagctgaagaaggttgatttttcacaaaagtaaaagttgtttttgagtgtttcaagaaagcatgcaaaaattagtgaaacttttatatgtaattaatttaatttctgatatgtaagaattaaagaagttcatgtgaacttattacttttttatttttgtatttttctacacacaagtttatgatataatcatgtattatatatgccatccaatgatttttttttattattattat

SEQ ID NO: 34303 - DNA, 1921 bp, Cannabis sativa
ctaaatagtttataagggacaaaatctactaatgtgattattgaagcaccaaaaactgaaaactgaaaagcattttcagttttttttttcttttcaaattatgaaatgagtcatcacttaggaattaatgaatgttcaaagtttctatattgtacatgatttgattttaacaaagtctaattcccaatgtaaacacgtatctatcgtgtcctacatccctataatcgtttaactttatcacaactatatttgtatttatttatttagtatttctaatgtgctctgtggcagttaaggtccattatctggtttttacagttttttcttcttttttcagtttctctgttcattgttttctccttttcctgcatttttctgcattctcacttggtttactatggatccattcattcacaaaatgaaatccacaatgactttgtctgacaatgagaaatcagtttttgccattgctgatgatggctcctgtgaagaacaaccccctgaagaattttcgttatttgccagagtaatcacgcataaaaaagtctggcttacaactttccaacgtcaaatggctgaacattgggatggccggttcaaagtaaatattaaggaacatttctctggcctcttcattctctgttttggatgtgaaggtgatcgattaagagctcttgataaagaaccttggcattttcagaatcatcatattgttctttatcctcccactgcacttcaaaatgtcactccggaatctatggttttttctcctttttgggtgcaagcttataggcttccttttctcagtaaatccagattgttggctaaatcattgggaaatattttgggtgaatttttgactgttcatgaagactcattgaatgaaggatggggtccgtttttacgattcaaagttcgtttaaatataacgaaaccattgcttcgtggtaagatgattactctacccaaggttcgggatgaattttgggttgaattccgttatgaacgtctccctgattattgcatggaatgtggtattattggtcatttataccagaaatgcccacagttcttggaaaatcttgacaatgggattgaaccagagttggcctatggacctatgttgaacggttctgctttgccatcttcatcttatgaccgttatcgatctgatttttccaaaggaaatgcgtggcccttactcacacgtctggctagaaactctctaactgcttcaattccacagatccattctcgtcctcctgctcatccaccacaattactgtctggagagtcttctacttctcgagcgttatcctctactgctgctgctactgatcatgtttccactacagcaccatcctccagggttcaaccatttttttcaccggctttacttggacaatcttcattgatctcctctggttcggtacaaacttcagcaacaccatcattattcacatctggtgtgaacaatacaattaccaatgctcctacaacacataattcggttgcacatctctcagatgtatatacacctgatgttggcaatttttttgttcctaatccagtgtccaccattaatcatccagttgccacttaccccccaatggcttcacccacttatcaatctcattaccctgctctgaccgtgcctgttactactcccttatattcaacctcccaatctattgttaatcccaccactggtctccattcatctactcagtcgagtttagatcaggaaaatattcacccaaatcgtcagtttaaacgccacaatgactccaaatccttaagacaatttcttaaacgatgccggggtaaccatgttcctcaagcttctcctttgtcagttgaagtggactctatccattcagtttcggatgcttcttcagattctgatgagatcattgacaat

SEQ ID NO: 34304 - DNA, 2166 bp, Cannabis sativa
  modified_base (2107)..(2121): a, c, t, g, unknown or other
gagagagagagagagagaaaatccaagatcatagtgaatgtgtgttgagggatgtaaaagggagtatcactcttaaagtaatttcccttaatgtgagatatttctttgtaattacttactgtgttgagttgtaatcttgggcccattctattatgtactactggctattcctattcaataaagatccatcattcattcattatcaagctaagttttctttgtctatttttcaattaagttcaagttttggttttgtgattggttttagttttgaattgtgtttcttggaaattgttactactgtaacaacctgttttgacggtgaggattcgccacccttatttacttaaatatggtacttttaagtttgaccaatatatatgacatttttttttattttaaagtatttttatggtatttggtatgccatatatgtaaattagattttcaaagcccatatatttaatgtttttatttatttttagacagttttgtttgtcattggtatcgaaaaagtcgtcggagtttgctgccggcgttggaaaagtggcaagactagctgccggtgttggaaaagtcgccggagttgttgctggcactgaaaaaattgttggaattggcattgtcgccgaaaaaatcaccgaaaaaaatactaaaaaattggtttcgtgatgaagaaatcagtttcttggtgaagaaattggtttctcgatgaagaaaccagtttctttttgttgatatgtgcaaaaaaaggtgatcttcgagttttgtcaagttccaagtcggacaactttgggttgaacaggccttgtatcaggttcttgagttgatccaacttttcttgcacaaaacgttccacttcgaccagcccttgtctgagttaacccttgtcctgctaacccatgtcctgccaaccctctgccgaccaactttactggtgggttgacaaggagttggttattttggggtgcatcatttgtatcccaattagctctcctttggtttaactcattcgaaaggtatccatcagctcttggaccccactctatttacacagagttcctgggcatagggtcagaatgtgtttgagcattccagggtggaatgtcgttattgtacccaatattattatgagttctcgggttagtgcgctcaccactatggtgactagtggcaatgttctcattgagattggtgtaagactccccactatgggacctactccggccttgccttggtggaatgtcttccctcatctcttcatctctgggcagggcctgactttgtttagtcttccatatgccctttcgggcaagatttgatcatcattgtgctactggtgagccgaccttgtttgggacgcagttggtcccactagccgcaaggtgtgcccatgacccataggccattgaattccgtctgggacatagggactctttcctcgaagggggtctcttatgagtggtggttcttccactttggacacgaccctttcgttgaactgcctgattagttcattcacttttctattttggcagcttagcttcgcctaatgggctcatttgtttctttttgttgcacacaaatcaagcaatcttcattatcaatgaaattgaaccgaaataaagatctcttgttgtagcctatttatcacaaccaaccaaatgatgaacttttgctttgggatgataaatcgaccctaaacttcaccataccatgtctttgcttcttgttgaggaacgaatgcttcatatccttttttgattgtatatctacatatcacaaatggaggccaataatctttctgaattcctcctttacttgcaaaatttggcgccaataccaactactttgtggagtagatctgtacttctacctattctcacttttaatgtacacattatacacccatttaattcgaagtgtgtcttatttagtagctactgtccacccgtattttctgagaaccgctttatttcattgcaatagcttcctaaaccccatatctccttccttccaaggtttacatataacttgtatattgaacttttttttttttttggaaatcatcttgtatattgaacttggaggcgtttggttgggaggnnnnnnnnnnnnnnnataggaatgggaatgggaataagaataggaatggaatggaataaa

SEQ ID NO: 34305 - DNA, 2580 bp, Cannabis sativa
  modified_base (466)..(468): a, c, t, g, unknown or other
aaagtaaaaaataccgcctggcagtatttttgtaaaaaaatgataaaagttagtataccatgtaaattttccttatatttatatactttcaataatggtaataaggttacatatatgttgatttaaaaaatggttatatatataatatttttaaggtcttaagataatttttaaaaataactgtaattaaatattaatgttaatttttaaaaataaaattttaatttaacaattgataattaaaaaaattaaaatttctgcacttaattttattatttaattaagagtaatttgcggtataaatacctaattttaacttctagttacaaataaataccaaagtttaatttttggcggtaataatacctaagttataattctgaaacttttgtaggtacctgactgttaattgttaagtaaattgccacgtgggaattccttattggttcaagtcattaaatttttnnnttttttttttaaaaaaagtaatttaaatatatcaataagaaaatgacaagtggataatgacataatatttaatggttaggtacctacagagttctgaaaatataatttaggtattattaccgccaaaaattaaagttaggtatttatttgcaactgggagcaaaacttaagtatttctatcttttcatattatataaataaggagaattatcctatgtactaatatttacagttttgattgcttcgatagtttttatgtgggttgctatgtaaattttacttgcaatttaaattatttcgttggttgctatgtaaatttccgtaaaaatacaacagaaaaaaaaaaattgtgttgaactgtaaaaatgaagatcttacaaaactaccaattttttttccatttttatatttttactatcatttatatatatatatatttacatatttactatatcaaattttcaaaaatactgtgttaaaattttaaaattataaaaatactattcttcagtaaaataaaaaaaaaacaactagacatctaaaaatcaattttagaataacttaacaaacaacatgaaaacaattataaaacaacaaaaagtcaactataaaattacagaaaaataataaaatattgaattaattgtaatatgcaaaacagtatcaattcctcgacatatttttgaattacgaaattctttttttttatttaattttgacaatttgatttatctttttaaactactaaattatttttttatggaatgtattgttataattttatactttcaactttttttctcttttttctctctcttcctttctgagttagtgccagttaaaatgacgatttattttttagaagttaagtatataattacattaataattgaataaatatttttttataattttaaaatgggatatataatataattaattagtatatcaacaccattacacattgtgtcaattaaaacaaaaccaaacaatttatcattgtcttttaaaaaaatgtatcagaaaataaattacatctaaatagtaacacacatacaacaaaaaaaattgttaggaataaactaaaaatatacaccataaaaatatatatgaataaaaaaataactattaaacaaaaaaaatattctaaaaaccacttaaaaataactaaaaaataataatataaaaattataaaataaatgcacatatatacaacaaaaataatgtctcgaataaacaaaaaatatacaccataaataatgcacataaactaaacaaaagttgtacaaaaaataacagaaaaatatgtagaacacctaaacaacaacataaaataactataaaataacaaaaatgatagaacacctaaacaacaacataaaaataactataaaataacaaaaagacaactataataacctaaaaaaataaaaatacatcgatcttgttgcaatatacaaaaaaaaaaaaaatatgaactccttagcaaattttttgtgttagttcttttttttttcttcttaattttgacaatttgattatctttttgtattacgatattatttttgtacaatttcatacatttaactcttctttttctattcttttttgagttagtaacaactaaaatgataatttattttttagaaattaaatgaatggttacattaataatagaaattataaagttttaataatttaaaaatgaggtaaataatttaatgagtaatatataattaatataacaaaaaattaactagataacaatatgtttaccgagtttttcagaaattaaatattttgagagcttaaaaaagataaatgataatagataataaacagatagatttttacgtggttcaggtgttaatgattcttagtccacaagtctatattattggcctctatgggcaaagattttcaagattacaaaatattacaatgaagattgccctacttctcttgagagagaggcttcctagaatttcagcagagccgctatagataaagatttgttctctctttgcctcaagaaaaatgggactatttataagcacacatgggataaagggaacatctttcacctgcctagtgtttcataccccatacgc

SEQ ID NO: 34306 - DNA, 2213 bp, Cannabis sativa
tgtggagaaataactattagcaaatgtttatgcaactgttatgaaacattaaaaatcagaacaatattttaacgtacgtaactctatctacattaatgtgaacagattcaccattagaattttagaaaacaacgaaaaattaatataacaggataaacattttactatagtattcttttaaaaaaaaattggattatacttaagttggattatttgggaactccaattcaactttttgaaatctgcatttcatggatctaaaaattaaagtcatgacattagttttatgcgaattaaactggatttctggttgaattttagtttcatagtagtttttctgtacttttttttcatgaattcaaaacaatccctattttgattgattccgaccgtcttatcaggtgaagttaacgaaattaatggtggttttctttctggttgaatttcgtttcagttgcgttgggttgctgggtggttacccgaaggtttcaatcccgaaaagcaagaatcgtgagttgaaggtgtgtgtaagtagtatttgtgtaatttttttatttagactgtatatttatttatttggtggcctagaattatttttacaatattgtaatcttttttaattaaaactaaaaaacccctaaaaatatttgatgaaattacgaatggaaacttgattaaataatcctatattattatgaattacatgctttcaacaaaataaggaaacttacaatagaattaacaagtctataataaggtcaccactaacaacagaaaaaagatccctattccagatagcactatctccacaatctacactgtactcgagagagcaacaaagtttcacaataattaatataactaaaacctcacattatatctcaaataattaccaaattaattttttattttgggttttttatgtacacacttttgttttattgttagtttttttcccccttgaacatacatatatgcgcgcgctccttgagattttccttagaaaaaatggatttatattatattttaggagttatcatagtctacaaacatagagaaaaagtagtgaaatattaaacatgagagaatgtatatgtacactggaaataataagttaagaagaaaaaaagtgtcttgatgagtttggtagccgtcatttggtttcatctcatatactgatctctccctagagaaaataccaatataaattagcacttaaaaaatactactctcatcttctagctctctctttcaaagcaattacacctctctctctctctctcccactcccaccatttaatgcaaattacctctctctctctcccatgcaccattaaatgcaattgcaccatctcaataagctttgcaataactccttgctgccacattttcctccatctgctttccatttctccttccttttttcctctccagtcctttgatccttcatcttctttatatttttctttctaaatatatataattttttttgctaagtaataacttcactgatcaagcccttgctactcaactttaaccgcttaactatcacaaaaactaagcttcacaagcaattgcagccccaaaatattggttcgccgacactctctttagctacctagccccaaagcagatctgatagtctcatcttttctggggttttttcattagggcacgaaagagttaaatatttctatttatatgctggtgagtataatacatatacttatatgtatatgtacatactatcaatttctctctctgtttattggttaatacaataatttttaatttgttacatttttcatttcacccctttggtccagatcatggtgctataaagttctaagcaaaacgtaaaatactactgttaagacacgtttggatactccgagatcttcgagggcgttacgtatatagctttttttttttgtttgtttgtagaattttatttgtttggttaatgtttttatttttccccaaaagccaaatccaaattgtcaacccttatctttatatgatactctctgtagagatttttacctttccaaacaccccctaaaaaatgaagcacaaactaattgtcacctcagtccattttactttgtaaaaggtttttgtttagttaagagtagcacactactactgtcaaagaatctaagattaaagtagtagtcagaactcttttttgacttaatccttttaaagatata

SEQ ID NO: 34307 - DNA, 1275 bp, Cannabis sativa
  modified_base (171)..(176): a, c, t, g, unknown or other
ttgtaaatgcttttgtaaatgggatcccgaatttttatgtgtatggtattttatgttttaattaattaagtaaaattttaattaatcacgattttcaataaactcgttgattagcaacgtgctgcacagttaagtttaaaattacgttaacatgcctaaaatagttagggnnnnnnaatttggtatcagagccgctaggttatcttccgaagatcgtcacgaaatgtacaatcatcatcagttttcagctcgtctcacagttcagtaagcttttattgctttagtagtttattttaataaaatgatttaagaaaagcctgataagaagcatgttagtagcttgatagctgaataggcgcatgttttaaatttccaaaataatcagcaattagtaagttattcttgatcgcgatctgaccaaaatagctcttggttacgcgggctgttctagtagtatggacgccaggcgaaacaccaggagtcagtgtaactcggtcagattcagttgcggtcagggagttctgattcccccaaacgtttatggccgaagcagaggccttagaggcagggcatgaggttggggtgatgttaactcgctgcaggttgcctaggttgcccaagaatgggaaacaggtttacaccgatgcaagccagaatcaacgaataagaggaagagatcaaacgataaaggcagcagggtgcccctacaatccctgctttagaaatgtaggtagctcttgcctctgctgtgcaggcaggaccagtcactgcagtgaactgaatggaaccactgtatgagaggttccggaagtaggcatctccagtcttcttgagaggtcccgatgttatgaaagtcgagcagtgggtaacggttattaccagaattctaaactttatgggcgtcatcggcaataatagagtggcttgtgccacattccagtttcaagaagacgctctagtatggtgggacatggtatccctgacccatgatgttactacgatgacctgagagaagttccaggaattgttcaatgcaaagtactacaatgaagcagtcagaagtgtgaaaagaaaagaatttactcagctgactaagaaagaaaatatgagtgttactgaatacacaactcaatttgaccgcttggcaagattggcttcagaaatcgtgccaaccgatttcagtaagaaagagaaatacctagacggactgaattcaaagataagacatgacatgatgatcaccagtgatgacagtactgttggaaattattttac

SEQ ID NO: 34308 - DNA, 1495 bp, Cannabis sativa
tttaattttcttataaggttatagttttatatgagagaattgtattatatttttcatataaattatttgataaaatgttattgcataattatttactacgtgttttatgtttaataataatttaatcaatttgtttatatatcaaaatgctaattgtttttagtaaaccataataatataatttaattttttagttaacttgtattctaaagcataattgtttactatatttttttatgtaagaacatctactctttgtcttgtggaagatttttttcctaatttttgactattactttttactacatttaaattatattatattaaattatggatgagaagagaatgatgaaaatgatgagtgccactgagataatagcaagcaaatacttgacttcaatgaatcattttaatttgcatcgtaaacgaataattaaaataagataaaagatataaaataaatcaatgcaaataattttattcaaattgaagatgtcaatagagaaactatcttcgatctagttgacatacaactaaagcacatgcttatcgttcggaaagcaagtttcacttcatatgtagaagaacttcgccgaaaagccttatgtaaacctttaaaggaactcaaacatagtcagaagctttttataagaaaaaaatatgttcttcgtttgatcaaaaaattggtacaagatgatctatatatgatctttcaaaatatgtatgaaggcaagcatacaaaaattatcctgaatcaagtggctgaaattatcacagaactttgtgtggaatttaattatacacatcgtagtttacatatttttctattagctcatggattggcgtacagtccttttaaaattttgatgaatgatggcatgatgaatgactattaaattagttagttaaaaagtacaaatatttcaatcatagttgacgatattagcaaatttataagcacaataagtgaccgaaaataaaaaaaaattaaaaataaactatagaaagtgcatatgctcatttgattagaaatttaaagtgcaactaaagaaaagaatttactttgatttttttataagattatagttttatatgagggaattgtattatatttttcatgtaaattatttaataaaatgttactgaataattatttactgtgtgtttcatgtttaataataatttaattaatttgtgtaaatgttgctattacctaattattaacttatataataataataaaaattaaaattaatacaatttaattatattttctaaatatataaaattttgtaagaaaatatgtctaactaattttattaaacaataaaataaataaataaatttagacttttgaataatgtaactaatacaagtactataaagtatattaggagtgttcataaaaatcgaaaaaccaaaaccgaccatcaaaccgaccagaccgtaaccgaattttcagttccacgtcatcagatcggaagagcggttcagc

SEQ ID NO: 34309 - DNA, 2929 bp, Cannabis sativa
  modified_base (2901)..(2904): a, c, t, g, unknown or other
tggataaatccacatcattgagtagcccaatggtagttagatcaagtaatgtggaaaaagatccttttccacctagagaagaacgtgaagggctccttagtccaaaagtactatatcttagagcaataggagtattgatgtatcttgttaactgtacacgacctgatatagctttctctgtcaatttgttagcaaaatttagttatgctccaccatataaacattgaaaaaggattaagcacatacttcgctatctttagtgtactattgataaaggattattctaataattgtgagtcataatttattggctatccagatgtaggatacgtatctgatccacataaagccagatctcaaactggatatttgttcactttcggtgacactgctatatcatgctagtcaacaaagcaaactctagtggctatttactcaaattatggtgagatactttcaattcatgaggcaagtcgagaatatgtttgcttaagatcactgacataacatattcgaggaacatgtggattaacatctaataaagacgaactaataattctctatgaagataatgatgcttgcatcgcttaaattaaaggagggtacataaaaggagataaaactaaacacattttacaaaaaatcttctttacacataatctttaagagaatggtgatatcaatgttcaataaattcgatcaagtcataatcttatagacttattcacaaagtcattaccaacattaatttttgagaagatttttcacaagattgaaatgtgtcgattaaaagagctccatgaatgccaaaatgaggggaagtaatttcttactgcactctttttttttcgaccgagttttgtcccactgggttttctcggcaagttttttagtgaggcagttattatggacattcaagggagagttataaatattaataattatatggatgttcaaatcttttatttattaccattaattataattaatattcttttttcttagtgttttttttttaatttctaaacatttaactcttatatgtataaataagagatcattcattaaaataaaatattaaataaattctcatctcttctttattttcattctctaaattataatatttcataataggatgtaattctagttcattgtctaataataatttatagtagtattaaagtaatttatatattactttaaattctaatactagaacgggattagttttggagaggaattaaatttattattatataaactaatataatatatatacatatatatggacttactatttggaaattttaaaaaataactaatttcttagtccttaagaagaagcaagctaagctttgtttataaaaatattaaagtaatatttgccatcatctaacccaactgctctattattatttcatctttttatgattagtagttttcacttggttatctatttctttttctttgtttaaatttcggattaagtggtcctttggccccgcatttaaaaaggagagtggctcattcaatcacatgtgagtttgttgataggattaggatatcatctcgtgaatgattattcacaagctggttttatgtggtggaccctcgtatggctacaagtggatgatgaatactggctgaggtttctctacatttatttatatctttcacattttaattttaattactactagtatttgattctactcgatgcatattagtcattttttataatatcttatttttaaaattcaatcataccaattttataataattatttaattaaaatatatgattttttaattaaaaaaataatatatagaatttaatattaatgtatatttaacatctctaagtattatattttttttttttttgaataatcaagtcttctaaaactaaggaaacaattacagtaggtaaattaacactactaaaagtacggtcagcctttagaagagaagatcacgctaaccagtggcggactcaaaatttaagttgaggggaggcaaactttttttttttaagtgagggagggcgtactattttttctacataatataacatattaaaaattaatgtaaatttgtattttatagtattaaatagtttaagtaaaaataaaaaagttgacttcaatgattgaaatactaaatacaaattttattgatagagattaaaaaaatttaaaatactaaaaggtaaatatgctcttattgggatttgatcccatgacctcccctatctataacataaaacttaaccattatgctaaagattgtatcatgtttaaaaaaatattacttttctaaaaaatgtataccttaactaactaaaatgcatatatatttttttctcgattttttttttcaggggagccactgccccacctcgccttaatgtgggtccgcccctggcgccaacacatgcgcaaccttattagcaggtcgcttcacaaaattaaaagagacattataaccatcgacaaacaaagctttacaatctgaaattatatggccataaggagaggccatacttttattcttttgtaaatccgaaacaactctaaggcaatctgactccacaatcacacttggccatccattatctttaatccaactcaaaacctcttttattccaatggcttcaacctcgtgagaggttgcaatatgccccaaccttcttcaatgtcttggcttgaatgaccatactagtcgcaaaccgagaaaccaagccaacaccaaagtttctctcattagtaaaaagtggtccatcaacattaactttgattatgggaaaaattggagggtcctgttaggttatttttagtattaattttaaattaagtttagtatatttttaattgagttttaatcgtgtttggagcattnnnncgcttgttatcttttatttttgcag

SEQ ID NO: 34310 - DNA, 3601 bp, Cannabis sativa
  modified_base (746)..(747): a, c, t, g, unknown or other
  modified_base (2477)..(2481): a, c, t, g, unknown or other
  modified_base (3342)..(3343): a, c, t, g, unknown or other
aacatttatccaaggtgtaagtatactttatcgctgattatcacatcaatgtaaatccaatgcactgatgaaccagagacattttcttttgaaccatatattcacaatcacattccactgtgttgacatcactgtaattgtgaacaattatattttctggacttaatagattttgtatatattaaaccataaacatgaaacctacatgtaaacataaatgacttctaatcttttattgataacaaatcagattagactaaatattgatccaaaattccgaccggttcggcaaaagcaaagacttttggataaagagtgagcgctagccctgaaggaagaggtagaaaagctacggaacaacaatttcataattgaagctttctactcggcttgggtttctaatcccatgctggtacccaagccgaacaaaaaatggcgagtttgtattgatttgaacgacctcaacaaagcataccccaaagactgttttccacttccaagaatcgatcagcttgtggatgcaacagaagggcacgaaatattgagctttatggacgcctattcggggtacaatcaaatcaaaatgcatcaacctgaccaagaacatacaagttttcgaacagatatgggcctgtaatgctataaagtcatgccatttggtcgaaaaaaatgttggagcaacataccaaagattggtaaacaaaatgtttaaagatcaaatcggacgaaatatggaagtgtacgtnnatgacatgctcgtcaaatccaagaaggctagggggcacatagatgaccttgacgaatgcttcaaagtcctcaggaaatataacatgaaactcaatcccttaaagtgctcctttggagtcagctcgggtaagtttctaggctttattgtcaatgtccgaggaattgaagcaaatctagagaagattcaagccctcctggatatgaaatcgccaacaagaaccaaggaagttcaaagtttgattggtcggatcatcgcactcagcagatttgtttcaaaatcaacagataagtgtattccattctttaacatcctgcgaggaaataagcaatttgagtggacgaaggaatgtgaaaaagcttttcaagagctaaaaatgcaactcgcaaaacctcctatactttctaaacctttggacggagaagaacttgggatatatttagctgtcacagagcatgttgtacgtgccgtaatgatcagagaggaaaacaacattcaacattcggtctattacattagtaaaagactcattgaggccgaaagttgatacccattgatagagaaactcacttactgcctgattctagcaataagaaagttaatgccctattttcaagttcaccctattcaggtgtacactgaccaatcgttacgccaaatattgcaaaaaacggatgcctctagacggttactcaagtgagcagtagaattgggtcagtacaaaattactttccaaccccaaacaacaagttaaggtcaggccttaacagattttgtagtagaatgcacaggcaaggaagaaagcttttcagaaaaaaaaaaaaaaactctgagccagaacaaatacatcagcctagtaacagtgaagacaagctgacttagaaattacatgtggacaggtcggctacagatcagctatccggtgcaggaatttcccttgtcacacctgggggcagcacctgcatgctacaatcaagtttggatttaaagcatccaataatgaggccgaatatgaagctttgattgctggtctaaagctagcccaagagatgaaggccgaatatattgaaatctacagtgattcacagctggtggtgaaccacgtatctggagaatacgaggctcgagggaaaaaaatgatagcgtatctgagcaaaatacacaacctactcgcacagttcaaaagttatgctctcaagcaaattccaagggaagaaaacactactgttgacgtgttagctcggctggtgagtagtagtgtaaatgatagagcaaatctggttcctattcagtttcttgaagaacctagcatcactggaacagaagagatcaaaatgattaatacttccccaaactggatgacgccaatagcaacctacctcaacactggggaactcccaaataatcaaaatgaggctcgaaagatgagaaggaaggctggacggtacatcatagtagagggaattatgtatagacgaggattctccatgccattgctcagatgtgttacccaagaagaagaggcgcaactcttatctgaagtacatgatggattttagggaaaccatgctgtcgggcagagtttatcaaagaaaattctaaggcaaggttatttctggccaacaatgattgacgattccaaggcctatgttaaaagatgtgacaaatgccagagattttcgaagataccttgagcaccgcccaactagttaactcagatgcaaagtccttnnnnntttgccatttggggaattgacctgattggacaattacccaagggcaaaggaggcgtgcagtatgcagtagtcgcagttgattacttcaccaagtggacagaagccgagctgttagcaaccattacgtccaaaaaagttcaagactttgttatgaagaacataatctgccggttcgaattgccgtacaaaatagtctcggacaatggcaaataatttgacagccagtcctttactgatttctatgcaaaccatggtatcatcaaaagtttctccgcagtggggcatccccaagcaaatggtcaagttgaagcagtcaacaagacattgaaggatacactaaagaaaaggcttgaggaggctaaaggaaactggtcggaggaacttcctaaagttttatggtcgtaccgaacaactgagaaaacggaaaccaaacagaccccatttgccatggcatatggatatgaagctatgctacccgtagaactcgaaccaccatcccacaaaagattaacatatagccaagaggctaatcatgtactccttgccgaatcacttgattaaattgaagagaggtgaaccacaagaaagttagaactgatggctcattagcaaaaagtagctcggtatttcaacaaacaagtgaagactcagaaattctttgtgggagatatggtcctaagaagagtattcttaaacaccaaagacagtacagcaagtgtgcttggacctaactgggaaggaccatatcaggtagtcgaagttctagaatcaggagcatacaaattgggtacgtatgatgaaaaaatgcaacttgttctggtaccacggtattggaatggagaacatttaagaaaatactannaatagaagtaccaggtcggatgaccatatcaagtacgaaacacaagaacatttactcctaagtgaatggccttctgggcggaccacgcccaaaggttcggataaaatcttcaaaatactcaggtcagatgaccaccattgaaagtacaacttttaaatacctgcaatttgttttatttcatgttaagctaaagattagattagatcaaattaatagctttgatgtaagttactacggtaacagacatattttcgatca

SEQ ID NO: 34311 - DNA, 1307 bp, Cannabis sativa
ctttttattttactggatgcagggctggtgctccacctgttcaaagaaggtttggaaatggaaggtttgcttctaaggtactcttttatgctcagactattagtcttctataagctcctgcaaattactgtttggcattattgctggggataataattactattgttgccaccagtttcttgaataataattcttaatcatagaagtaatgataagatagggttagaagtaatgaaaacacgggaatgggaatgtgtgtgaattttctttttattgcccaatggacttgtggaaggaatacttaaaatcctaaccaaggaatgattctattactctcaaccaaacatacacattaaacggtgtacttctgatcatatagtttcatagagggcttttgttattaattcgacatagaatatcaactggttaaccgagtttctcattcgatgaacagcccccgcaacagcagcagatgccaccccctcagcagcagcagcagcagcgtcatcagcatcagcatcagcatcagcaagggggtaatgctgggatgcataagcaaaggcctcaaacactggattcattgtttgcaaacatgaaagaagagaggatgaggattctttcacagaagaacaatggcgtacaacaacatcaacaacaacaatatcgcaacaggggcagtcagcaaaggccttcaagaggaagaggtcgttttggcaactaagttgttaaaccaacgccaacatcaaatcacgtttgttagaaatgggatttttttagcctactacttgcatttagaaatgggttttattttttgtttaattttgggttgtggctgcctgtttgtgattcttctatcttctccctcgttagctaatgtgatgtaaatagatattttactacttcaattcaatcaatatgtgcttattctattcatttgttttccttctattagtaatagttatctatatggtttttcttgtacaagtgaacatgtcgactacgaggcctgaaaaggttttttttttccctataaatatagtagtataatctatatatatatatgtatacagtacacgtgaccttttaacattaacttttttatgtttttggtgtaagtatatgacatcaaccaaagtgggacacgtagtccttgaacattaattttctttttttttttaaaaaaataagtaggtgaaaagaaatacactaagacacatatatatagagagatataatatgtattcttacataaaatgtctatgcaattagtataaaatcaattgaactagtttgttcctacttataat

SEQ ID NO: 34312 - DNA, 904 bp, Cannabis sativa
  modified_base (180)..(182): a, c, t, g, unknown or other
gagtactgagtataggctggattcgtacttagtcatactttgtcgagaacgatccttactcagttagggttatggttgggtgtctgggcgcctggttataacccgcgatattagtgtgttttatgttatgcttttcttactgggtctgtcgactcacagtgctatttccatgtgtaggtnnnggcaaggctaaagttgaggagccgtgagagcgagcaagtgaagattgtacatatcgaggcagttaggcctggagcgtacgatctttgggacatcaaggcttttactaaatagtcgctaggcaacaaagtttttgtatatggatagcaaactttttgtaaatgtattttgtaacgagatcccaggatttcaaaattgtataagtttatgtatttaattaaataagcaaatttttaattaatcacgtttttcattaatctcattgattaacaacgagctgcacaatacattcaaaatcacgttatcatgtctaaatagttagggtgttacagccatttcatgcacaatcctctctagttggcacattagattatgctacacttcaaaaaatcttttcagttgcatcttgaacctttttgtgatgcggattaggcagctgatcctaatgaccagaatgtctaccacaggatattgcatcttttttgggagaaatcttgtagcttggcagtccaagaaataggaaaccatctctcgatcatcaaccgatgcagtgtttagaggcttagattttgttgttgtactgagttggattcagtcattacttactcagcttcaagtctcgatatcttcacctcctttaatctagtgtgataatctcagcaccatattactgtaactaatctaattttccatatacgagcaaagcacgtagagattgatctct

SEQ ID NO: 34313 - DNA, 2733 bp, Cannabis sativa
attacccactcgtcatatcagtatgagttttattgtagttggtgaaatagtaggatatatgaaatcatgtgaataaactcaataatagggtgatattacactaaaagcatgtccaacggcacggcatttgcaacctcaattttggatttgtctacactgtcccaccatatttaggtgagcactgtagacaacactaaactttttttttttttttactttttaataattatataatatttaaaaaaaaatactaaataattataaataaatattaatcaaaacttttataaatgtatttatttgtatttttatatttttaagtgtgctaaaaataatttagggtgtttgcagtgcgggtagtgcggtttttgaccatttttttttaaccaatccatacatgcggttttttcaatttctcaaaccgcacccgcaccgcgaaattaaaaaatcgcgaaaaccacaccgtaaaaaatggcgcgatgcggtacagtttttgtgatttggactattaccaataattaaactatcacaaatacaacaaaacttgagcaacacttgtcaaaaataccataaagcttgaaaataaatatataaaaaaattaaatttcaataattgtaaattaaaatatttaatatttactaatatgatttattgaatttaacaaatatttagtattaaaatattcttattatattattaaaataatagaataataaagaatataatatatttggtgcaatttttagtgttgtggttggaattgaaaaaaaaaattagtgttgaaatagtagatttttggtgttaatttaacaacaaatttaggtttctccaggagatgcccttaatctcccaaaaaaccatgatatgaagtaattgttctgtcatctcattggaacaagacaccagctcaaaatcaacattgaacattgacgttacctgtagtaaagaaaatagttagcagttggtggtgtgtccatatatatttagtgcaactcttctaaacaaggtttttcttttcttataatataaaagtcaaaggcgcagctttcaaatataataacttcaatgccattataacatgcataatagaatatagtaatttgatataggtcggtagtactactactatagtctataattgaatcaaaagatactcaaaatcaataaagatatctacaataatttaacaataattaaaaaaaaaaacaaattcaattcaaattaatatttaatttaactctacttagaaaaagtagcacagcttcgacataataaacttgctcttcgagtcctttgcaaaaaaaaaaaaaaaaaagctagctcttccattgggaaccatttttctaccccatatcaaaaaaactgatcatgtttcgatttgtttattcgtgtcgtatgaaagcttcaattgtgatcgttgacgatgactgatcaaatgttattattataaattcatttttctttcaacatcttacaaattaatgacaagtgtttggatcaaaatggtctaatttagaaattaatgccattgtgtcaaccacacttgaaaatgacaattataaattatttacactaataattaattatgctatatatatgtgtctaataagcaatacctgctactggcctactaccagtggaaaaattatgtaatatttgagattttcattaattcttcccactacacgaagaaaaaagaggcaaaattcaactgcttgaaaatgttgaataagacaccatggctgatcacattgtttatataactcaaaaaagtaaataaaacttggcaaattaggtccctcaccactagtcactacccaatataagtatcctctcttctttcaacaaaataatcttaatacataaagctggtgaacatggtggagaaggaacaggctcgaccgctagccccggcggctgaccgaccgaacagcagcgacgaagacgatgtcgcggcgcacttgaagaaaattcgtcgcagaaaattgatcaagtgttgtggcttcatcacagcggtgcttctagtcgtagcggtggtgatcataatcctcatcttcactgtgtttcgaatcaaggaccccattatcaagatgaacaagattacggtcgcacaattgaatttagtcaacaatacgacaccaaaggccggaagtaacatgtcgttgactgctgacgtgtccgttaagaaccccaacgtggcgtcctttaagtacagtaacacgactacgtggttgtactattacggaacggtggtcggagaggccaaaggcccacctgggagggccaggcccagaagaaccatgaggatgaatatcacggtggacatcattatgggccggattatgtccagcccaaattttgtggccgatgtggcctccggccttttgtcaatgaatagctattcgcggattccgggtcgggttaaaatgttgggcataaagagacatgttgttgtgatgatgaattgcaccatgaccgttagtatctcaagccagacaattcaagaacagaaatgcaagagaaaggttaaactatagggtacatcttaattttcttgtttatatatatggttgaaagttatttagaaagatctcaattttttacatattaattagagagagagtaaattattacctttgtagactgtagactgtagtatcttgacagatattattttagtattttatttcttctttatttttttgttttcttgttttttttgtttttttttt

SEQ ID NO: 34314 - DNA, 1406 bp, Cannabis sativa
  modified_base (1038)..(1041): a, c, t, g, unknown or other
gttgttcaggaaatatttcgggataaaatttctttaagtaggggataattgtaatatcctacgataaggagatggattagcgaaccctaactagttaaatatgtatttatgtggaattaaattattatataatttattatatgtgaattaatttgataaatgacgggttaagaccccattggtgagctaggagaatttttagtaattttgacccggaagggtaaaaactgtaattttaatattatgatgtgcttatggactatattattatatagtataattgttttgtccttctgcaggtgttcactgacaggtcggcgcggtatagtcacaatcgggtatttcgggtcaaaccgggttcggtgccaaaatacattttcgggattttatattggcattttattgatatatgaataacctgaaattatttgagcgtgtatgtgaatgacattcttacccttgtttcttgcatatgcttcattaaggccctaggggcaatttagtcattttgaccacttgagttgcttttaacaaaaaggaattttagagaaatttaaatgcatttctggttttgatcagccctaaccgaccctccttttcctctttctttctcaaaattttcttcacttggatattcactttcaattggatttttgttgtgtgcttgaaactttagattttggtgcttgtgtggggaagatcttgaggtagtttccatcttttgttattgtatttttgttgctgtaattctgaaatgaaaatatgtgtgatgtcattgttagcccaagatatgtttccaagagggggtgagttggaaatttaagctaattttagaaatttaaaaactctgaagacaattcatgcaaatattcaagtttaatggaataacaaagataatcacaagtataaacaaataacaatctagatatgtaaagatttagggatagaaattgcaaactcttaattttttacaaggttcggtagaactaagccacctacgtccttggtcttcaaagctatagacctagctttgagttnnnntttcgagccaagttaacgggcttgactaacccttacaaccggggaatattcactaaggtttttcccaaacctctcacaataattcaaggactatcaacctcaccggattgttaaagtgtgaatctcacttttctcgggttgtttacaaaaaatggtgtcaacctcatctacaatcgagttatttttctatcggtgccaacctcacctcttaaatacaaagccaactctctttaataagatgaaaacaatgtgaaatgctagagagaattgcaagcaccctagagaagataagaacaagtttggctcaagtgtgtgtggttggtgtgtttatgaaaagatgataattctttagcttagaacactta

SEQ ID NO: 34315 - DNA, 11296 bp, Cannabis sativa
taaccagattaaaatgcatgttcctgatcaagaacatacaagcttcgtaaccaacatggaactttattgttataaagtcatgccttttggtttgaataatgttgggataacatactagtaaatgaaatgtttgcaaaatagataggaagaaacatggaggtctacgtcgatgatatgttggtgaagtcgataaaaagtggagatcacacaaaagacctcacggagtgctttgagataccgagaaagtataatatgaagcttaacccaaaaatttgttcctttggagtcttttcaggaaaatttttgggattcatagtcaacgcgaggagcattgaagcaaatcctgagaaaattaaggctttgataaaaataccatcaccaacaaaaccaaaggaagtctaggccttaacaggaagaatgtcagctcttaacaaatcatctcgaaatcaactgataagtgcgtacaattctttaatgtattacgaatcaacaaaaaattcgagtggacaattgagtgcgaggaagccttaaaaagcataaagaggcacttgtcaacaactccagttttggctaaaccaataactggagaaacattacacctttacttggctgtctcaaaaaatgtgattagtgcagcgttagtgcgagaagagggaaagcaccaacaaccagattactatgttagtaaaaggttactgggggcataatcaagatatccaccacttgaaaaacttgccctatgcctaattcatacatctcgcatattaaggccttacttccaggcacattcaattaaggtgttaactgatcaacccatgagacaagttttgtcagaaccaaatgcgtttggaagattgataaaatggttaattgaactggggcaattcgacataacttatcacccaagaacatccatcaagggccaggctttggcagattttctgataaaaaggatagctcaagatgaaaatccacttgttcaatgagacacaaacacttggaggttgtacgtggatggagcatccaatgagcatggctcgggtgtaggggtgatactaatttcgccagaaggctttaaatttcactatgccttaagatttcaattcaacacttcaaacaacgaggctgagtatgaagccttgatctcttgtttaaagatagctaaagtgttaaaggtaaaaaatcttatatgccatagtgattcgcaattaattgggaatcaagttctaggcaaataccaggaaaagggtttaaaaatggaaaaatatttagagaaggttcgaaagaacttggaaaagttcgattattttaaaatcaaacaaattctgagagaacaaaactctaataccgactccctggcaaaactagcctcgcagaacgaacttgatgaattaaacttggtaccggtggaaatgttaaacgagccgagtatatgtgaaagggaagaagttgagatgatagatagctcgcctacttggatgacacccatagtcaattatcttctcaacgggcaacttccagctgacaaagacgagacacgtaaactcttgtattcgctgcctcgctacacgataatagaaggaaaattgtatagaaggggctattcaatgcctctcctacggtgtgttctccccatagaagcaaatgagattatcaaagaaatccacgaaggcttttgtggagatcacgcaggttggcaaagcttgtcaaagaaaataattcgacacacacgaatttgtcaaaaaatgcaataaatgtcaaaggttttcacatatacctcgcgtaccaccaacagagctaaggatgatgacctcgccttacccatttgcaatatgggagattgatttgattggagcacttccacagggcgaggaggagcaaagtacgcagtggtagcgattgacttctttacaaagtggagagaggctgaacctctggtttccataacctgcaaggaagttctcgcaactttgtcatcaaaaacataatttgtaggtttggaatacccattaagatagtgtctaataatggaacaaagtttgatggtgagttattcactgagttctgcgagaggaacaagattattaagagcttctcgtcagtatcaaggcatcaagcgaatgggcaagtagaagttgttaataagaccttgaaggatactatcaaaaagaggttggatgccgcaaaaggtagatgggtcgatgaactaccacaagttctttgggctcacagaataattaagaaaatagcaacagggcatactccattctcgctagcatttggctcggaagcaatgttgccagtagaagtcaatattgcgacccatagacgagatttttataatcaagaagaaaaccaagaactcttgaaattgtccttggatctacttgaggaagaacgtattgagtcgcaaattactaatgcaacctatcaacaccgagttacgagatattttaataagaaagtgaagaaaaggctctttaatgttggtgatttggtgctaaggtgagtatttgcaaacacgagagatgcatctgcaagagtatttaacctaaactgggaagggccttatgtgatagaagcaatagtgggaaccggggtttataaattagctcagcttaaccactcgttaataaagagccactggaatgtggagcatttgcggccctaccaccagtaaactaatgttgtaatttccctttctgatataatattttgaatttcaattattaataaagttgaattattttccaagtaattacaaagttttgctctttagaattacttaggggacatatgtataggtgtatgatcaactagaaattatctgaaaatacataatatattgcaaaccctccattttaaaaattttcaaagttttttaagtggttgattgaagtcatctatggacgatacaaaatcaaaagtagtagttgtaaatgagatttaactcataaaacaacgataagctacatgcggagctgcatgtttaacgacccgcattttatgggaatgtattaaaatgaagcaccaagatggcttgaaaaaaatacttaacctaaggtgtgaatagaaggcttaactattcatacaggcaataaaaaatatacaaagtgattcacgagatgaattatttaaagtatgtttaagtttgtctaaaaacagattataactgtttatgcgaagcagaattgataactgctcacaaatcaaaagcaaagcagataataactgctcatgcacatagtagattactaactacttaaacaatattaaaggaagataagagcaatggaaatgcttaaagtattttaaaatttgatcaaagtataattgtctaagttgtgagcaaaaacgcaagtaaacaaatatattaagtttgaatgcaaaaatacgaggccattaataaaagataaaataaaagtaaagttggccatccaacgatgcaaatttgtctttacaaaaaaaaaagagccacaaggggcaaaccattgtctcggccatatggctattttcctaaaataagaaaaataattaaaaaccaagcctacatagtaggagacttggatggttcttcttcttcttctcctgctgcctcggcctcctcctctgcctttcttggcctgcagtagataaggacttcctccatgccctttcctaggaaactcaaatctatttctggatttgccatccaagctcgatagatggagcgcttggcaatggtgttgcatcacttctggtgttggtctcgaccccctcaagctttgcggtggctgcactaagctcttcctagagttttcgacacaactcggacttgtccttggcctctttctgagctgcctcaagttcatctttgttagccctcttcacctcctcatcctctttgtttaggcgagagatctctgactgagccttattccactctctagaaacacccttgcactgaccaatcaccttctggagctcgctctccagttgccttatcctgtcgagaccccgacgttgggcgacaaaggagatgaaggtttgctgaacacaaataaaataatgttggcatgcaaagcttcgtataatctgggcagagtttttttgcagagaatctcaagatttttatgaaatggcaaagtgatgaaaggtggttcctaacttttgtaaaaataaaattttatgggaacaagctcgagtctatttttttcctccaaaatctacatttgtttaagtaaacataatattttatttagtttaatttctaacttttttttttaaaaaataattttctatttttactgaatttttaattatttttcttcattttttaagagattagtttatttgttttttttcaaaaaatcttagtttgtttacattattggttggattttcaataatttttgtttgattttttaagatacgtgtttataaataaaattaagtttggaaatatatatttaggaataaattaggttttttttttggtaaacttaatattttttaataaatttaatattttaatcaggtttttttaataatttttattaattttctgaggattaataggaatattataatttttaaaattaattttttttttataaaaggaggtaaaattttgtattggtcaaagttcaaagggtaaagatactaacttttaatggtaaaagaaatagaacttaacatgaatgagctcatctagacaaagtcctacttgtaatcaatctatgagagtgaaaaaacaaagacttgtaaaagctacagagtctttgatatgaccctttatttatagggaaaaaacccaaagaagcagtagaaaatacagttgaaaataacaaaaaaataaagaacaagaactgttattacaacttgaaactacagctcacaacacaggctaagtaacaaaattagttacactatcatcccccctaaagcgaaagggtgatacacacacttgaagcttggtcttgaggtaattgaacctgtcagtcgacaattacttggtcaagatattagctatttgatcaattgaaggaacatagcgcacctcaagctactttgccaaaatttggtcccgaacgaagtggagttctatctcaatatgcttagagcgagcatgaaaaactgggttggcagcaagagaggcagcaccttggttgtctacccaaattattggtgaagagggtaattgaatattaagttcttttagtacagagcaccaccattttatctcagaggcagtgttggcaagcgctctgaattcactttcggtgattgagcggggcaacaacttgttgctttttggcagaccacgagatcaaattacctccgaagtaaacaacataacctcccgtagaatgtttgtcatcagggcagctagcccaatcaacatcagaataagcttgtaaacatagcctggctgctggtctgatataaagtccctcatgtagagttccttccgaaaaggtctcttgcaagcttcccaatgggttgttttaggggtgtgaataaattgacttaacctattgatgataaaagccacatctggcctagttaaagtcaagtattgaagtgcccctaatgtgctttggtaaagacaatgatcctcaaattgttctccatagtttaaggacagtttatgagaagcactagtttgtgatggacttggtttagctccatcaagatgcaacttaaccaagagattagatatatatttaaactgagataggtaaatgccactactatctctaactatttcaactttaagaaaatagtgaagagaacttaggtttttgacagagaaaaccctgttgagatcagctataaggcttgcaattatcttctcatttggtcctgttattagtatatcatcaacatatagtaataacattatcaaatctgcaccagaaccgtgtataaacaatgaagtatcaaacctggaagctttgaaaccagtggtgtaaagagtttgtttaagcttctcgttccaagctctcggagcttgttttagaccatatagggctttgtgtaatttacacacatgattgggcttttcaggatccataaagccttggggctgggacatatatactgtctcttccaatctccctttgagaaaagcgttggagatatccaattgagtgacttttcaattgttaaagacaactagtgtgagcaaaacacgagcagtgacagggcaaacaactggactaaatgggtcagtaaagtcaatacctagagtttgatggtagcctttagccacaagccgtgatttgtacttctcaatagtgttattaggtttgagcttcactttttgcacccatttattgccaaccaggtgcattgtaggatcaaaaaggaccaatgtccatacgccatttttctttaaagcaaagatttcttcctgcattgaattgaaccagttgggatcatttaaagctttttgcaaggtttttggctctttagttaaggaggtgaaagggagaggatattttgtggcatggtaggctttaggtttgtaatcctagctttggaccttgtttgcatggagtggtgattggtgggttgagtaatggaagggggattggtgtttgacttgtttgtagatgggagtgtggtagtaggagcacatgagtctgagatattatttcgtgtctcaatcaagacatcaccttgagccgagacctgagcaggaagtgtagtagcagcccaatgatcagtaggcagtgcagctaaagtggaaactgctgctggtgcaaactatggagttgtgatcataggaggagggacatgggaagcaaggccaccattactaggaagtgtaattgcagcaggagtaacctcgggttgtaaaagaggagtgttagtgaacataggttctgtacaaaaactggcagtgggatgttcattaggaagagaagaaggtacctggtttatttttttgttggacatggtagggaagtccatctcattgaaggccacatttctggttatatttattcttcctgggggtgttgacacatgtaccccttgtgatgcattgaatagccaacaaaggtgcatttgttagatctgagattgaatttgtgctgttgatagggcctcaagtggggatagcaggcacacccaaacggtttaagaatgtcataatcgggagccttatgaaacaaacactcatagggacacatatcttggattactggtgatggaagcctgttaatcacaaatactgcatgctgaaaagctaaccaccaaaatgttaaatcaagatcggattgtacaagtaaagtgaggctatgtgcctatgttttcgctccgccctaccattttgttcatgatcatgaggacaaggatgttggaacttaatcccatgcttagataagaacttagaaaatgacctatactcaccaccccaatcagattgaactttcttaatagtgagactaaattggtttttgacaagtttttttgcactcgagaaaggtggcataggcttgagacttaaccgtgaggggaaaaatccaagtatatcaattaaagtcgtcgataaaatgtatgtagtacctataaccttctatagatgacacatgggagggaccccgcacatcggtgtgaagcagttctaagggctaggaggcacgagaatcaaacaaggcataagggagtttatgacttttcccaattttgcatgcttcacagaactgaagttctttaagattgcttttaattcctatggtagataacactttggcaagtgttttaggagctgggtggcacaatttagagtgccaaagattaatgtcaggtttagtttgaacattaaaagttgcacaaggacatgaaacagaacaagaagaacaatccatttgatttattattgaatctttacaagaaattgcagctagggaaccagctgatttattacaattggaagcatgaaaagattgtacagaggaactagattgagaggtggcaaggtgacattggagctccacatttggagaagaaaagtgattttgaggaagcacataaagaccattttcaaccctcccttggagcaagactgtccctgtgactttgtccttaacaaaataacatttggaatgaaattctaagaaaacattattatcctcagttagtttaagaacactaacaagatttttagtaatgtcaggaacttttaagatagaatttagcagtataggttttgaagaaccagtcaaagaatgattaccaatacgagagatggaaagtctcttaccattacaaacaataagggatttagaacctgagtaaggatgttcacaatcaaggtgttccatgcctaacgcaacatgattggtagccccggtatccgtataccagtcatggtcaatgttaggatcgggtacgcttgaggtcatgtaggcttaaggatcatcagcttgatctatctcagtcaagaaagcacgagatttgccaattttgggggtaacaaacgatttgtcaaaccggtaatggcaaaaagtagttgtgtgcccaatcttgtggcaaacttggcaaaccagtcttgaattggggaaattacctctcccaaatggtttgcctagaggtctatttggaaagtttagggtgttgccacgactcttgttcggagagaaacgattttgactgaatcttgatgaggaagtggtgagattgacagacatgtttgaggtgcgatcctcggtgttgaagtggcgttccaatatgctttcatgagtaagaagcaatgactgaatagattcaacagatatatcatccactaagctggtgacatggacaacgacgggatcaaacttagggccctagccattcaagagatgcatgatgagagcactttcctccatgggatggccagaagtagctaaagtgtcagcaagaactttaactttatcatagtaatctgtaattgagagattgccttttcgaatggtggagagttgtgatttgatctgtagtaagcgagtcttggattgactggagcagcgttgatcaagagctctccagatagcatgagaagaattatgttgggctaaagatccaagaattgtcttgaacataaacgagtgaagccaacaaagaaggagttgatctttccttctccaagtgatgaattctgggttcggaccccctgtaattaatcgttcatgcagaggaattccagtcaggagaatatcatcaagaccatgacctatcactgtgggaagaacctgtgatttccatggtaggaaattggagcaaatccaatttcacagtgaaggaggagttgagggagttctaaaagagattccattgttgggtgaccggagctggggtgggagcgggagcagcgaattgttgaacagaggagcgtggtggatttttaaggtgactaggatttatcttcgacgcttgtcaatgacaatttgataccatgaatgagctcgtatatacaaagtgctaccagtaatcaatctatgagagtgaaaaacaaagatttgtaaaagctacaaagtctttgatatgagcctttatttatagggaaaaaacccaaagaagcagtagaaaatatagttgaaaataacagaaaataaagaacaagaaccgttattacaactgaaaactacagctcacaacacatgctaagtaacagaattagttacactatcataacaaaatgaatataattatataactgttatattttaggggaatttctaacaagccgtatattttagaagacaaacttagatagtgtcgaaagttcaagagacaaaaatatcaattactcatatctatatatagtgtgtactatactttgttagacttagatggttcatatttgttttggccagtcggattgtcactaaatcttatcctattatcaaaacttttataggtagtttttcctttccataactttgtttagtggtttaatacttttttgctataatatatgcaaagtatacttattattatcttttctaatatgaacaacaagatattcaaaggtctagagaatcattgcttgaagaattgcaaaaaagcaaagcaaaaattataatttaacctatctctattagtttggactcgtttgtcttaagatatagatcaagtttagaagcttgtcaggatcaatatgaatatcaagtttgatttttcttaaactaatgttgctttataatgaagttttcttatttgagaaataatgtaaatagtttttgaattttgatattcgtattctacttttttgttaatttatctataaatttgatttaaaattaaagagaagatatcttgataatttataaggtattaataaaacatttttagtcaattttttttaatgatttcaatttaatttaaaatttaaaaattttaatttcttataattaatgaattttagttattcgggcaaataacataacttgcagtaataaagatataattaagtataactaaatataattaagtatacgcggtatttaatttcaacttagtgtatatatatagggtaagattatggtagtacctagtaaaagttccctaccggtaaaaaattttttttgaccattgattttagatcatgtggttattatgatgtaaggtgtatactcttacgataagactgcttacatacaattaaaatcttatacatattataataatattttttttatagataatattaataattaaaaagatttattaatttttattctgaattattattattttttataaaaatttaaattatttttatatatgtatttatttacaaaaaataattttacttataaattttgatatcaatttttttatactaatagttaactataacaaaattgattacttaagtacttttgccaccaatttatttacatacataattctaccataattatcttttaaattaatttgctattatattattataaaattatgtattaatatttttatttaagatattttgttaatttttttattttgaaaaaagataacttttatcaatcaaactgagttaattacgtctacaaagtattcttcttcaaaagagaaacttttgtttcggtatctaacagatttttttagtcattttttttatatatagtgtatattatagttatttaagacatcctataaaattttgaaaaatttataaaaaattaagacgccgaaaacaaacttctttaaaagtggcgcactgatatactcctacatatttcagaattcaagagacgttttggtctttttttttcatggtcgtgtacattatagttaattaagacatcctacaaaacttcga

SEQ ID NO: 34316 - DNA, 978 bp, Cannabis sativa
tcttttaactaaattataaccttagtttcttctataatggaaaatttcattaaatatgcttatatctttaccccatatctaaaaaaaatctcaaatagttcgatgccaatttatccttaatttattttagagtattgctattagacaccagtggtacctagcaaatagttactaactttccttagctttatcttaaagttcatttcttgaacatatcattgtaagtcatcactagtatcatccaaataataacaaaatagattccttgaaatccttccactatgataagatactgtgattctatgttcaggaactttagtggtatctaatctattattattgtaggagataacggaacatatacaagattaagaacaaatatattctattagtttgctagtcataaaatggtttacacttaatctatttagaaaatgaattttaacatttctgatggatttgagtaggatattatatctatatctaatcaaaatgtgtgttacagagattttgtggtagtaagttttgaatataatttaaagtttattgtaaaagatctttaaactacatatatcaattacttctccacccatatcacatcagatattttattaaataaaatcataataattgcttaaggattaataattattcataaacattgtatttaggttcaagtgtttatgtggtattatctctttgcatagattatcttattaataagaatattaacatgatttataccataaatattgtatctataataactataaaatacataagtattgttatacctaaatttcgaccagcaataaaaaactaacacgtgtatcaaggctaaaatatgaaccagttcaaatcacatattattaaatgcacattagattacccgcctcgagaaatacagttaataaaaatattcaaacttaccaccatataggcaatagcgagatgatgagcaataattattaactaaag

SEQ ID NO: 34317 - DNA, 2099 bp, Cannabis sativa
atggtatataagttttattgtatagtatatcattttattttagataatgcatgtttagtttttatttacaaaatttagagttattttgcatctcaaccctatactttttgtccttgttattttaatattttctcaaactgaataagattattttagtaattttttttttttttgcaatgttttaaattatattttttgttttgtttgtacctattgtaaatgtttttgtccttcttatttttttaacctcactcttttttttcatttttcttattttttttttactccatgttttgtttcaattttcttaaagtcttttgtacatttgtaccacttttcttctccggtttttttttcaattttatttgtttttttactttttatttatttattaatatgagaagcttagagctaaaaacaaaagaaactgtttgactgagttgctggcttagcaaagaaatcagttgctgacattgggatgtaagatctgcagcagcaggagcagcaatggtgtgatcaattggattgcttgtagaagcttgattgacttgagccatgcctttgtcgtttcttttcttgtctccatatcctggtgggaagccgtgaataatgaaatatttatctattaagtgaccaggcttgccacaatgggaacaagagggtctgggttttttgtttcttggaggattagtagatagtgggcgaacagagaaggaaaggggtgggtttagaggaaccaagtgtgtgttggcgttcttcttgaacgatcatagcaaagactcgagaaagatttggaataggttcattgaagagaattttggcacgaacagaggcataagattcattaagcccaataaggaattgaaggacttggttttgattgtagaaatcaagaaaagccttcatagcaccacaggtgcaagtagtgcttggctgaaactctttcagctcatcccatagggattttaatttggtgaaatatgaggtggcggaatgatcaccttgttgcaaccgagtgagttgtgtttgaagttggaatattcgaggtgcattaccctcattaaatcttcagctaacatatcagtagctaggtcaaagtacattatagtttgggcgatttcagcaaagacggaattcacaagccaagatatgaccatgttgttacaacaaagctaagaagggagaagagaattaccaaattcaggtcgtggaagagatctatctatgaaggcaattttgtttttcgcagccaacgccatggtgatcccccatttccaagactggtagttgatgccggtaagaacagtcgacaccagaaccagacctggatggtcaccggagctaaggaagaaagggttggatgcgtcttcattggcatggcgatcgagaagagagtgagatcacttgtttcgaatttgattatcttctgttcttggagattgatcttcgcgaatatcgttgtgattctgagatcgagtcttggtggttgttcgtcgagaagatgccattggagcgattgtaggagcggaagtggcatcagttggaggatctgatgaagtattttcaagtggatgtggaaggattccatcctgggatcttgtggaaggtcgtgccattgaaatgggcagggtaactttttataccatatgagaagcttagagctaaaaacagaggagaaagaaaaagtattttcctattatgttgaagcttaaataacatgccttatataggcacgagtacagtggcttaagcaacaaaaaataacaacttgacaagaaatgttataacagaaaataacagactccaaacagttggagtaactaacttaacatatcctaaccattaataaatgtataatagcgtagaagactataggaatatacatataatattaatctcttttgtgatgttatgtatctttatttaataaatttttattttattttttaaaaactttacttattagtagataataatggaaaaaattacataagcttacatttaaacaacatgactaaacttcaataactaaagaaaaaattacataaggtaccattttttgtagaaaaaaaaatacatttttacgtttaaataatttt

SEQ ID NO: 34318 - DNA, 2584 bp, Cannabis sativa
ataaattcaaagaaaacaacaatactttggaacattatgttaccgcttctattacacgccaagtagactcaaatgggtgcacttctgcagatccaatgacaggtttatcttctagcagagtttcaacacaagcaagcgttgaatttgctatagactccagattgtaaccaccttctaaagccaacacaactttcccttgggcaaaatccatcaactaatgaatcaaaagatttgaaaaacaaaaagaaataacgaatcatccgagtcattaagttccaaattaataacagaatgcaagaaagtaaactgaaaattagtaaaagcaatcccaaagtaaaactcaataggcattagtgataaagagaattaacaaacggaatattttaataaatctaataggttgatgcaggatgaaccagatcatatcactgttaaaagaagattagtaaatgtataaccttctttagcatgattgcgtatccagatggcgtgacacgacaacctcctaagggatcattaacagctgcaccaagaatacattggagttcatcagcatagtttgatgggaatgcatgaatataaaaatgttaagaaacggaagagagaacacatcattgcattaaaatacatgacccacctgcatcaaacccggcagatactataattatgtcagggttgaattccttagcaacgggaatcaaaatatgatcccaaactgcaaagtaatcagcatccccgcattgactattttcccaagggacgtttatattatatccagcacccggtcctccaccaatcattgtgtaaaaaccatcatcattggctggataaaagcttccaaactcatgcctatacaaatatatagattaacattgctatgagcaggatcttttgagtttatgcaaacagctaaacgatactgttagtgttatatcacttgcatagtccttaataacacaaagtctactcagactatatgtattatataggaggacaattaaatgtataaacattttatcaattcttataacatacctatgaacggagaaaaataatacacgcggatcctcccaaaacatcttttgagtaccattaccatgatgaacatcccaatcaactatcaaaatcctttcttctggctattaaaaataataaaaataataaaaataataaaaaaaaatcaaatgaaaatcagcagacataactttccatattaagagagaaaatgtaataatatctccctactgtaggttctcagtgtgataaaaaaagagatgaatcaaagatttagaaaaaaattcacgagttagagggtgactcactttctcattcaatagaacttgtgttgcaatagccacgttattgtaaagacaaaaacccattggttcatcatgttcagcatgatgtcctggaggcctaacaatagccataccagaatttaattctcctttggcaactcgctcaaccatctatcatatgtcacaaaacattaacaataaagttagttctgagtttgaaaagtattttgtaatgtataaaaatgtcagcattacatacactctgacttaacagtggggaagtaacttcatgcgtacaattaaatatattcagtattcacattacctctacaacagagcctgcagcaagagacgcagcttcagatgatccatcattgaaataaatggagttgtatcttgatgcagtcctttctcttcgcgaatcgaattgtttcgaacttatattcttaatcaatttcaaatgattttgggaatgaactaacaaaacatgcttatcttccacttctttggcattcaaaagaatacatctgaagcataaaacccgaataggagattatcagaaaaattcaaaaataaaaaagaaaataatcagaaactacctttttattagcctaacactaaaatcaaaattaaaattctacactttcctactataatcacgaataaacttaaaatttcaactaatacagtataaaacttggtgatgatcatcatcacatggaaagtaaaacaaacaaagaatattaatttataacggcagagacaactgaaaccactgaacttgataaaatataaaataaaaacagcgaaattgtttgtgtttcgcgtcaattttctggacaggaaaacaaaaagtcaaaattgaaaaattgtttacctttgaggtataccagcactgtgcagtttcttccaaatggctttgatgcgattcgggttttcgggatggtcttcgtggtcaggagtgtgatgtttacacattcgctcatcgtataataacccaactcgcctctgttcagtcttactctcactattgctcctcaaatccgccatgtttgcaccaagaaaatgagagagataaccagaaaaggccaccacagaaatgtagttccaaaatctgtggaactatgggattccaatcaaaaactaaaatagagatgatgacttttccttcaataatttgaccaattttccctctcctttttctatctttttctatcttttccttttattatatcttgtttaggtgtcaacctcttatttcatgggagtgtttttttttttttttt

SEQ ID NO: 34319 - DNA, 2660 bp, Cannabis sativa
tttaagggtctgcttccagtgccggttccaattttgggtcatagtgtacgatttaaggtttcggtgtgggtctgggtccgagtcctggtctaggtctaggtccgcgtttgggttcaggtctgattccgatcttgggtcccgttccatgttcgggtccgagtttgggaccgagaccaaggtctggtcttatgtctcagtccctttcctgggtcctgattctggttctaatttcgcatttgggtccccaatctaggtcagggtcctaggtctaggtctgagtctccaatcccggtccgggtcctgcattcgggtctgggtccaagtccgtgtctgggtttgggttcgtgtctcgagtcccaattcgagatttgggttcgcatcccggtcttggtctgggtctacttccttgtcagattccggttccaggaccgagatcgggtcttagtcccttggtcttgttatcgggtcccagtccgcttccggttccgcttcaagtttcgggtcacggagtacaagttcgggtcttggtccgggtttgggtttgagtttgggtctcagtttgagtctaggtatgggtccgagatccaaaaattgacaatgggtcaggtccaagccccgagtctagatcaagatccttgtctcgggtcccaatctagttccacttcaagtccccggtcctggtccgtgtccaagttcagggtctgggtctcgggttaggtcctgggtctcggtgtcaattccgaagctcgggtcccgcgtccacgtcccccatccaggtctgggtcctaggtcacgctctaagtctaggacctggtcggggttcaagtcctagtccgagttcgggttcgggttttttatcacagtcattgtcaagatctgggttcgagtcctgggtttgagtccagatccaggtccaggtctgagtctcgagtttcgatccgggtctgggttccgaggcccgggtctaggtcccccatccaagttcgggtcctaggtcccagtccgagtccatgtttgggttcgggtcctattcccagttctgatttcgattccgtgcctgggttcgggttcttgtccaagtctgggtcggggtctgagtcctggtccgagtctagggttcggtatgggtttttgtccaggtccgagtgcaagtcttgggtacaggtccaggtttgggtctaggtctcggtccggatccaggtcctaagtttcgatcacggtctgggtgtgggttcgggtctgggttcgagtccaggttcttatcccgatccatgtcttggtttgagtctaggtctgggattgggtcccaggttcaggtccgactcgatccgagatccagaacaggaattggactaggactaagactagaacacagacatgggactgtaacaggacccaaaactaaaccctaactcagaccagaacccataccgggacttggacccaaaccgggacctgtgacctgggacctaaaccaacaccgggaccttgacccagatccagactcggacccagaatcaaacccaaaaactagggccaaacccaggacccaagaacaagactcgaacctgggacctaaaactcggacacagacttggactgggacccgaactcagactcgaacccaaatcgggacctaggacccaaacatagatgggggacccagacctaggaattgggcccctgaactaggaccagaacttgggcctcagaactttgattaggatctgggacccgaccccaatccaaaacgtgacctaggagcctcctcgggacctgagattcgggacttgatgcttggacccgacccgtagtcggtgtttggatctaggacatagacctgaacccgaacccaaactcgaactcaaactaagaccctgatacataccaagacccaaacccacactcgggaaccataaccaaaacttgaactggaattggaccgggatatttgaatgggactaggacctggacctagaccgaacccggaaccagacccaccctcaaaccctaactgtgaccgaaacccagacctgaacctcgccccagacccaaatcaggacccgaacccaaacttgcacccaaactcgacccgaacttgtaccccttgacttgaaattggaaccgaaattagaagtggatcgggacccaagaacaggaccaggaccaggaatttaaaaaccttagcgctctgataccaaactataacgccctaagaaataggcacactacccaaggtgattaagaacccctaatccccaaaattggattactaaaaagataagcgcgggtaatttaaaatttaattgaaaacagagtgaaaataaaagttgtaataaacttaactttacaatcaaaaattacatgtctcgagatctcaaaaatattttacaaaatattacaaggcttttcactagctgacctaagcagcaaaatcagagtttcaaaagttcatcactggtagaccccaacccgcttggtctagtgtggcccgaacatgtacatacatcgcccaactcttgcactcatggatgatctgagacagatttctcctttcgtgcacagtacatcacccgtgagccaagcccagcaagacagtataaaatatcaataatcataattatcacatcacataaacatcaatgccatttcacatttgt

SEQ ID NO: 34320 - DNA, 2385 bp, Cannabis sativa
tagtaacaagttaagtattcgtttatgttagatattcaattagagcacttcttatttccacccactaatatatacttatctcaacaccttgtaaattctacttattagcacatcccttccatcttgataatctcttgaacgactatcgaatctgcatcctaatatgaatctttatagcgtactttgtcctcactcgtgtgctctccgagataacttcctggaagatttcccaccttgagattaccctaagttaagcatgcttaactccaaggtaagctcatggtgggttatcagaaagtagatgctttgtcgtccctaattgtatttcttacattcattatttttctaataaaattaaatttccttcattgcgattcctcataagttttattcacttaaactagaggaattctcctcttattgtcaacttaagtattgttcatctccacttattttaacttgtatcaatttctcttgaactgacacaacttttaaatttcccaatcatttacggttaaccaccattataaagtaaattaactaaacctatgcaggagaggcaacactgctcatactaggtacccacaactaaactggaaatacccatttctcgaattctcaactaataacattgaatcaaagatcattccgtgatcctgaaattttaaacacatccagaaatatacatacctcaagtatattctttattttattgacaacccatggtacgaactaccataccaatttatagtgagtctcccgttcatgacgctgattcatcaacatctaagactctcatgttcttttctatcattaccactaaggtttcgctccctagttcatacgctaccactgcttccttgcaatcatcactatcttcatagttggttaaccactttaaaacttattttgcactcaattatatagctctttgttcaataaacaacctgctttgtgatctaatattcactaatcactcaaatacatgtccattaaattgcatctcaattcataagcttttctccattttgggtgagttgcctttctataattgcttaataaggttatcttttccaagaattttaatggtctctttaaataccatgttgactattcagtcaattatgaagtactctccatcattactgcatcaccttaagaaaattaggtaatcttctttaccttagtgataccactactcttcctgacgtaatttttttatacattaccccggtaacgtccaccttggaattcctaaatgaaatcaccccaaatcaaggacactcaaccatagagttccttcatggtaggctaccaaacataaaattcttcttgctaacataggtagtcccacacatacataatctcaaaattagtacacaatcactgccttcaattcacttaggattccagacaattctcataaattgtcctaccttttctaatgctagatcactcctaaacaaaagattttgttatttgaatcaattagatcgatgcctccattaactactcatgtcttatattccactgaggaatactagcgatttaactcatattgtcatttctctaatttgtctaccccgtcaaatgggttaccactaaataacatacatgcacaatccattcagatttcttgatgtctctaactgaatgtacaatgtttgatatcaatatcaaataaaacaacaattgtaatatttcccataaaattctaagttgagtcggctgaaggaccgatatctgggtccccttgaatcatatctggcacttgggcaggacccgtacacttttcttctttaatgttagactttcttaacaacgcgtaggttctttttagatgacccactaccccacaataaaacaagatctggccctacattaattcaaatgatgccttttttcatcttgaacactcaggataaggtcgctattacttattctcaacttgattgttattcaagtcaccctggaacctttttgttctatcccataattggtggttcatttagtttttgcttcttgatctactagtaagttggcttcatatattccaccacatctactggtacaacaggaagtgtcagtagtacaaaagcagacacaagatgagcttattgttctttcagatttcagatctgttttccccttattgtcttatcatatcctgcatagtagaatttacatgttcccaacattatggcaataaagaattctcttccttaccgtttgccttgagcccagatagctcgctaatcagactgttcgattgcccttactggagaactcaaaacacatttagttaacatcttctaaccatttagaactcagacagatatcagtatcaatatgcaaataccatacacatattcttatcacaatcat

SEQ ID NO: 34321 - DNA, 2981 bp, Cannabis sativa
atttaattatcataaaaaagtcttttaatatttaaaataaataatatttttttaaaaaatccacatattctttctctctcttctctcacgtactctgactcatcttttcttatttatttattttaacttttttttttctatcttcttgttccctttatcttcttcatcagtagacataccaccaccaccataagcatgaatctatatacataaaaataattaaaattaaacgcaaatgtcattacacatccatataacatgcaaaaacaaaaattaaaagccaaaaaaaaagtttagcaactttgggagtaccaaatcggagctttgtcgatctcaacgtcggtgagatggcaactctttctctaagggcttttgacatattctatcaattggaggatgtttccatggaggccagaaattcaacacgacccaaaccaatccaagaaaatagccttaacaccgcaggcgcagatggaagtcgtctttcttatcttagtgtaccaccattaatggtatcaaaaacaaaaaattaatttcttttaataatgaaaaattattatttttgaattttaaaataaatgtttaaatgatattttttataaattttaaataataaaattaagtgtaccaatataaatgtgccatgtgtacaagagtgtacacataaccaatttatgttggcatttaactgtgataaatagacggcaccttaaatttgctaacactttagtagttcggaggattttaccaccaaaatttgagctagtacctattgctttttagcatggcctcccatcactctttagtgatggtcattgcgcggtaagccgcacaagggtagccactacgtgattccaaaagcagatattaagctgtaaacttttattacacgtaagaccaactgtgtctaaaccactattaacaagattaactacttaaagttattctttcaattccacatgcgtacaacaggcatcaccctaagaaaagtcccaggcaaggtctatgagacttggtgaatagcaagtgaccaagagatataagcctgcatggttacttggggagcacacacaccgtacaatgcatcaaactaacacaaaaaaatgcagagaaattttaacgcttagaataagctactaaacctgtctctaagtcgtgtaagcactttgacttgacaaagtaaatctagactttcacatgtcaaggccataagaagatagtcaggatgatcatatgtctgccgtaaaaggctttaaggctaaataatagtaatgttcgaaaataagcaagaacatgagagccttgagaccggatatgaaccggatagagctcctataagggccacgtaccgggctacgactaaggcagagttccttacaggttctaagccatgttgagtcttaagttgaacatccgactataatagactcaccattaagtttcgtacagagtttccaagggaaccatgtatgagactaaggttgtatatgcctacaaaaccataatcttgccgaagtcaaaagaggatagaaaattggctacccacctggaaccaaggcccatgccggccaaggttctcaagctttgaagggatcggccagggtcccatgactcagtcaggaaccagccatggtcaccaaacttagacatgatcagcctagctttatttataggataaaaccctagagatagatggccaactcccatgattaacccctagggccgaccaagtctcaagcaagacctctcaagcaagccaaggttagttttgaatctcaatatgtgtttttctttcaaaactcgaatatgtgcctcgtattctttatgactcaatgagtcaagaatcacaacaaaggctaaattaaatcttttccatcaaaaagtcacacattatacattctaaaactgttataaggatcaatataccaaggagattacaaactaacatgagaattaaaaagtttctcagagcttgaaaagcttgaaacttgttaatggtaggtacaaagaagagatatctaagaagagaagataaaacgtagatagagagagaagatcaaagatccaaaagcatgtcatacagaaagccaacactcggctagacaaggctggacaacagaaattactacaaataagatgagagctagaaagttcctatccgaccagacattcgaacagtgacttgggaggaaaatgttatctcaaattttgtccacctaacgtggcatgtccacataagccaaagatagagtacaggtggaatacaaccttatcagtagcaagacagggtctccatacaagatatggtaaaaccgtcaagcagaaaccgaaaggagtgaagcgagccatcaagaggttgtaccaacatgtatggatagctagagtaagcctataggcagaccagagtaagcttgtatggccagctaggatttgggcacaaactggctggccaaaaggtgacttctagaccaagagagcttccattcgaccaagggaacttggcctctacaaggaaacaatgtacaaatatgtcctccacttgcaaaagggtggccttctcttggtaaagctatagtgaccgacaaaatcctagcagacacatgacctgccaggtcttggcaggagcatggccgaccagacctcctctgcaggtacatgggtgaccagacctcctctacatgtgtatgggcagccaggattaatctagcaggactctatgtacagaaagatacctacgaatcgggcccttaacatcccaacaaattgatagaaaatatctaatttcaaggggcaatttaattttttcgtatttaatcaatttaatatataaatatctaagggtttcagttgtaaattagggtttagactttgctacataaaggccttaactccaacctagaaaacctatgtcactaagcctaattctagcctccaaaccactctaagtctaaaaccctaatctcttttctctctctctctct

SEQ ID NO: 34322 - DNA, 5530 bp, Cannabis sativa
  modified_base (279)..(288): a, c, t, g, unknown or other
  modified_base (484)..(492): a, c, t, g, unknown or other
gacttagtcatttcttagaaaagtggtatttgttgaaacaaacactttcttatcttaatgacaataggatggtccacccccaatcacttagaatagcgatcaaacatgcgaaccttggtcaacagttttagctttcttaagattacgattacgacatccatgaatctagtaatggtttacactaagtacacaatcattccatcattctaaaattttcctatcactagggtatttccctagaaggacttaggcaattgctagtaactaatcatagacctnnnnnnnnnntcaatatgcaaatcaaatttctgggaaggtaagtttggatacaattgcaaaattcaacttaatgatctttgaactgcatatctacaaaatatttctccacccctattagttcgcaagatctaaaaccacttaacttaatatttttaaacattgctagaaattcatgaaatgtctaaaacatttcaaatttctttgnnnnnnnnnaaatctagagtgatcatcttaagaatataacaaaaactcatatccacccctaaatgtacatccatgtttgaatatagatgatcttactttgaagtggatataggcatattttctttttgcaaagaatcatcttgtcaaaaccactatgaacaagataaaaatgcatagatactaaaatgtggttgtaatcttttgatgacttacgtctagttacaataaagagttcttagaatagtccaagtgggtcctggtcacagaatactaaactcataatttatacataaacatacagtttgaatctattgacaaaaaatggatattaacaacttgtgaaagttatatagtattgatcaatgtaatcttggaaattgaaatataaaatttctatttggaatctaaaatttaaagtcagacttaaatttataccaaatatacaatgagtgattattctctcttagacccaagaaatggcatgacagaaatctcattaagaaagagtttcaaccaatttagcaaactctttaattcaaggctgaagctttttctaggcaagttgaagtcaagatgtctggtctgttcaccgtggtaaaagtttttccttatggatctattgatgtgactagtgaaaaatcgggaactttcaaagtaaatgatgagcgtctaaagctctacttaggtggttagattgatcaagccaagtccgccatcctctaggcacttctcaaataagaaattagtgtctggctatatgacattaataacagcgctcttgagaggcaccccaagttttacagttatttttagttaatttaagacaattgtgttttttatttttctattttaatttgttttagtattttcttttctgtaaaaattaatatcgtgaaaaatgtgaaaaaaaaaatgatgaaagaaatgaaaaaatggtggttggttatagtggttgcaaccagggtaagccttgttgcgactaattattgtcgcttcgacgaggctatatcccaatcacaacgaggctcttgctagagcaggcagaaaaataatcacgaatagtagtcgcggcgagcgtatttctcaccgcggtgagagtgttagattgcctttatattgcccatttcgtgtccaagctttctaaacctaaaaaaaatcaaaaccccacccaatttttaccttctcccagctgaaaaacacacattccttcccaaaatataaattttcttcatctctttctaacatcttccatcccaatcattcgaaaacacattttctctcatcaatctcactttttcccaaaaatcaaccctaaaatcaccacttttcacccaaatctgagatgatcattattcatcatcttcaacctcaagctttttgaggtcattcaacaatggaggaacattaagggcatggtcacttagtaatttcgtcttcattgtattttattgattaagtgagtttttttctacaagattggatatcatctttatttgaggtttgtggatttttcttctaaattttggggctgttttggattattttttgcattggattatattggtgtaattttggtgaagtttgtaattttgggaagtgaaaaaattaaggggaagtgctgtcaaattttcctgagaatttttggttgagtatttcttgattttgagaatgggtctcaagcgcactagagctagtgcagcgggtgcttcatcgtcgaatcctctacaagccgcttcaaggccaacttttaagaaagccctatttgtgagtctcaaagcccaagaaagatattttgaattacaaaaaagggcattcatagtagatcgaggcattgagtatagtgaaaatcccttgccaaatcagccactgtttgacaatattaggcttcaaattcagaacagtaagtgggcggaacttgttgatgttagggagagggtaaatcaaactttggctcttgaattttatgctaattggcctaagcggatgaatggattagttaaagtttttggtacatatgtccctacaacgacacaacctatccatactttatttggactgtcagtcttcactagggaggaacaacatctttgtattattgaggaggatgagctgttcaactatttagatgttacgaggacacttggcttcccgagattgagatttcatgagttggatgaggaaccccataaactctaccgctatgatttgatctaagttgctcgtgcttggttattttctatgagtgcccagttggttcttagtaagcacttttcagatgctcaaatggataggcttaaatatgtatatgcaattataaagggttacaacatgaatgttggggacattattcaatatagttttgatattatggtagagggagtcacacatggtggggttggcttggcaggaatcattactgaactttgtgtcacttatggtgtgcgtcagtatgcctatgatacccaggttcctctacaaagaaagattgatggggtgatgattcgtggactaaaacctccacatccttacctcctccctattataatcaacaggcagaagctcctggtcccgaagaagcaactcaggatgaagatgccttagttggtccctagtcctcttgacacacgaatgcaatatgtccgtgctcaactcaactatctcatccaacagaataatcacatgctgagttacatggcgcagaagagtgagttcaatgagaaccaagagaggaaactaaatcacctcattgatcagtggagccttggggttgaggatctgaattgcttggtgtatcctcctctcttccacccttataatcagccaccactgccaaaccccttctgatcggggtttcaggtaagttcttctttctctttgattttatgtcacattggggataatgtgaacttttagtttgggaagagggacttaattttttaagtttcgctactttgttttgtttgtgtgtttcgtgttttatttagttttagtctttgtttagtgtattgataattaagctaatgataattgatttagtgagttggtgatgttatttatggaatgaattgagatttaaattgtgtgcttgattcgttaactctttggattaatttagatacttattgaagaaaaaaaattaccgatttaaattatcaatattttgatgttctactatggtttgtagaatgtttgcttgaatggaataaaacttgcatgatttattttctcgaggcaaaatccttaataactcttgctttgaatatgatttaggcaattttcgttggaccagtttagcatttcaagcttacccttatgttttatccttagtttactcaaatttgagccttagcttgttaaaaaattttaactacttagttaagcttattttttttccattcactacattgaattcctaatgcaccttgaattatgccataagcttagagaacatgtttggagagtaaattgttatgggtggaattatttggaaagtgagagattgaaaaaagttttgtaatgtaaagtattcccaacatcactaaaaagaaaaaaaaaatatagaaaagaaaaaaaaattatatatataaaagaaaaattgtatagttattccttcttgattaaggaaaaatttagtggaaaagtgatgttggactcgaaattagaaattcttaatctttaaaaaaatatctttgggtaaatattgggatatgcggatttgtgtgggtacttgtttggttataatgtgcttatggtataatagagcctaaatgactttttatctaccttttacctaagccatgacattacaacctaggatgacctattgattctgagtaaggattgttgacattagtggagagaggtaggtcagcgagcatattgaacattggtttgtggaaagttggtaagagtagaatgattgtgatgtttttcaaatattgaagtgtaatttgcatctatacattgtttctcaaagaaagcatccaagttagttgttagagtttttagattgaaattctggtttaacctattaattgaattttcacaagtggcagtggtaatttgattatttggaagctgggttatctgtttgtttctttgttggtttgttcttttttagtttttagtcttactcgagggcgagtaagcatctagtttaggggattttattaggctattttagccaaagtttcactatttagtgttattttttctctttgtttctacttttaagataattttctgcttgtttctctctgtttcaagttcccagggtgtttaaagagaaaatttattaatgttagaatggacaaagttaggaaaaatgaggaaaaattcaagcgaaattttgcaaagcttgctgcggcgagctatgagggagtcccaactaattaatctcgtcgcgacgagccatgtttacagttgcatcgagcaactttccagaaagggttatttttgagtttttaaaagtcgccgcgactagaccattcgtggtcgcggtgatgccttcagtgcaaattcgtgggcatttttcataatttcaagaatttaagttgtaaccttgttcttttacaagtcttacaaattttgtgtggcaacagagcaatttctccactaatttcttttttctctcttctagatttcttatgttgatttttgtattaattttgattttaaatttgaatatggagattatgaactaaacttcctatttagggatatgatgaatgttgattgaaattataccatgagtttatgttgattgttattccttctttcaatttattcatatttgtgcttaattacatgtttgagattgatcacttgaggcatgatttataatctcaatacaaaatctaaaaagtgagtactgagaatgctaaaattaataaatcttacttttgatgtgaaatgagagtatttacatagcctttgtgacatttagattatatttaatgtaaattgtatgtgaaaaaccgtatttttgcaaatgtcagttatatataagaaaatataaaactgtaagcgtctgcagaagcagaaagta

SEQ ID NO: 34323 - DNA, 4523 bp, Cannabis sativa
  modified_base (1139)..(1141): a, c, t, g, unknown or other
cgccaatatccctaaaaaaaataagtgcttactaaattcaaatacagctcataaaaaaaaaacttatctttagtgacaactttttagtcacaacataattgttgactcaatttatagtcaaccgacacggagtcataataaatgagatttaaaccaaaacacgaacaatgtaaataatgacatcagaatttaaagaggttcgaccccagatgtcgctaatagtcaactccccttgtattttattaattggagttgcaaagtcaagaacaagctcttgaatgcaaggaataaaactggcaaagtttctgctatctaagttatggattttttggatccctttttcaggtcattggtgaccccatatataggggaaaggtcggttcttctcgcttcaggagacacgaccattacagagataactcaattgtctccttggtttttggaggtagttgaaatccaattcttgtgataatatcctactatttcgtgggtttttgcaattactattgagctccttgcgggatatgaataatttgaattagttactgactatgggggtccccccaaagttaggcatggccgtttaactttctctaagggtagtagccattactttggggtgacactctcgagacccactctgcaggggatgatagtcaccatctcagggggtggtggtggtactcttgagaccctttccacatgatttttgacgttgtaaagatgcactataccaaccatgtcttatgtagctagaatgtgttacttagaccatgagggtgtgagggtttaagggtacacccctaaactaacttcattaccttttgagtagattgttatatttgaggtaggcgtggttgtatatacccctagaccaattcgacttccttaggtatgtggtgatcgtttatcctttaagagggtgctagtccaccttctctctaggggtagtcacgttgcttaagttaggagaaaaggtgactgtcaaacttctcttccaacgattatgaccttacacattcttcatcaattcagtcatgatattctcgtgtcatgtgtcatcatttttaccacatcaccatcgtaaaaatttgggtaaacgataatacttttagctaaaacatagtatttagatacannntgtcactaatttagttttattcacaacaagtattgtgactaaaaatacatttagtttttttgactaatacttttagctacgaatcttttagtcacaatgtaggaacgataatttataatttgtcacaacttgttcacttgtaatcacaaattttgttgtgactaaaagtaagattttttttaatggatccacaaagaatgtagttagtatcttgaaagatattgaacttgttaagttgggtctttgtttgtagtctatctagcacaatcaaccatagctcaaagcgatgtttgtgaatgttatttatgttcaaaacttcctcttgccattgcactttatttttgacacaattttacccatttatactgttaaatgatactatactttcgaactatgaaagttaaaaagtgtatgtggttcttttgctgatcttttactgctacaaccattctccaataccaattgctttgtactaatgctacataagcccaccattaatcttcattccccacatgtacccatttcatccaaatattatcttgcttcatcactatagcccatacatacttgtcgatagcaacaatattcgatgtttttgtatattcctaaatcccaagctcctttctttctttagtttccaagcatcttcacaaacatgataacctagataattagttcaactacatcctttcagaaaaagttcttggaaattgagtttatttatttatttattttgcaaaattgtttttgaaagaagcataatttgagaccaataagaatgtatggaatgtaaaacaaagtgaactaatacaaccttacctaaaaaagagaggtttattgagctccatgtacttattatttttactattttttccaccaatagttcacattcagttgctgagaattctttatagcacaaatgagattcccaggtacctaaaaggcatagtactttgaaatccaaatatatctacaaacgtttgaatttcttgatcactcattccacaacaatagatgcatatttagattcattaggtcgcgtaagcccttgaagcataaaataaattaatttaaagtccccatgataaaataataacaaattgtcagtaaaacaaagatggtttactttcatccctgtaaatctatcataaaacttaaaatcctccaagtgcccaacttttatcattatttgggaaacatattccatcccaagaacaaatagaagagaagaggagacatgggatcaccttgtctgagtcttcttcttacgtcaaaaaggcctgtcatattgtcattgatcatcaagctaaatcagggggttttaatgcataccataattagtttgatgaagttgtctagaaaattaaaagttgttagcatctcttcaataaaatctcaatctagtgtgtcatatgcttatctcaaataagactttatcatacaactcaattttgaatttttttctcccataatgtttgaccaagtcttgacagaccataatagtatcaaaaatgtacctaccttgaacaaaaccactttggttttgagtaataatatcaagtaaaatgtttctctacctagagcatattagtttagtcgcaactttatacaaaacattaccttactttccatgccttttctatatatagctatggtgaaaataattctcactgttaatgctttaattagagggctgaaagttttaccaaaatctaaacccagtctttggttgaaacttttgactacaagtctagctttgtagcgctgaaaagagccatttaagttcctttttattttaaaaatccatttgttacattcaactgtgagatctaggcaccaaattccatgtcatgtttttaacaagagctacatgttcattactcatagcattattccaaccaacatgactcaaagcttctataactaagtttagttcttctttaatttattcccaatttgagtgagagaaatagatttgaggcttgaagattttgaccttggctcatgccaccataggataagaaaaaggtagagttataggttttaatgaatctatactgtggtcatcagatgcaattggggagggagatgatggatctaggccagtaaagaacctgatttgtctgatctatttgaggcatcaaatgttgagttaaagagattgacattttaagatgataaatgtgctgaagagatggacttaacagatatatgtgaggatatgataatgtaggtggtatggtaggataatagtttcccccaaggaatagatatagagataggagattcaagtttatgagtgtttaaaaaatcaaattaattcaaaagaaattcatcctcattaaaaaccacatttcgtgagatatatagtctaccaatcctgctcaagcatatatttatacccttgacatatgtcattatagacaagatttacacactttgtggagtagaattgaaatttatgggactagcatggcatgaggcatataaagcaagacgatccaaagactttgaggaacttataatcaggctgctttgagaaatctagttcaaatggggattcgttcttgtaacaaaggtgtaggtaatcaatttatcaaatacacaattgtaattggaaggcatcctaccaatattttttgggtacaccagcttgagcaagaagggttaatcccaattctacaatgtgtttgtgttacatttgaaaattccattttgattatggggacaagggtgatcaaagttgattccacaatctatcacaagtctagtgaaagcttgatattctcacttgaatttgtgtgaagagatttaactactttttaaattagataaaggttgccggtgcttttttttttttttttggaaaagatagtaaataaatataattattaagtttgcttggaaaccgataaatagctagctcatcgatccataatacggttacatagagaagaaaagtattaattctctccaaacttgtatctgtttttcttataaaagctacacaatatataatagaatttgaatatattaacagtgcatggaagaaaagtaaattataataatggaacatatgcaaacgtgcaattcgaaaaggaagttgttccttcttcagtgaataataaaactaatgatttttttttttttttcacttcaagtatctataacctacctattcattacttgtatcaactgaatactgattgaatcataattagctagcattgaaattcactaccatttttgtcactccgcaaagtaccacagcaaggaaagaagtatagcaactagcgcggtacgtacatatatatatactaggtgaatgtacgtgccgagccacgtattgctaatttcatttaagattttagtctttttaaga

SEQ ID NO: 34324 - DNA, 2131 bp, Cannabis sativa
tccttgtagaggtcaggcttccttagttgaacggacccttccttggtttgaaagtcaccttttggccagccagcttgtgctcgaaccctggccgaccatataagctcatcctggccaacctatagacacccttggccggccaaacatggtgttatagctttttgacaactcacttaacttctttcgcttgctacttggcagttttgccatacttcgtaaggagactttgtcttactattggtaaggttgtattctacatgtactctgtcttggctaatgtgcacatgccacgtcatgtggacaaaatttgggataatatttgctctctaagtatctgttcgtacatctggttggatagtgactttctagctcttgtcttgcttgtagtagccttatctagtcgagtgttccctttttgtatggcatgcgtgcttttaaatctttgatcttttctctctatgtatgcctcatcttctcttctttgatatctcatctttatacctgccatttataagtttcaagctttttaagctcttaaatcttttttttgattcccatgttaaattgtaatcttattggtatgttggtccacatgacagttttagaatgtgtgatttcttgatggaaaaaattcaattttggctttcgttgtgattcttgactctttgagtcatgaagaacacgaggtacatatttgtattttgaaaaaaaaaaacacacacatttcaattcaaaactaaccttggccggacctagtaggtcttatttgagacctggccagtcctaggatttaatcatgggagttagccagctctagggtttcaccctaggaagctagccagttcatgcctgggtttggtgaccctggctggttcttggttgagtcatgggaccctggttgaccctcttgaagctttgaaaccctggtcggcctaggccttggttctaagcaggtggccaactttctatcctcttttgacttcggtaagaatcatgtcatggccttgtaggcatatacaacctcagactcatacgtggtttccttagaaactctgtatgaaatttaatggtgagtatattatagtcaaatgctcaacttaagactcaacatttatctaagttgttacacttgagacttgtacttcactgatacccagccttgtacaatgacattgtttggcaagtacccttgggtacggttgtccaaagtcttgtcaatggcttggaacctgcaaggaactctgccttttggcttgggacctgctaggaactctaccttgccttatcctaatacgtggttcctctaggaactctatccaattcttctctagctatatggttcttacagagccttggccttatgcatttgaactaatttttcattcatatttggccatgaggcttttatgttcttgcttttggcctataggcactctattttttaacactactattgtttagccttaaagccttttactatggacatatgattgccctggctatctttttattgccttaacatgtaagtatccagatttacttttctttatgtcaagttgaagtatgtctacacttgacttagaggcaggtttagtagcttattctaagcgttaaaatttctttgcataagttctttgtgctagttcgatgcattgtacggtgtgggtgcccccaagtgagcatgcaaacttacagtttcttggttacttgcaattcaccaagtttcatagaccttgcctaggaattttcttgggggtgctacctggtgtacgcatgtggaactgaaaaagaataactttaagaagttatctttgttagcaagtggtttagacacaattggtcttacatgtaacaaaagcttacaacttagtgtctgcttttaaaatcacgttgtgcctacccctgcgcagcttattgcacagcgaccatcattgaagagtgatgggaggccatgttgaaaagagatgggcactagctcttttatatatggctacctctgcagggcttaccgtgcaaaggccattactgaagagtgatggaaggcaatcactgaagggcgatgggtactagctcttttatggattcctggacggtgaaacaatagaataaccactatacaagttggctagtg

SEQ ID NO: 34325 - DNA, 1939 bp, Cannabis sativa
taataataataataatatatgacatatttatatagtttgtatatgttatgtacctcagccaaaaagtgtttccggttcgaagcttgaattaaatcttccatcaactttattacatactatccaaaaagtgatgatccataattcaatcatttcatctaatggatcccaattcacctcttcaatatattcacttacttctttaggcttaggagaggtatttggtctactaggggaatttttccgatgactataccaaattgtatagcttttgtcaatcccattgaaaaataaatgttccttgactttacataaattcaacttttttacatttccacacttaacacatggacaaaaaatatcatttgggcctaccataatttccatacaaaatcttattaagaattcaaccccatttctatactcctcagataacctacttgttgacatccatatttttcttcctacatcattcgtatgaaattacaaaaaaataaaatcaaaatgaagaacataaaatttcattaacaatacgatcaaatcaaacaagcaaacatttatcaataataacaaataaaattctaaaaaaaattggacagcatttcccctataatattaccctaaccatctgttatagtaaattaataatttaaacaattcaacaaacacacaataagttttcatccttataccaccgcaacacaatcaaatgttctgtgtcactaaaaactacttttaattttttagtgacccacacttttatgtgtgtcactatatagtgtcactaaaagcttaatttgtagtagtgcgttttgggacttcgagtttgctgcgtgttgtggggcttttcacttagcggaggaggttcatgttcacacctggttctggaggaggacaggttccaacttggttaaggaggagaaggtgaagggttcactcgtggaagaagaagaagcagaaaagaagtgaaatgaaaagaaaagaaggaaaaataaaggaaattattcattattttttaattttaaaatgattaattttttttacttatttttaattttaaaatacattttcatatttttttaaataattaattacatttactaataagattgtactatgtgtacaataagattgtgccacgtatacactgcgtacatgtagacaatcaaaagttattcggaggccctcccctctagcatagacggaaaggactccgtgatcttcattagtaaaactgctaccaagaaggaacagaagtcacaagtgctcaaggatggtagcagggtagtataaactgggaaagccttagctaaatgttcctggaattctcttatacaatattcgaagtgaaacccaatggctgcataccttctgaaaataaatcagatcttattcccggtgtcaaaccttggtagtgtttgtacgtgctctgtagctccattttgtccaatgggttgtgtatacaccagctttgcaaggtgaaacctttagacaatacgtgtctttagcccgacaagtagggtagcaatagtcgtgcaccacacaatgaggaagttccctgtctaccaacggtcaaatcgtcaaggtttaaatgctatctgttgacctaacttttagccaacgacaatgagtcaaaaataaagcgaataaataagacaaataaaagaaagtaaaaatagtaaagtaaagtgaacactagattttaacgagatttggccccatgagaatggaaatagcctactccccttgtaattgtattgacttgagagaaggaataaagcgttcttcctttcaaaagctcttacaattgatctgtgagttattttctctcttaaatcactactttctcccatgagtgtatttctgaatcaattcttttgttccctttcatagtgagattatgccactatttatagggactaaatatgtaacaccctaacta

SEQ ID NO: 34326 - DNA, 1764 bp, Cannabis sativa
tgggtcggctgatgtgagcagcactccaatggaggtaatgtcatcaggttctcaatctggaggagatgagagggattttaagatggttacttatgtgaagggactttatgctcttaacgatatatttgctgatcttgtatttcgtgaaattgaggcaaagtttgatgcttggattggcgaaggtttgctaaaacatcctaggtgattattttctttattttgctttgtattttttatttgtttgaattctgtttttatttttgtaattatttgaattcaatattatttttttttattattgatttagggcttacaattgttatgaggatggtgcgaagaaattttcccctgggtttagattaggtgttgattatattgaagataaaatctggttttatcatttggcttgctgtgacatgtttatcaatgactcagtaaaatttctttttccttttaaaactttttatagtttttttatcattattttttagtttatttactgttattaaatttttgtaatattttttaactttttatttttgtgtttctttgttgttttgtttcaacatatgaacactatcttctattaccttaggaaaaaagagaaatattcttctgttgttacactgaattttgcaacaacggactgccttttcgatgattccattcaatcgttctaccacaagttctgcaaagtcaaggcaatgaaaacaaagatgtctcacatacatgatgctcacccaatagagcattacaaaagaggcctatggattccgtgttctaagccttggtatgaagtcgatcatgtcctattcataataaatcttaggaaagaaagccattggatttttggccgtcttgatatgaatgagggaattatatttctttataattctttgaggactgccaaaatgacttttgcagcaaggaatgcaatgaaggcttattctgttttactccctttgtttttttatctgcttggattttggaagagtaggtcccatgttcttgatttaggttctgaccctaaaactcctctacagttgtggagattgatggtattccatctcagcagaaaaaaagagttgttattattaagtttgttttatgttgtataatagttgtttaactgttttgttttcctttctagataatagtgattgcggagcatttgtggctgcatttgccgagttcttcatccatagaaaagatgttcctagtgattttgacattggaagttatcgcactcgacttgctgcccacttcttctcgtacggtcaaaggaaaatgatgaaagtattgatagcgaggatgagaagcaaagcaagtcttccaaggcttctaaattgaaaaagtcgggtcatttttatgtaaactttgttgttattggttgattttcatttcagataattttgatctttttatgtttgtaggtactctatgcgttttatattctggaactggttataaagttttaggatatttgacactaaccataataatatgttcattttttttatattttaacagcaacagtgttatgattttacatttaattatgtttttttaagtcgtacaactatagataaactattatgcaactgtctccaaactatttttagtattcaacatacttgtcatttaatttctgacatcttctcttaatatatttcttactgttatgcaactttttccttctccttattatacaacttataaaaaattatttctgactttaaaaaaatatttctattgaaattcttt

SEQ ID NO: 34327 - DNA, 1610 bp, Cannabis sativa
taaataaaatcataaaataaaaatgaaaatgaaagtttttttttctttgagaaaagaactgttattataaattagagagcatcatttacagcaacagagaaaatggtagagagaatttcctcaaaccacatacaatcatcatccaactccaatgcatctttagccaagccatgagcagcttggttagcatcttgcttaacatgagatacacaaacagaggagagataggacaaacgattcttaatatccaaaactaaatcaccaaaagaagaaatagcattagagttactattaattgaattaactaaaatcagggaatcagattccaaaagattgaccgataaattacaaagagctgcacaatcgattcccaaaattaatgctttggcttccatttcttgtggcttgtatctacccgtaagaggcttcgaattggctgcaacaacttgacccgaagaattttgaatgatgataccaacaccaattttgttacaagagacatcacaagcggcatcaacattcatttttaatttatccaaaggtgggcggagccatttggggtgagcagccgcacctgtagagtctttaatggagttcggtgaagttgaatgctgctgaaagttgcaataatatgcagcagatttggcccaaatttgtgttggtgagaggcctggtttgccatgaataaagttgttcctgtcagtccataaaaaccacatagtgcagagtagttgttccatttccgaagtagatttaagggtagaaagcagcatcaaagaatcatcaaatttcattctagaaaccagatcataatcaaaagaaataccagccacacgccagacttttttagcatgtttgcataggaacaaagcatgctcaaccgactcctaggcattcgaacaaaggctacatgctgcagaatcgataattttgcgcttgcacagagcaacaacagtgggaatggcacaatgaaaagctttccaaacaaagattttaatcttggatggaagttgcagattccaaaagtatttccaccaagtatgctgatcattggaagagttagagagctcagtatcttcaaggtcatttgcaagatgataacctgattggaccgtgtactcattggagcttgttaagtgccagatccatttgtctgaaactgatgaagaagatagtggaattgacagaatatagtccaagtctacagctgagaaatcacgagtaaggagtgggagatttcattctttatcatcagtgatgtagtgataaactaaattctgagtatctcccgagaagtgaataggtgtgaattcagaatgacgaggaatccacgggtctgagatacatttaacactagaaccatccccaattttaagccttaaacctttcacaaggagatcacgtccccaacaaataccttgccaagtgagtgaagaacaaccagttttcggagcttgtaagaagtcattatgtgaaaaatacctcccttttaagacaggctaagaagagagtgtggatattggatgatccgccaagcttgtttagctaacaacgcttggttaaaatggataaaagaacgaaatcccattcctccatccattttagttttg

SEQ ID NO: 34328 - DNA, 2746 bp, Cannabis sativa
aacctacatagtaggagacttggacggatcttcttcttctgctgtctcagccttttcctcctccttcttggtcatctcgcagaaagtaagaattttctcctcttcttcctccaagaaactcgtgtccatgtatggagttgccatccaggctcggtaaagggtacgaaggccaacgttgttgcatcgttcttaggttttgatctctttcccatcaagtgtcaccttggtagcttcaagttcctctttaagcttctcgcattcatcgattttggcctttgtcgccttctcggcatcttcaaggttcttcttcatcctcttgtcttctttagtaaggcgagtaatttccagttgggcatcattacatttcttgaccacgaccttgcattggcctagtgacttctggacctcgctctccaagtatttaatcttttctaagcctcaccgttgggcagcaaaggagaggaaagaagcctggaaagtcacaaacaaagatgtataaaaaaagaggaaggagaagagaaataagataagtgagcagattgggacaaagaaacttaccaagaggctgtgagacaaactcctcgtaaatactccctccaaatcaccatgattgattaaatcccaatcatggggaaggagagccttgaactggcaccaacatgcagccccaaactcttgggtgaactccgagccaatctttcttgcctcgacaggcactgtttcaatgacctggctcgaggaggcagaagcttgagtcgctttaagaggaggctcatcggtacttgcggtgatcggaggaggaatttgatcctgggtttcaatcttagggacctcgaggttaaaagtttgagaggctttcttcttgttagtggtggtttcctttgccttttagggggctccacatcggcattagaaggagcctccaaggtggacaccctcttctttcctttcctctgcatgagaccctcgaaatgcatctctgtgagacaagataaaagtgttagaattaattaaagacaagtaaaaggagagcttggggcatgattttccgcctaaggaatttaccatagtcactagaagacgaggtatcactagaagatggggtagaatgaccacaatatccactaacatccctacaactcgtgatcctgaatatatcatagggattaattggttctaattccagctcgcgtctaaatgacttgccctatccatcatagtcccatactactaggttacttcgtagtatgactcaacaaaactaatttgaacacggaatctgagataccaaataaaaaagttaaagcggctatctcgaaatataactaaagtgttacattcagccctaagcagtgtgggtgaccaacgacattgattacctcaagatgctccttcaccagcttctcgaggggtagtattatgtaggtacagtgcccgagccacgcgatcttgaggtttctccttgtttgggatgggaacttgctgccaggaagaatacttgggatatttgtaatcacaagtaaactccttgtcagttaggagatccacaaacctcagattaacctcgcttagaaggaagtcgcatgacctaaggccatatgggagagtcagcaagagcgtgcgccgttcaaccatctcagggatagggcaggtcttttcgagatagctgtcgagaacaaaacaaaattttagtcagataacatagaataaaagacatggattaattcaaccaagtctaatgcaaataatcacttacaaattatgcgaaaagtggttgtgccaatcttggagaggccagtcttccaaaagaaatcgtccttgaaggaagttttgtttggcaaatccacgatgatcttgcgattgtcggagtgagtgccgagatagtaaaagccccttgcggaattcttcctcgcaggaacaactttaacagagtaaagatactctatttctaggggagtggggcactcccaattaggattttgtacaaaaccctcaaacttgcaaggattctataggagacaggattcagttggaacggggcaagcccgagctggtttacaaagtccttgaaatagtcgcaaggggggattattgctcctgccctgatgtgcgcaaggctccaagcgcctattctagtcgagccacttgtactggtctcgccactggccccccagaggtctcacgtgtaagtcgcacaggtgtgtaacaaataaactcgccggctcgtactgatctaaccctctaatctcgcttatactcaatgttgcaggtccttagtgaatcgcctacgtaacctgcgatggttcgcaccctcaactctattaactctgcctcgaaggtgatgttagggtcctggggagtctttgattgatatggcttgggagacattatttcaaaatccaagtcacctggttcaaaagcaattgtgactttgggtaaaaacgggggtttgaccaaaggaatagaagacacactgggaggttcgggccaagtagcatctcgcaagaaatgacatttgccttcagaaattacgtgcaagaagcgtctgtggcaactagcagtgtcttcctgatgaattttcactaagtgttctctaattcttgcatcatttacctctagttttgattggggttcataaattttgggtttgtaagggatggaaatctcagtagggtactcaatttctaagtcttctagacgataaacttcttaaccaaattgggacattgctacaaggagaaagcaa

SEQ ID NO: 34329 - DNA, 1705 bp, Cannabis sativa
aattaattaataaataaaaaataaatctttatttaattaaataatttttctttaaaaaattaagtgacactacctcacccgtcccggctcggtcggatggcggcgcgctgtgagtcctcacctatgcgcacaaaactgggtaccccttggggcccaaacctatatctcaaacttgcactagatatacactttaaataaagtgtttctatcccatgtgagattcctactcacacacttaacttttctatttttacataatttcataaatagttccaacaaggaatatgaaattgggagacaatctagcatatgtcaaataaaaggaactaagtttgttatgttcaagctactcaaggatgtctaagacaaattttcaataatttcttcaactgatcacgctatttttaatttacacgataattaggttttttttaataatgatattatatatccaaagggagataaatttgccttcaattaaaaagggtaataagtgcaatgaaaattcaattaacaattaatgtctaactggacacaatgaagaatcaaaactaaacccacatgcaaagccatgaaaagttttgtgcagcctaccggtattgcgcagtgtaaaagaaggtatacattaattaattttatagttgagtatttttactaattgtaattaattaagcccttacacagtacgtacacagacttttgaattttctttttgactttagaattagattctttgaatacaaaaaacgacattgccgacattccaacattgtcacatgtgttttataaattaactcattagtgatcaccgttcaccgtgcatgtattccattttcaattctccttttaatcttttcactttcaaattcataaatcttctcattaattattaatatatttactttggcattttccttcttcaaataataataataataatagtaataatgatggatatatattgatgatgacattttcagacattgcctcagggtgtgtccatctatagggagtttaattattttacattgtcaagcatactttttaacattaatacgtcccatcaacaatgacctttttgttattataaaattcagtccaaatatttcgtatgtaaaatgtgaaccaatatataattaacaaattaacatgcatgaaaaaatatcaaatatagtcatcagactattaattctagcgtacgtattatgttgtttctacatatatatacaataatgatcatcatcaaggttgtattttattttattaagaaattaacgcattcaaagaatgtatatataggaattaaatgtatatgtctgaaactatcacatatatataccaataatattatatgatcagttggtaggcagtccatgtgaaattgtttgcctaggtgttgtcttgtgtataagtatatatgtgtgtataatgtatatgcttattcaatattgtccaaaataataaattaagttattcatattatactatatatatacaccttatctaaataatatctcaattattagtatacgtaaatataaacaattaaatcatatacattttgatttttattcaaacatgtatacacatatgtacttaaatttggatgcaaggttttgaatgatgttattgaatattaaggggaagttaggggaccatatctaatatatatgatcgatcagttaatgaacatttgggcattaat

SEQ ID NO: 34330 - DNA, 1431 bp, Cannabis sativa
aatttttggatcaataataataaatatagatactacactaggatgaaaatggtgtcccaaattaagtagtagtagtaggtacccttgggttggcagggttttcagattgttgaagcatgtaaccattgggtgtttttgcaagtatttctttggccttgtcaagggctccttccaatcccttagttgggtcagtgagaacaagctcagctccaaaagcacgtagaatggttttcctttcaagactcattgaagctggcattgctattattagcttatatccctttatggctgctataaatgctagcccaatcccagtgtttccacttgtacgctcaataagaacactctgcattcataaattcattacttaataattattcacattaattaatgacatgctttaatataattgaacattaattaatcatgaatatttttactaaccttaccaggaatgatgagacccctttcttctgcatctctaatcatgctatatccaatcctgcaatcaagagaaaattctccacctttcattttacatttttaatctgtacttaacaaaataatatataataatgataaaaatagtaattataatatgcacatataaatagttttctcttttgctgaaacagacacatatttttcactataattaaagtataactcttttgtaacaatagagttatatttttggaaaatgctgtttatggtgcaattttacatattttcttctctctcttttagtgatgtctaacttatatatccacctttcattttaaatttttaatctgttaacaaaataatatgtaataataacgatataaatagtaatcacatatacaaagtttttactataattaaagtatatactcttttattttattttattttttatttaagtgtttaaatattacaaccatatataacttgggactcgaactcaggacctccaacaggatgctcttatggccactagcctcgagtggttcagtatatactcttttgtaacaatacagttataggtagggaaaatgatgtttatggtgccatttaaaatatctttcttaaataatttttatgctggcattcagtgccaaagtaagtggccattagagatcaaaatgtggtacttttctaattaaacagaaaagtagtgatgagcatgagctctactcatagaaacttatttggctatcaagttttagaaagtgctagacattcgaataaaacgttttcatctataatatataatgataaatgaataataaatctgtggatgaaatattttgtaatattatatataaataatagtgggagagttaattaagggggtgaccccacctctaaggctagcaaagcaccaaaagattatcataatacgggtttattaaaagatatatggtaccaaaagtcattaattaataattt

SEQ ID NO: 34331 - DNA, 1961 bp, Cannabis sativa
  modified_base (238)..(244): a, c, t, g, unknown or other
  modified_base (294)..(303): a, c, t, g, unknown or other
ccctgtacccagccatagaatgatcgctcgtacaaagaaaaccacgtgtctggctgatgcatctgaccctcaagtggctcggcacgccactttgcccagcgccgaagaggattcagccgtccagatagaggaggatcatgaaggggacgctgaggtgaaggagattgaggggcaggacgatgtacatcgtggcagttcctccaaggaggaggaagaggcagaggttgcacccccaaannnnnnngagtacaataaggctggggagccaatcgatgctgacggagacgtcctggnnnnnnnnnnggactacgtcagtgaggaacttgctgcagcggttcctcatagaagacagggtgccttgggcaccaattgggtaagccctccgtccaaggttactgaggcgcgccttcgatctctcgaccacgatggatacctgggcgacttggactgctacattccaacctacaacaatcgtgccacaaaccttgaaaaaggggatgtgcgcctggttgggtgcccatggtcagcaaggggatattgatgcctttgaatcaatacttcaaaaatgtggcgaacttcttcggcctctgcccggcccagttcactcctaagggcatcaagtatctgtttgccctcttcgtcctctatgcctcctagaaatggggtatgccctctccccatgaggttgcttggttcttttatttgaagtccacccccaagcatggtaggtcggggtacttctacttctctcaaccaggcttcaagtggttgacgggcacagacgatacgaccatcatccagattgggcattccgttgatgagtacttcatggtggatggcacgggcatcacccgcactcggttctagcaaattctgacatatcaccgcactcccctcactcttgctcttagggatagagctcagaaacttgcccggcttccaggggaagaacggaatattatccagctgacctctgaggataatcttgtgaggtatgggctctatcccaaggactttactcctaagtccgtgacggggaagaagaggaaatctggttgccagcccgaacaagctcattcggaggatgagttgattcaactgaagcgggaggctaagttgaagggaggtgcaagggccaagcagtatgcttaggagcccttgaatcctgaggatgaggctgaggaagagtaggtgactccactgaaaaggaagaagaaactcccggccccgcccagggctgttgaacatgcgattcgtataagggagcccatttcacctgtttggccatcccctcccgtgttcggaaaagggaaagctgttatgtctgaaataagatcgatgtcaggtaatgatggacttctgagtcttgttcccgcagtcaccttgcatattactttgtcttgtttttgagcttcttgattttcatgccttatgtttctaatgtctgttttctaaccatgctattttcgttctgtacaaacatgtctcggcagatgcttgacactctgaggaagagaataggcggaagctctagcgcctctcttccggccaagatgtcttaggggggtgaggggtcctctactaaggaaaagaggcctactggggaggtcattgatcttttcgaggagctgactgctgcaaacccctctaccctcaaagctgctaagtccaaggagtcaggaccaccgaaggttgggtctgaactggtcaggagtgatcctgaatgagtgcgggcacctactcaacctttgtcggtgcttccagacgccaagaagggcaaggagatactggtccattatatgaatcggctggttcctgaggtcagtgatcaactggctggtgctgacaatgactcttcttttgaattgctagtgggcggagtcttaaaggagttcaccagggtaagtctttcttgatacttcccttttatcttccacacttagctcaaatgctaaaggttt

SEQ ID NO: 34332 - DNA, 1641 bp, Cannabis sativa
tacagaaaatacggtctttctatgctgtactcttgttaatttgttgtttattttttgttatgtgtatgttattttttgttgttattttgatgtttcatgttactattatgttgttttcgcgttacttctaaagaaaaccataaaatatataaaaaaaattctttgaatgtaaaaatgtaatttttttaccaaaaattgtgctttatgtaattatcccaataaatttttgagttttaggctaaaatctaaaacaaaattggttggtgatttcaaaactagtattttaaaaaatgtgactctaaaaatgaaaatatgaattttgatattcgttttgtaaattttttttgaatttgaaatttgaaaataaaaaaaaaaataaaaataaaaatcagcaaaaaacaataaataaagctgagttttatttaaatatttttcatgtaaatatatttttttgacgtagtgattagaattactcataaatttacgatgtagacatctgcaactagcgcaagaacctccttgaaaatggatagttcattatcaaactgaaggacatgctttgtcaaaccataaattgctaaagtcagcaagcaacatgagacaaaactgtcctcggaaatttagacaataaagctataacttccttaaacaggacacccaagagctagagcttcaactaaatagtacacggcacacaccaactcaataacatatcaagaatatttccaaaatatctacaaaataaaataagataaaaatgaattaatcccttagcgaagacattaaaaccttaaaaaaagaaattctcaatagttacaagataacaactttcaaataaataatatttaaataaacttattggcaaaaactctgtagcagttggcccttctcaaaactgacctacaaattaacaatatataaaattctattaacatataattcattgaaaaaaaaaaatagttaatgtgaacaaaaatagtaaaacaatccataatgtcaagacttgaaacaattatttgtcggctctgaaaatcatttgtagaaggcatgagtacaaaaggatcgtatctattgaccatattacaaatctaccttaaataattaggagcaagccataaaaatggcacaaaaaccataaaaagcatgaaaactataaaaacaaaatggtgcaaagcagtaaagtcatcgaatctaaaatttattttaaaagattttaatgaaccttaaaaaataaattgagttttaaattaaaaaaaaaaaccgaccaccatataaatatatttttgatataatgtaaaaagaggtaacttttagtattttctttaattaagttattaaattaagcatagaaattaaaatttctctttattatttgatatcagaccaaaatctaatggtttgatatttttaaatttaatattcataattgaatatgtttagtacccatcaataggtaatacctattaagaagtgttccatatttatatatatgtatgtatatatattaagggtaagtctacaatataatttcaaatgggtattttggtagaccctatttgttttggtacttaatagaactttttagtgtaacttttttcataatcatgtatatgtgataattatttaagactacctgtaaat

SEQ ID NO: 34333 - DNA, 1410 bp, Cannabis sativa
aaatgtaaattgcttccctttttaatttattatagaaaaaatcccataaatcaataagttatacattttcaaaagttaaacttaaatatttaaaggttgcaaaatttgaaatattatttcaacaatcactatcaaattaaaacataattcacaaaagtatattttcaaaatataaatattaattagtaatatacatgatctatattattttcaaaaatgtacatgaagattttttagttaattaatatttataaaaatttaatataataaaaaataaagaagtttaatattataaatttaaattcagtttaagataaatgttaaaatgcaatttcaacaatcaatatcaaattgaaacataaaaaatgtatatttttaaaatataaatattagttagttatatacatggtatagatattattttcagaattatacatcaagattttttttaattaattaatatttatgaaaatttaatataataaaaaaaagtttaatattataaatttaaatttagtttaagataaatgatacacatgtttttaaactatagatattttatagaataaaatattatttatatgaaaatccaaacctaaataactatgctaaaaaaaaacaatagaaatatgttttttatttatatattttgttttttataattaaataattattatttcatttctttttaagttttgaaattatttaataaaaattttattgacaatgtaatcaattaacacgtgttagtttagtcaaatataataagattggaaacatcaacaacactgtatccaacattcaaagaatagaaaaatgaagttcaaaaaactttcaattgaatggacaacatattgttcattaacgatattaatataaaaatactgaaaaataaccataattcaaaaatcattagaataattatattatattaataataattttttttcttttcttatatttacattttaatattaaattattgttttcaaatatatatgaaataccttacttaaaaaatatcgttaacaatattcatataacataattcaaaaataactataataaaataataatatattttttttcatttctcaactatttttaataatataatattaaaaattattattttaatctattattttacccaacattctacaatatttaccgacatgataaaattctagagataaattattattttattttctaaaagatagacataataagttacggtgaatgaagtattttttagatattattttctatacaaatctatctttaatttagctacaatgtgtacaataattatagcaacgttgaatgatcaagataaaaatgatccttatgaagaagagcatttcatatcaaatttatttatatagatttaaatttaattagataatt

SEQ ID NO: 34334 - DNA, 2066 bp, Cannabis sativa
cagatttatgaggaccttttatcccggttcttatgtagaaaatcaggataaaaagtctcatttaaaacgtaagttgcgtttggcaaatgcataaaaatagcatttctaacactgttttttgtctgtttttcaaactagacccttgttccaaactttttttaaggtttcaaatgtaaaagtaggatcaaaagtttttatagcactttttatattttcaagtgtaaaaactgggataaaaaatctcttttgttgttgtggataacaaggtgattcaagattgatgagcaaaaacaactaccattttaaggggagatattagagaacattgtcccacatggattaaatataaaaatattgagcgatatatatatatatataaaagaatatggactacttcactcatgagcaattaattttgtgatagaactccatgtttctcaacagagctacttttgtctttttcttttcaaataaggttaagtaactagttatgatcaagattattttttttttaattcaaatttaggtataccatcgtgattaacttaagtaactagttacgatcagtttaagttataccatttttttttttttgtgttaggtttgtcgctttgagagcgataaataattaaccccatattacttaaaaacataaatattaatgtgatagctagtaaccgaccaccatcgtagtattaaatatataaactaaatttataacagtaatcaattacttaccactagattacaatggtaattgaaaagtgccaatatttttttataatggtaactagttacactagatcgtgatcaaatgaaaccaactacacatacaataatagaagaaaatggatggaaaaaaaatgaaaataaaaatttgttaagaaaaataatactacttgaatacacatataattaagtttctatattattatttttaatatatatatatatatcattttataaaaatccaaataattgtatagaaaaataataaaattactttcacaaaaatatcacatctaatactaaagtctatttaataaaagattgtatcacaaataaagtattataaatatataggaagaaaaactcccataaaaaatgccttaagaaacttatcaaggaaaaatgattgccatagattttaagcattttaaaaaaaatctcatatatgcatttgatttaaataaaaaaactaattatatttaaattaagatagtattacacatttatactttaagactcgtttgatacatcgtattgtattgtattgaattttataatattgcattgcattgaattatattatattgtattattattatttaatgcaatattatgtttgatattgacttttattaatatattgtgtaaaattatactatctttaccataaactcgacttcaacctcgaccccgttagtggataaggatcccatctccagccctgagccacaaatcctggcccagacccagacccagaccccattccaaaaccctgaccttcgaccaggggtccgaggactggggcctggggccaaggttcagggagtccaagaccggggtcgggtctgggtacaatgttcgggtccaaggtctaaatttggggttgggtctggagctggagtctgggtctccaacctttaactctttctaaatattataatacatgctaatatgtatcgttttttatgtattaaataatacgattcacattgtgaaaagttatggtcgtaataattaatataatataaagttttatccaaatacagtgttgttccttattatttaatataatacaacacttatacggtttactgaaccagctaaaaatagttatatttaatacttgcacatttataatataagttgcttaaattataaaaaagacgaacccaagttgtactatatttattaaaattgttaattagtactttcgacatttagagggttctatttttttattttagaattagtagttatttttttatttgaaaaaatatgcataaaataccctaatattttatccctaaactaatacatatcaaaattgaaaacatatg

SEQ ID NO: 34335 - DNA, 1174 bp, Cannabis sativa
ctaaattaatagggatattaatatataagaagaaagtagtagccacactctctcttgaatttgatatgatgaaacgcgtacttttctgcatattagttgacccacacatgtgagaggctaaatgcattataattggaagcaacaataaaaaggaaaaataaagtaaaatagaaagttttttgtgcgttgaaacagtcaaaaattttaaaattttcccgaaagggctttttcctattatagaaaaaaaaaaatacttattatagaaaaaatccctcgaggtgtaatataactttttcctttatagtattaaaaggtaaaattatttctttgaatttgatatgatgaaacaggtacttttctgcatgggagttggcctacacatgtgataggctaaatgcattattaattggaagcaacaataaaaagttaaaaaaaaaagggaaaaaaaagaaacatgacataaatattcaattatgtacgtgtggacacatttaaattaacatccttgcgaagcaaaccatcaatgccaattttatgatatttccttcaatataatgttctaggtccacatgctattatactgttaaagatatttgaaaattcaattatatataaaaaaaaaaaaaaaaagatttgtgtgaaatagatttttcttttgaaaaaaaaaaacacattaagtatcaaaaacgaagtaagttacatgatttataataaaattttacaaacttttttaaatattaatttcaatcaattagtttcattttaataaattagatactgtttaaagttgcttaaaaaagtctaaagcttaattgtgatagtgtaatttaaattgtgctctttgtacactctcaaccttagtgactgatccttttaacaatatacttcttgcgtagcctaataattaataatcttcattaattgaagcctttcttgtttaaattatttcttaggacattgatcctctcatgttttaataataaacacattattataagttattatttatgtatagctagtttagttatctaattagctttttctccatgagagtcatgtgtaaatacaaattaaatgatatatttatacttcaaactaaaaaataaagttcgagtatgaaagatttggtctcagcatattatatttagcttgatacatacataagattttatat

SEQ ID NO: 34336 - DNA, 1856 bp, Cannabis sativa
tgttttgaacaggatatttaggctccattgtctatcatagtttgggccactgtgttgttagctatctgtacttccacaactaatggatcattatgtgggaaacgaaccttgacaacatcttcttcattgaatgttatactgggttcccctactcgtggtatttttggctgcgtttcttctacgaccaggaccacttctttttgctcgtgctgtaaggtttgagcatacctcttccaagctttgcccgaatctccagctatatgcgggctcccaatgatgacttgcaaatgctcgtctactggtggaggcagtaataaatcttagttattgtctgctgggcggccttgacatatttttgcacatgtgggttattttttcttatcaggaattcaatttcccgcttcaaattgttgtagtcattggtgtcatggccataatctccatgaaaactgcaaaacttggacatgtcctgcttacttatgtcctttttcatgggagcaggtttcttgtacgaaactactgactgagtagccatgtagatggtctccaagtcgccagtcagggcagagaaagtagtgaatttggacggattctctttagacatctgttcggctttgcctgcgaactttcccttttttccattgccttgtctgttgttgttgttagatctttaactgtccaagtttgaactattagggtactgggggttttgaatgaacgtcctagccgaaggaacttgtgattggcccagtttaggctcgacatctgctcgttgaatggcttcttcaagcttgatgaaaccatctacacggtcaagaaaatcactcatagaatctactggaccacttttcttgatgtctttccacagctctcctagaatctttatgcctcccaatatgacggctaatttcccctcttcagttaatcgcgccactttttttgcctccgtcatgaacctgcttatataagctcggagaggctctcctggtctttgcttcacttcgaccaggtcttctaaatgtaataggagttaatgagaagaagagaattgtgcatgaaactccaaggagaatgccttccaagagttgaaccttcctggtgtcaacttgaagtaccattgttgagcagctttggagagtgtggcagagaaaattctgcaacacacatctcctcgtaccccttgcaagtctatttgcatttcaaaatacttgagatgtgataagggatcctctttccctgtatacatcttacaggttggcatcttgaacttatggggtagttcttaaacattgatctctggagtaaatggggatccacatgctcggtccaactcaagatcattgagcttttgaccaccaggccttggaacatatttttcagttcattcaactgtgcttgcggatggacgaacttgttcgacctcttagcctatcagtgtcacattaggatctctttgagctggatcttgaatgcggaccccgggctgagtggctggttgaacatattgttcgtctaaccctctccttctatttagatcatctctaagatcatgagccgttcccagtctattgaatactgaaacaccaggttgcctcagtgactggttggtttggcggagcacttggtcagaactgctagtctgggtggagttattgggtataaccccacctgacgaattaccagataaggtctggccgcctactacttggcccacaggtggaacctgtgactggacattggacggctgactgttcagagtttgggcagtatgccagtaagattttcgtccgagccgcccagtgagacgctagatgcaggttgctgattagcaacttggtaggctcttcgtatcaata

SEQ ID NO: 34337 - DNA, 2888 bp, Cannabis sativa
cagattggttgagatgcgttagtaagtattactcaacaagtcatggggcttagaaactttgaataacaaagtccaaatggaacacattggaagatattgtttagtactaactgacaaaaatgccaacccatttgctagaattaggccaatttgatttattattaaccttaattttaaaattagatctcttttactctgaatttaaatcagaactcaaaagattggttatgatactctataagttactctatgagtttggaatctgaccgaaggctagagtcagttgaatatttgttatgtttaagaattatttgtcctattgatattcacatgcatcgtaatattttatcatagtctgcaataataagctgattttacttaccttgtctgtgatttgtacttgcttggaactttgttagtatcttgtacttcacaagtagatactcaatatctagatgatgaatacttttctaggtcctattatagaagagaatctaagatgccatgcattatatacttcacgagtcattgggagtctctgctcaaatggtcagacatgtggttttctcccacaaagcctgaggttcaagtccctcctaagtacatagcaattgttatagttttgtggttcctaaagattgtagggtggctaagcgagatcttagttttgaaaaaacatattaggagtttctctatatttgaaagaagaagttttccttagctggaatataaaataatttcttgcctattttactctggatgtagtacaatctaaatatactaagtcagcagtattatgttaggccttaggataataaataaagaggataaatgagtaattgtaaaggggcattggtactatatatatgagtgagtagcaaaggggagaggagggaatgaatttgtactgagcagctcttgactttgggagatcaccgggtctctcaaatacccatatatcaataccagcaattttttgctctattttcttgctgttctagacaatttgataggaaattcctatcaaagtactagctattagtgcacagtttggagtgagagaagtaccaaagtttttgaggggatagagcgttcagcagaggacatgtggaagaaaattaaagtttgggtagcatcgatctttaactcaaaatactttgaggatctatccctttttttgtaagccttgtgtagagaatggggtaacctatgtattaaatgagatgtttgtcctattttaataggctatgtgagtctagcttcagatataatagtagaattctgtgtttttgcattcttttgggagtcacaagttttgtaaccatggtattcctctaaccttatttgagggttctaataacaattatgggcggtggtcagtcatagacatttgatccctgtccctttttcaaaaaactgtgtctttagtggacattctgcgttttaagtttctgacaggtaatcaaatgtgttgtacttaagaaccacacaagcactatgcgaataatgaatcacataatgaagttatgcattacataactacgatgaaagataccaatcgttggagaaaaaattgctggatgtagcaactttgtgctgaaaaaagctaaatttattaaatttctatcgtctccttgggtaaatgttatttgttgctcaaaatcttcgagcatgtttatgctatctaaatgaattgagttcttgataattagatttaacattgtgatatgtttctaacagttgtttgattctttccattttggaggaatgcattttacaaatatataagttgagttgttggatactccaggcctactataaagctatatataagtttcacaaatattgcattttgcgtgtgtccaaacatcaacttaaaagactattggattgttgtttgaaaagatgcaacacaaaactgcaatgctaattcttgtagacctctcatattttttttttcctatatgccttagtgactctttccatataatcatgtttatgttactttgttaatgtagtgaaatatagaagccattatcttgtctaattttcatttttgatgtccttttcttgtaggtaccgtgccataaccagtgcctactatcgaggagcagttggcgctttattagtgtacgatgtcactagacactcaacatttgagaatgtagcaaggtggttgaaagagttgagggaccacaccgatcccaacattgtagtcatgctcattggcaacaaatctgatcttcgtcaccttgtggccgtctcaactgaggatggaaaatctttcgctgagagggagtctctctatttcatggaaacttctgccctggaagcaaccaatgtggagggcgcctttactgaggtcttgagtcagatatatcggattgtgagcaagagggctgtcgaggcaggtggtgattctggaggcagttctgcacttccctccaaaggagagactataaatgtcaaggaagattcatcggttttgaagagaatcggatgctgttcaagctagctttggtgtttcttctcctgcaacagttggcctctattttccctgtacatgattttacatacaatgattctgtagaataagaatctaagctgtctgataaattggtcgggggaagttgcattttaacactagaattggtcctgtaattggtaatgtcatgtggattgttttgcttgttacaaatttactttgagctaaatgaatgaatcactattctctttaggtatttttcttgaaactattgtacacaaaactcataacaggtgagcctatatgggctttgggcccaaattggtttaaagcccaggcatccaaaattggaactgttcaagttccggatatataataattgtctctctcactctaataaatc

SEQ ID NO: 34338 - DNA, 1465 bp, Cannabis sativa
  modified_base (47)..(54): a, c, t, g, unknown or other
ttgctcctcaaattcctcatgagctcaggcttgccgaaggcaacctnnnnnnnntgtgcgaggtaaatattctcccgagtttcattaagctcattataaatagtatacactacacgtaattatcatgattcttctgtttcttttttatccttcgacggttccatggtactgtcctttcccttcgaaccagaagcctctgagttatcaattctcgtggaaatgatacttattgaaatattgttgggtttgcttcccaagcttatttttagcaatatcatttcttttcgggcttcttccttccgaacgaatacatgagacctttcattgaactcagtgatgcttcttactagacgaccttgtaattcatcccacaactgaccccctacggtcaatggatcagtagagatccccgcctgaagggttgtaagttgtgtgttgtcatccaaattcataaccctatccgcagtcgtgctaacatgacttaagaatgccttaagtgttattaggctactgctttatattggttagtgacgccgcttcaggtcatctatccctagcagcctgaaactatttcttgaaatccctgaaccgctgctcccaagaggttactaaatgatgagtaatcttgttaaaccagctactcgctactccaacaagtgcggtggggtacaaaatacaacgtaaattattcgtcacattactcgctcgcattattatgttaaagtttttcaaatacgagaccggatcaatgatttcgtcatatgacgtggcatgcgggtttttgaatcctaaaggaaaagcggtattcattatatttggatgatatggctcaagctcctcgtctgagtcgtatccagattgtttcccaagttcccccacttgatatctcttgaacttgtcctccagcttgtttatccgcaattggatgggatcctctttctttggaccaaattgttggcgaaggtcaggtttcttccgattcaagtgctctcgcaaatttgattgggagtaattactggcagacctcgtcttactcatagattgcgtcctactcatagactttgtctttgagtgacccgcgaatttactggttcccatactttctcaatcattagctaattgagtactttctcctattcgagttgatcgtctgtgggttcttgactgccacgaggtcacacttcttcttcacgctctgttctttccccctgagagcagatttgtcgtatttcccccatcaaggtctgtacgagtcctcgctttatgggtttgggaagaacgctagtgatttctagcaggtgacatacattctcccggttcagtcccaagatcctcctcattgtcatgagggatttctcgttcatcagtttctgattgtctcccatatggctgttcattttgattctcaaggggtatctcattttacttcggttattcttctcggacattttcctgtctcctggtt

SEQ ID NO: 34339 - DNA, 2994 bp, Cannabis sativa
aacatgtgaaataaggactgctcattaatcaattggatttgatgagcatgcatgcaaaagttgtgtttcattaaatttgaaagtggacttttaaaatattcaagccacgtgcaatagatttaattcaatgtattaaccagtatgacaattaatagatatatggctcttactctgtctagaacacagctcctcgtggcatttagacagagcaagaaactggagaaatttttgatgcttctgctgcttatcaaagagttgggaagaaacaatagccatggccaaaatctcagctcctctggttgttgtccagtgcttagctagagtatcaacaattgatttgcttgttctggcaaaaacatttgtttcttctcctctttcaaatgctctagttttttgtagcttttcaagcgagccttcaacctgtccagatacttgaaaatcatggaaaagttgactcaacaaagtttctgactcttcatcttgggcatttcggtgtgccatcacacccacgactgccctctgtctatctccagcacccaatgcttcagaactagcccttctaggagctacattacctccaaatgtgatatttttcctctcctcttgtgctgatccttcatttgagctacctttacgagataagcttctttcagggggttcgactccaccaattataacagccttctcaggtattgcccatattcctgctttctcagttagtacaacccatgccccttcttcaccatcatcagtattaggaagaactgaagcatccaatactttaccagcatcataaggtaggtcaaattgataaagccgggtagaatttccataatagtgagacactgttgctgttccatcattagaaagtataatcgttgagcctgaaggcttgcctcctactcgaagtctcatggagaacagaaaatcttcatcttcaactcttgctttaggaataatcacttgtattggagcttttttctctagaaccctttcgtgagccacctctgtactcaccccagacttatattgcatggttagaagagaatattgtgtgtagcttgaactgctaactcggtctttacaaaatgtagcaacaagaatggtaatgaccttaccatgattgtctatctgcatatcaaggggccatatacacttctgtccagctagatcctttttaatacccaaatcaccatccgtgccaataatttcatgcgaccagaccttcgacacatttacatcaggacaaagttcaatgctgaaacactgtatttcataattagtcaaaagaaaaaactgcctgctggattcttgcattgaaggatgtgaaaaacgccagatcagtgaccttggatatcccctgcttcctaaaatttgaacaccatcattacttcgagaggttgaactcaaagaagtatcccagtctactttgtggcgtttaatacccgatgggctacaaagaaatttccatacttcaccatttgaactagaagcaagtgcaatacagacatgtggcaaattgggaactgcagcagtaatcaaagagttgaaagaacacaaaccagtaaaactactatttttcttgttcgttatgtttttcacattgataggtgaagatgtcacctcgaattcattaggagatgcattactggtgactggagcagttttcccttcagaatttatgtcaggccagtatataacagtgcgagttttctgattacacagtataatagcagcaaagtcgttatgctctacaagtttctttgttctactagatgtcctatcccaactgacagcacaaacaaaccaacagttaccatcacttctgtcaatgtctccactctctaaaatatttgaagggatttcaagaacaacgcatttttttgacacagcaggagataggtaactccaaacaaagagcttgcttccacatataatccatgcaatagatgttcccttctccactccaccacatataaatgcatcacctgaacaataaatttagttttccacggtaaaataaaaaaaaattcatgttctcaagctctcaaccaaaaaagttataaaagtatgagaaactaaccccgaccatgcctctgcagcaacatggtctgctcatcacgaaccacctggggaaattctcctacataaacaggtttaatctggtctgcaacatctcctttctcgttattattcgcagtcggaattctagaaaagataatcgacaatgattcaataagatattacatgaatgatttgagctaccatttcgattcaatgcaatagccagagttttctacttagtatataaaagatccacactcatttatggcactgttggaattcacaaaggaagtacttccatgaacttgtatataactatgattactatgtcaatacataatacaataaataaagcagtcgatcaaccaacaatgaagctccaaaacacactatcagccaattaaactaacttcgttttcacacacacattctcatatagaatagaaatggcggtgatacctggccagaacagagagccggggagcccaaggggccggagtgccagtactagggcgatttggaacggcattatcggaagtcgaacggcgattctcggtaagaggagtaaccggagagcctgcgtgccctagattagggtcccttcgagaactagcattagacctctttgttccaggcgagaacatccttcttctgatgaaaatggagggaaatgaattatgggtttttggggtttagggattataaagacttgctttgcttagtcatacactgagttgagtccaagttaaaacacgcctgcagtaattatcaggtagaaccaaccacagcacacaatgtctccctcaaaatgttccttacttctttcaaataataatattcaattttatttattggaaaaattacattgggacacgttttttcccatttatttctaataataccgtgtatctttaaattattaagtttacc

SEQ ID NO: 34340 - DNA, 1531 bp, Cannabis sativa
ttttttaattgctaactaacaacataaacacaatacacaaacaactttaatacatacttgaataactaaataacaacgataacaactcccatcaaaataaagaataaaagctcaaaataaaaatttaaaagaacgaagataaattttttaaatatcttgcaaaaaataaaatgaatttaaaatatttttttaatacataaataaataatgtggaatcaaaattacaaacttgcactcgggtcttttatttttaattgttaattaacaacataaacacaacatacaaataatcttaatacatgcttgaacaaataaataacagagtaacaacccctcattaatatagaaattaactaggcatcaacatacaagaaaaaatataataaattaaaatcaacacatcataatcttaaaaaaaaatttaagaaatttaaaactaatgataaaatacttgctcactaactaaaaatatatatatacccttaaaaaaattaaacatgtatttatttttcatttgcttgaacaactaaaaattaaaaataatactttcatattttgattgattaaacaacttagatgtaactaaaaagtaattagataacaacactagttaatactagttaaatatgtaaattaattcaacaaataatgtagacaacctgaaagaaacaaaaaaaaaaaacatgtaaacaatctcaataaaataaaagtactaatcacgtatataacatgaaaaaactaaatatatactcatgattgaataataattgtgacacactcaaattccactcaccatctacatataatgatatatgtaattaatctcaattatttttctcttacttaaacaaattaatgacaataaacaaacgactttatgataacctatatgcacattaaatatatatcaaaacattgtatcaacttaaaaaaaattaccaataatctatgaaagaaattcaaaaggaattacaaagccttaattagtacaccaactcaaaaacatttgtacccataaaaaattaaatatataattttatttttctcttaattaaataactacataataaaaaataaataattaaataacaaaagtacaatataaaaatgaatgacaacatcagaaaaccatatttttgtaaatcgaatcttaaagctcgtaaaatatttaaaattctataaaatcacatttttataatttttttgttatttttgtgtacgtgtatttttaaaataatcccaaaaataaatataaactcattttttattgtttaacaactaaataataacaaataaacaattaaataataatataaaaaaataaaacaaacttttttttatgaaaaattaaaaaaagaaaacttaaaaataactacaaaataacttgtacataacctcaaaaatatatatcaaaaaaaatatatatttattaaggataatttaatttgatattttacattggtaatatttttattctcttaaattgttaagaatttgttataaattaagtgcttgaaattgcatatatata

SEQ ID NO: 34341 - DNA, 2355 bp, Cannabis sativa
taagccagttcgacatcaagtacaaaccaagatctacgattaaggggcaagccttggccgatttcattctcgagttcccaagcactgagatagcactcatagaaggaaaattgatattgatgttacaaatgtcgaggattggactctatacatcgatggggcctctaatagcaaaggctccggtggcggcataatactcatcagtccaagcaattttaaggtactcgctgctttacaatttgaattttctgcatctaacaatgaagccgagtatgaggctttgatcgcaggattaaagctcacccttgaaatgaagatcgaatacttacaggctcttagggactcccaaatcgtcgtatgccaggtgaatggagaatatctggccaaaggcgagcgtttggctaagtacctcgccataacatgccagttgttgcagaaattcaagaaagtgattgtctcacgagtaccgcgtgctcataattcacacgcagagctttggcctgcttggcctcaacaagagaagctaaattgctcgatgtgattcctgtctatgtgctaacccacccaacggtgagtcgagatgaagtgatggagatagacgttgccagagggattacttggatgactctgatagtgaattacttggaaaaggaggtcttgcccaatgataaaatagaagcaagaaaattgcgacatcgagttgcctgatatgtcatctacgatggaagactatatcgcagaagcttcagccaaccgctactcaaatgcaatgacggggaggaatgcgattatatcctccgcgaagtacatagtggtatctgctgaaatcatactggctgtaattctcttgtcttaaatatcatgcggcaagggtattactggccgacactgtgacaagacgccttcaacttctcaaagaaatgcgacagtgtcagcgaatagccacgtatgttaaccaacctctgagtcacttgcactctatcacgagcccttggccctttgcgatctagggcatcgacctgataggggaattaacaaaaggaaaaggcaaagtcaaataagctgtattcgcggttgactacttcaccaaatgggtcgaggcaaaggcactagcaactattacagcagctaaactgtgtgagtttgtctataactccataatctgtcgatttggcatcccttacaagctcatcttggacaacagaaagtaatttgattgtaaggaaatgcgacaattgttcgatgagttagtgattagaaaggcattttcaacagtcgcctacccgcagagcaatggacagacagaagccgtcaacaagataatcaaacataccatcaaaggaaaacttgttgaagagcataagggggtatggcgagaagaactttcgtaagttttatggtcatacaacacaaccccccgatccacgactggtgaaactcctttctcgctctcctatggatgcgaggccatgataccagtcgaggttggggtaggttccctacgaagagatgttttcaacattgtacaaaacgaagaaaatcaatttctgcacctcgatcttttagaagaaaaatgcgattaggctcacctgaaaactgcagcttatcagcagcgaactgcgtggtatttcaactctgaggtcaaggagagaattctgcaagtaagggatttggttcttcgaaaagtcatgccaaacatgaaaaacccaatgcatggggttttcggaaacaattgggaaggaccatacctcatcgctgaaaagattggtaacgcaacatatcgacttgcagaagtactgcaatccaaagagcctgaaatggtgaaaatttgaaattttattatcaatagtacttgcattgtatcctttgtactcgctatgtatttatacttagtcaatttatctacataaatattctaagtataggggtatataacccactcactttgtactattgattaatctatttcttataaagagttatgaattttttcgagcttttaaaattttcctaccttagtatttattacaccaagctgtaattaaactgcaatcgagatgataaacaaaaaatgcgagtacccgtgtactgcgaaaagattatataataacataagtaaacatctccgaagggatatatgttgtttaaaaaggcaataaccataaatttgtccaagtacaaattgcgagtacccgtgtaccgcttaaaaagtttggcaaaagtaatattaaagtaaaaaggtaagcattgggagcagtcggggcagttggagtgatggattcatctgcgactttactagcagcctcgtccacgacttcttcaatgtccgcagcatcagcgtctcgggaagaagat

SEQ ID NO: 34342 - DNA, 2370 bp, Cannabis sativa
tattaagagtaatttttttaaaaattatttaagtttatatttttttttaataataggtgtatttataattttatggggtgcaaatataactcccaataattaattgaagcaggaattaaaaaaaggagatttgagagatagccctggccgtccatgcaatgaaaagtgagatccaacggtgaagaagaagtgtagccaggaaatggagggtagcgggatccacatatcgactttaaggccatgtttggggtgtggaccacttaccctaatcttctctcaaaaaaagtttaaattatacctaagagagagatcagaggatgcaatccgattccgatgcatattgcattgttactgtatcggacttgttaatatacattatttggttgaacagaatttatgatcataccgatcgacaaaattcaagttctatataattacatcaattataataattatattataaaattatatatgtgaaaatttataaaattacttaaataatggcagtttgtttgtgcgaactacatcaaagtccatacttaacatatgtatattatacatataaaaaatttgttttaaaaaaagggtcaactacaagagggatatatattttgtagatgattcattgtgaattacgaagtggatttaaaatctgaagcatcgaatttggtgggggcacaacttaaatcttcatctgtaatggaactatcaggcccaatcctcttccaccattttatacttccgctcgccacgtccctgttattattattatttttatttttattatacgtctaccaaatatttatatgtatataatattatgaggtttttttataaatatatatatatttataaatagattttttatatttttttctttttcaaattctattttattttttgtgaaattaaataatttgatcaattttttcttaaaaaaaaattgttttagtaaattatttatttcttaaaattaataaggtatagtcatttaattattattttattattaactaattaaatttatttctaaaacatttttttaatactaaaatttaacatttgacctaataatatatcgccacatgtctcttaagtgacatttaacagagaaaaagacacactgttgcgatacaagagtaagttaaaatatttttgctactactatttttgattaatgtcatatgtttaacaattaaaaaaaaaaaatcaccgtaaatatccctccaattaatatataaaagtgtacatgcttgataaaatgaatttatatgcctatgaaaaaatatatttatattttgtatataataaaatagatgattgagatttgtacctctagccacaatcaactattaaaatatttgataatcaattaagaaataaaattagatgacaaaaaatagtcactattactattgaaatattttattaattaattaaaaattaatatttaatatagaattctaatggatttatttatcacccaattattttaacggaacaaagaaaggtgtaaaaacgtgccttttatacatcaaacattttatttttcttttaacaattgtatccaattactttaattttggtttaatgcttaatacccatagatagagttagctactcgatctattctcactttataaaatcgaatctaatgtatagtttacaattttagctttaaattaaatgccttggaaatttttttaaaagaaaaagagttgagccgtaaataatttattaattgaaagccaaagcaagaatataatatgattaattattgtttggtccgtgggagaacattccgtgtaagtttttgtgtgttggttgggaaatggaatcatattttaacagttttaacggccaaaactgttgagttaaccggagacaattcagcggaagataagggcaaatcagacaaaatcatcaaaataagagaaataatatcctaaatcaatcaaccaaaacaaataaaataaaaataacagacaaaatttatataataaaaataaaccgatccttggcattagttctctcacagggtatcaaatcagccactacagtacaggtacttactggcctacaccgccgtgaggaaaattttcaagagcatatatgtctaaattataattttacattctaaataaagttcaaacccacctattaattactactcaatgggtttccttccttttgggtcagaatcactataaatttaaaaccgacccctactccctaaaaaaaaagtaagaaaagaaaatgggaaaaaaaaattaagataaagaaattcacctattttattccccatttctttttcaaaaaagaaaaataaggaaaatctagtactaggagatgggagaggggttaaaagga

SEQ ID NO: 34343 - DNA, 2564 bp, Cannabis sativa
cagaatcaaaggacgcatttttccaaaggggattatgacaaaaataccttctgtaattatttaaaagcactttttattaaaaaagaacttttgaagggacaattgttacactagaagttcggctaccatctcagtggaggacacgtgtcaagataaagggaatatggatcgatgaaaatcacttttaatgaaataactcattaattgcgtaagtagcaaagtatatttaaaactcgctgactgtaaggtcttatgcgaggaaaagatatacaaattgttgcttagtatattaacgagaaaccatatgccattggatgtataaggcaagacatcgactccgttacatctgggaagacgaaagcgacgtatatcgactgagataacacttagtgtaaaatgcacaaactaagcacaacagttgagtggactcgagacataataagcgagatgtctatctcactataggaaggcccattcctgtaaccttcaccggttaatttcagacatctgtcagtaagaattataatcttgacgagtcaggagctaacattcaaatgagcctcgagaaactctctattaataagaattgcgattgtcacaaatgaagcgttaagctttcaaacaaagaagcaacaaggcgtatattgtcgagacatcccagaacgtaacaattaaagatgtgtttaaacacaccatcattttgaacccaataaaagaaggaaaatcatagctgtgtgattttcaaataataattgcatttatcctacgtgatttgtaatcaaaccccatgatttcagaggaaaaatgttgtcaagattacatttaaccttttatttaactgcctaccatgtaattataaatagtgacaagtaagatcaaaaaaggggacgaaaaaatcatacaaaaatggtcctgaaaaactatcagaaatctaataagattgacttgtagactatgcagaattttaactgcaagaccacgtaaaaaatcctttgtattcatactttttattttacagcttttattttttctgtgtgagattgtctcttttaggcttaaatttggttaacaaaaatttgcgtgaacacttgtcatggaaaattcgttttgtccttgcattcttttagggctttaggtctaatcatgtgattgtttagaccataactttttgtacttagtttcataaatcctttcaaaatattccttatgcttttggctgagtaaaggattgtcatcattagtattctccaagtaatagtgagatgagtttatacaaatcctccaactacttcaaagtactatgcctttctttcaatgagttttagtgactttaatctcttcaaatttattcaacatattagagatagtatgatcatcttatctaatagcttaagatgatggaacatgtacgagatgattctactacttatgttttgtagtgtctcataacttacaaaacacgtatagagttgataatcatagtccacccctaatcactttagagttatagagagaacatatctttatttttttaaggatgctgttaagaaataatttgattataagcttaatatatattcattttatatagatatgtctgaagcggtatcattgaaatgcaatttcgacctttaattgatctttaaactgcatacaaaaatttctccacccctattagtttgcaaaatatttaatgactttatattaatctattagaaattcatgaacttttttaaagaattcaaatttctaatatgatttaattatataagtaaaagtctaagaatttgacaaattactcataattactttttgaataatgtttctgttaacatacatattatccaagtgattatctagcatgattctctttgcagagaataatcatgttaaaaccaccataataagataaaataccatagatagtagtcattattataaaaacataatataatataaacaaaaactaaagtgatggttaataggacaaataataatagatcacaaaatacaaagctcaatccatacatgcaactcacaataaaatccattaagagaaaactgaaatttttactccaaaatgtcacagtgatagttgcaaacataactagaaataataaaataaagtcgaacaaattaactagaataaataatgtttttcaagcataactaatttattctaaaattgaaatagcgagcttagtattctagcctagaccaacatcatgttgttgtcttcaactatcaactttttttgatcaagagatgtatcccaagtctcaagcagcaacaactgtaaataagaacatacatggttaatagatctagaattgataattcaattaaataatccttctctaaaactcatgaacaaaaaagtgaggaataccttgactctttacaaaaaacttaggacactaaagtttccagtatctctttcaccgcaagagaagtactttcctttgccttttgctttaggtttggaagccttctttcccttcctagctgttttgacagcattaggagattcaggattgggattgttcctttcttccttttcttac

SEQ ID NO: 34344 - DNA, 1954 bp, Cannabis sativa
ataatatattaccaacttgtatctaggtgcccatacgcctatccacagataagtaagaacattctttactaaggtacgaccactgtaccacatgcaatacataccgctactgtacgagtattggtaggtttgcaccgtacctcaagtaccactaagtattgtgccacatacactccgtactcaaccgtactagtactgtactctttgaacatcatacactataccaatgcactcagtatcgctatcgtactagtattggtaatatacgaatcacaaacagcatgcatatattacacatacacatattcttatataaatacgttctatgctattcttatctcgtttctaaattcaagtgtgatggccgacctaaatagaaaatcatgcgctggatggatgccctatgtcatatttacacaaatgggtaaataacacgctaaaacccgaactggggacctaaacttacaactacaagtttcgctatcgataattaacatgatagtattctaattatcgaggaaacaaaaaactaaggctctgaaaaataacacgaatcagcaaaatagattttttgaggatcctgcctgtgtataggtctggtttacactagaaaaccccccaaatccaaaaacttgcacaattcgtacaaaacttaaccataccttccagatcacctataataacatcaaagagtaaatttcaactagaaacaacaaaaattatccacagaattttaaaacaccattgttgagccaagtttgaattcttagaactcaaacttgctcaacccgagaattaagcaccaaaaccagaagattcaaacctaaaacaacttcactaatcaacaaaaaaacaatcaagtattaaccttaactcaaaaagtagtagaatcacaaccttaacatgcttgaactaacaaaataacttaaaaactcaacaagaagcagctagggctcttacctccacttgatacaccctgaattcctagttgattcctagaaaaataatgaaagtttggctgagttcttctggttcttaaggaggggttgagcaaagggagagagaaagagaagttttttctcaaattttggtttttctttattttctaaaaatgaaactaaaaataaattattaacttaattataataagtggccagctgccaatcaaggggtatgtcacctaattctctaatgcaaaatatcaaaaatacccctcctacttccaacttaagccatgaaaagtctaggggtaaaaaggtccaaaaccatgaccccgctcaaacctagcatttaaaatatctcaaatgtttatccccgttaagaattaagttctaaacttacccatatgactctaacagtcatccatcacattttcgatcgctgctgagcaaaaatcataaaaaaaaaaaaaatacatatttcatatttagcttaaataatactcttagagtttaataaaatctctagaatcgataaattataactctaatgtccatttctaaaaatggagcccacaataatgataaaatcatatataattataaaataccaataattaacgctaatcgcctttactaatccataatttaacatgcgatcattacaattatctcctctttaaaagatttcatcctcgaaatctaacctgaataactttagatattgagccctcataccagactgtagctcccaggtgacttcttccaccttattgttcttctagagtaccttgaccaaagctatgttcttgtttcgaagaaccttttctttcctattgaggatttaaactggttgttcctcataggataagtccggctatagctctagggctttgtaactcaagacatgagttgggtctgaaacatatttcctcagcatcaaaatatgaaatacattatgaaaagctaataacgctggtggctacctgccggaccttcttgagtatctcaagtag

SEQ ID NO: 34345 - DNA, 4655 bp, Cannabis sativa
gtgtgtggatgggtaacttcagcagcaaggtgtagtcccgttaaagatgattggagactagtgttattaggcgatcgtatggtgtggtcaggggtgtatatgttggcttgattgtggtgtagattatgttgaggaagtgagtttgaagactccccattgtagataattctcggttgaggagggccacgggaatgaaggttgggcagtgaggaagtaattgaatttctagccaatctagtgagttgtggccaggcattggctttagagaagtccgtgcgatatttgtcatagccatttgttgggagtttggaaccttttatccattgttcatattgaaagtcatcatcgttttcgctgtccattcgttccatgaaagcaacacatcgttcaaatggatggcctagacaaccacattcgaaacaaaattcaggaagtcgctcatatcggaagtcgacccaaaatttgtcctttattttcagtagtttgatcatttggccttgcataagtggctttgtaacaaggagtttaactcggatctgcagtaatggaccccaaccttcattggtagagtcatcatgaacttctaaaaatttgtcaattatatttccgagtgcttcagcaggaaactttgatttttttaggtaggggagtcgatatatttgcacccaaaatggagtatatatatatatatatatatcagattttcctttgtgacattttgcagagtatctggcgccaaaagtatgattaagtaattttgaaagtaccatagctctttgctgagtatacgtcatttatcaccttcacaaccaaagcgaatatggaataagccatcctctcctttatactcggtgattatgacagggtatcgttcctgccaatggccagacatttggtcgatgaaccccgatttgtcgacatgctggttggtgaagatcgttgccaagagtccaaaaataggttgaatttctgttgaatgcagcgtaacatcgtcagggagtgtaaggacggagctttcctcatcagtgagggaaagtgtggaattatattattcacaacagagttcatggaaatggatatattggtaacattgtgtcaaatgtagagttgccgacggtaggaaattgaggagaaggtaatggagggaacaattatcttcaaaggaaatttaaaaaagttgaggaaaaacagttggaacaaaagaaaaaagagttaaaattacttaacttctacaattggaataaagattattattcttattcttattattattatttatataaatataattatatacataagtttatacaaacttgagtttacttttatatgaattcaaatttatatattaatattattataattttaattaattaaataataattaataattaaaatcttttatatattatatttaaatccatattgagtttttaataattataaattgaaactttaaattaacaatttattaatttgatattaactttttataattaacaattaagcctatatgtctcttatttccttaatttaatccaacatagtgaaattcttgtaatttgacatagtcaacttttaaattctaattgagttattaaactaattaattgagtcgatattattcaagaaaatgtggggaccataggcctatgtaaccaacctcctaataagaagatttgagatttactaactaaatttcttagcttattaattcctcctaactccaatctagatttgaaattatactcttaattatttaatgctctatatactaaatttagatatgctatgaattattcattgttttaatctgaacaatcattgatactctatagatggtttacatcgagtaaggacaaatttactattttacccttcatgtattttatccttaaaatacttagctacttgtaaattattttcagtaaactaatataattaccgaaatggttcctctatcatttattgcatttagctaagcttaaaggaaaccgtcattttatttctaaatagaagctataaattctatatctatgattaacactcctactcaattgtactacagaattcccaagatgtaagtatgggctagtcctacaggtaagctcgtaacgaataagtcaaaaaacacataaagtacaattaagctaaaacttaaccgtctccggtttgacatcgacttagaaaagacataacaataagtttataatatcttattaatatcggtccagttccatgtatagacgatacatcagatacaagtttactttactaatgtcctagaaaggatattccacttatacaagtttaagtaaactacatcactcattatcacgtcagtataaatgtagtgcactgataattcctgggactaaatagtttgaagcatataatcatgattattttctattgcgtagataacactataatcatgagtaacaatatgttcaggatttattagaatttatatattaattatttaatcacgtgaacaacaaatttaattagggcataaaatcctaacacaaaaatcttaggaagtctaataacaatttggttatgaaattttatgctaatctagatgccaagatcatcaatctaagaagcaagttaaagtatcacacctatattagtggttcctaatttaagagtcctctactaacagttagttgtctgttgaaaataccaagactttcgaaatctagatatttagctaaataccttagggatgtaggtggtgaattggcaagacggactttttttggaatggtgaagaacttcctgttattgtgttgtctaatttttatagggtcttcacaaaatggctttgtccaattatttgtcaattcacatatctctatcgataacgttgagatggggcaatttctgttttctttgaaaattgttattataattaattttctaagcttattgtatgatcagattctaaagtatgctcctgtcaagagtactaagagtatgtttccatatatgagtttggtgcactgtctagtcatgtgtggtgctcttccaatggttgatcaaaatgatatactctctgttctaactcttgataggtatttcaatactctttccaacaagcctatgcctcaatctatgaccaaagagcccactactgatgttcctttcttcttttccccttctccagttgtccttcttagtgcggtggccaatagttggcaagtcaagatgtttttattctttcaaaaatttcaagctcggtatgactatgataaccaatgaaaacttttctttgagaagtctgtggttaatgttcttaatgcaatggctgaggtgctcagcactggtcctactactccccaagttgatttactttgccagggtcagttcaatctatgctttctctagttccatctactagtgttcaggggaagtattcacattcaagtgtccataggtaaggttaggtctagggataatagcttaatcttgttcagagtgaagaaaatttagtttagacggagtaagtcattctacttaccgattatcttttactagccagcctacgacaacctagacatttgcatgacgtgaacacactactcttgttgatactcaagctactaagctgtcttctcagggggagtttccttattgtcctactcatagtacaggaactctagatgctttgggtgaagttgctctgattgttgatgcaaatgctgctggttttccagtggtgttgttccaaactttgatgattcttcatacactattcctttaactgatgaacgtgtttagttatgctcaatgaggggaagacattagtgttagttgctgacaatttttgatttattaaactatttttttatctataatcttttgattcattattattagctttagtcaatattttgatacactatataagggataatttaatatggtcttgttacttgtgtgtgtgtcacaatttagtagtaatctttttgttcaaaggttcttttgttaacatgattacattgtgcatgatggttgtgctgtttagtattcatatggtttttgttgtggttttttttgttactcttttttttttatagcattgatcataatttgtcaaaggagagattgtaagaactatatttttcaatatggaaaattatgtgtaaggtacgtaagtgcactactaagaactcttttagtggaaaaaaaattattattcccaactgttaacaatgatgtagtggcgagccattgaagaacaaaaaaaaaaaaaaaaaactaacaacgaaacaaaataaaataaaaccatgtcacatagacatgactaacacactcaaaattatgtggcacagacaagactaaaacccttaaacccatgttacatagacaagactaaaatactcaaaagtatgtcatagagacaaggctactcatagtagtaaatattgaatggcagtagcaaaatacaaccccgactaagctggacctaaaactagggaaaactggcaggcctagccggagaaaaaggcaactttcgatagctatagatttaagaataggaaaaaaactctcatattaaatttattgaaaatattttatctattttttcttatcattttttcctttaatttttgttttttttagttttggttagttttttttttttt

SEQ ID NO: 34346 - DNA, 1349 bp, Cannabis sativa
aaacaacgaatttttttttgtttccagtggtcgcgaccaaggcttgtgctagtcgcgaccacgccattttccagaaacctagaattttttgaattcaagctagtcgcgaccagctgacgaatttctattaatagccctaattttcaccccattaaccctaaaccttcaaaaccacttttcagccgtcccaaaccccttctcatccgaaaatccccattcttttctcaccattcttcaattctttcatcttgaaaccaatttctcaatcccaatccatcccaaaacctaatttcactcatcaatcttcactttccatcaaaaaccaccccaataatcatcaatttcaccccaaattcgaaaataccattgctcttcatcttcaacctcaagctttcaaggatattcaataatggaggtggagtagtggcgtcttcaggtttgtaagtatcattctctattacatttgagaaattgcatgagattttgagtattttttgtgaaaatagtgattattctaggaattattggttgatagaggaataattgggtttatattgtgattttggactgtgtatgtatttgtctggattattctggtgtagttttgaatttttgggaagtagaaatttaaggggaggtgttgtccaatttttcttagaattattttgaaaaatatatatatatatttctaagattatggggccaaaaagaactaggcacatagaggaaggtggttcatcatcgaacccgccatctacgggttttgaccgaacccggcctgcaagtgaggcggcacaaaaccgcttcatgagggttaaggttaggccttacattgatgataggggtattgaattccctgagaaccccttgaggcgtcaacctaagttcgaagcaatttgagcccaaatagaaaggatgaaatggggtagctttgtggatgctcggggctgggccaatgtgactatggcatgtgaatttcttgccaattggcccgagcgcaagaatggggaggtaaaggtgcggggtaaaaaggttcccgccactgctgatgcatttaatgttatgttctctgtcccagattactctagggaggaacagcgcctccgaattattgaggaggaagagcagtttgatttggtggatgtggcagaaacagtgggatttgcagggttaaggttccacgataatgatgggcaagacgggtcgcccaatatcctgcatagatgcgaaataaacccgatggcaaagacgtggctgtacttcgtgagtgctcggttggtgccgagtaaacatttttcagatgtccaaatggatcgcctcaaatatgtgtacgccatcatgaaggggta

SEQ ID NO: 34347 - DNA, 1887 bp, Cannabis sativa
  modified_base (1827)..(1838): a, c, t, g, unknown or other
cacaacctagcctcaaattagctcaaataacataatttaaacctcagaacataaacccaagcagcaagaacaaaagcagaacctaacacccataatcatacaaaaccttaacttacaatttaagaaattcaagggagaagatgctagagtggttacctccaattagaacattaaatccttgctataatcctctgaattgctgaagaaaaactcagtttcttgttggcttctagggttcacgagagaaagagagagaaggaaagggaggtgttgattgatttttgtatttttcttatttgaataaatgagttactaaaaatacatttcctaactaataataacataagggattcatatcaaatcttattaggaatatccttatgagcaacatatctcaaacaaaaaaattcctttctttcacttgtttgttgaagtaccgagccactttttgctgatgaactagtagctttagatttgctaaatctcttttttatttaactttgtcaagtgattttgccaggagggcatggttagtctccttgtcgtatgtcaatcttttatgggatggaggctctaattcaactggaaacattccttcatagccataggccatggaaaaggtgtttgcctaattattgtcctgttagttgttctgtacgacctaagtacctgtgatagttcctctggctgattcccattggcctcttcaagttgtttcttcatggtgtctttcaatgtcttgttgactactttgactattccatttgtttggggatgtgcaactattgagaacttttgacgattccatgtgttgtgcaaaagtctatgaacatctggctatcaaattgttttccattatttgaattaatttttgtggaagtttgtatcggcatatgaatttttttaccacaaaatccaaaacattcttggatgttattgttgccaatggctcagtttctgtccgcttggtgaaataatccacaaccacaacggcgtattgtactccaccttttcctttgggcaattttccgatcagatctattccccatatagcaaacggccaccgactttgcaactgcattaactcattagaaggtgctcgagggattttggaaaatctctagcattagtcaccttttttacatgggcctttgaatcttcaataaattttggctagaagtaaccttgtcttagtatgttcttataaaaactttgcccctagcatgatttccacaaaagcctttatgaacttcaaacaagagtcgtgcaacttcttcttttgtaacacacctcaacaacggcatggagaaacctcttctgtgcaatacaccatccactattatgtactgtgtagcctttctcataatttttcaagcctcatttctattgttaggaagttctccggtgttaagataggctgctatgggagtcatccaatttggtgtgttgtctatcatctcgatttcattcgtgcatgtgatgatgggctcttctagaaattggattgggactaacttatctttgtttgttgttgtgttgctcaccaaccgtgctagtgcattagctgttacattttcatccttttgaatctgcttgagggcataccaatttaattatgtgagcaggtcatggatcttacttagatatgcaaccattttttctcctcaagtcgtgtattcccttaggaaatgatttaccaccaactgtgagtcactatagatttctaaatatttagcaggaacttccctaaaaagttttaacctagcaatgagtgctttatactctaccttgtgttgggttttgtgtcctaaataaaacccatttcannnnnnnnnnnnttactaattaatataagatcagaaatcattctatgttgcgtggttcaca

SEQ ID NO: 34348 - DNA, 2100 bp, Cannabis sativa
ttggctcaatctttacaaaaatacccccacacggcagaaattacttttatactgtcttggccaatttttttttcttttatactgtaaacaaaaaaaaaaactgaggcctccatcttccacacccacgaacagaaccaccacaggaacactagaacaatcaaaaaacaaccattaattctggtgagattgagaaaaaacagtgaaatcgatgtcaaataaataatcatggcaaaataactgtaaaacaacactaaaacagatcaaacaaaagaaaggaaaacatgattaaaaaaactaaaaaatattctgcacaacctcgatacctaatgaaatagcagttatatttgcaagccaaatcttaaaaaatcagaacaaaaaaactactaaaacaacataaaaataaatgtaaaacaataaacagatataaccacttagaaaaatataaaagaatcacacacctcaaaactttttttctagtgagctcgtcaaatgtatttttaggaaaacaaccatagagaacacccatcttccacacctacggataaagccaccacatcaccacgagaatacccagaaaacaattattaatttcaacaagatggaacaagaacagtgaaatcgacgttaaaaaaataaattatggaaaacaactataaaacaaccgtacaataacactaaaacaaataaaaaaataaaagaataaatgcagtatactgcagtataaaacttataaaaatatacagtaaaaaagtaaaaaatatcgtctagcaatatttttgtaaaaaaaaaaagagcaaaaattaatataccatataaattttcctaaaagtaaataagagcctttaaagtctattaatgtagtagtgtatttagttatttgttttttttttattttattaaaatataatattttgtaattttaaaattttaagatagtatttttaaaaatatatataagaaaaaatataggagaattacctcatatatttttttaaaaaaaatttatggtttgggttactaaagtggttgtaatgcaagttgcaatagggtttctatatgattttttgttgcaatttaggttgcagtgctagttgcaataagagtttctatgtaaaattttgtaaaaatataaaaataaaactgttttgaagtgtaaaaattaaaaaaaaaaataatggtaaaattataaaaataaaactatatatatatttgtaaagaaacaaaacttataatgaaaaaaaataaaataaaaaaggattacgatgacaagaagtaatccatccaaattggaaagtgttaggtgagcatagaaaaggctcctataaaccatcttcttccccggacttcttttgcttcttcttgattctttttctttttctcattattattattattgttattcacaccccaacaataaatctttttatattactatttgatatattatctttattcatttattttcaaataaaaacagtgaaaaatgccacgtgttcattcaacacaagaccaaagttccaataaaatcactttcagaaattgttatagaagcttccctcactcaaatgaaagaaagaaacgaccaagagaaaaacacacccacctttccattttttttaaattaattaaaattaaaattacacctttctttctctctctatctctctttcataattttcttcaagaaagaaaaaagcgtgttctttgtctcttctacccgccttcactttccgtcttatcattttagaagacttaattaaagagcatgggcattagtggcaccattaaaattaagagcattagtaggaggtacatttagtttttaatagggctgataaaacggggagagatgataacacaactagaaatccgcacaagagttaattggttttaatttatcttaaatgaattcgaatcgtgtttgaattgattcgtctaatccctttaataaatagatcgtatttgagttgacacggctaatacgaaattaaccctttaataatatagttaaagttattttagtactttaatatatcataaatgagttataaacgtgttgaatacttcataaacgtgttattagttgacatatttaaacaa

SEQ ID NO: 34349 - DNA, 2631 bp, Cannabis sativa
ataacttgtcgcacaagttagtgacccaaacttataaacgtataaaccctagtgtactatgcaaatcactttgacaagactaaagtaaacttatacaatttgattgtgaatagtcttgatgtagataagattcctagcttgatttgcatgttttgatccaaagttgacttttctccaagagttgactttgactttaacttttgtctttgaccttttgaagtcctcttttggatagggtcttgaattcttgatctcttgatgaaatttttgctcgtatgaagtatgaagtagttgatatacttgttgaatctacttcattgattatgtttctgtaccgagaaaatattgatactttgtgatttgcttgcaaaatgatcaagaaaagattagtaaaaaataataatcaattttttttatcatcaaaataacagagtgattgactttttgtcaacataactaagctatttttcaaatttaaatatacattatttaaattaattaattaatcaaaaaatacaaaactaatagggacaccctataataatgggacgcatgcactgtgtctagagacatttcatggggtgcctcgctcagtctaaattaagacaatagatgtgtcttttttcatgaaaacttttgtcttttccctatttaattaagttgaaataaaaattatttattacgaaatatataatttctattttgacaattgaaaatagatttttttgaacttccacatacaacttttatctcacacctttacagtatttcaaggtggcaatctgaggaccatggacctataattctatgctccaaaaaactagattatttatagaatcacatcaaccaaagaatcttgtttattagttccatgattactccattataaatatggaatcaaactcttagtaattatagaattctatttacagagttttacagtagtgtccattgatataatcaattccagtgattagccctcctagtgttggttcgtaattcgttttggtcaaattaccattctacccttctaactacttcattatcctttagtatcgttaaatcactagtaaaagtataattttcaatctaaatttgcacacaacttttaagttccaaaattaacacataaagagaaccaacattcgacccttaggaaagtcaagatttcataattatagatcatgttcccaatcatccacattactagattcccaaagcagaagttgaaagaatcatctactttgagaaactttaacgagtgaatcaaagaaactaataacatagattggagttcttgattactcaagatttaagccggtctacatattgatcatcgttatgatatgaagtgggtgtttatagtaaacaaccagttttgtaaagataactttattctcgatccttgtcatatataatctcaatatacaacaccttcacttatatgtcatgctacatcagtaaactgaatcgaaattatttgcaccgaataacaagcatcagtgaaccatactagcaactgctgattcaaagttcccaaactttaatatgttgctgagtattttatttatggctaagtaatcttaattctccatataattacaggtcacaacttcatttatgaataagaaattttttaatatttatgtataaattattccatattaaatattaataatttaacaaataagtatatataaaaatatttcaactcttatttataaccagaactgccttaacagaattttcatggtataaaccctacaatctcccactttccctaaaattaaattaggcatatttcttaatcccatattagttatatgacccattaaaaattttgttggtagtatctttgtgaatggatctcccaggttatgatttgacacaatctttaagaccgtctcatcacctctatctactatatttcttagtagatgctactttctctcaatgtattttcctctcttgtggcttcttagttccttggagttggccaccgatacactgttgtcagtagagcaccaatagtttttctacttctggaactacttccagatcagtgtagaatttcttcaataaaaatatttccttagctatttctcacgttgctatatatattcagcttccattgttaaacctgcaatacaggtttgcttaattcttctctagactatagctccaccaccaagagtgaatactgacccatatatcaatttttgactatctttatctgattaaaaatcacaattagtatatctagtaggttttaactctcaactagaatatacatgcatgagatctctcgctctctgaagatacttgagaatgttctttacagctacccaatgttccaatgtggattagatagattggtaacaactatccctacatcataatatatatcaggtcttgaacacaacattgcatacattaagctcccaacagctgatgcataagggtactttctcatgtactccatctcttgaggagtctttggacattgatccttgcaaagattaattccaagaaaggatagtttgcatgtagacatggaattattctttcttggaattctccattgacaatctttcaagccccttattgatataagttgcttgaaaagtacta

SEQ ID NO: 34350 - DNA, 1588 bp, Cannabis sativa
tcatatttgcaagtatttcatattaatttcatgcaatataaagctcttcaaagaaatttttataacatatttagttttattaatatactaaattagttgatgtaaagttggtttacagaggtctaataattgtttctccacatattactattaaggtacaagtaattatcggttagtgacaacaaaaaattaacaaatagtttcttatagatacacattcacatttaatatttctcattgcaattaagttgcacgttagttgaataataattttgctactacaatatcatagtattataaaaacaaggcttggaattgtcaaatacgtgatctgaacagataaaacacgattgttaattgtattattcgtttgtattaaatttgtgaaattattagttattttgcggttttatattagctggctcacaacagatgtaactgttgcattacagtttccttacagttttctcatagtagactcactataaatgaattttcaaaaaatgtcaggaaagggaggtaattctatttctcatattttacaatgggcagtttaatcaaggaataaattgtgtaaattataaagttagtgaagaattcatctcaatggattgaaaaatatgaagaacttatacacaagttgaaacaagtgttggaatgcaacaaagaaaatactcaactgcaactgaaatattaagtgaaaaaagattactaaccgttgagataaaggacgatccaagcctattcttctacatccaagcaattatacagtagaacttctatctaagaatacacttaggatcaagtaaattatattctaattgagaggttatgagtaaatagagttatactagaaaaaaaattcaaaacctaaaaaatatcattttaaactacaataacaataaataatccttaatactatattataatagaattgttttgagtaaatataatatttatacatatattacaatttagaataaaacataaataaatttataaaatatatgtacataaattattgaaatgtaattatatttttatatatatgtatactttgttaatatgagacttaaaaaatatataactaattataatttaaaagttattcttatttataattagctcaaattgggacttttttttttttttaaataaattagaagttattcttgaatagagtattcttaaatataggttctacaatatattaaaaggaaatttatttgactttcttttttttttttttaaatttttttcaaaactcatacaaggagaaatattttctttaatacattgcgcatattgatttttagatagttgcatagcagttggtttaaacttgtatgccatatcaaacttcaatcaaacgagaattttgattcttccccttttaaccaacaacaataggactcccctcgatttcctctcctttaacgatattagatttcttcttagcagaagccttcccctatttgggtatggcctcaaaaaaattttcatacactactacaaacaaaggcctttaatcccggtttttaaggccttttatcccgattttcgctaaaatgaaaaccgggatatatgc

SEQ ID NO: 34351 - DNA, 2218 bp, Cannabis sativa
taatttttacattcaaaattacataccgaaatactttttttaatttttttatagcggtattcgttgtagttacagtatcattcttgtaaatttttaaaaaattccacaaataatttacaattacccgaaaaacagagttcctgatatttcagtttaccaagcgtgtgtaaaaaacttcaaacgtattttcgacactgtaaactatatttgaaattttttaaaaatttataagaatgatattgtaattaagcataacgaataccgtcatgaaaaattttttttaaaaaaatatactgacatgtaataagaggttgatagatagcactattctgattcgtttggtacgtcatattacattatattatattatatagtattatattgaattgtattctgtacaatatttttatgtaagactatatgtggtattaatttttatatggacacctaaatatataatattttagtataaattaaaatttaacatagtgtattatataaaaatatatgtaatataatctatttcaatgtaatacaatataatataatacaatacaatataatacgatcaaatatagcgttacaaacaagtcctttatttatataattatgtataatatttattaggaacattaattagggttagaacttagaccaagtccaagtcatcgtcttctgcgtaaattatacgggacataatagcaaattctaattaaaaagctacgaattatgtaatggaaataggaagaaaaataaaacacttttgtcaattcaattttgctaataaattcatcatatttatatatcttctttaaagtcgtcttttggtttgaattaatggtagactcgtgattagtttttctatttatatattttagggatgaaaaactatacaacaaacttttatagaatttaaataagagaacccctcttatgttttaatttttatacatttaattttcttatttattttttttttttgtaaaacctctcgtgttttaatttttatacacttaaattttttatcttcttctgtagtttacttttcttaaattacaataaacttgaaggaaaaagaaaaaaatttgtatatgtataaataaatgtttaattttattttagattatgctttctatataaataagaataaaatataaatttgtggtaaaaataatataattttacacgactattaatacaagtcaatatcaaacataaataatatcaatacaatacaatgcaatccaacacaatacaacatattggatcaaatgagtcgttaatctactaagttttgaaatatatttgtatcatatgtgttagatctttaaattactattttttacattaaaatatctattgtatatgtattttttaaatatatatatatatttaaagaaaattttaatagttactttaaatatataactatgatgattatatttacttctagtcgttagatcattattagacagttgtaattaatttcaaaatttattaaaaataattaataaattacttgtaacttgatactaaccttaatttatttattttcttaaaataaaaaaataaaaaattataaatattaatttttgaaaatattttaactaaaaaattaatttattttaagtatataaataatttaaatttaaaaataaaaattttacctactaattacttgtgatagcatgtcataaaagatatataattaaaaataataaatatttcacaaaaatattaaaattaaaaatacttaaatatattctctcaaaaaaaataattaaatatacatttttaaaataaaagatacatataaaatattctaattaactaaaacacataaaatactaatgtaagatacatgaacaaaataaagaaagaaaaaaagtacggaattggtaattatctgaagatatgatatgggtggtgaagactgaagagtgctttcaagtgaagttagagatcaaattgggcatggcttaagagaattcacaaacaccaataacatgtacaaaagcaaccattttagtcctgatattaataagggtcacttaaagcaacctaaagaaacaaccccttagctggggcaaattgtagctaaactaattaaataagtagaaaattattacaacagtttattacagaggcaaaccattttgtctaaatatggtaactttcatctgaggttgatttctctgtatcagctcaaatatgcaca

SEQ ID NO: 34352 - DNA, 2201 bp, Cannabis sativa
gaaaaactactacctcattaattaacagtgttctaaaaaatatgttaaatttggaacatgctaaaaattttaccatatttgtcacaagatataatattgtactaaatttaactcataacaaatgctactttttttatttagtataatcccactagttattatgattcattcacttttattaaacttaacattctttatttaccattactaccattatttaaataataaacaaataaagaaattgattttgtatattctcaataaaatattaaatgactataaatatataattaattattatttgtttgagttattttacgtgcattagaatataattgtaaataataggccaaatataataaaacaaactcatttttgtgctaaatttagtacaaattttaaatcttatattggagatagtctaatagtgtgctaaatcttgagctaatttgacaatgcttaatgttatatcaaatttgacataagatataatatagtgataaatttgaaaaatgcaattttttcaattagtttatcattgatcattaatgataaactttaacatacaaattagtgcttttggacaccggtggtgcccaacactttctatagaggaaattatattttatatttactttactttatttgttttaatttatacctttatttttacattctttaagatatatccacttttataaatgatatcttcattatactccttaagttaatgtaatttatttgctaataacttatgtgcaattgtctcggtccccgaccttcaacaacttatgtgctaataacttaagtgaaggataaagatatattaagcaatccactcacaaaagtacatatattttaatgaattataatataaatgtatttttgattaatagattcaaaaaaaaatatatattcttcaacttactcctttttataggtgatgtcttaggattgcttatcaatattttttaaaagatattttcttaaattacgtaggactccgtatttaattacaccaatgacaaaaatactagactgaattttttttttggtcataatgttatttgtaatttggagaaatataccatttactttttttttgtcctcaaattttacacaatattttatttacatcttgcatttgtggactcctctttattaacatttttcatccataaatatccaactcgatctaaatcagcaataaccaacctaaggcaaaaaaaaaaaaactacaagcctaaagatggaagcttattctttctggacttttcttctcaccttggcaaccttagcttcttttatcatcttaatctcaaaacgacttaactcatccccaaaactacaccctccgccaggtcctaaaccatggcctctcataggaaacctgaacctaatcggtcctctcccacaccagtcgctccacaaactgtcccaaaaatatggtcccattatgcaactcaagttcgggtccttcccggtggtggtggtgtcctcggcggaaatggctaaactcattcttagaacacacgaccacgttttcgcttcaagacccaaaacagccgccggaaagtacacggggtataactattcaaaactcacttggtctccatacggccctcactggcgtcagggccgtaggatcttcctgaccgagcttttcaactcgaaaagactccagtcctatgagtacattcgtgtcgaggaaaggcgtcaattcctttcgcgactatttgcgttgtcaggtaaacccgttgtcattaaagagcaactctcacgtgtgactctaagcgttataagtagaattgttttgggtaagaagtacttcaaggagcccgaatcggcgtcgtcaacacccgaaacgacgtcgttggtgaaactggaagagtttcaggagatgttggatgagttgtttttgcttaatggagtgttaaacattggggactggattccgtttcttagtttcttggatttgcagggctatgtgaagagaatgaatagtttgagtaaaaagtttcatcggtttcatgaccatgttattgatgaacacaaggcaaatagaatggagcagggacaaaagggtaattttgaacctaaggacatggtggattttctgttggagctccgtgagacccctgaccttgaagttaagcttagttatgatagtatcaaggcattcattcaggtacgtatatact

SEQ ID NO: 34353 - DNA, 1306 bp, Cannabis sativa
gatatgtccttctaggaacatatcttggttccgcactcgcaaagccttccaccctcgatgagtcgtatttggaagtatgttcagtaccatgagactagagagatgagacagtgcgttctcaaaagatccttctggtttccttttttattcttgcacacaaataaagaaattctagttatcagatcacaacagagtattgtatcaagattaatggaaaaacttcctataacaaatattatgcaattaattcagattaattgccctcaatcagtatacgcagtgttgactagatcaaaccaaatccgattcgcctagttagtagatcgtctccttgatgggctagatttcatgagatagcctaagggtattatttactgtaaactccccaatagtgggaaaggggaaacctaatgtaattctcaagtcactatacataccccacgaatcctatggattaggggttgaattctcttgtaaactttgctcaggcaaacttgagaacatatattctctgtattctcaaaggcttttacaagctaaagacttattgaataatactgactcatggactaaggctagttaacttcccaaccacataaaaaaaatatttgtctctttttatactttctcttttgattatttattcttcagttcttattatttaaatttagcttttaaaaatctcagtaaacactaacgattctttgtaaaccctagtattgaaaatttctaacagggtttaaaagcagaggttttttcttttctaaaaaaaatagagcagaacaaaaaaaccacgacgacaacaaatgcaattgtaaatgaaggatcggaagaaaccatcaacaaaaaaaattaaatgcatgaacaacaatttgctacacaaacataacattttggaagaggaaaaaagaaaagtaaaaacttacatgttgaagaagatgaagggagtgccgaaaccaccgtatgtcagtaatagttcacttggcaatggcataggaaaagcaaaagaaaatctgaagggtctagaattttgctagaaggtttggcgagtctgaaagtgagacacagtgagtgggtaaaaatatcagtagaaagaggtacgagctttgtcgaatattcctttgacaacggcattgatgaggggctttgtcgaataggcaggaatcggatcattatttgctagaataagggaaaatgattataaataataaatagcccacgtgcgtgtagactactaattacatcactccctgaggcaagaggcaagtctcaagtctcattttacaaaattgcaaaaataagactt

SEQ ID NO: 34354 - DNA, 1483 bp, Cannabis sativa
ttttactctttttttcttggattagatggattcagtcaaatctaatatatattggatctaaaatattagatagatccgatccgatccaaaaaatactagtttaaaatattaaataaattcaaattaaacaaataaatatatatgatatacatccaacggatagaaccgatccaatccaacatttcatgaatattggatcgattggatgactaaaatcaattagatcgaatcggatggtaaaatctaacatccaatatataattaaatcggatctgaataggccttaaaatattgaatgtgatccgatcaacacccctagatataagaattgtcaatatgtttgtcaaagtataaagtcacaaatttatgcataccataattacatgaccaaattttacacctcaacaatcctatacataataagaaatcataaatcagatagatatgaacacataactttgaaactaaaaaggacctactacccaattttaatatatacaagtaaaataaaaaatacccagataaacaacaaatattggttggattacatgtataattgaatggccaataaaacagtcataaaccaaaaatataaaagggaaaaatgatagtgatgtggttgggttgggtccacgacacaaaataatataattgaattaaaagtaggccatatagttatatttgttgtatttttttcacttatttattaaaaaaataatatcaaaaagttgtaattattacgtcaaaaaaatcagttgtaattatgaatcaaaatgaggcctaataaaaaccaagccgttacgccgccggcaacggcaacccaaacggctttgcagccgcctccgccaacttgtttaacacgtgtgtggttttaatgtttgtcccaaaccaaacttcttttttctattcttattattatccaaaaaaaataaaaaataaaaaaaaataatacaatattaacaccattgtccccctatcaattcagccatttcttttaggaaagttataaatattttcattttaaaaatatagagaaataatcttattatactatttattatttatattattttttactatataataatttttttatatattttttttagaattaaaagtaaattatataaaaattatagtatatctgtattagttttattaaaatatttttaattttaaagttatattgatatttttaatttttatgagttgttggaaattgtcggtatataaattttattgtacaatatatttctattttattctatagtatattattattcttaggtgatatttattttttattttaatatgtataatagtggtatataattttattagcataatacaaacattttaatacatgtatataaatttattgccatgctatatacattcaataattatttttatatattttaattgcatgatatattatttatttaaataatatttaattagtttctaatttattatatacaat

SEQ ID NO: 34355 - DNA, 2052 bp, Cannabis sativa
gtataaatgtttgggtaaccgtgtagtggttttttggtaataaaattaatattttgtatttttaatgtaaaaatttcttttaaaaatgtacttaccatatttaatttttatttttcttttaagaaaaaaaaatcataactttagattttttttggcaacatatgtagaatttttttcgtaaggtttgcagattttttttactctttttaataaataattgtataattttttttttttttttgaataaaattgtataatcttttaaaaatgataattaagaaattgtaaattattaaaattctactaataaaatatggagtttttttttcataaataaaaaatagtaagtttattataacaaaaaagatatttagttgtcaaaaaaaaaaagatatttagtattaaatagtgtaaaatagcctaaattagtccaaaacaaattattgatttcattttttttttcaaaacactttttttcgaactcaacctaaatttaatcaaaattggaagtatcataataatatatttaaaaaagaaacatatttaaaaaaaaaaaaaaaaaaaggaaattggaacggtcgtaaaaaagctagtaaaatctctttacaaatatatataaatgtttaataagggaaatatctcttttgattgagaaataagggaaacattaaaaaagcagtcttttacatatatatatatgggtattaataagagaagagcagaggagaagaaggaggaggctatggcggcgatgatgcttattccagatgatgtactctctcaaatattcatccgaatccatgattgccgatctttactccgatgtaccgccgtttgcaaggcctggttttctatcatcaattcagaccactttcgccaccaaaaacagaaacgattatcaaacaatcttcaacaatcaaaaccatttacccttttatttagacatggtcgcgttgacaaactaacaaaaccctttccctaccaatatttctcaaaagaatcacagactctacatcagaagaacacaaacaacaccaacatcgtacattctcaggatgattattacctcaatttcttgccttggccggagtttcgtttgctttcggttaccaacgacttgcttctgctttcacgcgaaatgggaaaggatttcatgatctgcaatcccttcaccaaacaatggattgtgattcccaagactcctatcgacttaactgaagtattcgattatagcggacacggtgggttgatttgcgaaaacaaggatgataaattattcaggtacagaatcatgttagtatggaggaaagtttatggtgaatcttacttatctgattttggtcaaataaccttttcttccgaaactggacaatggagttcagtaaagaacataactttacctcacgatttaagcgatgaacctcctattgtttgcaatggaatgctacactggctatctttgaattatgatactgcaattgctcatggcattattgccttggatccctttcatgaagatccaaattattacaattatattcaatttcccttagcctttccccaagatgagaggcaaaagcgttgggttaacatccgtcttggactggtccagggtcgtttaaggatttcacttgttaccttcttgactagaaggaaaaggatcttctctgtcaaagtatgggaattgaattatgataataacaatggtgatgatgggaagaccacctcatggagtttggtgcatgattttgagaagagaggaattccttttaagtacaagtatgtggttgtgatggctttccatcccaccaatgataatgttttgttcattctatttgataatattcatgtttaccaatatgagattagggaagagaagatggaaaagatttatcaatttccagatcctggttatctacaatttggaatacgcgtacagaacttcccttttgtctatccattttggcctactaaaattcctacctttccctctctcactgtctcagctcttcatgtttgagacttatgttaatattagtaatatatatatat

SEQ ID NO: 34356 - DNA, 2565 bp, Cannabis sativa
  modified_base (1499)..(1501): a, c, t, g, unknown or other
ttgaaggcaaactatacataagaggttattcgatgcctctacttcggtgtgttctccctacaaaagcaaatcaaatcatcagagaaattcatgaaggcttttgtggggatcatgcaggttggcacagcctaactaaaaagatcattagacagggatactattagccaacgatcaataaggacacccatgagtttgtcaaaaagtgtgataagtgtcagaggtttttgcatacccctcgcgtatcgctgatggaactaaggacgatggcctcgccgtacccatttgctatatggaggatagatttaattggggcattacccactgggcaaggaggagccaagcacgcagtagtagcgattgacttctacactaaatggactgaggacgagcctcttgtttcaataacctgcaagaaagtcctcgactttattgtcaagaacattatcagtaggttcgaaatttccatgaagatagtattcgataacggaacccaatttgatggtgacttgttcattgagttctgcgagaggaacaaaataattaagagtttcttgtcagtatccaggcctcaagtgaatggacaagtggaagctgttaataaaaccttgaaggatactatcaagaagaagttagacgctgccaaaggtagatgggtcgacgagctaccacaagtactttgggctcacagaactaccgagaagacggcaacggaacacactccattcttgctagcattcggctcagaagcaatgctacctgttgaagtgaacatatcaactcacagacgagaattttataatcaagaagaaaaccaggaacttctaaagttatccctggatctacttgatgaaaaatgaatcgagtcgcaagtcactaatacagtgtatcaacaccgagttacaagatatttcaacaaaaagtcaagaaaagactattcaatgttggagacttggtgctaagatcggtatttgcaaacacgagagacgcgtctgtaagagtgttcaacccaaactgggagggtccatatgtaatcaatgcagtagtaggaatcggagtttacaaattggctcgactcaatggctcgctaataaagaactaatggaatgtggaatatttacaaccctattaccagtaaataaatgatgtaactcacattaatgatgtaatattttaactttagttatgaataaagagaatcattactactatttaagtaattacaaagctttactctttaaaattacttaaggggcatttatgtatgattaaccgaaattcatttggaaatacatagtataatgcaaacccataactttaaaactttttttttaagtttttgatcaaacctttctgacgagatggggatcaaaccactaatcaaacttttttttacgagaagaggatcaaaccactgatcaaacctttctgacgagaaggggatcaaaccatcataactttttggtttaaacttgtttgacgagaaaggaaaatcaaaagtnnnaaatgagatataactcataacttgtgcacaaaactgaatactaacggttcgcgcaagatagaaaagtactaaatgagacatcgcgatgcttgataaaagtacttaaacctagtgcatggatagataatataactattcatataagcaaacaaatatatacaaaagtgataaaatcattaaacgtatattcaagtttgcttaagacagattataactgtcattgcgaggcagagttgataactgcttgaaaattaaaagtttggtagataactaactacttaaacaggaaaattatgagccatggaaaaacccaaaagtactctacacttgatcaaagtataattgtttacattatgaataaaaacgcaagtaaatgcaattatattaagatcaaatgaaaaagtacaagacatttaagataagagaaaaccaagttcgtttacaaacttgtctttacaaaaatgctactaggggcagaccattaagccatcttcctaagataaagaacacaaggttattcgtggagggttggtgagctcgaggaagaccgtctacacatagcttgagaaagaccgtctacacgtagcctgagaaagatcgtctacacgtaaaaggtctcgacctctacatagaccttattctccacatcaaaagatcccatttcctgcagccaagacctcattcccagcctcaggaaatttatcaacacttgggattggctggtccaaaggttttcttgtgcaagcttgggtcttgggccagttgggttctttagtagaatccatgaccacagcaactgggattaccttcttcctagattctttgccagcctgaggaggacctctgaacttgctctcaaaaactatgtccattcctgtagagacagagataaaagatcaatggaggaacaaaaaaatatataatccagatcagaccaccattcgcgaggaatgatacttaccctcaaactcttgtgaggatcgcccgtaacgatcaactgcatctccttggtttggattgattggaagctcctcagtcttagaatccttcgtttccaatttaaa

SEQ ID NO: 34357 - DNA, 2975 bp, Cannabis sativa
  modified_base (1489)..(1494): a, c, t, g, unknown or other
  modified_base (1569)..(1583): a, c, t, g, unknown or other
atatatatattgatgatattgataaggtgtaaacccactataattacactattcttttattatttgaatttggattaatgtaatttttttggaagattagtgtaaattttgtttatggtattaaactcttcttttcagtaatatttctttttaaattcaccttattaatttaatacttaatcaacaaatttttcaataataatatttttttttcaaaataataataatttgggtcataataataataatgatgaggttgtgttttacataactagaaagaattgtgtttcttccgttcatttttctttttttataaaggatatattgaaataaaagttttgttattttaatataatttattattattttttttttccaataaaagaagtgtatcatttactcattattatataatgaagtaatatttataaatattattccaaagtaattcatataattatcttaattatttgttaaaaaaaacttattaaacaaatgtgttgaaataaaaataaagatactataataatatttttacatatagaattttaatacattttcgtatagattaattatgtttaacttttcaaataagttggacatttaatatttaaggcttttatttaatttttcaaatattataaaaaaaatttaaataagttggacattttatttttttataatctaatatatagtttctctttttaatattatttttcttttgtagtagtcaaaatgaaaggcaactaaccagaatttaagaaaataaataaatataattacttttacaattaatagctcttagtattctactaaaaaatataaatatatatatttgttagtatttacatgttacatttttttattttttggaattttttcatttttacactttaaaattattattttttttttgcatttttacggaatttcacacataaattcctatagcaactaacggagcaacctaaatcgcaactaaaatccgtataacaacccatatagaaaccatccgagaaatcaccagagcaatccaaactgtaaatttgaaaaagaaaatgttaaaaattaatatatgagataattctccttatttttttcaaaaaaaaattaataagaacaagaaaaagaaaataataataaaattaaaattgcgattagtatatatgtttgatactattataataatgaagattgaaatagtataaaaaaaatctcgagtatgtgttgttaagaagattatttcacaactgcttaaaaatatgtaagtatatatccatttataaatataaagatatatatatatataaatatatatttatgtttgggtgcactcttaatgggtattacccatgaatgagtaaaattagaaaattttgagtttttatgcttgatttttttatctaattaaaaaaaatctcttattattatatcatatgggctgagattgtttcatgagtaaaaaaaaatttaaaaaaaaaagtttttnnnnnnagaaaaataagaaaagaaaaagttaagtttgagtaaaatatttttgtattaatatatttttgatatagtgtaaannnnnnnnnnnnnnnatatttgtttttaattaagtagttaaattaagcatatttttgtgatttcattattcgttattagatcaacattcgatggttgatatttttaaaattaatatttatagttaaatttgtttagtaaccattcataagtaatacccattaagaagtgttccatgtttatatataagttcatatatatcaaaatattatattttacattatatcacttaatttgtaaaataaattttgcaaaactaggatcgaacccacgcgaagcgcgactttatttcctagtatatatatatatatatataagaaattttctattactataaacaataaaaaaaatctaagccataggaatcttttcaaaattcatattttttttttgtttgtttggtaagtaagaattcatattgtagaaactttaaatataatattctgccaaaatactattaactaatctatatccatatatctatatatatataaatataaaggaaaagacaaaaaagcctaggtaacattctagatttttttcattgtatttttaaaattttgtgatattttcatattttgtttagaaataaactactacaaatagaaacttaaagtcccacatagtttagaaacactttctccatgtgggttataaataacacttttgttatactatttttctttgtccaagaaatatttttttaagggtgattgatttatatcttgcctaataagttttaaatttttatttaatatataaaaataaataatttatcattcatattttgataaataattatatatctttaataatctatatatctatatataaatataaaggaaagcacaaaagagtctaggtggcatcctaaatttttttcattgtatttttaaaattttgtgatattttcatattttgtttagaaataaactactacaaatagaaacttaaagtttcacatggtttaaaaatacttaatgtgttatccatgtaggttataaataatacttttgttatactactttcctttgtccaagaaatatttttcttttaagtgtgattaatttatatattgcttaataagttttaaatatttatttaatatataaaaataaataatttatcttttatattttgataaatagttatatatctttaataattaagttttatagaaattatatatcgtttttctttaaaataaaaacaaacacatatatatataataacacatttttttataatacaatatgaaattaattaattcaatactttttatacatataaatatgttagtatttgggtatgctcttaaagggtattacccatgtatgggtattttatttttgaccattggatcaaatatctaatggttgatatttataatcattaattaaatattaaaa

SEQ ID NO: 34358 - DNA, 1108 bp, Cannabis sativa
tgtaatgaccagaatatttagttattatcttctaaaatagtctagaattctcgatgtggaaatagtaatttcataaatatgttactttatatagtagtactaaactaatattatttctttttttcaaattaagtaattttagtttttttttttttttgccataataataattttggaaaatattagattagttcaaagttgtggtatcattatataattttatttatggacgagatatataagtggaaaatcaagagagtattgattagtttaagtgtttggttgagttgaaaaataataataatataaaaaaaaaatagaataagtattatctgtatgggagttatgtgagtaaaatgtgggaattaagttgaattagtccaactagttttatgcgaagagataggaggagcccactatctcatcatgaattattaaagaatgaaactttacacattaagcttttgaagttaaacttaaactcttggcagtcttggtgtgcacgtgtggcactcacatatatgaagtacaaaaattaattaaaaatgtttaaatctttatatcatgtgcttgttgtgacgtgtgcatgagatagtgtagtcatcaaatggttagctacattgatgttgataagtaggttatgtggcaagaatggagtccatttctccatgacatacgaagttaaggaaattagtttccatctgttacgcattaaggttgatactcaagattatgtgcatgaaattttgaaataaactatggaccctttgaatgtttctccaaccgatatcacatgaaggatgagtcttggaggctatgtgtcatcctatgattaatccacttgcttattaagtaatttttttaaactttaaccttagttaattagtgtatggtggtatggttaagagtgaagtatagtttagtatttaaggcctataaatagagcctagctaagctagctcatttcatttttcatcactcacaaagaagccaacattgtcaagaaaacacttcctagaccttgttgatacttagactaaaatcacctcaaagctccataaacttttgtcatccttcttttcccttcttctatagccaatcacttatt

SEQ ID NO: 34359 - DNA, 1072 bp, Cannabis sativa
aaagtaatgcttttttttaggaattaattaattagaaagagatttagaaaagaaaatcaaaattttaagaaattcattcccctttctctctctctttgctcaacccctcaaaccagcagaagccaactctaatcttcatcatttttctagaattcaacaaaaaaccaaagttttaccaagtggaggtaaatcctagaacttaatttttagttgttcaagctttatgtttagtttgattatgtgaatttgaggattattggtcgttaaggttagaatggtttgtgaatgaacaagtttgagttttctaagttctttttgagttagaattgagttcttgcagtaggttatggtggtttgcgtggtgaatgaacaagtttgagtttgaaaactcaaacttgggtcattaatggcatgtttagattttgtgtatgtttcttgttgttattgcttgggaaacattgtttgaggttggtacaggtgttttggaaggtttggcgtggtttggacacgaattggacaagttttgaacttgtttgggttacctggtgcaaactggttgactagttttacagatcatgtaaaactgattaaccgaattaggggcaggtttcccggattatttgatttgtcaactcgtgttttattcagagtcttaattggttatttctttgataattagggtattgttataactattactaatagtagaacccttagtagggagtttaggttttccaaattagggttttgacgtgtcatttacacgtttatgtaaatgtgactagagcatccatccagcacgaggttttccgttcaagtcggccaactcacttgaattgggaaacgaggtaagactagcatagaacgtattatatatgcatgtggtgtatgtgatttgtatatgttttgggctaatatcatagcgacacaatcattgtgttagttcggcagtacaggcacactactggttaagagtgatatttcaccccaaaaagtattaattggtgctatcatagtggtacgaacatagtactggttcaacagtacaggcatagtactaattaagagtgat

SEQ ID NO: 34360 - DNA, 1237 bp, Cannabis sativa
  modified_base (46)..(64): a, c, t, g, unknown or other
  modified_base (1202)..(1206): a, c, t, g, unknown or other
catgcaacataaaatgttatttccgatctttattaataagtaaatnnnnnnnnnnnnnnnnnnnttttatttagggcacaagacccaacacaaggaacaataccaaagcaacaaaacacatccacaagctcaaaaacaaaatatgccattagagagccaagcttgagttctagaactcaaagcttgctcaaacatcaagccagccattacaacaagcctaaaacaacatatctaagcataatttatccactgaaaacaataacaaacactagtagcaaatacagcaacaaaactcacaaggcatgcgtgaatccataagtgaaaacccaagaaatcaaagaggaggttgctagagactataccttggcttggatcacacaagaatcttgcagaattctacttgaaatgaagaagaaatgacaaaccctagctgcctctaagtggattcgaaagagagagagatttaagagtgaaatgtgatttttttgataaatttctattttttttgtcaaatattgagataatattctttttatccaattaattcagcttaagcctcaattaaaaatctgatttaatacatcccacaaaagagaaaacacaacttggcaaaatgaccattttgcccctttaacactaaaaatcataaaaggccacttaggggtattttgggaaattctaaaatcccaaccaatcccgacattcccaatgtgtaactatatcaccctgctatactaaaaatgctaggatgtgattttaatagccaaacgacgcgttctaatgttgtcgggcactgagtatgcaaaattatgcaatttctatatatgacatataaaatgcattctaaattcaaattaaacactataaattaataatttagaattaataaataatctccataattaaaccctaattatctgttaatttccaaatttaagataagcggtgtttacagaagccattgaaaagattcgatctcgtatgcttgctttgcaaagtagacagaaaagctatgctaatccaaagcgtagggatatagaatttcaagtgggagactctgtatttcttcaaatatcacctataaaaggggtgcgtagatttggaaagaaaggaaagttgagccctaggtacatcagtcattttaaaatactggagcggataggtcaggtggcctatcgattaactttaccacccgcgttatnnnnngtgcataatgtcttccatatctctatgttga

SEQ ID NO: 34361 - DNA, 1111 bp, Cannabis sativa
agattattgcttaatgttgattttatgttgatttaattaataatcatatttgaagaactttaattttttagcacacagacacctaatgcccaggttgataatctatcaacctaggcgacttcaaagcattagatcaaaaatctaagacatgcatcttcttcgtcttcataaaaaatgggtaaacgagtcctttaggggagaaataacacatcctaagtgccagaacaaaggcccaacgcccaagttgacattttatcaacctaggccaatttggaggagttattcaaaaaagtcttctaggcatattgttaagattaagattcaactatttctagggaccaaacgaaacttccaggtgacctgaaactggatccaacgtccaagttgacacctggcacactaggccaagcgcccaggttgacatattattaacttggagtgtttccaattagttttccaagaaattgttttgggcatcttttccgtcatcagaaataacgaatatacaagaaaacttgggtagaaaaccacaatcccaagggtctagaaactgagcccatcgcctaggttgacaatcaacctactagctggttttgatcattctctgagcattctctccaaaatggtaaaaaaaaataaggtagaaaacctcgtcctcaagttcaagaaccttagaggtgccaaaacgacatcctggaaactccaaaattagcacccgatgctcaggttgacaaatggtttggtgcacaaggttctgcttattcgattctgatattgtctagaccgtttatctagtttttcacaataattgagaaccttgaagtcaaaatggtcaaattcacaactttatatttttacttttctagggattacttgaaaaccaagtagttttgagtctcttgtttctatataatatagcaatggtgatgaaaaaaatagccaattgactagaagttaaataatcactaattaatcatcaataatgaattgggagtaataaataaatggaaagaaaactagacgtagttctgttaacatccaaatataataagtgaactattacaaattgtctatttttcaacatcaacaatatggaatagtgaagattttg

SEQ ID NO: 34362 - DNA, 1217 bp, Cannabis sativa
  modified_base (53)..(53): a, c, t, g, unknown or other
gttttcaccattacatctccttcggtcacaaaatccttgatattgtgaaaatnctttctatatatttactcctcttagggtattagattatttactatttggtaattatacatgtgttatcagaaataacactagtagttaatccgtgactggaataacgctaaaaattgtataatagtttccataggttgaataattatctagagttagagactttagatagcttcttacacttctccaaaaatcactgctccaccgccagagtaatcacgatctcataagtagattttttggcattaatgcaagtctagaaacataattttggtaagtctaagagtattaaaataccacccttatcgagtaacatatagttcctctttcgatcttaagatttgtctaattgtcttccaatgttcctttcttcgattaaactaatacttactcataactcccactcaatagtaggtgtttggtcagcatacgtgagacctctcactattgatgcttaaggaattcttttcatgactttcatcttttctagaatatttgaaattgttccttagataagctatataactaggagccaaaagacttcctttagagttagccattagaaaatgctccaagatcttaataaagtaagtttcttgcacttgagtaaataaattactaggtataccacaaggcataagtttagataatctaaaacttatgatactaagatcaaaagttttgttaagtccattgaatagacttattattaaaatttgccttcttgttcacgtaatacataacatttagttactccatacgaacggttttaaccatagttttctttgctttcatacttagttcattactctgactatccattgcctatttaaactaacaatgaatttcaatcacaagtatcttccaagtcataatagggcgagttccttaaacccactacgatgaggtaccatgactttttgtcttggaatattaatggtattaaactcagtgaatgtatcaatacaatggaggcagtgggaccatcttatgtagaataagatgatagaacacttttggaattgaaataagaaaaatatctcctctactttgctactttgttttaactttagtcatattcttaaaaaaagtagtatatgttgaaacaaaatactttcttagcttaatgaccataggatggtccacccttaatcactttagaatag

SEQ ID NO: 34363 - DNA, 1447 bp, Cannabis sativa
tttctctcctgtagttagacaaacctctataagaatcatgatgtctagagtggccaagcatgacctagaaatggatcaaatggatgtgaaaacagcttttttacatgggagacttggagaacaaatatacatggaagaaccagatggattcaaaagtaataagccaaaccaggtatgcctattacagaaatctctttatggcctcaaacaagctccaaggcaattgaacttgagatttcatgaatttatgatgagcattggatacaatagaagcaactatgatccatgtgtgtactacaacagtgaaccaatctggttactgttgtatgtggatgacatactaataattggagaaaagagacaggctattgacaagctaaaacaaaatctaagtgctgaattcgaaatgaaggatcttggtgaagctaagaggatacttggaattgacatcaatagaactagacctgaaagactttcattatcacaaaagggatacattcagaatctaattgacaagttctgtatgaatgaagccaaatgagttagcactccattggctcagcatttcaagctaactcaaaatcagtcacctaaaacagaggaagaaaagatgtatatggattctatgccctatgcctcttgtgttggaagtctcatgtattgcatggtgtgcactaggcctgacttagcctatgcactcaacattgttagccgattcattgcagaccctggtaaggaacattggtctgctgtgaaatggatactcagatatttgaagggatctatgaacattggacctgtctatgataacaagtttaaagaaggaattgaagtgaatggatatgttgactctgattatgcaggaagtatagacacaagaagatctataactggttatgcattcacagtcctaggtggatgcatcagttggaaatccaatctacaaaaggtagtagctctgtcatcaactgaagcagagtacatggctgctactgaggccattaaggaagcaatctggctcaagggattcacaaatgaactggggttcaattcagaaaccataacagtgcactgtgttaatcaaagtgcactacatttgatgaagaatcctatgttccatgagagatcaaagcacatagatattaaactacatttcataagggatatcattgttgaaaaggagattagtgtggagaagattggaacaaaagagaaccctgcagacatgatgacaaagtatgtaagtttagccaagtttaggctttacttagacttgctaaacatcctcaattgctaagtgaggattcaagaccagttcagcccctatcatcattcattttctctattaatgaccaaggtggataattgttataattggccactaatagaggaatagacatctttggctaatacattccaacttcccctaacagttttacctaactgt

SEQ ID NO: 34364 - DNA, 1628 bp, Cannabis sativa
attgccccctcgtcacgcctggggggcaacacctgcgcactgtagtcatattcggattcaaggcttctaaaaacgaagccgaatacgaggctctaatagctggacttcagctagcccaagaaaggaaggtcaaacacattgaaatctgcagtgattcacagctggtgtaaatcatgtatccggcaaatacgaggctcgaggagaaaagatgatagcatacctgagcgaaatacacgacctgctcgcacaattcaaaagctacggtctcagacaaattccaagagaagaaaatagaactgtagacgcgttagctcgattggcaaaaggcaatgtaagtgacaaggcaaacttggtccctatctagttccttgaagagcctactactacaaattttctctttagtgacacacatatttctgcgggtcactaaaaggttaggagtagtttttagtgacatacacagttagtctctaaaattcaatgttagtgtcctataatttgagtcactaaaatgtgaagtgtcactaaagattaatacccataattttatgaattttttttaattaaaaatattcacctatagagtcactctaggagtgactgaaaaaatatataccaacgcgcattgcgcgtcactaaagccactttacagtttatttatttttttaaataataattattttattcatttgtattaatgtatggccaaaaaaaattgtaaggctgacagttgttatttaatgtattttgttattatataaataatataataaaaaaacataaaataataaataaataagttgataagaatgaaaccctaaaataacatcattctctctcaccctctcttaccgcctccttctctctctctgaaaatctctcaagctctcaacgtaaaatggaagatggtctaaatcaatgggttcgacggccatgaacggtcgtttctcgattccggtgactcatgcagaggccacgaacggcctctccgttactccatcatcagttcgcttcccccctcttcgacttctttgagatcgtcgatctcctctactattctttttttctgttttataacagatctgtgttttaggttgccggcggttggggctttgctttgcaactagctgtgcttgcgtcatcgaggttcggggttcacaaatttttggtgatatttcggtgcaaatggcagaaactatgttgagtggctcagagtttgatgaggaggtggccgatataaggtcctccattgtgaataagaagaatgagatgggtgagatggctctgttcattgctttcgagaaaggtcatcttgaggtggtgaaagagctcatgcaatatcttactaaagagggcatttccatcaagaatctttcaggctttgatcctttccatattgctgcaagtcaagatcataaaggtataatcttttatactctattttcgtttttaataaaataattaatcaagtgtcagctatgaagttctagtatgacaattaattagatataaacttaatactttgaatggaggatgttgcccctgaattcgcccaaaatacgtggactagtcgaaataggacacgtgtatcagataacctgtaaacatttgataagtctttgtgcgcc

SEQ ID NO: 34365 - DNA, 1457 bp, Cannabis sativa
  modified_base (491)..(496): a, c, t, g, unknown or other
gagctttggttcaaatggggtttgacactgactcgaagagtcaattttaggagatttgtcctgtctcgaagaggactattatctaacaaacgtccctttgataaagtaaagcacatatttgtctcaaggcattaaaaaataatgctgaaattaattagtttagcaaagcttgatcccattcatcaccaataccctaatatgttgcttcatcaatcatcggtcgatttagtcagtttttttctatataaaaatttaaaatttggttttcgatctggattgatgcaatctgaaaatcgaccgaccaatccagaacctgtcttaaaatcgaccgttttgaacctcagtttggtcggtttaaactgcccaaactgaacttttttttctataaaatatgatccaatttattctataagcacattattctacattctacaactataacgatatagattaattattcaaaaactaattatcttattcttttaactttnnnnnnaataaaataataatatattattatatattattactaactacaatacataaagaaaaaaaaactttataaattaatacatatgtataacggtcggctttgatttttttggtcggtttattacccaaaaaaatcgactgttcaatggcagttttaaccgttagcaatttttttggtttttggttccgtcagttttggttccagtggtgtttggtaggtcagtttgaatggttttttcggttttctgtatttcatgctcagccctacttcatcctttaatttttcatcttcatatatcattgccatgtatcatgggctcacctattcaggtagtggaacacccgtgcagcaccttgacttttcaagccaaggtcagccttccaaccatccgagtaacaatgagctcattttttgcgcgactgtgcccctcgtgcacacttcttcttctcgaacaactcccgtcgagtcatgctcgcaagcatccatgagtgcatccatgcattgaggctctctagccaagatacccgtactatccataggttgccactatgataaggcaaattccaacaccatcgctcacctagtcactcgtgaccaaggtagcatgtgtggcaagatgccaacaccaagctgacgtgccaacgcttttaatcatgctccattcgatactgtctgaatggtccccctcatcgttcaaggattcccatacgtccatggtccaatccttaaggcaccatgggtaatgccctaatctatagcgacgccacgtgtgtgattttgtaaactagtttaatactaatatattaattaattattaaaaaaaacatgataatattaaaaacttgactaaaataaaatactaaaaacgtgataatattaattataatgacataaaaagcgtgtttcggggatccctattataaaaatctttacgaaagaactatatactgttgggttttatgcc

SEQ ID NO: 34366 - DNA, 1682 bp, Cannabis sativa
aagaacctggggaaagagggaggaaaagtcgaaaacatccctcgactgacttaaggtaaaaacttaatgataaacatggtgacttgagaaagcacctggaacggaaaaagcaggcgataccggtgtcgggatatgccctgaatgagggaatcttggttgagttggcaatcctccacaaagacatcgctagagtctcgcagagacagaagggagatgactcggagtctaattgtgaggaccgggagccctgcgccaggaacatcctagaagtagaacttcccaaaaattttaaaatgcccaaaatggcaatgtacacgggggactcagactccagtgaccatctatcttgattcaatagagtaatgatcgtcatgagagttagcaatgatgcgaaatgtctatgctttccactgaaactaagtgggtctgtcgaggaatggttcaagaaattggagtcaggatcggtagactgttggaacaagttacaggttagtttttggcgacaattgtggcagcaaggaagattaaccttgaagtgagtgccttgaccaatatagaacaattactcaaggagactttgaagaatttcataaaaagattcaaggaggaggcctcgaaaacaaaaaaggttgacgatggacaataattagccatactccaagttggtatcctgattggaacccccttctagaacgagtaacaacaagaaggagcggctagcctccaagacttttagaagagagtccagaaatagattaacctggaggaggcccaaatagtggcttacggaggatattacctgacgggagtgtcaggaatgcagcaggagcacaacttcctagggctgcactccctgctgctcctcaaataagcggaatacagttctttgctactccaggatacaactagaatctcatcttggccctgacactgtcacactttgggacatccataagcaatccctctaggggtgagcattcatctttcgtcccaatctgcaccggccactagcatggcaggagcccaataaagctctcggagtaagaggtcttctaaaggtagcacacggactaaagacaagagacaacagagggagtatacaccctaatacacgcagtacaccgaactcacaaactctcaagaacatgtatattttgccactcaacaaaatacgcattaccgaaaacctccccccttgtacatggatagctcccggagggaccccgacaaaaggtgtgactatcacaacgatattggtcataccacaaacgaatgcaaaaatctaaaagatgaaattgaagacttaatccgattgggccacttgtatgagtggataaaaaataggctgccacacttgaatctaacccaaaccggaggccccgtgcctcagggagggagtgcgattgcgcctgagggtcaggtgcctcccggaggagtgccccatcagtaggcgcttggactaccacctcggcctaatgggagagtcattatgatcttcggaggtcctcatattggaggaaccaccaagaatgagctaaagcgctatattggtgccctaaaacatgacgaggaggtatgggaagttactcaacttctagcctaaaggcccaggctcatggatcaacccatcaccttcacggaggaagatgcgaagccaatgcgtttcccgcaccatgacccct

SEQ ID NO: 34367 - DNA, 1536 bp, Cannabis sativa
tgtgattttcccgcttttaccgggtcaaaacgatcgtgtatttaaacacgtctttaattgttgtatctggagatgtctcgacagaagtttggttccaatgatcacaatagctagctggggccatttttccttccgaggttaacgatacacgtcttgtgacgatcgcgattcttatttacaaagagttcttcgaggctcgtttgaatgtaagcttctgactcgtcaggactgtaagcctcaccgagaaaatgtctgaagttaactgggtgaaattacaggaagccttcccacaacgagataggcatctcgcttactaggtctcgagccaacccgactgttacacttagtttgttcattatacactaagtgcttccaaagttgatatgtgtcgcttttgtcttcctagatacagcgtacttgatgcctcgctatttgcacttaacgacatatggtctctcgctagtatactaagtaacagtttgtatattgattcctcgcataagaccttacggtcagcatgttacaaatatactctgatacttacgcaattaatgagttattccataaaaagtgatttcatcgatccatattccctttatattaacacgtgtcctccaccgagatgacagctgaatttcgggtataacaataacatattcagaaaacatatatattacactcaataaagaagtatcaacacaggcagtattctacgaggataatattacttgcatcgtccaatttaaaggagggtacattgaaggagatataattaaaacacattttaccaaattcttctttttacatttctagaaaatgcacattggtgtccaacaaatttaatcaagtgtcaatctagcagacttattcaaaaagtcattaccaacatcaatatttgtgaagatggttcacaagattaaaatttgtcgattaaaagatctccacgaatgcctaaataagaagtagttagtttacactgcactctttttcttttgaccaagtttttcaacaaggcttttaataagataatttttatggacattcaaaggggagtgtcatgaaatattatttatggatgtccaaatcactaaattagttatcaccattaatgttaaattgatttagtttcccattcttttaatcatatttttgtatgaataggggttcaccccattagaataaacaactgagaaattagcttatttttctctcttcatcatcttcttcttttccttttatatattttataacattaattattttgttacattatatattcaatctatatattatactacttactaaatattattacaagtacctcacaaaatgtagaaaaattgttcgtcttaggccaactccaatgggcctgtaaaacatcaattatggtgtgatattacaccaaaactaagtccaaccgaacgacaattgtattatcatttttgggtttgtctacagtgtcccaccatatttaggtgggcattgtagacagcactaaattgttttttttttcttttttaatagggtaaatggcgg

SEQ ID NO: 34368 - DNA, 4347 bp, Cannabis sativa
ggtaatatatatgtgagaaaattacaactaaatgtgctgaatcaaatcaactacacttttaacaatcaaacaattagcaatgacaaaattaacaaattgcacacatcagatgaaaaacagggatgcatacagtaaggtaaaacctgaaaacaaataaggcaaaaaataaagaaatcaacaccaagatacatactagttcaagtccgatggatcgatgtgatctatgactttactctagttctgaaacaccaccaaatgttctttattgattgagcaggaataggtacgatacattcgagattgattctctgatgaattctctcaaagtgtttcaactctcatactcttacccaagaatcttctttgtcaacctcaatctctcttttctctatacctctctctctctctacttctaaagctttctctctctaactctcaatctcaatttgatcgttcttctgatcgatcctctgaaatgataaatgttgggggtatttataggcttaggattaagatctttaagtcggtgcctgcaagaattaagattattaagttagttaagaaataactaacactattataaaaatagtttttctcgacatttttaaacagtcgtttaaagtattttcgtcgatttctataactgtcgcctatacgaccgtcacaaaacaggcagaataggcgacagttcaaaaaaatgtgaaattcttaacagtttaaaatcgtgtcctatactataggcgacagtataaaccttaaaccctaaatcgtcgcctatagtatagggcacaattttaaaccatcgcctataccctgttataggcgacggttttaagtcatgccttacagtattggttacatttttaattttaaaaagttttttcagcgaaaatttttttcagtcgttacattggaaaaatagggaaaaaaatgtagattttttgtcactttttcccctacattaatttgaaatttttttacaaatctctatagtcaaaataattaaaacaaatgctaatatcatctaaatttatttaaaattctgtatagtgacaatatttaaactaaaactaatatcatctaaatatttttaaaaatctagatagtaccagtaattaagttagcgctaataatcatctaaatatatttacaaatctatataataaatcgagatatatacacactgattaacaaggcaactgtcgctccgcttcggctttcacataaagaatctaccgatcatgcgtaacatttatatcatcatttgtttacgaagtggagaacatatcctgtaaaataaatgtatatattaattagtaaagactaaatattatcatatactatttaataaaaaataatatttattataatacttattaattattttagcggttgtgtcaacacatgtattggatcttctttggtcatgaaacttttaatgaatttcatgacgcactatccacattgtttattgtcaggttgttcaggacatataggagttatctactggataggtctatcaggctgtcctatcatttgattgtatatggtgaacgatctacacaaaaagtaaagttaacatacataaatttataaatataaaatacgcttacatgttgggatgttggatattgaacttacgtggaaatgatgaatttcaaatcattcggtgcattgccattgcctgaatccaagtacgccatcgtcttcatacttagtcggatgagtacaagcatccagtgaaatattttgcacaaacaaatgtgtgtaacactattaatacataataataaatattatgaagagttataaatactaaaattatattcattttaaatctacatataccgattgttgtaaggggcaataatctattatttggatttatcatcctagtcatacgagtgactagtgcttgacaacagttactgtcaattcctgcttcagtggcaaccacactcatatttaaaaattcatatactttatgcaacccattgatgtccaataatatttcattcatgtgcctgatgaaaagttataattaataaccgtcgccgtcaaaagaatattatcaagtttattgtaaagaattagaaatcatacttgtatcgaactcctatcgattgggctccaaagtattgcatggtgcacaattcatgaatatcatttttaacaagccaaatagagtcatcttcgaccctaaatagatcataagcaacctagaattagattatggatgacttcggccaccttttgatagagttataaaaggtaatgattgagctagtttttcgtaaattggacacaacgaccatgacctgttggcttacttggcctctcgaggtgttttcgagattgtgttggaggaccgagtaaatcttgagagttttatctgcttctcctcacgggtttcttctaaagttgcttggtaggtggttgtgtctatatatgaaaaaaaataaaattagaaatgtcattaatcaataaacataataagttaaataaacaaattaaaacatactaagtattttccaataggtgtaagatagtcttttggccatgttgcataactttttatatcttgacctactactgtcaatgcatcttcaccaatgggacacggaagcagtgcattctccacattgacttcttcgatgaatacccgacgataatctttgtgtaggtattcatcattgtgaatcgagaactttctatcttttaaatatttttccttcacaatgtgcctcgaagtaaccttttgtaccatcccactaggctccaactgacagtgcatcgaacacgataaggtctgcatatcgaaataaaataagccataattcagtttgtaaattgaccatattttaaatttttgcattagatcagtttgtaaaataacatgaagattacctcttttgaactaccactagtaggtggcggtgctgctactagagcagaaccctttctaacacgtgttggtgatggagtagagatattggtagcacctgatggttatgctacaggatttggtggagtatagacattgacaggacccgatggttgtgctactatattggaggcaagctcagcatagccttgttcattcgatgctcctccaatatcgaaactagatgcaacgttgctatgctgggaactaaccagacgaatgagctcatccacttaactttttgttgctttcctatgtctcacatacacgtctctccaaattatatgatgcctagttcaacccatctatgtttttcctttgatgaaaggtttacctagagagaaagtccttaaaacattaaattgcccttagactgatgaatcactcataatggcaacccgaccccatagactgaagatctcgagaaataggttcactgggtaataacaagttatgaattgataaaggtgagatcatgctataattattccaaaagagaagcatgaattcttgaagtgatttaaggttgagttaatagaagctcttaatgtgttctatactccaagtggagtggagtaccgagctacacgagtattattgatagacttacctatgtgaatgtgtgtgaggctacttcctatgaaatttcgagcaaagtttctagagcgttcactataccaagatagatgtccatggccattgaagcacgagcttttggactacaccctagaaaggttatgtgtggtacattgttagagatagagttcaagattacgaatcactctagtatattctaagttgcattcactacgcaatggttcaaatcgaaagatacatttgcctatgctcaatcttattgtttagattactgctcgagaaaatattttttaaaaattttaagtgaagaattgctggaactttagttgaaattttccaaaattattgtatgagaagcgaagtgtgtaagtgcgtggagttccacatgggattggaacacttcattataagtgtacataatgtgcaactttgacacatgggctggggccccaagcagtgccggccctgaaaatatatgggcccaagacgaattaaattttggagccctcaaaaatatataaaaaaaaatattaaaagaagagtgttatgggatttgaacccatgactttagatattatgccatccacctcaaccaactaagctataaatagttgttgcttatattacacttaaattttacttaaataaaagcctaataattttttttagttttttattttgggccctagggccggccctggccccaaggggtacccaattttgtgcaaatgggtgagaactcacacaccgaatcaccacacgtgtgcaactactgtccgtgtggtgaggtgtcattttatttttta

SEQ ID NO: 34369 - DNA, 1440 bp, Cannabis sativa
aataataataattaatacgtgttcagtacaaaaaaaaatgtacttataaaatgtaatattctatttttctttaaaacaatatgtaattgctccaattaatcaattaaggccaaactttgatgttaatattaatatttaaattgaggaattatttataaaagaaagaagttaaaaaaggatgcactaattaatcatgtgtataattattaataataagaaacatattaatgtattaatattatagataaaaaatattatagataaaaaaaaaagttcaaaagacatgtacatatatatagcatgtaggtgagactgagagctttagacttagagcaatgataccacaagtttctttttcaattctaaattttattcaatatttagtgatttatattatctattaagatatatatcatcctaatcatacttataatataacaataacattaatttaaacaaatgttatgtatttgtatagtcaccaaatattagtttaaacaattttcttatttatttatttgtatgttgcctcttgttcactaaattacttttaccaccaatcataacttaaatagtaggattatatgtttttgtgaagaataaagaaaaatatttccatacactcttcaaagctttatattaatttttaatttgttataacatttttcatctgcattccattgtttgtaatttttcaaaagtaataaatttcctccataaaaaaattttaatttgtttgtataagcaacttctgaaattattatacatgttatacttcataagaaattctttaattaatttatatgctttatatataattgtaccttttcacggaagtttttttattttacttttttttttatgttttttaataaaaataatatattaaaaatctcagcttatatttatcaaattttcttgaataacaaacaacaacaacaacaacaacaacaataatgtaatatgtatatgtttatcttttaaaaaaaaaattaataactgcgcaaagtgcgggtttgttacctagtatatatataattgtgctgttagggctaatgatgtggcacgttctccttttagtgtttaattttctctaatttgtgatttattctaactttttcatatattttattagatatatgatatttcttatacaaaaattaatgttgagttaagaaaaagactttaaaagacttaataaacttaaattttacacaaagtaataatcacaaaatttacacgtagtaataatgataatattaataattgtaaccgtatataaaaaagttaaaaagataataattaattaattgttaattataatatgaaaaaacataaagttttaaagacaattgtaaatgatatatatagacataattgtgttgttagaatagatgaagtgtctctctacaattactctaatctgttttatctttttct

SEQ ID NO: 34370 - DNA, 1208 bp, Cannabis sativa
  modified_base (555)..(563): a, c, t, g, unknown or other
  modified_base (680)..(691): a, c, t, g, unknown or other
aaacttaacaactaaaattttgaccataaatattatccaaaaaaaaatctacaaatatgtagtacattcttttaaaggtaaattgcaatataaatatctaatattttaaattttatacacttaaatatttaatatttatttttagagataaaaataattaatgttatgatgactcaaatgcattacatttattttattttaaaatttaatattcttaatataaaaaattaaatactacttattttttaaaaaaactaagagagatgcattacattacttgttttttaaaggggtgttcaataaaatttacaaaccgcccaacccgaataaaccgcccaaaccaaactgaacaaaaaatacaacccgaaataatacaatgaaaatccaaactgcccaatgaatatattggatggtttacaaattattctaaaccgcccgattaactcaaataaaccgaattaaaccgatttatatatttttttaataaaagtgtatatcttatattatataaattaaatttattagttaagctattttgtatttaaagtttgtacnnnnnnnnntttaacttaaaatttagattttatagttaataagttttagtgtatttggatattgaagttaaagtttaaaatctatactacattatcacttatttttattattttattcaattattnnnnnnnnnnnnaattatatttatcttatattaaaattcttaaaattaatttaatgactgaaaaatgatacgtctgcaataaaatcgtaagataatatacttttgctgtaacttttttttattaagattatatgtgtaaaaaattataaaaattaaagagatttcgctacaaatatattttttcttaataaatattcgggtagaccgtcttatatttttagcattcaaaaaaaaaaaaaattattctaattatctttttataatcgtatacgttgtaattatttagaattatgtataaaaagtaaagtttaaacagttacttaatacgtatataaaataacaatcatacgttgaataaaatatttattttaaaaaaatcataaatgttaaagagaatctcacattactaatgtgtaaaaaaataataaaatatataagataaattgactatttctcattactaattaatttgaggtgtaaccttatttatcttatcttaaagtttaataataaattattttaatttttt

SEQ ID NO: 34371 - DNA, 2528 bp, Cannabis sativa
tagctttgaagtcacatttgatggatcgttgaagaatgtctctagttggggttgtgagtactattttgagtccacatcctttgctattactcgatctttcaactaacaacttccattttgaattcggttgttattctagacaaagcaattccttctatgcttgtacctgtatatcactagagaagtctgcaataaagttagccaatgcctgttattttgattggggtccttggttggaatgtgatgtcgtattcactgagttctacagcccacttcgttaatctttcggacaacttcggcttatgtagtatggagcggagtagatactgggtgagtaccaccatagggtggcattggaagtacgatttgagctttcttcctgttgtaacaagtgccaaggcaagcttgtctagtttgttgtacctagtttctgcatccaaaagagttttagacacataatagactagttgttggttaccatttttttctcttatgaaaacggcgctaacggttgcagctgatactacgaggtagatgtaaagcgtctctccatctttaggctttgccattaacggtggggatgaaagatacgccttgagctcgtcgagtgctttctgacattcctcgctccatctttaggatttaatttcatattatatttttcaagtacgtcaaaagcttgctgcagatgatcaatatggtcttgggcaaccaaggatttgactagcatatcatctatgtagacctccattgtattaacccacatatctgcgaacatccggtagactagcctttggtacgttgctcctgcattctttagcccaaagggcatgactttgtagctgaaggttcctcattcggtgatgaatgttgtcttctcttggtcatctgggtgcatgagtatctggttgtatcctgagaaggcgtttatgaaactaagtaactcgtgtccagctgtttcatccaccatcatgtttatgtgtggtaatgggaatgaatccttcgaacacgccttgtttagatcagtgaagttgatacagagacgccacttaccatttttctttttcaccacaacaacgttggccaaccagtcggggtaatctacttctctcacaaatcctatgtctatcaacttttggatctcttcgttaattactcggttgcgttctggagcaaactttctccttttttgtttgaacgaaggatggttagggtatacctgtaacttatgaacaataatgttaggatcaatacccatcatgtcctcatgagaccacgtaaagatgtgatggtacttctttaggaactcgatgagccgaacacagaactcaggtgttagctttgatcttatctagatgtttcgaaaagtctttgctgatacacacatcatcgagatcttccattttaggctctgtaggtgcccttgacgatgtggggtgctgtagttgctatgctgaggcttgtttatctttcaatgttgtttgataacaatctcgcaccatctttggggctccctagatcccttttactccccacttagttggaaaacaaataatctgatggtatgttgatggcacagctttcatagcatggatccaaggatggcctaggatggcgttgtaggctgagggtgagtcgattaccaagaatctggtctggaggttgactccttctgcatatacgtgcaatgtgacctcaccaatagaatgcttctgttcaccactgaaccccacaatacagttgacttacggatgatggtggattcatcaatccccattcccctgagagcatgaaaaaacaatatgttagcagaccttccattgtctatcaatatacatttagttaaacaatttgaaataagcaaagaaatgactaaagcatcatgatggggattgagcaaatctgaggcttcatcgtctacgaaacttatggtttgtccggtgtaactcattgctggcctccgttgccttccgtccattcctacgacttctcttgcatgcctcttagctactgaatatgtcaccctgctaacttcggaccctccagatattacactacaagttctagtctgttgtggaggttctggtggtgtaacgggcctggtcttccctccagctatgatacttttccccttgttagataagaattctttaagatgtccccgtcgaaggagcccagcaacttcaaaatccagagctatgcattctgccgttgtgtgaccatgatcgtcgtggaattcacaccatttggttttatctctctgatccgctggcttcttggtcttttcgggccacttgaccttgttccccattcctttcatgatagccacgatctttgctggttctacatttaggttatattctgggatgggtgccttctcttgttctcttggtcttggtgaaggaaacctatgcatgggcctctttccttgcctattgttcctggaagttgggtatggctcatgatgcgtattgtacttgcgttctactctccttatgctcctcttttctcttgagtatgggtatgat

SEQ ID NO: 34372 - DNA, 1810 bp, Cannabis sativa
caatcatcgagaaacagtcgataacatgtcgagaaatcatcaataacatgggacaagaaagtttgaaaacacaactatacacactataaaaaaactattgacaaacaatcgagaacgcaaagataacatgccaagaatgactttttttttgctaaaacacatctcaatcatgattggaaatgtaaaatcatttgccattttgacaaactgtcgagaacctatcgaaaagctttcgagaaaggtcatccctgaccttaggacattcgagtggagaacctttcgataacctatcgaaaagccttcgagaaaggtcttccctgaccttaggacatttgagtcaagaacctttcaagaacttatcgaaaacccgtctagaaaggtctttcttgaccttgagacattcgcatcgagaaacagtcgagaaaaatacgaacacacagaatacttcaaaaaatgagatctcgcaattttagcgaaaattatattaaaaacaaaagggtaaaatggaaagttcgtgtaatcaaaatataacatcattatttacgttgagaataaaagataatttaatcacaaaatcattatttttatttaaaaatctattgttatttgattgtgaataatgtcatatatatatataattgcatattatcaaatgacaaagatagaggttccgaaatctttttaaattttaaaaaattgttagaaaaataattataaataaatgagatatcaactcaataattatataaattaattaatggatagtaatacatatccaaaatagtgtacaaatataggccttaaaatttgagtggacatatacatatactcatgtctctttcataattttctaatgttgtcggcctaaaaataaaaaagaaaagaaacataagaaaagtacctaagccgcaactttatcccactcttcacataaatatatgaattttgtcttatttttcaatttaaattttacatatactgtaacaacaaattatttaaaatttattttcgtttcgccaaattattttactttaaaagtgacgtgtatttaaaatcccctaatttgaaggacccaaaaaaatttttttttaataatttttaaaaatactaatggttttggaagagatggtacttttattttttaatactttttaaaaatacttatatgagaagcttaaagcttgaaaacagagtaaaaaaaaaagaaagaaatgaatgaaaatgatatctggtatattactgagctgagaaaaagggcctttatataggcaagagtacaaagatagaaaattaactaactccaaagatagttggagtgacttaataacaacttaacaacctctaatagcccccctcaagatggagtgtaaatattgattacacccatcttggaaacaatatttgagaagggattcggaagtaaaggtttggtaaatatatcagccaagttttgttgagaagtgacatgaaggagctgaagagacacttgctgaattttctctcgaatgaagtggcagtctatttgaacgtgcttggtgcgttcatgatacacagcgttttcgctgatgtggattgcagtggtgttgtcgcaatagagattagcaggttctttgtgagagacaccaaaatcgttgagaagggcaaggatccatgtcagttctgaagtagcattagccattgcgcgatattcagcttcagccgaggaacgggataccacttgttgtttttttgatttccatgagactagggactttccaagaaagatgcagtagccagaaacggaacgacgagtgtcttgacagctgcccca

SEQ ID NO: 34373 - DNA, 1140 bp, Cannabis sativa
ttccttggtgagaccctttagccatatagcttcttttattgcttctgtagcagccatatactcagcctcagtagatgatagagcaaccaccttttggagatttgatttccaacttatacatccacctagagctgtgaaaacataacctgtgagagacctccttgtgtctgtgcaaccaacatagtctgagtcaacaaagccttcaatttcacagccttctttcttactggccttatagattaaaccagtgttttgggactgtaatatcctggaaaatatattgatattttaattagacatattttattaaatatgtgattctgtgggtattagagtaggattataagcctacttaaactaaaaacgagtcgattagggaaataagaataaataaagcgtaaattattaattacggagattatattggaagatgtgggtatcgtagataccataatttgaataaaatattttcaggcttggcaacagtggaacttgacggggtggtcaaagatgtcacgacggtataagatgaattatttagaattggaattatatcgggctagtttagaagttgtcggtgtagtggattagttagaaaatttacctagatacccctaagctttatgttatggaatgctttattggaagggcaatatggtcttttactaagtggaatgtttgactttataagagttgatatttttggctgaatatgacttaggaggggattattgtggtggctgaatatattattaagatataaaggaaaaaacaaaaaaaacaaaaaaaaacaaaaaaagaagaagaaacctctccttcttctttcttctctcgacaaccctaggaaacaagtaacaaccagaattttgactccaattctagcagagattgattgtagtagtgaggtgaagaagctgaacaacttggaggtaagtatcctttctagttcatagtgttttaccatggtttggattaggtttgggatatgaactttgtgattttgggactgtagtaccaaattgagtttaaattgtgttattaggattgatttagaatttaattaagcttagattaaatgatttgagtggatgttgtgttaaaattggagaattgagcttagaacacaattttaaggttcta

SEQ ID NO: 34374 - DNA, 3320 bp, Cannabis sativa
gtttggttcttcatagcatatcagcttatttgtttatataataagtaattgatataataaacatggcaaaaaaatctttgtgtgctttagctcaatttaatgtaattaagctggttattggggtaggcaaattagctttattaatctgtattggtaaagaggtgaatgaactcttaactgtaatacatgtttattggttcatgtattttagagagcttaatgaaaatcttgtttacttaaaacagttaaaagtaaactatatatgcataatggtctcaaattttgaccattagactagatttgcatatatgtagccttagtaagatctcaaattcaatctcaaacaaagcagaattatgtcctgatattctcaactgttctttgactcccatcatgcataataatgaacatcacccattcaatttcttgtaccttgaaccatttgttgttctctaacagaacactaacattgattgttcatatatgaaaaacaaatccaagtcaaagaagcacccagtatagaattcttttgagttgagcactaaagaatagcaataaaatagagaagaatgaaaatttacaaaaatgttgcatcttcttcaaacaagccaaaatataatttacaaaccagagagtaaaacaaagaaaaacttctcttaaagccatcgaccctgaactcctgtttccaaattcccctggccaatgaaaacacttgaaatgtgttttacttttaagtagttctcatgttgacttccactatacatagtttctgtcaattctacacacaaatctaccaaataaagatattcaaggcttcttaggtattgaattccaaatggtaatttgttcagcaatttgcaattctccaaactcataactttgagatgagacaatgctttgtcttccactatcaaccttcttaagttgtccatttctacaacatagagcttttcaagctttaagaaactcccagctttaaaacatagcgactccccatcataagctcctttcaaaaacgcaagtaatactaaattgggcaaattttttaatgactctagaggatctactagcaacctacaaccagtcaaacgtaatctagacaagtttgtaaggttttgtaatccttctagtgacttttccacacgtccagttatatatagtctttgaagtaatcgaagagatgaaaatgatttaaacttcaaattgaggacttcatcttctgtcctagaatccaaacgtaatgaactaagaaactttaattcatgaatagaagaaaatagtgcatctacatgctcagctccaagtcttaggatgcctaacatagtcaattgtgttagttttcctatggacactagaaactcggtatcaccaagttttgcctcaacacagtttagttttctcaaagaagaaagagaatctattccttttaaagccttaaaacgtcgcattaccggtgaatttttataatcataaactattacatgccgtaaacactctaagcttaaaatctccttaggcagctcttgtacaaaagtatttttgaggtctagtgtttcaagatgtcgaagattagcaatagaaggtggaattgaacttatattggtgtctcttaaacacaggtatcgtaaatggtatagctttgtgatatcctttgcaaatgtggtcattggtacacttgtacaatccaacaccttgacaagtattgaccccttttgagaaaatgaaacattaatttctttggtgaatacgagcaaagaacgcagttgggatagttgattctcccccattgtatctatttttgttccttcatggacacatagtcttctaacacttttggggagccttctactactctctttattagttattgttgcgaagctttgatctgttgatttaagaagcatagtttctcttaaaatatcgtgcactcgacaactattaactcttccatctaagtatctttcagtcacttggagtaagcttctattaataagctcattgaaacaaccatttcccacttcttctaatgatcttccttcaatttcttctataaacccttcagaaatccacaatcgaatcaaaacattgtatttaatcaagtaatcctcagggaataagcttagatacatgaggcaatgcttcaagtggtaaggcaaatcatttaaactaagtgaaagtatggcttgcatgcctttcagttttttattgccatgcaattcagcttgtagagaacgctcaacaatctcgaattcatcgactcgattcatgtcttttgtggccaacatgcttcctattgccacaatggcaagaggcaatccttcacatcttttaaggacgtttcttgaaatttcctccaaatgagaaggacatggactaccttgaaaggctttagcacaaaacagagtccaagaatctttagaagacagaggatttaatgtcaaactctcaccaccaagatctttagtagaggaagaagccaccagtgcaatacgagttgtgataattattcggctaccgttgttgttattcctaaatataactttcaatgcttcccatgcatctacatcccaaatgtcatccaatacaatcaaatactttttgttacaaagaaaatgaacaatgattgtctttaggaagtgggtgtctgtggacttgtcaacttcattaggaagtggttggttaatagcttcatataattgctggatgatttgcttcagaacttcatctagcttcaacgattgcgaaacagtaacccaagcttggatttgatgaaaatgggtctttacttttaaatcaccataaactgtattcaccaaagtggttttgcccaaccctcccattccaacaactgcagccacttgtagttgagaagtattctccataagaaaactcaaaagatgttgcttttgtgactcaatgcccaccagctgatcatcttccaacaaccgcgcatcatttctaagctcagataagtaacaaggtttagttccagagctcgggccaagcccgagctctttgaacccatatctctttcgcccctcagaaatatcagtaactctgagtttgatttttttcaattgggaggcaatactacgacgagctttcaaattttttattccttgagttgtcttagataaataagcatagaatccagtatgtcgcttggaatgctcaaatctatacaagaaatcatcgatgatgtcttctgcatcgtaagcaacctctctaacttgcttaacccacactttgatttcctcatcttcatcttccgcagcatcagcagagtgcaagaaggctcttattcgatccaactcattctt

SEQ ID NO: 34375 - DNA, 3328 bp, Cannabis sativa
attatatcacttaatataaatacataaaaattataaaagttaggcaacaccgcgcgaagcgcggcttaattccctagttgaatataattgatagattttaattaaggtttccaattctcatggctacaatgagaatttatatattctaattaatgtttaaaaacttttcattttaaatattaattattataaatattatttttctcgtgtaattactaactattttttttttaaacaagacattaaaaattcatatctaattaccacatcatattcaaacattttgaaatatagtgtaagtactaggttatgtaaatagtatcttaataattacactatatagtaattacaacaattattttcaaacacaccctaagtgttgattcaaaattaacatttaaactcattttaccacccaatacaatttcagtcaattttcgagttaatttgttcggctcaactcaacccatgaatagtcctaactattagttcatgtgagttaattagcgtcaaaatcttttaatatttatacatttaactccatgattttttttgcgatactttcttttttaacttcacttttatttgtaaatttgagatgtcaattaaatttcactattaaatgttaacaaaatttgtcactgtgtatacttgtgtacacgtgacactaaaacttcaaagtcaatgaaaatatactacgtatgcacaaggttcctactcttcaaacttgtcttgtgtgtggagtggaaattgaaacttcttttcatgcattttgggggtgctcaagccttcatctattgttaagatggtggactttgtactaccttcttcttttctaacacgggttaatctcttatcgctcctacgtgcccatgaatttgtttttcataaagaggagatggaggcacttctttggtgtatatggtatcgtcgacatgcatctttgggtccatagtcggaagctattagatgaggaaggtgttttaggttgggctttctcttacgctcaatccttttgggaagcctagaaaaggaatggaggaaaggcggctatttcgtctaggagtggttgtgtgacacccgatagtccagtgatccgtaaagggaaatattgggtaagttgtgcaatcccacatcgcctgaggataatcaagtgtaatgattatgagactgtataggtattggagtacatagttgaagagaacttaaatggattgattggtactacctatatcaacaaggtgcatcttatttttggtagcccattatgaaagaactccacagttaagcgtgcttgactttgggtaatttcaggatgggaaacctcttgaaatctttctcaggaagcatgcaagtgaggacaaaacatgctgaaaacactcgtgttagtctatagggttagtcgtcattccaagaagcagtcaaagtgacgtattcgtgtataaaagtcatcatttcgtggttgtaagacctaatggaagcttgaagtgggaacgttacaggttattcgagtagtcgatcaccggagcccccatgggtcctccaccataaggggtgttcaagcttaacacgaacacgggtctgcgaccttctatttgttgcctgggttatggggtcattattcgggaccataatggtgttagtgttgcttcgttggcttctgcgactagggaaatgttatctccaaatatagcaaaggcaatggctatttggatgggtctccaattatgttttcttccacgttacaataatgtggaagtatagacggattgtcaggtggttataaagcttatgaataaaaaagaaacttgtatggaaatttatcgttctattatgagtgatatttatttaattagtaggaatattaatgtttttaagattttattttgtaatcgatcaacgaattttattgcctactagttaattaaactgactctctcgtcggataagaaaagagtttggtggcaagtttgcatgatttcatgcaagtcttttggacttgttttgattgttgcctaatgataattttatattttttcaaaaggaaaaaattagctataaattatatggacttaaatttaaaagaaatttgtatttcaaaaccgcaaacattgcacggtttaaaaacaatataaattacaaccacaccataaaatatttcaaaccgaattttcttaaagcaaaactaattaactaactctagaaatgaattaactttctaaaccgtatcgtattccctcccaaatggaacaattcagtcgtctcccttacttttgcaaatcagtcgttgattgtggacattgtcccacataaaataaatggtagagaattgatgggctacttcactcattctcaacatagtatcagagccatcccttgcgggcaagtgatcttatccgatccgcatttatacagatagtgatcatgtccactctaattacggttcaagaattgaaacctcatgattctcaacacagtcgtctcctcctgcgagttcccatcccagcagccggctcagtcagcgcatccaaatctctagtgtcgaacgattccctttctttctccaagtgccgactcgagtctcactcgagtcctacattctctgtgtctattctcatttctcaatggtctatttttttatccatcatcagacccattgttactcggatggttggaaggctgaccttgggcttagtgaagtcaaggtgccgcatgggtattccgctgcctgaaaaggtgagcccgtgacactaagcatggtaaatctttaccctccttttctaaataagaatatatttattttgttatggtgtgaactgtgaattcagttgtgtagtgcttatgaaaatatgcagggccaatttttcattatggattaggagtacgaaatactcaattcttattcatgatacatatgtatattaattaacaccatttaagaattgtatatatatgttatgaattctgaataaaatcaggaaatacacaattttgaatttttctttttcttgcttattatgaaatctgaatatctgactatatatactacatattgatttagtctttattttatgctaactttataggctgtttatatcgatcaataaactggattatgacaataaatttttacatttggagtcatttttgacaaagaaatatgtatttttcagctttgtacgctagctgtttgtttggaaatttggtggaacaactttggaattttgcttggctttctgtaattgcaatgatacatccaagccttctgctggtggcaatcatgggtttcttcaccaaggtctgatatttataataatgtgaaattgct

SEQ ID NO: 34376 - DNA, 1691 bp, Cannabis sativa
tacacacatgtggagatccattggaatataatacaatgataattagtaatatgaaacccttcccctgcctatctaatttataccataaaaccaatagttagataccattcgacctgagtagattcggcctgaagatatcaaattggtacaagaatttatagatgtattcctagaggaactttcagggttgccaccgcagcgagaaatagattttgtcattgagttagcacctagaatgaagccagcctctagggcaccctacagaatggctccttcagaacttaaagaattaaagatacaacttcagggtatgcttgacataggatttacccgactcagtttgtcactctggggatctcttgtgttgtttttttagaagaaagatgggtctctttgtatgtgtattgactacatagaactaaacaagttgacaattaaaaataagtaacctctgcctaggatcaatgatttgttcaataagcttaagggaaagatagtcttctccaagattgaccttcactcgagttatcatcaaataagaatttgagaggaggacattctaaagactgttttctgtactagatacgaccactatgaatttttagttatgtcttttggactaaccaatgctccaaaagcttttatggatttgatgaataggatattcaaggattttcttgatacatgtgttatatggtatttatcaatgatatccttatgtactctgaatcagaagtggagcatgagtagcatctacggatggttttatagcgactacgagaacataaactttatgccaaatttaagaagtgtgaattttggttatcccgagtgtccttcctagggcacattattagtaaggatgggatcatggttgatctggaaaatattgaactgtcagggattggctaataccgaagatagtaaccgaagtcagaagcttcttaggtttagttgggtattatcaccgctttgtagaaggtttttccaagatctccatgcccttaatagagttaattaagaaaaaattagcagtttatatggatataaaattgtgaaacaagctttcaagagctgaagcaatgattaattacagctccagtattagccttgccatcagatcaagaaagtttgtggtctgttgtgatgcatccaaacaaggtctagggtgcattctaatgcaagttggcatggttattgcttacacttctcgtcacttgaaggagtatgagcaacgatatctaactcatgacctagaacttgcgctaatagtctttgctcttaagatttggcgacactatctctatggagaaaagtgtgagatctataccgattctaagagcctcaaatatttcttcttaggaagatttcaatatgagatggaggcagtggttgcagttaattaagattacgattttaaaattctttatcaccccgggaaggcaaatatagtgacaaatgccttaagtaggaaaggtcctggacaagtttacggtacagctataatttctccccagttggcgaccaacatggtcaaatcaagtattgaatttgtggttggcaagcttaataatttgacaattcaatcagatttactaaaaagaattagaagtgctcagctggtggatctagagttggtgaaaactcaagaagaggtcttagctgtccaagctaaggatttttcagtgtca

SEQ ID NO: 34377 - DNA, 1307 bp, Cannabis sativa
attttaagttaatttatatatataaaaatattaatatattatttgtaatattattgttttattattatttttaatgttgggagtatgtttcaattttaagattattaaactttatagttatttttctcaaatttttgaaactttaaatattattttttaaaaaaatataaaaattaataaatagtttcctttaatttataaaattttaaaaatatacaaaacaaaactaaaaattaaaaatataactaagtagacgtgcattgcacgtaacaataacagaatatatttatatacactagaagataattacgtgcaagatatttgtttgtttatttttttttaatcttgatttaataatataatttaaaataaaaatattatttaaagcttttattacatatttcataacttaaattgtttaattattcaaaaacattacatcaaaagataatttatatatttttaaatattagttatatttaatttataatctaaaataaagatatatcaactttctcttattttacttctgcactaataaatttcagtctttaatttctgtaatattaatctcatataattcatgatataagtaacttaactaatttttggatttttatatttatttttgtaatataaaataataaataattatatatcagtatgtgtatataaataatttaatcaagtatacatatacaaatataggttatattaataaaactaaaaataatctaataaagtatatacaaatatggctatattaacaaaattaaaaataatctaatctaagtatatatatacaaatataagttatattaacagaactaatctctatataaagcaagtcaattttttttatgagttatattaccataaagtaaaacaaaacaaaaaaaatcatgcatttatatatgatctttttaaaaaatagcatatataattttgatattaattaaaaaataaatatattatttatgtacttgaaaaaaccgtatatgatttgataaagcaaacattttttattaacaactaaattacttatgtttaccatctatctcttttgggcctaagctaactaattttattaagaaatttacaccacatattgttttttcttattttatttcaattttactgttgtaagaaaaatattacatttttactgtatttttctatactgtgtatgtgtagtggttttatttttattttttttatttttttacttttgaacaacctgcctatccacattatatgtatatatatatatatatatatatatattatataaactaacaaaagtaaaa

SEQ ID NO: 34378 - DNA, 2204 bp, Cannabis sativa
  modified_base (2147)..(2155): a, c, t, g, unknown or other
atgcttgcttcgcaaagcaggcagaaaagttatgctaatctgaagcgtagagatgttacatttcaggcaggggaacatgttttcctgcgggtttctccggtgaagggtatcagacgctttggaaagaggggcaagttaagctctaagttcattggaccatttcagatactcgtgaaggtcgagtaggtagcgtatcggctagccttactaccaacgtcattggttgtccataatgtttttcatatttaatgttgaggaaatatgtttcaaacctgactcatgtcttgagttatgaagcccttgaactacagtcagacttgtcctacaagaaacagccagtttagatccttgatagaaaggaaaaggttcttcgaaacaagaccatacccttggtcaatgtgctctacacgaacagcaaggtggaggaagccacctgagaattagagtttgacatgaggactcaatatccagagctattcaggttagattttgaggataaaatccttttaatggggggataattgtaatgaccgcattttagaatatggattagtaaaggtaattagcgttaattattgatattatttttataattatttataattttattaaattatgggtctcattattagaattgggcattagagttataatttctcaattccaaagattttattaaactctaaaagtattatttgtgttatatgtgaattatgctatttttatgatttttgctcgggatgaaataaaatgcgatggatggccatttgaatcacatgggtaagtctagaacctttttcttagtgggataaatattgaaaataaatagaataccgagtttgagtggggttatagtttttgaccattttacccctaggcttaagttggctttagtttaagcaccaagggcattttggttatttggctaggggattaggtggccctatctagagtttgacagctggtttttagacacttattcagcaagtgatttatccatttagaagaaaataagaaattataaagaaaaacaaaattaagagaaaactcatttctctttctctctctttgctcgaccaccaccaaaaccagaaggaaatcagcaatattcatccttttttctggaattcagcaagaaatctaagagtttccaagtggagataagccttagcaccataattctttagtttcttaagcttgaagtttagcttgaatgtacaatttttagttataggggttgttagggtttgaatgagttaaagtttgatttttatgttccatttgagtttggtttgagttcttgctgctggtttggggatttggtgtgctggatgcacaagtttgagtttgaaaactcaagcttggttcacccatggcatgttctaattctgtgtgaatttttgaattctgttgcttggaatatgttgtgggaggtcaatatatgtgttctggaatttttggtgaggtttgaacacggtttatgcaggttttggattgtttggggaaaacctagtgcaaaccagttaaccaatttgccaggtcctgtaaaaccagttaaccggttctaggacaagtttcccgaacaatccatttcgtcgatttgtgtccattttagagccttggttgggtgattccttgttacatatggtattgtagtttcagttgtctatggcagaagaacctgtagttgaaggttggatttcccagattagggtttggggcgtgtcgtttacccgtttttgttatgtgattaaggcatccatccagcgtaaagttttccgttcaggtcggcccactcacttgaattcggaaacgaggtaagaatagcgtagaacatatgatatatatatttgcaaatgtatgcatgtgtgaaatatatatgcatgcttgttatgctctatacactaccaacacttgtacggaagtggtacagagtgcattggtatattgtacaatatttaggagtacgttatggtattaccagcataagtacgggaaagtacagtgtgtgtgtggtatagcacttagtggtacttagggtacgaaacaaaccctaccaacacttgtacaatgttggtacgtagtataggtggtacagtggttgtaccctagtaaagaacgttcttactcatttgttaagccttgtnnnnnnnnntatgggcgcctagatacaagttgacattatatgatttgttgtatgcttt

SEQ ID NO: 34379 - DNA, 3574 bp, Cannabis sativa
  modified_base (1005)..(1024): a, c, t, g, unknown or other
tatatttaagttggaaatttttcaatttcaaaccaacttaaataagaataattttcaaaatatatttaattttattttaataatcattcccttaaaattttgaaaatatattttctaaatgtagatattttgaaaatttacaattttcaaaattaggttaaagttaaaaattaattttagaccaacacaaatcaagtaatttttaataatgatttaattaaaataaatagattaaaatatattatattttaataggaaataagtaattagtttatgaattatctagatagatattttcttagtagactttttggtatttttctagatataaattaattaaataagaaaatttatatttaagttgattgtattctagaaacttaaatatttgatatttttcttatgagatttaattaaatatggcaattatatttatattgaaaattgatatatttaattctagaccaacataaattaaactaatttttccagttttattttattttattttaagtgtaatttcaaaaatgtattgctttaaatacattaatattatttgattttggaccaacttaaactacgtaattttcataatatttattgaaaaattaatactgaggaaaaaaattcttatttttgaaatattcctagggtataactttataaatattaaattaaaatttatatttagagttatctaaattagtaatttcaattaagtaaatatatgttaaaataaatggattaaaataagtatcaaatgaaaatacactcttaagaataatgagctttagttataagaacattcaatctccattattgtttctacacagttcttattttagtgagtaatcatcactaatggatgaacattcattggcaatttaatatcgtagaatctcgaaagataagtattattgtaaatgtttatattcttagtaatgtccaccctaaagtggctgctaagagtaggacttacaaggtatgaaataatggtggaagctnnnnnnnnnnnnnnnnnnnnactctcgcctaaacggaacaacgccagattctagtcttgatcgaataaaaagttactagaatggtatccattttagatgagttgaatactcgattcaatgaatgatatctttgactcccgcctaaatgggacactgtaacagtttgttggaaaccttggaaattatttaagatgtacttgttttgtatttttacatgtctaacttacttgctacatgtatgataatttttgaatgtatatgaatttatattgaaccatgttgttttcagttattaattgtagtataattttgaatgttcattgttggtctaacttagcttgttgtttttaatgggacatatcccaaaggtttgtcatccgttagacaaacataatagtgttagatctcgacagataagtgttgttggagaaatttagacaacactaaaataaacaatataataaagatatgaacagagaatgtgtaagtacttgacctagaatggcgagtattcaagctatgaacacacagacgtactaaaaataaaaagaacacaaaggaatatagtggttcagtcaaatcacagtctgcttagtccactgttgcaagggttttctgtcttgtccatttcatgttggattaatcctttatatacaaagcaagtgtcctttgattacccagagattgacttcattatcaatccgtttttacattgaattacaacatttaaattaataaaaatgtaaatagaataaatgaagaataatttcggcccaattcaccaaatacaacaacgtatgcgacttctatagtgcgagttttctgttcatattcctgcataagctcgcaggcttaagatgcatacaagactagtcgagtttgggatgtctgcgtcctgttggagtcgcttatacggacatcctgtaataagttgataacctaaggcatgggagtccttatcgggttatcggggttgttgggtcatccgtactaactcgcaaagtaaagaattgatctttacaattcccaagaagatctttgtagtctttgcatacatctaagtatatgcgagtcttaaaccgatcatcgatcctactttgtgcaaactatacgaatgccactagactctatcaaggtcacatcatcccgttgagtctggttcaggcgaggtttacactcaagaggtctctcactgacatctcagctttcctcgaggagagtgagtccacgtgtgatttttataagagtctggtatcgagtttctaggtgagaaattctcactacaacacatgcccctagtttcgcgactgacagcttatgtcatgagggaaactataagcgagaggcaggcgaaaggttgtcacaagatggtgacttttggttgtctaatcgagggtttcgaaaagacggctgtaatcattatacttaacccatttggtgtgccacatcatcaaaactcttcagagtccgtgtaggtgttgttatggataaccgttagattgtgtgactttaggcattctcttgccaagtgtctttatcccaattaatgagggataatggtatttaaccatcctgatacgaaatgatccttcatttttccctctcatttttacttctttcttcttttctctttgatttttaaaactttaaaacccacttcacatttctttttttcttttctagaaaaggtctcaaaagcttctgaatctctgaagaatatcgacattctcaaggttagtaggaaattgtttgtaactgtttcttcctttattttgagaatcaatccatattctgcgttttagcaggtagataatgcatgagacatcaagaagtatatatatgtgactttattttttgacaaaattgggtatttttctgagaaatatgagcctgaaatttaagtaatcacaggtttcagtaaggacactttgagtattcgcatctttcttgttgagtatgttgaatactcgcgagtattaggatgaacatcttgaatactcgcatatatatatatatacatgaataatttatcaaatatgaaatttagctatcttaatccctgtttagaacttaggtttttatttttagccttccgatttatatatgcgtttgtccaaatattggttgagtcttttgaatggtggatgtgtcactgtaacttaatgttcatgcgagtgtatgcatgttccttgggtcactgtgatacacccagccatttgtgacatgcgacaagttttttcttttcttgctcttttagtcgcatgttagaactgaccagatttcttgaaatggtgggtgtgtccgagtaactctatggtcatgcctaaaaacccatgccccttgggttactgggaaacaccagccattttttgagacatactgttagttgcacatgtgtgacttacaccttgagagagttagctaaattctcgaaatgatgggcgtgtctcaataccttaatattccggtaccaacatgatcattaggttattgagatacacccaaccatttcttgagatgtcttgttaatccttcatattttctgaatttcttttatgcgggtgaggtca

SEQ ID NO: 34380 - DNA, 2021 bp, Cannabis sativa
ttgtaaagacctttgtcaagcttcatagacatcaagatcttcttggttacttgatctttgacagaacaagtaaaggggtgaaactcaaagaaaacaccattgtcaagggcaaatttagacacactaagtaagttcttagtaatagatggagcttggagtaaattattgagatgtagagtataagaagaaactggggataagaaggatgcattaccaatgtgtttgatatttaggcctgtaccattgcctatatagatttgttcttggccattgtaggctgaactagtgccaagattggtgttatatggggtaaggtggtgtgttgctcctgaatcagggtaccagctctcatcaccaacagtttcacctgtggcacagcaggcctgcatttcagcaacattggctgtaggaggaaacctttgaaagtattctgagcatgtgaatgacttgtcgaatctgtaaaaacactgtttcacagtgtggtccattttgtgacagagttggcactggggcttttgattccagttgttgttttgtcctctagcaaaggagggaccaccagggcttgttgggttttgtgctgaagtgttttgtcctctaccagtatttgggccaccacaattgttctagttttgcacattgcctcctggatatcctaaaccaccatactgattaggaccacttcgaccaccaccataattttgttgctgacaactagatgaattgttgcgcgtgtaaggattatacctaggatatctggcatgagagagataagcttcccctttgctgatgtcaaggttcttggcattcatttcaattcttgcagactgagccatgagcaaggcctcaatctcagcaacagagtaggcatctttccttgtggtaatagatgtgacaaacacatcgtactctggtggaagaccattgaaaatggcctcaatgtgatcttaagcagtctgtttatgcccgattgtagttaaaaaatcaacaatgttcttgatcttaagcaaatagtcattgagagccaagcatcttggtgttgcgaagttgtgttttgtacaaactgatattagttgcattgagagctgtatagtattcatgccgagcttcccagatctgagcagtgatgtcataaccaatcattcgattggtagttttctcagacatagaagaaagaagccaagaaacaagcatgttatcttgttgttcccggtcctcgaagacatggttgacattgttagcacgttcatcaacaagtgttagaaatttaaggggaatttgactagaatcaagaaatttagataaacgactacctttaatggatgcaagaacttgatgttgccatggtaaaaagttgtgttcatcaagctttattgacagcaagtgtgtgaaggtgacatggtaggacattggcagaagaggttggggattgtggagttgagcagtgttcaatcttgctgctgctccattggaataatctataaactccatgaacaatgcaaagctctgataccatgtaagattcaaacgagagaaagaaagagaattggattgaaagagagaaagagatgtgtaatgattatcagttaggaattacaagaggttatatatacaagtggtaaccaacaactaactactaactaacaacctaactgtcaagacaaacaatgctcaacagaattaacagacttaaccaactcagttcccttaacaatattattatttaaaaattatttttaaatttcattaaaaaattaaataaaataataaaaagcaaaaataaaatatttttttttttaaaataaaatatcttataaattttgagataatttatatattttttaaataataatattaagtgtaccaatctaaatttaacacatgtacaaaagtacatatcatagtctatattgctcgcggaaaatgaatgacactttaaatttactactagtttagtaatttggagattttaccgtcaaaatttgagcttaaaaaagggtatatacaattttagaccatgt

SEQ ID NO: 34381 - DNA, 1408 bp, Cannabis sativa
taaagattgcttgaacagtgagtaagctgttagtttctacctcgatcgtgctccaccctttgacttttagccagctaaggtcctcctttacccctaaagtataaacaacctcaaccgtgtaagtcccacggtaatatctggcaataaagtcaataatttggccatttggcaataaatttacttaagagtgaagaaaaggacattttaatcttttaccttaagatttatattagttaaataaggaaaattccaaaattcatttaaagaaatataatctgattttttaagtagataaacaaaagtagaaattacactatatataggaaaattttaagagtttacctttttatggcataattaaataaaactaaggggttatgggtttttttgtttttttttacatttatatgggatttttttatggcatattttgtaaaaaaagatggaaatcccatatttgtaaggaatttttacataaaatgccattttttctgtttttcaacatttatacggtaccataatttcagttttcaattttaccatttttcttaaacttttatacggtttcattttaaaaaattacatcatatacggtttttgttttcatcatttaactgcctacacgtttccttccaatatgtcaaatttcagtcacttccttgccaattaccattatctaacccactccctcgatattatcattatattttgaatttcatattctacaccattcttatcttcctcttcttcttttttctgatcatcgagttcttactctttttttttctgcttgttgtttttgcgatatttcattgtttttgagtaatggttgttactcgatctcgttcgagttcattgtccccttctcctaagaaaccaaaaaaaaaagtctattaaagaatctaaacccaaatcagttgctcaaacttcttcaaaaccccctaaccagaaattcaaagttgtagttgttgttggtgagccttcatctggtgatgctaggaaagctaagaggaagaggattgataatgatgatgattttgtttctgttcgtcctaaaaaggtatttttgaattttttatttttctatttttcttgttgatctactgttttcatgttgtggatcattttttatttgactgttattttgtttgtttattatttgtttatttctttaattttttaggtttagggtttttttctatgttgtttttatgttgtgggtttcaatctgattatttttcaacttattattttatgttcttagttttttttgtttattcattttttatcttgttcatatttcttcaattctactctaggttctatatgtatttctttttctttttgttgatatagtgtttctgtttaaacgtagacattttttttgtattaagtttttttcaatgtg

SEQ ID NO: 34382 - DNA, 1985 bp, Cannabis sativa
ataaaatctatgcctagaagtcgagaagcttctataggggagtaggtcattacctgccaaacaagggggctgaacctctataaatctttgtgtctcctttactatttactgttcttatttacacgtggtgattggtaatcataaataaggctccgctgttagttgaccaaagtctaaattaacacttttgaatttgggaagggttgactatcattatctagttttagtaggcaaactcatgttttcgtgttatcatctttcatttttcctctctaagtaatgttttattttgaaaattttgtttaaaattcatacaggtacttataatttcaagtgcattttaattttagtgaatgagttgttagtgaataatgtaatttactgagcatgtttctgattgagctttccttaagttttgaaggttaaagaaaatgccctcacctgaggcttagatgggactagttagttagcatttaattttgtagactttcttattagctatggtctttggaatgaggtttttgaggttgattttttgctcagttgagagtttcactaaaaggcttttattatgttttggttgaacattagataatgaatgatttaactctcagggggaaaaggcaaattaatgagatttgttctgctgagtgtgatattattaggttaatagtattgatttcttgttaagattgtcatgcacccatgctctttttctattatagagttattaaaaatcagtagaatgttttaaaaaaattagtaaatgtttatcaaaaataaaataacatagtagaattgtttaatttgatttccctagcttatgttgcataatagtcttattagtggcagtatatgtaacattttaagtatatgtgtatgcttcttcttgttgaaaaaagtaaaggagagatctcttttataatgttatttttgctattatttaatttgctcatcacatatattatggacgcataagtaatttgagacaaaacacacattttttttttcttataaatttcaatcataaattttatatgacaaaatataattgaagtaataaagagtgtaaaagaactatttctctacaaattttaaaatgagaacacttttacctataattttagatcttttactaattattataatttctctttaatggtcaaagtcctttgaaaaatggatggacaaatttttttacaagttttagagaagtttttaaatacttatctataataattacttatttattatattttaatttcaaaataatatacattaatattaaattaccaaaataaaaccagagcaatcgaaattacaaatttaaatttgttaactacttatttacaatatttataattcaaaataatatacattaatattaaattaacaaaataaaagctgagcaattgaaaagtttgaaataagaatgcagaatacaattgatgatattaattgattaattccctagttatgaaataagttctctatcagaagagatggagatgatgaggctctctcctaattttccaccttttcttttttccttcatctatataaaccataaccttaattttactaattttagggatgctttaaaaaaaaaaaaaagaacttttatgtattgggccatggtagtaacgtttgagtgaaaggctttagtttaagcccaataagtctttcaaatctcagcccgttagagaaggcccatgagaagcaaccggatccatctagaaagctcccaaagcagctagtgcaaaattctgaggcggtttgtttgtagaatgtgtgagaaagtactggatttccactcatctatactataaaaacagagtcggactcgggtgcttgctcagaccaaaacagacgtaatatattctgaacaatctttctcacctttctaagttttctaaattcctgtacacaaaagaaaaatggcgatgattccaagcttgttcggtggtcggaggagcaacattttc

SEQ ID NO: 34383 - DNA, 2342 bp, Cannabis sativa
  modified_base (746)..(752): a, c, t, g, unknown or other
  modified_base (1773)..(1773): a, c, t, g, unknown or other
  modified_base (1801)..(1801): a, c, t, g, unknown or other
cttttaccagtattccaactaccctaaaaatggggtaatgttgatccttcaaaaaaagtgggattcaaacattatatcagttatttgaacatataattaaaaaatttattaataaaaagtcaaataataattttaaaaaaaatgaaacactacacgattgaaaaaatgtttataatatatatagtactccttaatctgttattaatattatcctcaccgtcttcttctatttactccttcaaacaatataaaattaccacaacttaatctgccatttttattattctcaccatcttattctatttactccttcaaacaataccaaattatcatagattttttgttaaaattcaacattgcatcgctctcttgtcactgcaattttggtttctggctcatcagttggacaaatacattgcaaataaatttatttattaataaatatatttatttttacaaataataattttattatatttataattatgttgaaagagatataataattattattttattttattttaattcactattccaaaatggtatataagattcctgtgcttaaccaaacactataatttaattaataataatctaattaatattaccatgaataaccaaacacagtaataagtttacagataatcatattccccttaatcagattattttaaatcccttataccaaacgcccctagtgtattttcgttattttctaaatttctaatggtgaatttgttcannnnnnntcatgaagagacatgtagatagagttatgtacgtagaaacattattctgatttttaatgttgcataacagttgcattacaattgcataactattttgctaacagttatttcgtctgattgaaatcttcgtctgatgcaaccttcagccaaccacccagcaatcctagcaacctttgtttgattgaaaccttcgtctgatgcaaccttcggccaaccacccagcaaccattgtttgattgtgtaagtgattgtaaaagagatattttggtaattaaaaacacataaaaagtataaatgttgtctatatcttatgaatacatttttataaataaaatgtcaatttatatttttcatgtaataattcattttttaaaatgagccaaatttgctgtcaaacttggtctctcaaaatggtgtctcactaattataaaatgacaaacagtattcaacacattttacttttcccaatacttgctaattagctaagtgtgctatttttttttagaataataagtatttttgccctttgaattttcggcactacctaattttgtcccttaaaatatatggtttgttaaaatttcttcctaaaatataacagttacatatgccccttctgctaggttctgtttctttgaccgttaaaaattagtatttctacccctaaattttgaccaatatgaaatttcgtccccttttattaaaaacaaattaattttaaaaattataatattctatttttttaaagcagttataatattatattaattcagaaaaaataataaaaattattaaaaaaattggataaaaatattaaattaattaaaaaaaatattagttttacttaaaaaatattttcaaactttactttgtttatcgacacgtattttaaaaaattaaacaaaaattattaagaatctaataaataatttaaataaactaagattttttgaagaaaaaaatcaaacttatttatatttataaacttatatcttaataaataaaaaaaaaataattaanaataaaaaaaaaataattaaaaattcantaaaaatataaaattattttgaaagaaaattataaattaaattaaaaaaaatgttatggttacttaaacaaattaaaattttttgataaaaataaagtatactcaagtttgttcccgtaaaatttagtgttcacaaattaaatttttaatatatttttttaatatctaaatgaatcttataataaaaaataaataattttttatatcgcttaattatttttaaaatattaatttattttttaatttttttaatcattcaaaataatttttctaagatctaaattaatttttaagatttagtaaaaatatattgactcctttttttattattattttgaggggtacggtttgatagttgtcaaaatttaagggacaaaattactaattgacaaagacacatcattaattaaacgaaatatgtaaaagttcaagggagattcttaacaataggggtcttcacggattggtttggtctggattttcataaattttgaaccaaaccagtataacgattttttcaatattagaaaccaaaccagac

SEQ ID NO: 34384 - DNA, 3684 bp, Cannabis sativa
ttccatccagagaaaactgaattttgaattttttatatagaaaaaaccgaccgatgctcagccctagttttagtattaattattatctccttcatcaccaccttaattcaattttcttcattatcagttatatgtatatttaaaaatattttttagattttttataggattaaagtctaaattaccctaaattgagtagctatatatagctatagctacaaattataaaacatgaaagaattatatggatgaaacaaaagagaaaaaaagagtgatgagatgatattatgtgccataaaaattctcgacaaagagacaaaatagtcagagtcccccgttttaatttcaacaatgcaataaaaaatgagatttcattttataattgttagtttatacaaaatttttaaaataaatatggatttttttatttttacatttttgtgataaatttttgatattttttttaattgattttggtaaatgaaataaaaatatataggaaaaaatgatgcattattagttcttaaaaaaatggatttaggaaaaaaattataaatttagatataaaattatttttttttttaaaaaaagaaaaaaaagagttgggtcggatcgaattcgatccgtataaggcgggtctgatctaatccaatctaagtaactagtctatcggagcgggacgggacagaacattacatgattcggatcatagctggattagatccgacccgctccatcgacactcctacttataatcataagcggtagctataaaaaaaagaatccaaatggatttaagtctttccacatgagagaaggttttgtcactgtcgaccccttctccctgtgtgtagcctttggattcaatcctaactttaaaggtctctaccttcccttcaatatttctcttcttcttaaaaatccacttacactttatgagtgtaacatcctcgggtgaaattttatattcctagactttgttggtgcgcacagaatccaattcttgatccatgacattgttccatttgtctaagtcaaggtcttccattacttctttataagtcaatatatcgtcattgtttgtgttagagacaagaacatgtgcttcatattcatagcggacatgttgtctcataaccctcccattgtgatgatgtactggggtttctttttttggaatagtggtgacttttattggtcattcaactaatggtactgaagttgatggttcagaaatatgcttatttctgatttcctcgataaccacttggttgcggtttggacttttcatatagtcatgttcaataaaaagtagcatttgttgatacaaatactttgttgtcttgatgattatagaagtatgcaccttgagtttcctctggatatcttacaaacatacacacttcagttctgggatcaagtttcccattcttggatttaagaacatgagcaggataaccccaaatataaaaatattttaaaatgggttttgtcccattccataattctattggagtgttgcttatgcttttcgatggtactatatttaaaatgtaagtagtcactagaataatcatcaataaaagtgacaaagtattcataaccacctcgagcttgaatattaaatgctccataaacatcagtgtgaataagcaaaagttgttctttggctctattgcctttcacaaatgaaggtcttttaaccatcttgccttctagacaagattcatataccggaagagtcctaatttttagttctctcaaaggactatcctttattaattggtttattctgtctaggccaatatggcctaaacgtagatgccatggatacgatttatcatcattagaaaccttttgcctctgtatgtcttttaccttgtaattagttccatctaatgtgtactttccctaaataaggtggccaacaacccaagatgttgtttgacggttatcagcatgtctagaatctaggttacatgtgtgctcgttgtggaacacagtaacctcaaacatgttacaacgtgccttcttcctcttcctcaatctccatttgcaatttggatccttacaagttgcgtaaaacacatctgtgccaaacatcctcactatgaacttaaaattcaatttcaatgcaaacctttccactacttgtttcaattcagccttgtttgtgtacaacttgtcagtttgtatttttcctgaaggcgtaccactaagagaagttgaataaatattattttcttctatgttttccttaatctacataagagatttgaattttgtataaacttcaaaatctgatggtacaatactacgagaagaaacttgctgactactaccagtgcctggtatttggagatttttactaggaggtcttctttctcgctcaacatgatggttgcttcgaggtatttaaaacctcaaagcaggtactctataaattcattatctatgtaaatctatacatatcaaactaaatacaactaaacctaacaataattagcaaaaagattgcatatctattattttttgcaaggatttaggtcctaaatagcagtttcaatggttcacttggtgcaaggtcggtgtgtgtgggtgacgaggggagctcaaacaaagggtggtgcatgtgtgggtgtgatgtggtcttccgagagagagaagagataagagagacagattgttgaaacaaaatgaaaaattggtttttaactatagagaggtattttctcaaaaaaaaaaaaaaaaactataaaggggtataattggattaatgtgttcaataggtggtgcattaaaagatcttgtaccatatttaagcaaggtatatcaaatttcccttgtctagtaacaccgactgtgctacaccagaaaagtgtcaatagtttggaaaatatgctttaccagggatgaaaagtgtcacacgagaaagagtcatacataggataggagattaataatctttctttgggacgattacatagcatagcagatttcttaccagaaaatcagggagaaagaaatcatggggttcgacacgttgggtgatctcgagcttaacataatcctaagcaacttaggagctgaagacaccgctagaacttcttgtgtcagcaagaaattgcggacatccacctccgatgacattctttggtcccatttctgcgcccaagagcttggcctctcacaaccccttgatcctctcggcaatccagtcgcttctttcaaggtgtgcaaaactcagcaaatgggtcagaaatcatgttttattttcgtatctactcgttcagtttgtgtaattttggattgttttttgttatacctatttttatgggtaactgtaggttagtgatttactgattttggactctgggtcggttttattgtgttcccaattgatggtaaagctgttgaattctatcttgggttcttttggggacgtaactgctgaagctacatatttagttgagaagggattgtattggttgcctaatctctttttctttacccggatatgtttttggaaagaacattgacaaactgacttaagacactactggagggactattgatttcattttatattgactttggtttcacaagtatactattttgtgggactttacttgttgagggagttgagtactagtctaggttaatgacacattttggtttaatatt

SEQ ID NO: 34385 - DNA, 1768 bp, Cannabis sativa
attcaataataaacatataagaataagaatatataaatatacatatataatatatagatatataaataaaaagtaaaagaaaacaaagtgttcttgaaattgtttcagccagataagtatatatataaatatatatttagtgtattgtgaccttaaaataatttaagaactttaacaaaatacttacattagggattgggcagagactcgtgcttgaagcttgggcagagactcgtgctgataacatgttataaaataatatagaataatataaaatagatatgaagaaaagaagaagaagatgaagagagaaagagaaactgaatgagaatttttcagttgtttattccaatggggtgaacctctatttatacaaaagtattgactaaaggatgagaaactaaattaatatgtaataaaggaaaatacaatcaagcattaatggtgataattgatttggtgatttggacatccataaataatattacataataaaaacttatttctttatctacatctctctcatcatcccatccaaaaggagccaccatgcaccttcctccctctatttcttcctctagatccctctcatctgcccaaatatcccgtcaccctcaacccacccattcctccgtggaagtccaaatgtctgccatggaagcgtcctccatggaagcttgtcgaagactcaaaacgtcccactacaaagttcgaaggtcggagctcgtagcttaatgagtaagtgttttttaaaataattataaaagtatactctatttttcattagattttatgtggttgttgtttgtatttgtttggttttgatgtattcttcgctgaaatcatgagatctaattttcttaagtattttatgtgttcgtaattttctcgaagctttattgatacgttctcgacgagttctcgatgcagatgtcctaaggtcagggaagacatttatcaatagttttttgatagttcaagttttgcaaaaaaaagtggaatttgtttactatcgattgattatcgataggtttttgatagattatcaatatgagtgagaattcttttcgctgtcgttatcttggttattctcgcttgattattgataaattattgactgattatcgagaagttctcggcatgttatcgatagttcaagttttaccaaaaaataagaaattttgttattataaacaggttattaataggctctcgagaagagtgagaattttattttttttgttgttatgttggttattgttgcttgattatcgacatattgtcgacaggttctcgataagattgagaattatttttttagttgtcatctttggtgattgtctactgattatcgatggattcttagcaggttctcaataggatttagtattgcattttttgtttcatgtttgcattttatttctattattattataatatttaacttttgttggtatcattgataagttgtgtttgtttccctctgttgtgttatgtctgtttgttgaaaggttttcgattggttgtcgatatgttttcgataggattctaacatttattttaagttttttcttcaacagtaattgattgttatgagagggttatttccttgcctagatgaagaagtgtatgctaggacaatcacatacaatgatgttgagatagtgattgagatgggtgttgatgagatgcatcatgaatgtgacgcccatgaccttactatttttgaaagccaacctaaaaaagcagtagaataaattaaaataac

SEQ ID NO: 34386 - DNA, 2380 bp, Cannabis sativa
aatgatgtgtaagtggtattattgtaataaaataaagatgataagtaaaaatgttgatgtaggcgtgtaagggtaaaacagtaataaattgtgcaaatcaggtttttggtgtaaaaatttcatttgtgtgtgtataataattttaatgatattaaatatctattcctattatcattttcacttcttattcctttatttcattatttaccgggttaagatataaaataacgttaaatctcaaaactagataagttaatatcctccctcccttttaaatatttagtaaaatgacctaactgttaaaaatttcacaataaatgtacaattataaccttgaaagttttatcctaactttctaccctttctcagtctcttatcttgtttgtggtgtactgatttattggctatggtataacataaagaaaagaaaaagagaaaaaagaatgtagaaatttatttgtttttagtataattatttctgactaagatagatttatagtatattaagttttcactatggtatatttgtttaagtttgtggtatatggattagggatggcaaaacgaatttcgacacggcacacaaacacgaacacgatacaaattttacgggttagggtcgagaaaattagacacgagtcgaaaatgggtcgacacgacttgacacgaaataaaaagggtcaaacgcgacacgatctgcataacacaaatttgacatgtttgacacgattttttttaaataaaataaaataaaaaattattaataatactataattatataaaactatatatttagtgattcaatgttaagttaaaaaaattttaaatttaattttttttaaacatgaaattaaaaaaaaaaaaaattttgttatatatatatatataacaaactatatacgcataattatatataagttttctaatagaacctaaatctattatttttctctacaactccaatttgaataatagtaaaatgggtcacagtgggttgacacaaacacgacacgatttttcataggtcgaattagggttgagaaaattagacacaagtcaaaaaacggtcaacatgcctgacacaaaatgtaaaattgggtcatataaaatatgacacgaacacgacacaatgacacattttatcacccctaatatggattatgtatgctatgttatatattgtgaaaaaaaaactcttaataaaatattagtttaaacttatgttatatatattcatattactctaatgtatatggtttatatgtgatatgatatattacgaagaaaataaagaaaaaaaataaaattaaaagaatagaatattactttaagtgtaacgtatatttattttgcactatagtatatcttttttatgtgttatagtatattaagaaaaaaaaaataaaaatcttaaaagttgtatatgaatttaagtgtgtggtatattagttttatctgctatgatatataatgaacgaaagagactaaaaaagttgtgaaatattagtttaagtttgtagtatagttatatttcactaggatatattatttttatgtgctatggtatataatgaacgaaataaagaaaaaaaaacttgtggaatattagtttaagtttatggtatagttatatattaccggggtatattgttcttatgtgttatggcatatcaagaatcgtatttttttcactatggtatatatgtttaggttaatattggtatataatttttgtatgctattgtctatcgtgaaaagaaaaaaaaactcatttaataagaaattagtgtaaatttgttttatattcatgttgctctaagttatgaatttgtatgtgatatggtatatcatgaaggaaataaagaaaaaataactaaaaatagaatattattttgaattttgtgtatatttattttgcactaaggtttatttttttttatgcgctatgtaatatctttagagcacactataagattctcaataattatgttgattaggtgccctttgttaggttttgtgttggttaattcctccgttttctttgtaactgctattttggtttctaacttttttttctttcattcttttcttcattttcttttaaatttcactccaactgttcccgcccatgctcctgctatcgccaattgccttctgcttctacttttctagccgatttttcgatggatctactcgccaactcaataaattccacgctctactatctccttacctgatgtcactaataatccacccttttatcgatccaatcatgtgcttttgttccatgttctcaccacaaggattgtctacaaacctggttttgtggactaaatgtctggacattggaaatgatgctttgttgggttttatgcccta

SEQ ID NO: 34387 - DNA, 3942 bp, Cannabis sativa
atatatatattaaattgtcataatattataatatataattaaaataataaaattaatgcatgtactatatataactaaattaattaactctatgagagagagaaagagagatatagtcttgcattcactatattttaaattataaatagacaccacaataaaattcttggaagagtatttcactttattaatctttagaaatattacacaaaatcaaacttgaaagaactagtacaagaaagaaaaaagatattaattaattaaaaaaagcataacacacgttgcccatgaaatgagcaaattattaaaaagaaaaatacatgtacagacacatatacatatatagacacaagatatactgaacccattttttttttacatgtcaccatatacaaaataggacaacacataattattagttatatattgtacgacgtataccaagtaaatatgtatgtttgatatgcatgatcccaacacatatgtattatataagagaggaacacagtaattttatgtaaaataataacagaaaaaacaaacgataattgatgatatgaaaccttacgctgattgagaaacaatatcatcatcatcatcatgatgagtacgtagtagaagtaattcatcacgaacgtttgtcctcaaacatgttgccatgaatattgagaggattgaaagcttcaatctcatgagagcagttattgggatgtactatcatcatgcgacaattacaattgaatggggcaatcaatgaggaggaggaggagttgacacttggcatttgcaacacctttggattatgagaatagtgctttcgtgctataacaacagagttaataatttcatcagtgggatgaaacacagaaagaacctcaaagccttgtagatcacaatctgtatcaataactgggtacaagaaaactctagccccatgagcactcctaagcataagaagtgagcctggagccatatacttgcccaaatgctcaatcactttcactttgtccttcttgtccaaaccaacaagagcagccaagaaaacgacatcgtattggctcagctcactagtaacatccatgacatcagtgcttttgaacaccatccgtgtggacagatcatcatcgttaaccattaaggcactcgccttggaattggctgaaacatcgatgtcgtagttatggaatgtggtttttgtgaggtgatttgaggccagtacaatggacgtgagaggcaggggaccagaacccacgaaagcaatttttttaggttgtttgttgtttaaatgttggcttagaatttggtactcgagatgaccaagctttaggtaattgttatagtaagggaagactttgagattgtttagtgggtttttgtatgaggctaagatggttgagaaatgagactccaaaagtccctctgcctcaccacaaagcctaataaggttagaccttatgttttgaaccctcttggggaggtggtcaatgtcaaattttgggcaaggtggtatacatgtgtggactaattcagtgaagagagtgtcgacatcttttgaaggctttagactctcgaggtttgagatttgtgagtacaaatcacatattttagttactaaattattaataataacatcttcttcattatgattcttctgctggagagacatgtcgacactaggagattatttgggaaaaataaaataaaaagaaaattagataatggagatcaaagagaggaggagagagatagagagttggtattatttgtggtgcatctatgccctttcttagggttgatatttatatatggacactgtgggtgcctttcctcgccctaagtgcttggccacatcaatctcctaatattgtaatacaactactattgttagttagatatatgtatatatattatatccatattcatatttatgggctcataattatatatatacctttcaatattaaaaagaaaatacatttacatattattgtaatgcaactactattacatttatatatacatatatagattctcgtgttcatgatgttagtgctaataatatatatacatctatataatattcatgtgctcatgatgttaataaaacttagtgtattttttttttttaattagtgactgattctaattaagactaacttttagtactagcttgtatacttgaaaaacatatagtacaagctagccaaggtgtagtacttgaaatgtccacatacttagactactcatcattgatcaatcattataaataatttgtttatttttataataatcgtgtacatttaatccaataattatatgacacacatcaacaataaaaagtgtttagtgtgttgtctattagataagtgggatgaacggtttggggttgcttttagaaaagttaaaagtaccttttgaaaaatttattacttaaaaagtatttggtaaaataaaaaaaaaattctaccgttttttaaaacttaggctaaaattatagtttttagttaaagtgggcccacacaaacttttagatttttgcttttacgagaagctaaaatgtgggttaaatgaattttttagttaacctaattacactcattcaaattaaaaaattatcattttactgagtcttttgttttttcattcgtaaaatcaacccagagatatcgtagttaatcgactacggctcctcatcgtcaatcacaagagtcttctccgtccccgatcacccacgccgccgttccccaactccgtcataaacagctcctgcacaatcaagatttatctcttaactcttcctttgaatgccatggaaatatattttaattttcttttttttttcctgtcaaatcaatttttcttttcttttcaattcccttagtctccgtgtaagagtcaaaagggttctgattaatgagtcacaccttgatctgttttcttgaatcaattcctcaaaaataatttgaaattttttctaagctgctcgagcttttttatggcctctggcaaagatagtgacgattcatctgaaatagcacattacaccacctcctactgaagagcacattacaccacctcctagcgaaggagaacattgcgccacctcctactgaaggagcacattatgccacctcctgtcgagggagcacgatgcgtcacctcctactgaagcagcacatgtaccacttaccaaggaagcacattctgtgtaataagctcctctttatatcaactgcgaaggcgcaagagctccctaactaccaagtcaccttaaggaccatattggcacaaaccatcaagagactcaactggctgcccacatgtgcccatgaccattctagtttgcctagtgcgaaaggcatgtgctcttagagttattccaaaaatttagtcaaaaaataataattgaagagatatctattttttgaatgagtttttattcttattttacatcttaaacttaacttgactacagatgggataaagtatatcttgagttaagctactttaaaacctagagtgtaaacctatataaatgagacataatttgtaaagggactctaactttcattctcacaaactctagagaacttttagagaacataattctagagaactttcctcatgcattgagatcaataacaactcaagtggactagcctactaccgacaaaagggggtgaacaactataaaattattgttcatcttttttaaattctctttcagtaaaccagtttactttaattaatgtacttgtgttcatctttcttgtttacgatctccttagatcagttgacaaaaaatcacatcaacaacttagattcaagaaatataatgctaatggatgagactcatgattatattgtggccttattatgtgcatgcatgatacatgttatttagatgaaataataatatatataaatgtaacaccctaacta

SEQ ID NO: 34388 - DNA, 2420 bp, Cannabis sativa
tataattgacattaaaccaaaaatttgtaaaaaaaccaatatgtatagaaatatataaatacaaagtcatcttctattagccaaatttgactaaatttagacaaatttaacattcaaataattctttttaacattcaaatcattttatttatgttttcctatctttgtatattaaaataaatattatatatataatgaagaaataccataaccaaaatgccaagttctcactgatttttaaacatatttgtagatgtagacagctgacacaattatatcatgtagttttgacatgaatcaaggagtcagtataattttccagaaggaataataacaagggaagtatcaaaacatttccagaatataaaaaattcattaaaaaatcatcagtgtaatttcttttaatacaaatgaagtgcaaaatgcgttataatattacctgtgctgattgatttcagtttagtggcatatagccgctgagcattatcacgaatagcaatctcaacctgagagaaaagatataaatacagtttacatggataaatggagaatgaaaatatatactaccaaaaagatataagaatacatccattgtatacatgtaaggttttgataaatccaaatggacaaaactaatttcttggacaaaagaacttgacaaaaatgttacatttactaacacattaagggaaaagaaattgaaagtacctgggaatcaatgactttaaatactcgtttccaaggtaaaaggaaagacgatgcatctccaaaaacaagagtcgaaacataaatcaacttctgaaatgcctacactggagaatcactaataatgctcaagctctgtatcttcatccagtattatctgatatccaatagaataacccataaaactcaataagtgaaacagctgaaagacctacccgacgttcctttaagagtccatcctgatcaccagtctcaagcctttgcctaaaaagtcttcgaccaatctgaaaaccaacaaggactaacccagtttcagggatcaaaaatttaaagcaattgaaagaaacacacacaaacacaatcatggccttgagcaaacttaaagtcaatgaagctaactacatcacacgtagcaattactgagtacctccatatgcattgctgcagctgcctcaggatcatcaatgcccaaggcattcttgaaacttatgatcgtgtcaacttcatttccattaagctcttggcttcctgtcggaagaatagacgaaacaaatctggaaacggaacaaaaattttaggaaagaattttttatccatttgacaaacccaaaatgcacaagttagacaatacaataaatacctaaaaaaatgatcaaatacagtaaatatattgtatgtatataaaacaatacctttcaaacaaagaaataaaggcaaatgatgagattcactattggagtgactttgagaattcaaggaaggaagtaggagaagggttattgtttccaatctttgaactggatcccctgatctggaatatatttcaacaatgaaaatcaaaagacaaaaactataaccagaggtaagaagaattgaaatttaaagtacaaaaatcttctgtaaatatttattaaaccttgtgtgatgtggtggatcgtctttagatcttttcttgttgttttttatgtcacatattgtttcaagcatgaactccatctgccattaccaagccagttaaaaaaaattcatgagaagaataagagctattttggaagaaaagtacaaacaaactaacccctttactgtttatattttcttggctctcttgcgaggatgtctttaactcaatcactctattctgaatactgagaataaagtttttcatggatagaggatcatcggcccttattttcatcccacagcctattcagtcaacaattcctgaataattgactaaattgtagacacgcacacaaacacattaagagtcatgcttacattgtaaaactgtcaaaattgtagagacatcaatctttgctaaacgccgatgaagactcctaagctcagcgccgatgatattgttgtcaaggtcgcagccaaactataataaatataagtgattctattccacccaaccaaaggaactgaactgaagttgatttgagtctgaaattgcacaacccgaatctgtcaactataataaatcaaaacgcaaaatagaggcgtacctgggagaaaacggagaccggaaccacagccctcacctatggcagatgatgacgacgatgagggctttggggacttcaaatttgctctaatgactcctgttcataccgcctcctctatttccaccaatctgaagaccagctcctccactgatttattctccgacaatgattggggcgacttcataaccattccttctaatcagatca

SEQ ID NO: 34389 - DNA, 983 bp, Cannabis sativa
cataaacgacgtgccgtttctctaatgtaacaactcttattaatatagagttagttttgttacatttgattttttttaatcaattttattaatagataaaaataatgacatgaaatttaattgagacatttttttattagagatcgtttggtaaaaaaagaaaaaatgaaaaaaattacatcatcacagataattttaagaacacttatattcaattgtatctactacatagaagacacaatagtagaaacaacatgttcattcaatctcgtagtttgaacacttaattattgtgcaaagtaagtaattgcactactaacaaccccttcagtcatagaaattttgttattcccaactactaatagtgatttaatgtaagccatcgaagaataaaagaagaacaaacaataaaacaaaacataacaaaatcatattacagagacaagactaaaatactcaaaaccatattaacaagacaagactaatcatagtagaaaaatacaaccccgaccaagccactcttaaacctaagaaaggcctacgggccttccgagagaagtaagacaacctccaataattatagatttaagaacgagaaaccttattttttttttctttctatgatatttgttttatatttttaagttacattatgtatatgttttttttttttttttttttcacgtggcatcatatcatgttatatagtatcatactaagaatttttttcttatttctcatggaattccgtaccttgtttgataaagaagaaattaagggaaaaatatttaaaaaagaaaaattgcactttcatttattgagaaggaaaaatatcgtggtatcaaataagataaaggtaaataaaagaaaaaaaacaaacccacgtaacaaagaaaaccactacataattataacaattaagatttaagaacctattacacatagagaaatacattttaattggtaaacatgattattattag

SEQ ID NO: 34390 - DNA, 1773 bp, Cannabis sativa
agaacctgcccttggacccagaacctaggacctaactatcgggacccaaccccaaacccgaacccaaacccaaacccaaacttaggactcggcccaggacccaagaccaaaactggaacaagatagggatccaagatcgagatcctaatctggacctgaggcttcgaccatacctgtagtcagtgtttgaatccaagacccgaacccagacccgtaccaaaaccgtgatccagacctaattctggacacagaatctaaccaacactgggacaggaactctgacctgggactgtaacaggacccaaactcaaaccaaaatccatactaggacttggacctggattgagacctgtgacctgggacataaaccaagactgcgacctagaccaagatcgggacccattcccaaacctagacccaaaaatagagattagacccaggatcgaagaacgaaactcggacctgggacccaaaacccagactcagactagtactgggacccgaactcgaacctaaacccaaatcgagacctggactcaaatcgggacccgagacctgaacctgaaccagaacataaacttagacctcgatcgggacctaggagccaagcatagatgggggacccagacccaggaattgggcccccaaactgggaccaaaacttggatcgagatttgggacccgacccagaaccaaacctgaacctaagacccacctcaagacttgcgatccgggactagatgcttggactcgacccgtaccccatgagttgaaacaataactgaaacaaaaagtggatcgggacccaagaacaggaccaagacaaggacttggacccagacccaaaactatataaggactcggacccggactgaaacactgacccacactcggattctatgtcttggttcgggatctattttgtgtctgggttggggtatgagttttggtccgagtctaggtctgggtttgggtctaggtttgggtttgggtcaagatctcgaaccagatcttggtcccaagtttcaatcccggtgtgggtttgggtccaagttcaggttcttatccggatccctatctaggtctgagtctatgtttgggatcgaatcccaaatttaggtccaactcctgatatcggtcccggtctagctacacgaccgtctccgagcccgagttccagttttggtttgggtctagggctaggtctgagttttgttctaggtctgggtctgggtcttcgtcacggtccaagtcttgttccacggtcctggtcctacagttcttgtttaggttccagttttgggtctcgggtctaggtctgggtcagggtttgggtgctggtctgggttcaagtcctagtctgactcccatatccaaacaccgactacgggtctgttccaagccctatttctaggatctctagtcaagattcggatccctatcacgggtcccagtctggttctggttctggttcaggtcttacgtcccaggtctgattttgggttcaggattgagactggggtgcggttctaggtcccggtccctgttttgtcccgagtctggttccatgtttgggtaggagattggttgcgggtttgggtcccaagtctaggtctggattgggatccaggtctgggtcctagttcgtgtttaggtttgagttggagtctggttccttgtctggttacggtttcgagtctaggtctaggtccggttacagttccaggtccatgtcctagtttcgaccccattctcgggtcccagtctacttcc

SEQ ID NO: 34391 - DNA, 6930 bp, Cannabis sativa
aaaatgtcaattttgaagaagctcgattttacaagataaaatttgtttgcatattttgacgactttgtaagcaaaattagatttggagatgaacataaaagttttagatctcaatctcaatattttaaaacatcttgaatcatctaattctaaaatatgttaaaaaagttatggtcgatttactaacatagtacatgacatatttttgcatggatcgtgacacgaattttccaagttgctcgtgtgattaaaagattgataattattaaattataaaattattattttatctttataattattttttaataatatttgttgagggtatttatgtaatttacaataatggaaggaaagttccaatccttctattattagagggattacaattacaaattagagatttgagtggatttgctatcctctcacctttcttttctctccttcaatccctcttgccaaataaaaggatttgttatctcctcccaagtctcacctctctccctcctcttatctctatccctccatttctccctcctaccaaacatagtgttagttagtactattatagtgtcacataacataagtttttcttttttaattgttgttttaaaagaaataaaataattattaaaatagagcgcgtgagaatatatttcaattgaagggaatgtctattagcattgggtttgggaagtcacaagcttctctctctcttcactgaaagctccacaagcacactaaatacacattttatttatttaattaattaattatttatttatttacttattttacaaatttatttaataatttattttatttttcatttctttaactctctgaaacttactctacgtgtctcccaaatcccttccccctagatccatgtcttccttcttctagactcggatcagtatctagggttttcaatatccttctacgcacatttttcagtttcttctttcactgggttcgcttcttggacggaccactgcatttactgctcaacaacagccgttatcaaggtactgtttaatgaagatttattatgtttattaatgaagatttttgcattttggtttcggaattgagggtttcacctagtgtgaaggactgtgtttagtttttttacccgttcagaattgagaactagcattctggaaagttgtgtcatgactcactttattgtttgaagattttgaagattcttggttgtgggttggtgaaatatgaggttatttttgcttctcgctaaataacattgataggttgttggaaatgagtctctgtggttgacgggatatgcttgtgggatgagttgaattctgggttttagttggacaagttttgctctgtatcttttgcaaatgttatcatgggtttttggaattgagttcagggcttatgtgtatgaaagaaaggactatactgtaatgtgtaagagttgagggggctaaacattggttccaaaggaggagggtcttcctggggttggtcttggtgcgtgatgggttgcatctgttgcaagccctctgctattgatgatagcaaggagagccccagagagcggttatcaagcaaggcgtcatctgatttgcgtgctgctagggtagcttcatcaagaagagaggaagtatatcgagccaaagatcgaaacgatagtaataatggaagatcaatgttgattgataaacaaataaatgggcctgttcgattacatgttgagaataatgagagaaagagggagaagatggaatatttggttgctcaacatccagctacaggtagcattattaaggcttctgaaggggagcaaattgcagcagggtggccgtcttggctagttgcagtggctggggaggcgattaggggatgggtgccacgccgtgcagactcatttgagaagctggataaagtatgccccttcacattaagctgtatagagttgctattctggtgttttagatattattttattattattatcgatgaacaatacaagaatatgttgaaattggaatactttaaaataattttttcttgcttatgttaggcaaacattcaacttgctccattacttagatttatcctgactagagggagggaatttcctgctcccaattaatttatgtttacaaagaaactggcagttacttagtttaatacagtcaatataatgcttaacatccttaaattgctcagtgactgatctagtgctgtgtgttgacttggtcttgcatagtacattctttgtttctgcaacctaggtatgctattctttaatggtgctcactttagttatttgattatatctgtttatgcagattggccagggaacttatagtaatgtctatagggctcgtgatcttgatcaaaagaaaattgttgctttgaagaaagtgaggtttgacaacctagagcctgagagtgttcgttttatggcaagggaaattcatattctacgtaggcttgatcatccaaatgtaataaaactagaaggtttagttacatcaaggatgtcttgcagtctgtaccttgtatttgagtacatggaacatgacctagcaggtcttgcttcacatcctgggttgaagttcacggaagctcaggtatgtatgcatagaatgttatgttttgtattactacagtacatagtcatatttttgttcaggctgcatatctttaccaacttaagcataaggagttgattttttatgggctgtttggtatgatataatcttttcatgggaatggtaatcttctacattaaccatgtttagtatgaggtttttttatttttaagtataggaaaattagtactttggaaataagatttccctctattggggtaatcttaaatacttccaaaaatgtgggttctatatattcccttcaatcttaatagaattgacttaatatattaatattttttgtttaacttttcacaacactttatcatattcttttatttatccaaacaatataatccaatgaacagtaagctaactggatattcccttgcataaccaaacacagtaataagtttacaaacattcatattctccgctttattattccaattaatcagattattttgaacacctcataccaaacgtccccttaattaatatatgttaattagcttggaactcaaggcatttaggtatagtgcttattaactatgggctgcctttcctgatgtttagttcattcatttgcaggttaagtgttacatgcagcaacttttatgtggactcaatcattgtcatggccgtggggttctgcaccgtgacatcaagggttctaaccttcttattgataataatggaatattaaaaattgcagactttggtctggcaagtttttttgacccacatcaaaatcagcctttaacaagccgtgttgtaactctttggtaccgtccacctgagctcttacttggtgccacgtactatggaactgctgtagatttatggagcactggttgcatacttgctgaattgtatgccggcaaacctattatgcctggaagaacagaggtactaaagatatttttcatttgaaactgttgtattttttaccctagaaaaaattgttgttcacttgtcagaatctctctgtactacattgtcgttgaattgcttctgaaatttatttttttagtaattgtaaatatggatatctggataagtgcttcagcacgaaattgttgtcataaaatatgatttctctctgttaaaacacaaatactctctctatactacattgtcgttggattgcttctgaaatttatttgtttactaattattagctgatgtctttaataattataaaattttgacatgcaactccactgggttttgcttagattttttactctttttgtctggatataaggtgcttgtaagttgtatgattgcttataaatcagacactgaaacaaacaagtctaaattctggtgcctgaatcggaataatcaatgcagaaattttgatctagtcttttagactttgcatgtatagggtcagtttggttccttaggtctttgaggctttctcgcatttccttgtaggtggagcagttacacaaaattttcaagctttgtggatctccttctgaggattactggagaaaatcgaagttgcctcatgcaacaatatttaagccccagcaaccctatagacgctgtgttgcagatacctttaaggagttccctgcaccggctttagcacttatggagaccctgctttccatagatcctgctgatcgtggatctgcagcttctgctcttaagagtgaggtatagatctctcattgtgtgaaccaatacacaaaatggatggtcaggtcttttttggtgttgttttagtgttttcatgtgattgtcaaaacataaatagttattaaagtcacaaacattactttgttttctattctgactgttcgattggtgttttgttttctagttctttacagtaaaacctcttccatgtgatccttcaatcttgccgaagtatcctcctagcaaagagtttgatgcaaaagtacgggatgaagaagctagaaggtgtgtaatgacttaaaaggattttattcttttctggaaaactgatcaatcattttacttttgctctatattagttataagtcacacctcacagcatcacataatattacaattcatatttactagcttcagaatgaggtacttatgatattgatgtgtgtgtgtgttttcacttatagaaattattatgatgaatatcattggttttctgagccacaacttagccttaccaggcttggtttagcagctcaatggaaataaatatatgaagtctacagtttgctagttgcaatttctttatgtcttgtgcttttataaagtctagagattgcaagtagtgacactttatcgttgcacttattagtgtttcaaatttaatgtcatttggggagattgtgcttgtttttatttgaattattatctgatgggagtagtttaaagattattttagtgggtggtttttcaataatattttttgagttgttttggtcaaattaatttagtagaaactctgtgaatgtattttcatgtcatatgttgtaatttgtgattgttctgacaatcctatttttgctcggactaaaaaagacaaggagcagcaggaaacaagggccagagacctgatcctgagaggagaaccagagagtcccgagccattcctgctcctgatgctaatgctgaattggttgtatcaatgcaggtattatgtgaagaattttctatggtcaagcattcatctgattctgatgccactatgaactatagaaattcttgatatcattatgatttacagatcattcatttggaacagttgaatttaggacattaaattattgcatctaatttttgtttattatttatgcttgttttttttgctaaatttttttctatgtacctttctttcttggctttgcttaaaggctattacccaagaggggtagctcaaatggtcaggcatgtggtttgctcccacaaggtctgaggtttgagttccttcttgggcacttacatagcaattgctatagttttatatagggttaggtggggatcctagtttaaaaaaaaacagagtaaatgaaagtactgtgttgacttctgcattacagaaaaggtgtcaatccaattctaagagccggagtgagaagtttaaccctcatcctgaagaagttgcttctggttttccaattgatccacctagaccgtcacaagctgtggaagtaagcgttgatcagcagagctttaatcacaagagagcgtcacactctgggccattggctcatcgtgctgcatgggcaaagacttctaagaacacagatgaggctccaaaggtctcagtcgggggtgacttgtcaactatgtcaggtctagtggcagcaagaaggagtttgcttgctgaagactacagagataggtctagttcttcatatcctgaagtttcaaaagtgatgggaagatttccgggttcgttcaaggagggctcagattccttactgcaagatcagaagcctcacatacaggctgttggtcctaataaaaaagaagatggacgacatagcagtaaagatcctattcttgtaagtagcttgaattttccctcaattcatcaaatcccataattatgttctgcttattattgtgagttcatttggttatagtttattgaacgagcatcttcaaaattaaaattgctaaagcagtcttgttagtggtctattttaagaagttatatcatcattaaaactagtaaaacatttttatttatttgctgttttcttaatgctggatgtgtgattcttgttttatatctatagattggctatggagcaaaaggtcataagattcattactcaggtccattgctggtcccttccagtaatatggatcagatgcttaaggaccatgatcgccaggtccaagaagctgttagacgagcacgcattgacaaggcaaaggtcagaaaagtccaggttgaagggaaccaagcatcaagcaattcattgtttgtttctggtcgatgaaccagttgttgtagaaagacagacagagatgccagaaagacgaagcaaagatcattaggaaaatcatcgttaaataatttgggggcgattttttttccttgtgaaattatagttagtcattggttgggggctgtttttttttttcttcattgtataggggctttattctagaggatagtaggtggccttctttaggtaaaaagtatctttctctccttctccttccactttgcagttgttatttcgtagatgtggccccattattcttgtagagcttttttattagccaagagctatagaatatttgggaaatatgacgttttcctttttttttttttttt

SEQ ID NO: 34392 - DNA, 1372 bp, Cannabis sativa
agaaaaaagtgcatattagaaaaattgtctagtttgtctttaagttcgtacattacatgtataagtacaatagaaactcatgttattatgaatgagaagttcaaaaactagacaaattcatttattatttggcatgactagttaggtcatcccggtttaatcatgatgcgtagtattatagagaactcacatggtcatttcttaaagaaccagaagattctattattctataatctggtctatgtttatgttatgattatacatttcttaagtctgtcgactcacaattactgtttacatgtgtaggttagggcaagtatctgcataaaagaacaaatagtattagtggccctagaatcaataatccacaaagatttatcatcttccactaagttaacttcaagaacaaataaattgtattaatatatcttaagctcgaaatgatacttgttataatttttcttctagtgtcccattatgcaacaatggaaacactagcctttcgctttcttgtccttggacttagggttggctttgttcttcttgggtttaggtgccttcttgccttttggtttgggcttgccactgttgttgtccttaatgtcccatttccttttattatcaaaagaaggagagctagattttgcttctactatgtttgattcaccttccttggacttatccttgttaagattttcaaacaaggccaagtcgttcaacaattgaatcatgttgaactctaacttgttcatcacatagttagtggtgaaagctttgaagcaaggagatagtgacttgaggatcatgctcacttgattccttttgttgataatagtcctgtgtgtctctacctcatgtattagctcaattatttgaaatacacgagttctaatagggacaccctttttcatattacaattcatatagctacgaatagcatcatgtcttgcttgattagattgctgcccaaacatgacatgtagagaatttattatttgagatgcattctccatttattcatgcatcttacacataacattgtccattctaacgagcacgaagcattcggccttgttgttggattgaatctaagagtcatatttgtctcaaatatttttttgggcattgacagcaggttcctcaggacgctcctcagtgaggacaaatttgtagtttttacaaaccaacatcgaatagagattagatttctacttcatgaaatttttaccattcaatttttcaagagctagtaaagcaataaggagatttggcattgtagacatgattgaaagaaataaagataacataataaatatacttgaataataaatatcattttggaatgattgtaaacataatgcatgagcgcata

SEQ ID NO: 34393 - DNA, 2579 bp, Cannabis sativa
  modified_base (43)..(46): a, c, t, g, unknown or other
  modified_base (600)..(603): a, c, t, g, unknown or other
taatcattagaaagctctttttaattaaaaagaactttttaannnncaattgttatacctgaaattcgataagcacattagaggaagacaagtgtcgagctgggtagaatgaagaactaaaacacgcaaacaaaagtacacttagcatggaacaactcgttggaaacataatttgcagagtatgtttataactcggttggttgaatagccttctgcgagacaaaaacatacgaacgactaacttatgtattgacgagaaaccctgtgggtacacgtgtgcatgacgaggcctcaacctcgctgcgtggaagagaaataataaacactaaaaacacttagcgtatattatacaatatacaaactaagtgtagatagtttggcgagtcaagataacagatagcgaggttttttatttcgctagaagatggcatgcatgcaaggaagatcatctcgacaccagaaaatacagttatcagagtcaaaacaatattagtcttgggaagtaagatgacaagcaactgctccccatcaaaattaacttggctccattctcagggagacatccctatggaataaggtttaccgtatatctttaattannnnttcatctcggcccaataaaagcgagatacctgtgtgaatataataaaggcctcatttaccttttgatttgtaaccaaatcccatgatttgagggaataattgttgtaacaattattgtcaacttttgtaaatcattgcccactatgtaattataaatagtggcagacaagatcaagaagggggacgaaaaaaaaaactcatatgaaagaggccctaaaaaatactcacaaatctgaatgagattgacttgtggactatgcagaattttaactacaaaaccacgtagaaaaccctgtgttcatattctttattttgatagcttttatttttttttctgtgtgagatcaatattgtgaggctcgattttagagaacgaaaatttgcattaataggtatacttaaaccttggataagtgttatgtcttttccagggcatacttgctaagtgtttgataatttctgaatgtgtatgaattttgttaacgcagattttcgttaaccaaattttagcttaatagtgacaatctcacacagaaaattaaaatctaaaaaataaagagtatgaacacaaaggatttttcacgtggctttgtagttaaaattctgcatagtccacgagtcaatcttaatagatttttgatagcttctcagtgccttttgtgtctcatttttttccgtcccacttttgatcttacctgccactatttataaacacatagtagtcagttaattacaaagttgactgtaatctttacaacgattatcccctcaaatcatgggatctgattacatatcacgttaagtaaatgtgatttttatttaaatttcacacagctgtgactatcccgcttttacagtgtcaaagtgaatgtgtattaaatatacatggtaagccttatcgtattggaatgcctcgctgggaatagagttgagttaatcttgatggcgagctggagctcgtcatatgtgtttccaaggttgataatgcttttactttatttctgacaactgtagtttctggtgatgagatgatctttttcgtgtgcatgccttcctacagcgaggtggacgcttcactacttctcgctttgcttcactcattggttatacttagtttgtataacgtacattatacgctaagtgtctccattttcaatatatctcatccacgtaacgaggttagtgcctcgtcttgtacacctaaagttacatggtttctcatcgaggcacaagacaacagtttgtatatttttatctcgcataagtgtgttgagtgagccgagttgtaaacatactctgttaattatgcttttaacgagttatgccatttcaagtgtaattatgattacgtgtctgagttcttattcttcccagcttgacacgtgtcttcctctaatgtgctagctgaatttttggtataacaatcgccccttaaaaagttcttttttaataaaaagtgctttttaatgattacaaagggtatttttgtcatgatcccatttgaaaagatgcgtgtcctctgattttggtggttgtgcggtttcgtggtacattagcattaaatgacaatcttttccacttccactttgaattctatccgtaggatcaaacattttcctgatttgacgaagcagatatcatgagtataaagtaagaaaaaaagaaccacctttgcattatttcctccattttagaaagtctgagaaattcttaagcttcttcgctaagaatcaccatcgagtttggctaaggatttgcatgccattctagtccttgacatcttttctacgagtttcctccgacttcatcttgtcaaagcgatccttactacattcgaagatttgcagaccaaacaaccattcattgtcccaagccctaacttcgaagagtaagttgctttcctcctttacatgcttgttacattgtgtttaattgctgcttaacttgtttgtatcgttgccatctcatttggtttt

SEQ ID NO: 34394 - DNA, 2107 bp, Cannabis sativa
  modified_base (513)..(514): a, c, t, g, unknown or other
taaaaaaatagaagtagttaaaaaaacatattttttattttttaaaaatgaaaacaaaaattctactgtaacttttataatttaaaaaattaaaaataaaaagtatttccaaacacaactatcaaataaataaggtaagaaagagaaatccaaactcacaaaattaagtgttaaaattgtttaataatgttaactaagagtgttcgcagtgcgggtggtgcagtttttgactattttttcaaaccaacctgcacatgcggtttttctaatttctcaaaccacacccgtaccgtgaaactaaaaaaccgcaccgtaaaaaatagtgcgggtcggtgcagtttttgcagtttctgcagtttggactatcactaaataactaaactatcacaaatacaacaaaacttgtgcaacacttgtcaaaaataccgtaaggtttgaaaataaatatgaaaaaaaaattaagtttcaacaataaaataattagtggactttaggttgaacattcacatattnnacctaaataaatataaaaattaatatttttataatgtgtggtgcagtgcagtttgaatcgcatattaacaattcaaaattgcaaaccgcaccgtaccgcgcggtttaggaaaaattcaaattgtgaccgtgctgcaaataatttcaaaccgtatttttttttgtagtgtgatacggtgcgactgtttgagcagttttaggaatttgatgaacacccctaatactaacaaccattatgtaggagaaatttacaaatttagataaaaaaaaaagatgctatagtgttatgttagttgtttttatatatatgtatttctttctaaatatatctttatttttatatataaaatttagttatttaacgaaattattaatttgacagttttttgttattttacatttaaatttaaagctaatatcgttataaaaaatttaaaatttaaaaagtatgaaagaacttaatttttttgaaaaaaaatatgacaaaattaaaatttaaatattatatttttaattaaatttgtatatttaaaataatatgatagaattgaattagatttattttttgtaaggcagaagagcagcgctaaggatagtttggagaaccaagctcaatgagaggagcaagagggaaagtgcgcgaggaagtgaggagaacggatccacgtggaccatttcgagcaaaggaaatgaatcacatgacatctcttcttgcctataaataagaaactccatcattctaaaacggcacagattcgatcaaactaacctaatcaaaactctatcgaattacaatttcaaaacacacttgatcttggaagaataatgtaataaagtatagatgttcattatgattgggataattctagtgtaaagaattcgaagtagaaacataaatttattgttgagctaagtttcagcattaatatttttattaggctaattagtatttttttcccctaaacttagacatgtattaaattatgcccctgaacttttttggccattaaaaatttcccttgaactattaagatattgttgaatttaaggactttggtctaatttcattcaattttactaattcagtgattgttttatgttctgaatcacactctccagactttgatatctaccaaatcacgcccctcgaactttagtatgtactaaatcatacccctaaactttcatctatgttaggcgttcctgctaaaattagatacaagaccttcaatttaacaatctcaatagttcaagggaaatttttaacgatcttaaaagtttatgggtcatgatttggtatatatcaaaatttaaaggataaaattttattattaacattaaattaataatttttatctcttcacatatataaaacaaaaagaaagagtatgtaatatttttaatcacaacgtttacaaacttttaatgaccatctatatatgcaacatgtttataattttttgtaattatgttaatcgattgccatcaaattttattttttttgaacaacaaacatattgtaaattgttaagtcgttttttgaaaatattagttatcaaaatattatgtttcttgtgtagattacgttttcatg

SEQ ID NO: 34395 - DNA, 1466 bp, Cannabis sativa
tggtacaatgtttaaaaaaataggtaaaaatgatagagtttaaaaaagagggtaaaaataaaagaagataatataaaaatggtatagagtgtaatttcctctttgaatataggcctatcctgtcacaaagtttctaaaggtgttaaatgtaagtcgtgccaagttaactcataattacaactttagtaatgcttactattttttattccaaccgaactcaaaacccgttttccaatatacccaaatggagaaagagtattaccacacctgaggaggcggctaccgctgcagctgccgccgccacaactactataaacgacaccaattaccctgtcgtttgtacactttttgtattgtcacaattgtgtactatttggttatagtgtgaatgtgatactatcaagaacctttagccgtttgtgttggttttggttgggtttggttgacaatgagtgtgggccccacacatctcaaaggatgttaatccaacggtctcaaattgtttaattcatttcaaagaaagaaaatcaaagcttagtccaacaagaaagaagtttagaaaaaataaacattagagacaaaattttgttgaacaaattataaaaatacgttagtaccgatttttttttttttttttctttttttttttttaatttttacgttttaaattttttttatttacgaaaaatgtctctttaatttcaacaataaaatatatattttttttttttattttatagttgtattatagttattttgaagttaattttagttgttttatagttgtgatgagattgatttatcgttattttttagttatttttttaatgaaaaaaattatttttataattttaaaattttacaggtgtatttttataaataaaaaactttaagccataaaattataaataaaacataaaaaaagaaataattttaaaaaacacaaaaataacaaaaaaaaaaattataaaaatatggtatgtacgaagtttctaacaattttacaatttcttagattttatttatataaatacagttttttagtgtatttttatgttatattcttattattttattgttcattttttattatttatatgttattttggggttttttcattttttaaacttcaaaatagtttgtcttttttgtattcttataaaaatccacgtaccaacagagcaatttaaattacaaccaaaattcacaatttcacatagcaacccatataaaaactactagagcaactcaaattataaattttttttaaaaaaagaaaaaaataaaaatatattatatgggataattcctttattatttttaatattgttttgttattcttttgatgttgttttaatattgttttttttttagtattttgaaataatttttttttttatatttttataaaatactgtaaaaattaaatatatatcttacataatatataaaatgcttatctaac

SEQ ID NO: 34396 - DNA, 2058 bp, Cannabis sativa
atttttatttttattgcatttttttgtttatttgtattatttttttatgttgtttggatgttattttcctattgctttcatattgttttcgtattatttttatagaacatcgtaaaaatattaaaaaaataatatttaaatgtaaaagtataaattttttactaaaaatactattttatgtaaattttgctatattaaatatttggccaatccgtaacaacatggcttcttcggtaaatgccacgaaattcaaatttttaaatatttttgtcatatatgtgttataaaaaaactactttagataatttcactgcaaatttctacataatgaatttcgttattattataaggttctctggtggtgcatcctctctcaggctctcccggttcgagcagtgattggaagaagatttcagaatgatgatactagatgtcctttttgtggactggtggatgaaatgatggaacatctttttctaacgtgcgatgtggcgattcatttgtggcagtcctcaccgtggagaattttccctttgtgtgatactggtattcgagtttgggattgggtgaagttcatctggagccttaacaataggggtatccgtgtcaaggatgtctttctatatgcttctattgttgttgacaatatctggcaaatgcgtaacgatgtggtacacaataatagctcacctgatgttttgaaatgtattgaccatgtttgtgcttcttttgcagagttacatacttctctcttgctagtccttcgccgcatttgaaggattgctggactcctccacctctggattggatcaaattaaattgtgatgttcgtgtgggcttggagagtatgtgcacagctgtagtagtaaggaatcagctggggagggtgattcgaattcacacgtcccggttggatttttctgaggctctttgtggagaagctgcggtctgctgcttggcggtgtctattgcgatggagctagagtataagtatgttattgtggagagtgactcgagactagctatcaacactatttatgggaaggcgtcccattgggcttttgagaactatgtctccttttgtaccaagtcttctcctcatttcatatgttgtaacttttcgaatatttgtaggacttgtaactttgcggcccataatgtggctaaatgggctttcacccaccagatatatggatctattccgatccactctttaccggagaacattttgtgtaacaaccatgaggtgtaacatctatttaatacatgattacgcttattttcaaaaaaaaaaaaagaaaaaagaaattcgttattattatcatggcctacctacataaaaagtttgtagatccaaaatttctttgaatgagagaatatttaatatataaaaaaaaaattagataggagaatcatttttgttcttaaagggcagtttttatttttagcacctaaataaattatattctaatatttttcatatgatcacaacctttgttatacttgtattaagcattttactttttttaataattctaaataatttatagtgacaaaaataaaattgaaacaaatatttgcactgtatgtgttcctttttaatctgtggatgcaactgactatttaataactatcttttgaacataagtatatgtatgcaactcaagtagattaagtgagaatagaactgccaaaatcatactgtgataatcttatgaaaaaatatctaacataaatttagaagatgcaaatactcatcttcataaccataaatatgaaagatcataacatcttaatatactacaatacaatttgctttatttagatctaagcataataaagaaattctctatacataaattgcacattgtatggtactcttcaacgcatatgcatgcattttttttttctttttctttaagtctcaatgagctataggaagcatagacagatatgatattggaaagcaccatgtgcaaacaactagttcagatatatatatatatatatatacatatatgtacagtatactactggaattgaccttgacagtggaca

SEQ ID NO: 34397 - DNA, 1117 bp, Cannabis sativa
attttgatggttaataaagttgcattttaccattcaaaaaaaattgtatttttcatgtatgaaaatatatgaattacattaattaaccaataaattaacattaatctttatttttcttttttacagaaaaattaattctttatcaaacaaaaatttaaaatttctaataggcaattaaaaaaaacaattttgttctaacttattatcattaaatcaacaatttctatttatttcaatatatatgtaactctattttttttttattttatacatgaataatttgagcattaaaatgatttacaaaatttaatataattaaacaacaataaacatttgaattaatttgtatttttcatgtataaaaacatttaaattatatttattaaccaataaatcaacaataatctttatttattttttaaaggaaatattatttctttatggaattaagaaaattaattttattccaacttattaacaataaatcaacaatttttattttattttcaaggtatatgtaactcaattttttattttttattttatacttgaacaaattgatcattcaaatgatttacagaaattaaacaattaaacaacaataattatttactgttatatatttttttaatttttttgaatcaaatatctcaatcattaacatgcaattatcaaaagtaatccaataccttgttaattttttttggatttgattgggagctccgatcaacaatttttcaactcattcttgtatgatctgcaataattaaatgatttttagtatagaactttttctattaattttgtgtttcatgactctgttttttcataccagttttcaaaatgattttggatttagtagggagctgggatcaataatttttcaactcattgtagtatgaactgcaactattaaacaacaattatatgttttgtactatagatatttatctattcatttcgaattttgttgctttgatgtttaatgcttgttttcaatttgaatttggaattagtaggggggctccgatcaacaatctctcaactatttattgtattgtaaagaccgcttagtttaaatttgaaaattagctgataattagggtttaattatgaa

SEQ ID NO: 34398 - DNA, 1350 bp, Cannabis sativa
cctctggatggctccggtccaaaagagcctctcgctgctgggcctcctcccggatagcttttttctatgccgccaagtccctaagactcttcatggcctcatccatgcccccaaactcggacatgatgtacccatggtcaatttgagtctttgatagacgaccagtctctgcagcaatctggaaaaacaagaaaaatgtataagtatgcgaagccaggcaccaaaagacaaggctcgaaaaccttgacagatagaaacttaccgcggtcatggccgcacttatgtcttagatctggtagatcgagtttttggaagcacagactgcgtatctctttgccgggagctgggtaaggttggagacgaagtggcttgttaattctgaggcaaaaggagtaagggtaggcccgatgaagcgattgaaccagtctgtcaaaggatccatgtttaaatcccaagccttcccggagtactcactgcgagaaaaattgtcccggtcctcccttaggacctttttcaaggcctccacctccacgttccccttagtgtattcttccatagcatagttatgcttagcaatctagagttgttgtctttcctcgtcagtaggaacggtgttaggaaaatactgggaggaatagtgtactcctccgcctcaggtgggatccccaaatcaaagttgaggcccggagtgtcgactctcctgggcttcttggcagcctcgacctccaccatcttgcctttgcattttcggtctagaagggtgagaatctcgccctcctcttcctcttcaacctccctgtcctcgtcaatcagaacaatttggcttaaggggaagctagaagaaggattcccaaaagtcacctccaagtcttgtgtttgaggctgggccaagtcgggactgtaagtttgggcaagggtagccaaaagctcgtccattggcctagctgcttcaagaaacaaacaaataattgttagaacggtgacgagaaactgtgcatgcaggaacaaaccagtaaaactaatcctacccagacaatctaattcagccctagcaaagtcctgcactaaaatactggcgtttgtcatcccccccaaaagctgtgtccgaggggagaaaccagctagaagacacgtgggctgaatggtccagagggataggtgcaggaggcccgaaccccatccgggaccggcccaaaaaatgacctcagttggaaaagtaaaaacccttggcatgatcgctccatcgggtaggggcattctaaatctaagaagacattcatcaaattctacaggcctacatcaagaatatgttgggttttatgccctaaataaaactcatctcaatataat

SEQ ID NO: 34399 - DNA, 3687 bp, Cannabis sativa
  modified_base (2889)..(2891): a, c, t, g, unknown or other
  modified_base (3646)..(3651): a, c, t, g, unknown or other
agtctagctctccaaccttcgaatcgtgagcttatcttgtcaatgagattaaaaattgaagtggttttatgcattttcattgcttggagttaggatagactttaatcatttttctcgtacattgcagagttttatacttagtgttttttctttcttttaccttatgaatgttgacctctatttatgcgcacaggtagaccagctcgatccgagttggctcagaatcgcgtgaaaattacagaagttttgagcaatcttctagttagggatcgagattggcatcttgcaagaacacaaactaattcgagcagacgccagactttagcgagaatcagtatacaaggagccttttgagaaacagaaagtaaagattgaaaggcgtctttctaagcaaactccatggcaaattgcaggtaatgagcttccattttaatagataattttctatgagttcatatgattgtttataattagtgtatcttttatagatatgatttttctaaagagtgctctggtacctcacgggatccaatttgcggtgcttttgttgtactcctcgcacatcagggtctatgttcaaacgatgacacataaccttaggcaaaattccgaccatgtctgaatgtttccaggggaagacattcgggctttgtttgagaaatcaccaaactttctcgctgctacaaagttaatttagaaccaattttcaaaactttagaattatcaaaggagtcaattggtacctctatagtcttttcactagattgtgttgtgttaaatcaagtactactgagtgttgtaccacatgcactacttacttaagtgtactagtattggtaacaccggatcgtaccctttgaacattacatactgtaccaatacactcaataccattatcgtactagtgttggtagtatatgaatcacacacacaacatgtaatttacatacgtacacacacatatacatattctatgctagtcttaccttgtttccaaattcaagtgtgttggtcgacctgaatggaaaatctcgtgttggacagaggtcctatgtcacgatcacataaatgggtaaacaacatgctaaacctttccggggacctaaactcaaaactagaaatttttctatcgataaaaagcaaggcaaatccctaattattgtagaaacacgagaaaagcgatactacgagaaaacttcttgaaaaatggtgagtcgtttttctggttctgcactagtaaaaacggtcgaccgtttttgtataaacagtttgccatttttcactgtagaaagataaagagtctccaaatcgactcaaaataatccaaaactttgtactaaactccagatcatctaataatatcataatagaccaataccaagcaatataacctcaaaatatgcaaaaatttaaaaactaccattgttgagccaagtttgagttctttaaatcaaacttgcttaactcaagaatcaaccactaaatatagcttaaacatgctttaaacaacatcaaataaccccatcaatcaacccaagataaaaccctatttgtatagagcctaattcaatactcatgcatgcttgaacttaaggaaaacctaaaaaactcaagaaggagagtattaggaccttaacttaggtcttggctttcaatttcccttcaattattgatgaaaatcactggaaattgatgagaaaagagcctggttctcttggttcttctaaagtcgaggaagagataaggatgaggctatgagataacttcttatttttttcctaacatagataaaataaaaataaatccttaaatcttttgtttactcttactaaacaattcagaataagtggaattaatccacaaaatttactaaaggacaaaaccccaccaaatggcaaaattctaattttgtcccttactcacacttaaacaacttaaaggtctagaagtaaaatagtccaaaactataaccccgcctaatctcgatatttcaaatatcaaccttataattgtcccactagatcaaaggttctaagttaaaccatgtgactctaatggccatccgtcgtattttttattgttaccgagcaaaaatcataaaaattataaatttcacatatgacatataaaatagacctagaatttaataaaatctccggaattgaaaaattataactttaatgtctattttctgaaaatgggaccaacaataaatataataatgtaaaatcataacatattaataattaatgttaattgttataataatctatattctaatcatgtggtcattacatgaactctttttctaatacttcattgcctcattgtaattgctctaataatgtcacaactcactctcttgcacaattagctatcacacttgattccaatcgtgtgtggtggctgagtcttcctagttgtctcgagtaaaggcttatttttattggctttgtgcctaataatatttgaggaacttcaattaaaaaatactaatatctaaatttttagaaatattaaagagcatatgtgtggtgcccaatgctattataaaatattataatattattaatataattaaatattaagcgatatataattaattatttctttacaatattaattatttgcaaaacataacttgtaagggtgtaagatactcacaacagctcttttgaaaaagcatcttcattcaaaatttaaagaatcatgtaagaaatacattctattagttgcttcaaatagttctttattttagagaagcaaaatctttgccctaagggtatctctaatgaggaaactcaaatttgatgttaaattaataccaaaaaattactatttcaacactattttttttttcaattccaaccacaacactaaaaattacannnaatttatattctttattattttattaatataataacaatattttaatactaaatatatataattatttactttttctttttttaaagtattatttaattattaaaaaaaatttaaaaaaaaatagtgtggtctacagtatcccactaaattaggtgggacactgtgtagacaaagccatttatgaggatatgtttagtgttccattagaataaatatagtgtgaaactacactatatttgatgttttagtgttccattagaatttttaaagctcttcatttattttttattagtttctctctcctttcctttttatttaattatttaattgtttttttgaacatacaagtatataaaaatatcatatttaaaggatttagagaaaaaaaaaatagaaaatctattatatggcgtactgtaaaattttgatgtaaattaaataaagttaggttttagtaatatattttgaaagatagagtagaaaagttgttgggagtgctctaaggaacattaaaattgactactagtagtgtctagcagtttttagacctgttactttacaattaattagtgataatctttaaaagttattatattgaattatatggaacgcgatacttaattataccaacaacaatattgacatgttggaaggaagcactactactagttactagtagtgtctaacactacttaaaaatgatattttataaataactagaaaacaaaagccgcgcgttgcgcggtcttaaaannnnnnataagctatatatattattgaaaaaagtttattttt

SEQ ID NO: 34400 - DNA, 2021 bp, Cannabis sativa
aaggtatgcagtgcactaatgaaaaatagggtaattgagaattatgcaaattacaaaatatattgccctcctcatcgttagttagggccaacttaagttgtttggaggccttcgacaaaaaattaaaattaataaacattttattaaaaaatatatattaatcaatactttataaattcaattttaaaagaaaaatactttataaattctaatatagacaattttttttttaagattgtgtattgagagcacaagattttatcaatttttttaagtgctaactgcatatttacctttattatgtatatataaattgtacgaaaaaatatttattatattatatatataaagagaataaaaaaaataatcttttaatataaaaaccttctgtagtgatccaaactgctatatgtttaggccgacctaaattagtgaggtgagtgtatttatatcatgtaaaaatctataagaacagtagggagttgttaagctataaaagattccaaatcaaaagatgtcatttaccaataaaatatgcttcttttttcacacccttttggaccccttgcacctttaaaaaaaattgagattgttctctttgagaagagaatcaattaatatttaaattattttaccagaaaaagaaaaaattatagtaaatataaactgaaaagaatatatgtggaccacaaacaaacacaaatttacattgtatcaaattaatacccaacattgtgtcaaaaaaataaaattaatacccaacatatataatgaaaaaagtaaagaacaaaaaactaaactaacctaacaaagcaaattgttataaatgcttatctaaatgccaaaaatcgtcttttgcatataccattatttcagtcgaattttcttatatgataattttctttattgaaaactaaaaattataagcacagacaatgataagagaatactgagactaaaaaagtatttggttggtggggtcatggttgttccaacaccaaattagaaagaaaatttcaatatagtgaaagtagtcttgagcaatagctcttcttagctttaattaataatgaaactccttgttattagaaaactatgtagctcatcatcataagtctatttcataatcaattagaaaaataaagttttaggtaattaattacggcaatgaaaaagtttgctacttaaattttaattatataaaagacttgcatgtggtgacatacattagtctacctctcaagtctttatcatgtcttcccattaattttggctttatattgactataaattgtagtgtttatattatcttactataaataaatagtcatcagttgactggtaatgttattcaaataattatgtatttggttagtttgtatcgcacttaatataaaaaataaaattgcaaattcggtttttttttttttttttttatagatttcaatcaatttaaatgtatgcaaaaaacatatatatagtgtcttaaacaaaaaattaagatgaaaacttaattaatgtttactttgaaacttgggtttattcaattatagttatataaaataatatcaaatatattcaattagtaaaatcagtttggtaatcactataatataaactgcacaaaaccgtcaacctcttattacgattttttagtcaacttttatgttcgaaaatatatgttggaattttttttttatattttttttatggcggtattcgttatacttacaacatcatctatgtaattattttaaaaaaaaattgaataatttaccgtaccgaaaatatatttaaaattttttaaacacacatgataaattagaatatcagaaactctaaatcattattgtaactattcaaaatattttaaaaatttacaaaaataatactattactaatgaatacggttataaaaaaaattaaaaaaaaaatatatttcacgtatgatttaaaatagagtagttgacttaaaattgtagaagaagttataattatcactccatcaaaacttataaggt

SEQ ID NO: 34401 - DNA, 2069 bp, Cannabis sativa
tgtaggtaaaggaaaggtgaaggctgaacaggagtgagctttgagctagggtgatgttgtacatgtcatggcggcacgacctggagtgttcagtctcaggacaagtggagttttattttgtagtcgctctgcgacctgactatatatatattttggatattttgtaaaagtttaagaacgggatcccgacttatgtaattaaatgtttaaaagtttataaaagtttagcaatttaatttaaacttttaatttgacacaattttcaaggaaaaacctttgattagcaaaggtggcactgtcattgaaaaatcattgtagcgcgcctaagtatcagggcattataggtgatcccttcttgaagagcagtaagttgaacactgtcattcaagttgctaactttagcagcggaaatactaaagtgactcaagtaagccttaagtgactcgcctagttgctgctttatgttagttagggaagatggttcaggttgtctatccctaattgcttgaaattgtttcttaaagtccttggacaactgttcccaagaagttatcgaatggtgagtgaacttatcgaaccagctacttgctgccccagtaagcgaggtggggaatagagtacaacgtagattattcgagatgttgctggctcgcatgatggtattaaaattattcagatgagcgactggatcagtagtcccatcatactacgagatgtgacgatttttgaatccctgagggaattcagagttcagaatatcaagatggaaaggctcgggcccttcattagagtcatagccaggtaatttcccatattcaccatcatggtatcttctaaacttatcctccaactcaatgattcgcaattggatggggtcctcttactgtcgattagcattaagttgttggcgtaagtcaggtgcattctgatttagtcgctcgcatagattgggttgcctttgattcaattgctcacaaagatctagttgtcttctttcataattgcttacgcatctcgtatttgagtacctctcagatttatagcttctcgtgttgctcatgctctcttgatcaggataactctgaggtctagatcagcataactctgaggtctatctcctcctcctgtatgcctttctaatcgagtgtgccctcgagatcttgaatgttctgagctagaacttgcctcgtcttgcacagaccttcttctttggaaaatattagacacgcgtcctctgtttaggtacgtgtatgcctcttctctctcagattgagaaggacgttggggtgtcttggtgataacctacttggtctaggttgagtccttggatttctctcgttattacaagggatttcccgttccctagatctgggttgccttatgttctaatttctacgagaagtctctggcatatcattacgttcattcccctgattcgtaaatccttggggcctttgaggtacttcttgctgtggttcttggttgttctattcatctactagaacatccctagttcccccaggttgctcctcctaggtgttctggggatttttccttgatttgtttcatgcctctcctggttcttaaacctcgaggtcttcctagtggccttcttactccaagttcaggtaggttctgtgtattatttccttaagtcgtccttgctactgtaacttgtctttccaactcagcgtttcactggttggattctgccaaacgttgcctgagttgtcaattttccaattccactaatggtacatacctagtgtggtcataagcatcctcacttctaggtacataacctgttgtactattagtttcttcgtttctttcctctgggttttgactactaccaccatggttccttcttgaacgtgttgttctagaagtgggtggtctttgagaatccattggttccttcccaggacgatgcgtggtctcatcaggatgacttctatcattttgagtgtgattagacatagatggattgtttgtttttaaggagggattttttctgagttttatcacataggctctcaatgaaagcatcaaactgttaacgcagattt

SEQ ID NO: 34402 - DNA, 1979 bp, Cannabis sativa
gggggagtactgtttggggggagaaaatgtaacaggcatgaaggcccaattagatatgagaaaagacgcaaaggcccaattagacatactcccaacaataaggcccactggattggaggaaaacaaggtggcccacaaatagataaaataataaaaagcccacaaagccacaagatcaaaatggagcataacgataaagtatgaaagactcaagaaaagacaatataggggttcgctgctcgaagtaataactaatgatagaatcgaacccaacaaaaagaaataagtgacgacggcgcattcagtatcacgccaaaaagtcgaggtccgagataagttgaaactgacgggttaaagccataggtcagacaagaccaagtgcgaaaaaggtacacctttcatctaacccaccgtcggatgaaccagccctccatggacaggaaggcagattccatagaacgaggatatttcaagcaagataaaacaaaatcatactcatgtcggagaaacatacttgacgagagttaatgctaggataatctcattacccttaactgaaagcaaagtatgccgtcagaaggaaatcattcctcaaaggaacaaaataatcagtagatatcaagcaagaaaccagcggatctcataaatgcagaaagaaacacctcccaccctcgcaacaacaagacacgtggcaaacagagtttggtaaagaaaaaggacacacgtaaggatacatcaaaggaaggacaggtcacacatgcactaaaaggacgtacaacataaataagagaaaaactacgtaaagaaagggtggaaaattatgaacttaaaaagaggaacccacattaaaaatttatgactgtttctggtcgaaacaacgggtagcatatgaattccaatcacaatgattgtcattataaaagaattcggaatttatagcttgagaggaagaaagttactagaaaaagagctctgcataagctgtttagcatttgctgctgatgatgctttaactgcagaagcatatcgagaagttgttgctacagtttttggcaaggatggttcagtatccagatcaaaaaaaacttcgtcatttttaattgggacttcttcactaccagaagagacaaaatcatcttcgacaaaaattgttttgtcagatgaaaaagatttagttttagaatcgaattcttcggaggacacttccaacggatcttcttcttcatcattatttgaggaggtcaaaagaggattaagcttgagctttttagcagcaggaataggccaatcatgacacattttggttcaagcttcctgttcaaagcttgctaggcacaggtccgagatgaaggaccttttcgagttgatgttgcagaagaaacacctgttgcaataggtggtgactaagtaccatgagaaggagaggcctcagtagaaggagaagaagactttgaaccatatctagaagtcttgggcaattgggtgttccttacaaatttttgagagggtttttggtgctctgttgctggaagtaggagttgaacattacactttctttggttcacaccgaagaggcgatgaatcaactagtatcgaagcagttgcagtagcaggaggcgattgtgaaggcacaagtgaggcatttaaaggatcagtctcagatccagtcatcttccttgggtgcctaagttctttgttttagccatggatttctgaaagagaaaattcaaacaaagagaaaggataacaagaagaagagagatcgggtagaaggagagagaatgagagaataaagatatgaaggaagagaaaaaagaaaaccaatttgaaaaaattaaaaaggaaaatgaaaaaattaccttttccaattttatcccgcaacttgttgctatcacaccacactgaaggtaacccttttctatggtagtgcattctcttcataactcttgattacaaagtttcagcttactcaaaagatg

SEQ ID NO: 34403 - DNA, 1154 bp, Cannabis sativa
  modified_base (532)..(538): a, c, t, g, unknown or other
attggcatgaaaatgacattttatgttgggcttttttccagttttaaccgaaaaaggtaacaatattcttaaatacttcttcctgcctaaataaataaatatacatcccaaataaaaaaaattacgcaaatacctcttacacacaccttcaacccagaatctatgcttcctgggcaaccattgggcaaccacgcagcccaacgcagccgaagcgaaaatccaaccaaaaagagaaccaccattaattccggtgacttcacctgagaagacgaccaaaatagaattcatggaaaaatgcaaaaaaactactatgaaactaaaattcaactagaaattcagtttaattcacataaaactaatgtactgacttcaatttttagatccatgaaatgtagatctcaaaaagttgaactagagttcccaaacaatcaagctcaagtataataaaaaaaaatacaccagtactacagtaaaatatttatcctggtgtattttcattgttttccaaatttctaatggtgaatttgttcannnnnnntcatgaagagacatgtagatagagttacgtacgtgaaaacactgttatggtttttaatgtttcataacagttgcataaacattttgctaacaattatttctctacatattactattaaggtacaagtaatattgatcattgacaaaaaaatactcacaaatagttttttacatatacagattcatattttacatttttagttgcaattaagttgcacgttagttggctcgcagtagatataactgttgcattacagtttcaacagcacaatccatgcttcctgggattaaaactttcgtctgatgcaaccttcggtcaaccacccaacaaccttcgtctgattgaaaccttcgtctgatgcaatcttcgaccaaccacccaacatcattcgtctgattgtgtaagagatattttggtaattaaaagtacttaagtataaatattgtccacatcttatggatgtatttttttttaaataaagtgtcaatttatattttctacgtaataattccttttatttcaagaaaaatgaaaattttcagttacccttccagaatcaatataccattacaatccgcaaaaacataccaatcattctttgaacacaaaataaatg

SEQ ID NO: 34404 - DNA, 3162 bp, Cannabis sativa
cacttaatattggtgataattatggaggttacttatagtaacaagtaactcccccatatggtacaaaatgatgacaactaatatatattgtcatatgttaatgttgtacccaaaattcaattatgtatcagaagctgacacgtgtctactaaaggaatatgaattagtttgaagaatattataattaaattgtattattaaatgcaatttaaatatcttgtggaaattgtctaaaagttgatagaaatgttcaaactcactgactgcttagtcatatgcgagacaagaataataactgttaaactaatataattgacaagacagtatgtccacctcaggataaatacagtaataaagatatacaagtcaagacatcaaagatcttacgacccgttgactcacatacacaggcaaggtgaaagtaactgcttaaccatctcgctttctacacaatgtagtagtcatctcgcgacatcactacgatatgagggtactgcgggatgaagcaaatcaacacttagcattttttcctctcaaaacggataagaaggataactcatatttgacgagaaacaaccttcttagtgagcataaccgtttaaaggataaaaattaaaagcagataggtagttattagatattatgtgtaaataaaatgaaacgtgggaaatgtccacattttcatcaacagctgtaaatgaatcgatcccaataagaataactgccaatctattcacctataaataggggcagaatccatgggaaaagggacggcaaaaaatagagagaaaattatattattttatatactgagatttgtactctatattctacaaaatatccctaataagacggactcgtggagtatgtaaattttaactacaaaaccacgtaaaatatctggtgtttattattattattattcaattctgtagcttaaacgtattacaaaaaaggctatatatttggttaacaaaaatctgtgttaacagtttggtgctctcattgagagccttggtgataaaaactcggaaaaatccctgcttataaacacaaaattcaatccatattaatggctgataacattccacacgacgataatcgtccagaggaaacaacccatcgtcctggcaaagaacctatgggttctcaaagaactgacacatctgaaacaccatgttcagggaggaacgatgatgtaatgaccgcatgttagattatggattagtaaagacaattagcattaattactaacattttaataattaaatatgattttatattgtagtgagtcctatttttagaaatgggcattagagttataatttctcaattctagagattttattaaattctaagggtattatttatgctagatgcaaaattaacaatttttataatttttgctcggtaacagtaaaaaatgcgatggatggccagtagagtcacatgggtgagtttagaacctttttatttagcaagatatttgtatgttgatatttggagtatcgaggttaggcatggttatagtttttgaccactttacctctacacctataggttgcttaagtatgaagtaagtgggcaaaattagaatttgtccttttattgagattttgtcttgtagttgagttagtagaaactcccatgttttgttttatgctggtggagtgctctagtttatcaaggaaatagaaaaaaaagaaagtaggagaaaaattaaagttatctcattttctctctctcattcaccttcgtccctagaaaagaaccaaggaagaccaaggttagacttccatatttaggtcattttcagcaaggatttgaggagaaaccttgagccaaaataaaaggtaagccttagatactttattccttattgtttttaaaatcttaagcttggcttggttctcttatgttatgtgatgtgatttttgggaatttgggggtttaattttatttgaggttgcataatctaatcataccttgttcactggtcactcgaatagtgggaaaattgcagctctaatcatttatgttgatgacatacttctcactggggatgacatagaagaattggaggcaatgaaaaacagattctccgaggcatttgagataaaatatctaggagaaataaaatattttctggctatggaagtggcacagtccaaacaagggattgttatttctcaacagaaatatgttcttgatctgttaaaagattcaggaatgagtgagtgttgtccaatagacactcttattgatctgaacaagaagcttggtgagatttgccaaggaagtttagtagatgtgaaacactatcaaagacttgttgggagtagggcgtcacattttcacccgaaaacccacccacccggcctgaaacctagaaaacatgaagaaaaaaaaataggtttcaaaaatagggggtggggtttaggtgtaatccggtttggcaccgggctgagttcagatttaagaattttgaaaactcaaaacccaaaactcggttaccaatttatatatattttattattttttttagtctaacttattatggactataatatggattttattttgttcgaactttggactatgtaatatgtatgaacttttgttatttggactttggagtttggactatcaacttttcttaaaaaatttaataagttattagtagttaaggatttggagtaagagtgattttttcttttatataatatggaaaattaaaagaatacagagattatattgtaacatgacaaaaaatagaaatttaagagagaataaagttgctgaaattttatgtaattctatgcaaaaattttaaaaaagtgatatttttttttttttaaaaaaaaaaaaagaaagcctagcccaacctgaaactcgatcgcaacccactcaaaacccgaccaacctagaccaaacgcacccggagccaacccaaaaaatctggtctctatacgggcgggttcggtccaaagattccaaactcaactccaaaaacccagaaaacccacccgatgtgcacccctagctgggaggttgatctatctcatactctacctgatattgtttttgctgtgagtatggtaagtcagttcaagcattgtcgttacaaggaatatcttgaagctgcttatcgaattctaaggt

SEQ ID NO: 34405 - DNA, 1876 bp, Cannabis sativa
aagatagttagggtgttacacccctagaaatagaatccaccattatagacaaaagtttgagcttaaaagctcaaacattgatctttcgccacaataactactaaaatcaataagaatcaacacaaataattcaaatttaatacaagaaagaaactataaacattaccaaacaaaatagcaacccaaattctaaaacatgcataaaaataagattttctactagaaatccaaagggaaaaagagagagcaaattactttgagctaaccctcactcaaattattaaaaccctaattgaattctcttgatttggtctaaaaatggaaggaaaaatcttattttttctggggtttctacttggtcaaacacaagaggagagagagagagagagagagagagaaagagctggtgtttaacttagttttatttttggataagattttatttaataaaataaatttacttcagtataaaacataactttaataatcaaataacaatattaataataatagtttctacataattaactaatgacaaatctagggcaaaattacaaatttccttctttcttcaccatgaaataattttaaaacctaaaggtaatatggtccaaaactataaccccacaataacctgacattataaatgcttaacaagatcattgcctcgctatttttaaggtaccaaactgtatctaagttactctacaagccacatgtcgcattctattgttactggacataaactataaaaatcataaaatttcacatatatcatatttaatacaccgagaattcaaatatatctttataattgtgaaaataataattaaaagtctattatgaaattaatcattaattatctgctaattctctcataataaagctaaacgatcaggtttactattgggtattacacatcacaagctcatacctaataatatgtttactgcgctctttttattagatcacttatttaccctaattttaaatattaactcaaatgatttttcttaatttgtaagcgcacatattggactattaaaaatattctaacaatctccctcttgggctacagattaattccaataataattatatttgataaccttatgtgcacacaaacttgttagttttctcaaaatatctccttagacaatttggtccatctctaataccacttgtttgaaattagatctaaaatatgtatggatcttaaactcatgtcaaattattaagattactctatgaatcaacatgatggaagagatacctaattgcatgatattggatacgagatgagattatgggtacatagtcttccatagactaatcttttctctatgggttttctcactcaattgataagaatgaaggagaagagtggttgagattaaccttggggaccaaacctttatgttctttatatggtaaactaattggagccccataaacactaattaggtttactattatagctattacacattacaaagcccatactaaataagaaattcattgggctcatttaatgagatcacttatttaaccttagaatattagctcaaataaattatctttatttatgggataatattttgattattaaaaatgatcaaacaatttaagaggtaaaatttcgtgttcatcatttttcgttagtcacaggaaattttcaaaaataccattttttttatgttttatttacaattttacggcctaaatttttaattacaaacatactcttgtaaagttttaaagttacaaaaacacactttgttcagcaaaaattaaaacaaaaactaaaaaataacgtgaaatcaatcccacgacaaccacaaatcaactatgaaactgttgggctttatgccctaaa

SEQ ID NO: 34406 - DNA, 1633 bp, Cannabis sativa
  modified_base (1277)..(1279): a, c, t, g, unknown or other
aggttgaagatgaatcacaggggcttgactattaatagttgagctcgactatgtcagttgagatggtgattttactagtgctcgactatgttagttgaggttatagttttagtagagcttgactactgtcagtcgagatgacaaacgttactgtagagctcaactagatttgatcccgatttatatttttaattgttaaatttttttcatcgatgtttgctaaaagagtgacattcaatagatatgataattctaacatagctcaactagctcgaccaaacatgatcaagatattgttaatactcaattgttgttaaactctttgatggacacattgataaaacttaattgaatttagttgaaaattgaacttgtttaacatcaatatattttaactatttgttaatattaaccatctattttttatacaggaatgacttgaatagtaatctatgttcagtacgatgggagtgaaatgatgaacaggggtcatataagtggtcgccaaaaaataagaaagttatatctataattatcgatgattcaagcactacatttgggatgttattggataaattgtataaaaggattggagccaatcaaatttataattattaatcaaattttcaaaaaatggctcaactgagagtagttgagctcgactatatgtggttgagattagtaaaaattgtaattatatgactcgactgtaattagtagagctcgaccatttgtggttgagattcataattattaatcaaattcatttttatattgatcaaattttgtaaaggttagaagtgacaatagatattatacaattttgtaaatagattaaaattatcaagattattatgaaatgtaaagaatgtaacaatagaaattatgacatttttaaaatatatagttttgtctaaaataaatatggaatatcacaataaaattttagaaatacaatttctttcttaaatagattaaatcatcaagatcattatcaattttctttattagtagagaatgtggcaataaatattataacatttataaaatatatagttttgtctaaagtaaatatgaaatgtcacaataatattttagaaacacaattttttcttaaatagattaaatcatcaagattattattaattttctttattagtagagaatatgacaatagacattataacatttataaaatatatggttttatttaaagtaaatatgaaatgtcacaataatattttagaaacacaattttttttcttaaatagattaannnatcaagattattattaattttatttattagtagagaatatggcaatagacattataacatttataaaatatatagttttgtctaaagtaaatatgaaatatcataataatattttagaaacacaatttttttcttaaatagattaaattatcaagacgattgttacttttttttattggtagagagtgtggcaatagatattataacatttataaaatatatagttttatctaaagtaaatttgaaagtttgaccatattaaatcatatagctcgactataatgtgtagagctcgaccattataaattatatagctcaactgtatgagtagagctcgactgtatatggttgaga

SEQ ID NO: 34407 - DNA, 1431 bp, Cannabis sativa
aaaataaacaaataaaaaataatttaaaaaactaaccatcttctgcacagcctcaacacttgatgcaatagaggctatatttgcaagccaagttctggaaaattagattaaaaaaaccatactcttatctttcgaaaaaatatgactgaaaacttaaaaaattaaagaaaaagaatgaaaacaagatgaagaagaagaactgaataagaaataaaataacaatatggaaagaaaactaaaaataaaaaaacgtgaatgtatggattttaaaacaaaaaaaaaagagagaaacttatgaaaaagaagaagatgaacatggagagagagaataggaaataggatgaacatggagaaagaacatgtatattttgggtctcatctttatcatcatcaattttaagtaaaaaaaaataattataaaaacttatcacaaggtgaaaacatcaattaaatcaaaattatatatatatatatatatttatatagattagagagaaagcatatacgtttatgtatatatatcaacatcaaaccttctaataaaaagtttttaaaaaagcttttatatcaacatcaaactttttgtcatttcccaaaacatgacaaaaaaatatatattttaataaaaagcattatactgccgtataaaacttataaaaatacgcagtaaaaaaataagaaatattgtctggcagtatttttgtaaaaaatgagaaaaagtcagtatattgtgtaattttccccttcttaaaagcaaagctttaaaaaccaattagacttttaattaaaagggagaaaaaagataagaatataatgagaatagtaatagaaagtgaatggaactaaatttaaaatgcataaaaaaataataagagattattaaaaaaatttctcattttgcattagaaggtctttccttacatttcaaatgacaaagtcattctactaaaacaatagaaaaatcatgtaaccaaataaaggaataaaataaaaattatttcatttccattttattttatttcattactttcaaccaaatgtcacattaagattcgtttggtatgccttattagattatattgtattatatagtaatagattatattgtgttttctttcatatttttacataatgctacctaaaattttgatttatatcaaaatattgtacgtagataaatactaaatataaaatagaaaataatttaatataatattatatcatatagtacggtgcatcaaatatccctaaagagcttaagagttaatctacaaataattaatcaacatacttttagtataaacttttataagctttgcttattttgagttctgagctacaatgaatgagcaggttcgagctgaaaggtgcaattcttgaaggaggaataccctttcatagggtccgtggaatgcatgcttttgagtatcc

SEQ ID NO: 34408 - DNA, 2758 bp, Cannabis sativa
acctgtggaggaacttgcatatgcatatactataaaaattgaaattatcatctttggacattgcttcaacattcaaaaaactgatgctgtgaaatggtgtgggaagatataattaatataattaattaaattattttaataaattttataatatataatcttaatttaaaaaaattaatatttatttaaaaaaaaaatagatatagtgacactctaaaagagtagctgattctaataaagtctgactctaaatgcctatagtgacgcagcgagagtgactgtaaaagggttcagtgacacatgtgaagtgtcactaaaaattatttttccagtcacccttattagtgacgcgcggtgaagtgtcactaaatagtttaagagatactcaatgtgggtcactaaaacctatttttctagtagtgtattattattattttgtatcttgaacctaaccaactataattacgggaaggtatgcctatgtttaagggattttaaatcctatatgaatatctatataagggggtaaaatcacttgtagaagagaccctgaaattgatactcacgagatcatactcttgagcccccactctcaaattctaaaaactcacttgaggagtgaactcttggagaacataactctggagaactctccttaaacattgagatcaataacactccaagtggactagcctattaccgctgaaagggggtgaaccactataaaattcttgtgttcatctttggtgaatttacttttgcaaaccggtttattttgattaactatttcttatgttcatcttgctcgttttaagatcttcttagatccgttgacgaaaaaccgcgtcaacaacattaaaaccataaattaatgtcaaacaatatccatctaaaccctaataaattgtttagctactcttgtttatcgtagcaaattcaaacatattaatttagaatagaagaagaaaagaatgctgaaaactccattgaaaaaaccctcgcgatttattttgctctctaatttttgtactcctcaattgccttctcaaaaatatcgaagtctcactccttatatagccaaaaaaaaaagataaaaaataaacaagctaacaaataccgttctgcttgaaaattagaggggtgggccacgacatgtaaatcctatgccgcaatccgtgtcttcaaatccacacgccttcaactgctagacacgggcctaggcatgggatttctatgcctaggcataaccccctttaaattgggcagtgagctttctacgaatttatgcctaggcacacccatgccttagtccaatacgacattccctaccaaattttaaatctttcattccctggcacggatttttaatattgaggcactcctccaaattttatattttcttcgcctcaaaagctccaatcgcgccataacttctgaattttttttttttgaattaatttctagatgctcttgccccgagaattgattttatttgaccattttatttttatttttattcaatattttctattttcttctattttaaacctgcaaaataaaagatatcaaaaagcataaaattactcaaaataagagtaaaaatcaattaaaaatacactaaaaattaacctaaaaataatactaataaaaacctaataaaatctaaatataagctttgtaacctatatcacgtttgaaaaatatgtaacaaaagtgaataaattacatgtgtgagtataaataaatataaatatttttagttgttaaaaactgttacaatattcatttatagtgtttaaatgagtattgagatgttttggaatgagttgactcgaagaggagaattgaaactcaaaattggtgtgttgaaattgtcccaggcgacatggacgacatgtctccaaaacttatgttggaggtttttcgatgttttggcgatgttttatcgatgtgtggtttgagagtatcactagaactattttttagaaaatgttgggacttttaatgggggatgtttctagtgtcaaagccaacggtctagactccacttaattccctatttcggctggtaacatccatgaggatgtataatatcaaatgtgaatcctaggaggtctaaagtgttcatttttatatactagttttccatcaataagcactttctaaaaaatacaaggcctggtaattctcaaaaccatttccatgagagttgtcttaatgcttagagatataggaaaataagcttttggacaaatgtgttatactttattcaagtcatgatgattctcactaatctatatttaaggttgtgagtgggtgtatatatatttaactcttgttatatatatgtgttatacctgaaattcgcctatcaaccagaagctgacacatgtacttcaggaggaatatgaatcaacccaataattatattattaaatgcaacttacactactacaaaagtgtgtttttgcatcggtcaacacgtcagtcaaactgacgccaaaaaacaacaataagattttttatcagtttggaattgagggcattttgtgtcggtttaaaaatgacatattcgacatttgcatcggtttatgatagtcgcaacctagcgtcaatcagaaattgacgcattaaataaaagaaaaaaaaaacctagttcaataaagacccaattgacacataaaaaccctatgtataaagtaaatataaatctaaacctaaaacacaattagccgcaccccatctctctctctctctc

SEQ ID NO: 34409 - DNA, 1698 bp, Cannabis sativa
agctgggcgaagaatgtacatgtcagggccatatcagactaagcgggttgagggtctactagtgttgtgcttttgagactctgttttgccgcttaggcaggctgaaggaaaaggacttgtaatattattttgtaaatgtttttgggatcccaactgctgtaacttttagtttataaagtttaaagtattacaagttcattttcattcctattgttataaaagtttaaattctgcgctaattctattagtaatcccgtttaggggattagggttttataagtatcttgggtggcgtgcctaattatttagggcattacaattaagcttggacacatgggacaagatctaatcctgtgttaaaaaaagcataaccgtcactacgcgatctaagtttcgccaaacatagacgtccgcgacactcctaggcggtccacatccgcaataggcttttcgagtacccatctgggtattagctggttaggcttccatatttggaccactccaggtcggggagagacaatatgtcttctgcgtccgtgaacctaggataaggtagagtggacttccgcttatctattagtcttaacttgatgtaggtaacatgaggtttcttcgtgataggattgtaatgggagacttcaattactgagattatgagattaatctcttgttttatatgccacatgtcacgtgctcagaaatgcagattacaactccaaatgatgatcatcaatttttggagcttgaatcacgttcgttggatcgtttttgggttatttgcgaacaaaataacacttcaactaggggagagtttttgtatcgccctaatccctaggaatgccacctgtgtgattttggaacatagtttagtaataatagattgattatttaataaaatatgtgataataattaaaacttcactataataaaactatctcaacgaacaagatgacatcattaaaaatttgttttggggatcctttgtaacaaaagttttacaaaaagagttatatacaacagtaagtcaaaacacatatcaggcacagcccaaaagaactcctgacaacttgaccattcacgctagataagtcgatatgtacatttgtcggagaaggctatcgtctcacggttgccgtagttttccttgcccttacctgtaccacaaagcgctcgtgagtcacaaagagtagtaaaaaaaataatggaagtatataacaattaaatatataaatcaggataataacataattacacattaatattcaagtagtggttttataagataagccatatttttttttttttgaaaaaagaagatctttattcaaaacaagcaaagcaaccaagctatagccaaagaggcagttgttgaaagactacaacagccccaaaacaccactaccaccctctaattacattcattaaatattcatttttcaaacaatctttaaagggccctttattcaaaatccttagcctaactatacctctcacaaccaaaattatgtttctaggagtagaacatgtcatctcaaagatccatctatttctattcttccaaatttcgtaaaacgctgatgccataacaacatttacaattctattttggagatcataataccagccacaacacctgctatatatctcagccaaagaaccaggccaacaaaagaaccccagccacttgttaatttcag

SEQ ID NO: 34410 - DNA, 3100 bp, Cannabis sativa
  modified_base (51)..(58): a, c, t, g, unknown or other
ggtacaatacatataaaaagaggtatatttcaaataaatataaaattagannnnnnnntgattaattgattaataaaaagggcatttttcgacttaccccttaacatttttagttaatgtggacaccaccgatattacagagcatcacccattctcccaactaaaatttctcacgcacgtcttaattaaacaattctcccaataaaaaatcattgagaaattgagatcgacttaagatgataccatattttgtattacgtgataataacctcatcgacgtgggtttcattatcattgattaatattattccttgttcatacatataaataatatatatattgtttatttgttgttgtttgcttacgtagtagtattgatactttgaagcctaaataataagacatatgtattttaataattttaaattaaggttaggataaataatggtataaatatctaaattttttagtttataagtatttaatgttagtaaaatctgtttaaattcaatttgttaaacgttctgctaacaaggcttgtagctcttgttttcactcagttcgtatattcaccgagagtaatgctctagtggatcttttgaatattgtattggtttatgcaatttgcaaataaaatgtcaccattttatctcaaaaaaaaaaaaagtataatttttctcttttttgtcaatacatacattattattattttaaatctaaattattggatttgaaagaaacatatatgagttacattgaagtcttcttttaataaattaaaatagactttgtatgggaaaattagattaaaattgttattttacaaatattgaatatttatactactaaaaaaaataatgaattatacctattataaatataaaattttgagtatttatgtcataattatctcttaacaattacctctttaaggttatgacaaattatcatctttcataggtgcagatttttttttttaaaaaaaaaatgttggtgtatattttaattaggacaattattgtattcttgttgtgactatgattttttttatttattatgtataagaagagtgtaacaaagtatttaaagctttagttgagcaacaaaaattattcattttgtttcaaaagctagcaagatgcatgatataattacaatatatataattatataagaaaattaagaagatgtttttgtttttgttttaaaaaactaaaaattgtttttttttttttttctgaacaaaaatagggtgttgccattggttttagaaaatcattttctcaaaataaagttacaaaaaatatgttaaaaatattattaaaaaatatgtataaggataatataataattttacaaataaatgtatgtcctccaaccttccaccactacatccattctaccaaaaaaaactttaaaaaaaatgttactcaaatctccctgtctcctattctatttccttcatcaacttaaaaggattgtagctatgttttataaaatttggtgggaatctcacaaattttattcatttccacacaaaaagaaatgggaatttctcacaaattgttggggcttattcaatggtgggccttattggaaaagtaaccttcaaacaactataggcccaatgcttcacttaccctcacagcctactttccatagttggaaagggaaggcccagaccaatcaagccagtctcataaataaagacataaactggctcttaatatcttcatgatctggaatttggacctcaatttgtgttctgttttgtctttttgaaaaatagttttgtcgttgatttcttttatggtccatgacaacagcaacaacacactaacaaaatttgagaaatatattagtaaggaataataataaactcgcaaacatgacaaaattattgtgtcgtttcgaagaaaataaaacatcaagttcaaagtgccaatttagaaataacatataagtaatggaaaggaaacgataaaaacatgaatgaaggtaagatgtaagtaagggtatcaatcggtgaagcataatctagaaactggaatagaggtgtgagaacagattaactctagttaaaatgacttgatgatgacatccgctaaatatgttattttattatccaaagaattaattaatctaaaaaaattaatgataagtggattatgacattttagctatattaataatcggatacagtaaaatttaagaattatataaattttgatgtaaaataaaatttttatatagcttatgtgacttatccctcagaagatttaggtttgttgttcacaatgcggagaagaatttgaaattctggaacatacgcttatttttctgctttggcttaattctattatgtcactgattgggggtatggttggtgctttgttagtgtgtcccgcagtcgaaaattcttttatttctcttgaaaatttatcttgtgaggcatttgaattaatgatggttaccttatggtgactttggtatgatcgaaactcattattatttgataatatgcagtcaagctgggacggtgcaattcaaaccaagtttgacaacgacctactcggtggatgtcaccaccttctgagttctttgctcttgcgactgatgcttcagcagttcttgggaggggctttgtcgagctgggtggagtgatacaggatgttgcgagtgtggtttggctggtttggtcatctagtgttttaggtgatttttctgttaatgtgacagaactgcttgcaattaaactggggttctcttacacaataattcagtttcaatatttttattattaatagtgattctacatggttattggttattggttgaattaataattctaacttaaattttattttttagtgtattttattaaatattaattttaattattagttattgttggtggcagttcttgcagtattattctgtagtcgaggaatggtgttgcttatataccacctactaacataagagagtgtatatagatggatgttatccataatttttaaatgagcaatttgcggcgaaacccccttatgttttgatttttatacacttaacccccttatctttatttttggtggcaaaa

SEQ ID NO: 34411 - DNA, 1289 bp, Cannabis sativa
catatttcagtcagctttgtaattaactgccactatgcaattataaatagtagcagacaagatcacaagaaggagggacgaaaaaaaactcttctgaaagagaccttgaaaaaaatactcagaactatgaataagattgacacgtggactatgcagaattttaactgcaaaaccacaaaaaaaaccttgtgttcatatattatttttttacaacttttattttttctgtgttgagttatcatcgtgaggctcaaatttagttaacgaaaagtctgcgttaacagtttggtgctctcattgagagcctctgtaaacaaaagctcagaaaaaagcctcctgacataaaaatggtggatgacaccaaagataatcatcctcaagaaggaatgaatcattgtcccgaaaaaaaaccattgagtcctcagggatgtaccgagtcattgcatgaaaataatgcaagccccaggaagacccagtattggggctcctggcttgacggaccttggatggggaactatcggtcactccctaaccaggttgatgaaaatggcgtttacgacccaaccaaatacataccaatcgtggaatttgaaaaccaccatcctaggcgatgattggaggaagtaaaccggtgtaataccgagttaaagcgtgaaatagctgtagtaaaggcagcgggggaagatggtacccaaaatcaacttgaccttgggaaaagagattcacaaggcaaacctcacggctcgcagaccaaggggcagaggataacccagagatatatttgaaaccctcaggaaatacaacttgagggaactgaggaaaacctggagacacagcctgagatacgcgaaacatcagacaaaaattgaaaacccactattcaggctcatgagagtgaaactcgttcaaacccttataggaagaaaaaggtgagttaaaccttgagaggaagggcaaggtccgaccacaatcatgacaagagtgatttacgagaacatctgaacctgaagaagcctgacctccgtcaatgactcggttcaaggcaaaaggattcattccatttgcgaatgagcgagttggagaataagttcagagtgcatcaagtcacgaaacccaggagacaaccggggcacaataccgttggaaaacttgatttagaggccgcaggatcaaagacaaaagaagattccaaaatgctgctcaaggataagaagcccaataggtatatccctctttatgccgaatataccgagcacaatgaaacacgggaaaaaatctacctcgcacat

SEQ ID NO: 34412 - DNA, 2392 bp, Cannabis sativa
attatcaaaatttctaccatttatatattttaatgaagaaaaaaaataaaaagtgacaccaccatacacactgacaaaagtgtacgacagacatactagattttgtaaaagtctcacacacatttttgtaacatgatattagtgtatgtctcccagctataaatctcaactttatttttccatccaaaaaaagagtctagtttattttttaaaataaaaaatatatctaaagctaaagcttgacacaagtctaaatatttataaaaaaattaataatggatgctaaaaaagatctaaaataatgttgcatcgaagctcgttggctgaggcagacctgtctgagaagacattgttttggtacagtataaaaaaagcaactgaaaagagttggtaaaagtagacacagaaggaagcaacaaaagaacacgtcaaatcacttacttttatttatttatttattgtattttagccatttctttttctctctctaattctacttttattgctgagtaaggaagatttttcttcatctatttatttatttattttaatttaataaagcttgaaaatgaggaaaaaggatctggtctatatgtgcggttgttgtcttgtaagattaatattattattttcttttagttataaaaaagaaaagtatatattattattatttttttttccttggctcttttttccatcgctttcaaccttttcacagtgaaaaagacaatggtgccaatatctacggctttcaacaccgagtcactcactcgccccaactttctacaactcgttcctgactcggtcataattcacatttttgttatttgtttgtatggccttttctcattgcttttcaattcagaatcgaatcctttgtgtgtgtttgtttggtgaaatacgttctctggaaattattaaccaatatattgctattgtgtattttttctcctttcaactattgatatgtatgggtgagtacctgacatgaaaaacaatatgtattaatatatgacacaatacgtcataaaaaaaaatatgattttagatattattaggaaatggtgtcattacaggaaagagtaggaagtttacaataaaaatactcaaaatagaaataaaagtattacataaaaaaaaaaaaaaaaaagctagaaaagaaaaagaatcacacaataagggtatgtttggtttatagaaatgggaattgtaatggtaatcaatttgttcattactttgtttcctttcttttttttttaattttgtaatccattatattttattacattgtatgaagtaatcctccttacaatgaaaaaccattgtaatggttattacaattataatccattacaaaattaatataatattataataaaaatataataaaagaaattcaaaagtctattttaccttttatattaatattttataattataaaaaataaaagtaatagggatattttggtcaatatatattttattccattacatttccatactaaaccaaacacaataattttaattacaatattcattccaacaacaaaccaaacattgtaattaattaccattacgattcctattccattacatttctattacaccaaggcaaacatcacctaagctttatcaatgttcaatgatctttgtcttaaaagtcattttctccctcatatagacacttgaagaaactttagaaatgctcttaaaatttatgaagccacatatgtttagcctagtgtctaaggatgagcatatccttataaggttctaactacaacaaatgattttaagtacatctctcacaagtgaacaatatgacctttatttttaaaattttcaatcccatatgaacatgaatgactactataaagcccttgcatgttaccaattataaattgggcatttatagtattaattgggtgatttagatgaattttggaatgttagaaggactcccaaactttaaaaaacatatgcactcgttgttgaaaaaaaatagtaactagttattagttaccattttttcaattttagccaattcttctctaaagtgttctaaatcactcccacttaattttgaactatttatacaccttataaatgaataaatcaagtctccgacaactacattttcaataactatcattcattcacattcataaatagttagtaatatcttttataattaatttaagaataaaaaagaggtgagaattacgtatttaagtaatcatcaaattaaaagatttgcaactcctatttttctatcattctacacacatttgtaaccccataatgtatgttataatttgacaaaattaataatttgtcacactgaattatttgtaacttaattatttactctaaatattatattatataaaat

SEQ ID NO: 34413 - DNA, 3256 bp, Cannabis sativa
tttgaaaaagaataaggatggatcagctctgatttcccacgactttgccacggctatagacagaacaattcgaatcgttgatgcctttactactggactgaatgtttctttaaaatcaattcccggtctttgatgaaaaccttttgcaaccaatctggccttgagcctttcgacagacccatctttgtttctcttgacacgatatacccatttgtttccaacaatattcatccaaggaagctttggaaccaaaatccatgtcttatttttcttcaaggcaaccatttcactgcccatagcgttgttccaacctggatgttgcaaggcttcctcaactgtagccggttcatcattttcaacattccaggttgattgtccaacataagtctttggtttaaagattcccgctttggctcgtgtaatcatagtgtgtgttggtgctaagggagcatttcgggcagttactggtggtgaggaggcttgtgcaaattcttgatctgcattactttcaacagcaggctgtataatgggtgattcaatattcatggaagaggttgaggagtgatcatttacctgactttcagtatgaagtggagacaacaagttggatgcacctgcaagggagtttaactcagcgtctgtaccagtttgatgaggctgagatgttgcagcagtggttcgaatgggattaaatgaagctgaccatgatggaactaaaacctgcacagatttttcttgctggtgtgtatttaaaaaaccagttttaaaaggaaaatcactctcattaaatatgacatttcgagatatgtataatcttcctgttgtacttagacatttgtaacctttgtgagcatcactatagccaagatttacacacttggtagagtgaaagtggaatttatgagtttggtatggtctaagacaagggtagcaggctgttccaaacaccttaaggaacttgtaatctggctgttttgagtaaatgatttcgaaaggggatttgtcattaagtatgggtgttggcagtctatttataagatagacagctgtttggaaagcatcccaccaatactttagtggcatatatgcttgagcaagtaaggttaaccccatttctacaatatgcctatgctttctttccgctcttccattttgagctgaggtatgagggcaagagtggttaaaactaattccattttcaatgacgatttgagagaaagcttggaactctcctccccattcagttcttaaggcttttattttcttttcaaattggttttcgactaaagctttgaactgaatgaaggcagaaacagcttcatatttatgtttgagaggatagatccaggtgaacctgctatgatcatcaacgaaatgtatataaaattgataatttgtgtttgacataaccggtgctggcccccaaagatctgtatgaatgagatctagaggagcctttgtacggtcactgttgagagtaaaaggtaaaatgtgagatttgccaaattgacaagcttcacagaagctgtgtttttcattcatagcagttttgacattaacatgatttaagacaacattcaaaacacgattggatgggtggccaagtctcttgtgccacttatccttaattgaaatagatttaacaacgaaaaactaaagctgaaatagagtttttctttgctgcagtgactctaacaggctgatttgaattcttttgcagctgctcaaactggtacagcccctctttaagcttcccttgaaggagaaccttctttgtttccatgtccttcacaacaaaaaagtcagaaaaattccacagaaacattgttatcacaggttaatttggatatgcttatgaggttcttggtaatttctggaacatgaagaatatttttcaacagtaaagggtttgatgtgtaagatggcagagtcaaacaaccaacatgactaatattaagtttggcaccattgcctacagtgagtgtgtccttaccattatactcatttttctgagtcatttggttggcatctgatgtaatgtggctattggctccgctgtccgcataccaagctgtatcatccaccatttcaggggtagctatgaaagcagtcgctccacttggtcctcctttgttgttgctgctgttgttgacagtgttaggatccattcccatgtaagtctcgtcatagcgattgtagcaataagctgcagagtgaccataacgcccgcacacttgacacgttggcttggagttgttattgtttcttccaccacctcgacctcgaaatcgtccaccagaaccccttgttcctcttccaccatgttgtccactgtttcctccacggtttccaccagtgctgaagttgcttgagccgcctttgttatttgaatatccacctggtctggttgttgcaacatttgcactaggaccagcagaagtaagagcaacatttttgttagcaccagttaaagaactaagcctttcaaccttactgtcataacttaataggatatcctgtagctcttgccaggatgtagaggacctggcctctacttgaacaacaatgggtaaatattcaatgtcaagaccagataaaacattagacacaagttgtttttctggatacgggtcacctgcgagggccaacacatcaacccattgtcgtttttgtcgaaggtagtcagccatcgacatagcacctttcctggatgtttggatcttcgtacgatactcatccatcttcacgcgagagtgtgcaccaaacaaggtttccaaagcctgccatagacaggaagaggactcgcatcccatcacttccgttgcaatactttcggtcatagagccatataaccaaccaaggagaagctggtcatgaacaatccaagtttcaaattcaggattaacaataacagtgttcccttctgcagtttcatctggaggaaggaactcgattggcttgacctttgcaccatttaaatatccaccaagacgatgtccacgaactatggcagagaccatagttttccacagagtgtaattgtttcgatctaacttcaacgcaaaaggctgagttagcgtgctagcaacatgctgcacaggagctgcagaggtgaccgatgaagcttgagcaatgacattcgaagcagtccttgttgctgattcgactccaccaccacgaggagtttgttcagccatgacagattacaacaccaccggtgaagtacggcgctctgataccaagtttgaaaacagag

SEQ ID NO: 34414 - DNA, 4361 bp, Cannabis sativa
  modified_base (696)..(697): a, c, t, g, unknown or other
aaatgcagatcacctatccattgggatgaagtgggtgaaaggaagttcttaggccccgaggctgttcagagaacaagtgaggcagttgataaaattagagtgcgaatactcgcagctcaaagcagacagaagagttatgttgatccaaagcgaagaaacattaattttcagattggggacatggtatttctccacgtattgcctatgaaaggcattaaacgctttggtaagaagggaaagcttagcccgaggttcattggatcttttgaaatccttgagaggatagggcaagtagcgtacaggttggctatgcccccagcactggcagttgtacatgatgtgttccatgtttcgatgcttcagaagtatgtctcacatttgtcccatattctgagttatgaagcattggaattatagtaagatttatcatacgaagaacaaccggtgcaagttcttgatagaagggataaagtcttgagaaacaagacaattgcactggaaaaagtattatggaagaactatacagtggaagaggcaacctggaaactcgagacgaatatacaacagaaatatctggagttgttcaggtaaattttgagacaaaatttctataaggagggggtaattgtaataccctaaggttaagaaatagattagaaaatcctaactattataaaattatattattatataatnnattatatgtgaattaatatgatttatgacatgttaagaccccgttggtgagccaatggcattttagtaattttgacccaagaagggtaaaattatggatttaatttaattacgtgcttatgaactatattattatatagtatgcctatttggtcccttttcaggtgtaatctgacaagtcagcgcgatgtagtcacaagcgggtatttcggaccgaatcgggttcgcggccaaaatacaattttgggatgatttattggcattttatttatatgtgattaatctaaaatttatgagaatgtgctatgtgatgaaatgactatattgctttgtatgggtattatgtgtaagtatggccatgggacatttatgtaattttgcaattttgattatgtttaaacaaaagggttttttggttgagaaatggatttattttctagttttctctctctcaaactgaccccccctctatttctctcaatccatttctaaacattgttgaatttgtgagaacttgcttagatcaagcttgatttcagtgatctttgagcttggctttggtttgagtttgaggtagccatattaactatttcatttaaaatttcatgttgctaaaatgagattgaaaaataagtttattgtgtgattatgtccatccatgcatgtgtgatgaaacttgggaataatcttgttattttggcatgtatgtgttgtaaatgtgtggaaattgttcctagtgactaaggaggcatttttggagttatattgagattaaaatttgagtttagattcttattttagggtacgtgcaagtgagtgattttgaaattcattactcttggttgttcaagctcttgaaaggaatttcgctctagtatggagctttactttgaatgttgaccaaatttgaatttatggtgtttgtatgctgaattttgagctttaaatgtatgttctattctctgtataattatggataactctaaattatgttttgggagtttgtttaagttttggacatgatttgatgtgttttatgcatggttttttgaagctggaatttgggtttctctgggtttggagcctaggggccgcgacccagcttttgggcaccgtagcctgcccctgttgaaatcctgggttttaagcccaagtgtcgcagccccttgtggggagtgctgcgacccgcccccttgtttctgtgcagattcgaacgcgatattcgaatattcataacttggagatacggacttcgttttgggagttctaaatattgttggaaagctcgttccgagctctatgtgaatatctgtattttgaatgccaattttatattatgtaaaagtggaattcaggattaaccctatatttgtgaatcccagaatttgtgactagcattaccggcacttggtcaggagcacctgaggatttggaatctccacgtttgtgggacatcaggtaagatagtggttagcacgtagagttatgcgtggtggcgcttatattaaaaatgatatatgtgagtaatcagaaactgggataagggttattaccctaacatgagcggtttaatggcctagggttattatccaggtaattattaatgtgtatatgctattccatgttaaatatatgtgtataatgaaatttagagttatgcgttcaaggcataatcaagttgaactcggtagctagaaccgagatgaaccattctaaggtcttattacacatagacgtgttagtatagcatgtaggtctatgcacatagacataaaaaggcgtgtgagcgtaactagggctgtgcatgggttggactgagccggccaacccataaataggcagatcagtttatttttttatgggccaaaattgtattaggtgcaaaagttatcaacctgcatagtatgggttggaatttggttagactttttgtggcccaacaaacccaacccaactcgattgcttcatttaataaaaaaattatatatatatattatacacataaagaaatcagaccaaaactcaaatccctaacccttccttcactctcgactcacgctttcaagagcccagccaaaccagatcatcatctcaccctcactccgccccatttcctttctcttgtcgaccctagccataccaaaagcttattccctctatcatctcttccacttctagacagacctaagaacgtacacgcacacacacctgcagactcgtccattcgagattggagacgtcaatggcataggtaagtgtattcttccttctctcgtctcttttattttttttctttgcttaaactattctttgtagaactgtcccccttctgtctctaattgaatgaatcactcctccatctttataaatacctcagccgcgaaaccgatatcagtagctcactcgctccttctcgtcttgtattgatatcatctctctgactttatcttcttgtttccttactgttaatgttcaattcttataaaaccttcatttttatttattttattataagcttgtctttgtatcactcttttcctaagaagccatggcagatgttgctaattatttttttattatttatttatattaaatcaggtattgtaatttttaaattcaaattgtgttgtgttttagtttatgctatcttttttatatttacttttgctagttaaattagaatatccttttgtttctttatttatttgtattttttatttgttatgaaatttattttaatactctctcttttagttacaacaattaattgatttagaaaatggattaattctaaatatgagttttttgtactgattttatattatgatgttgatactttttaagaacttatttacttgaatgagcatttagaaggaaatttatttttgtaatttgtttcacgattaaaaataatataatacttgaatataatgtgttttttttttttttgaatttataataaagaacaacatcatattagaatgcaatttttatggtttgttttatgataaaaatattatcatatttgaatgcagtgttactgagtaactctgtctcttttttttttttaaatgtaggcaacaattcaaaggctcaagcataagagaagatgaatattgatattattaattgatgtcaaagaaatatatatatttttttgttaagtatgtaatcacttcctaatagcttggactttggatagttgtaatattatatttttgatgtatttgcttaatagcttagattttggatagtagtaatattatattttggatgtatttgccttagtctgaattattaatgtctttgattcaagtgaatttttttagcttatatgtttgaactctaaatttttaatggtagaaataagggttgtaacccaacccgacccaatccaacccatattttgttgggtttggttggtttgggttataaaaaaaattaatatgaatggtttataattttataggccgatcttaatgggttgacctattaaaataggttcaacccgaccaactcaacccattctcagccctaagcgtaacacgcatatttgtgtcatacaaacatatgtgaaatgacattgatgtttatgtgatatgttaagtatgattattgatattttatactatctggatgggcttggctcacgggtgctctactgt

SEQ ID NO: 34415 - DNA, 1892 bp, Cannabis sativa
  modified_base (51)..(56): a, c, t, g, unknown or other
  modified_base (955)..(957): a, c, t, g, unknown or other
  modified_base (1613)..(1615): a, c, t, g, unknown or other
  modified_base (1734)..(1737): a, c, t, g, unknown or other
agtttttttcgtccctcttttgagattgtttgccactatttataattgcannnnnncagttaattacaaagctgaccaaagtatgtttacagtcattgtctctgaaatcgtgggatctgattacatatcacgaaatgtaaatgcggtgtatgattttaaaaattgtatagctatgattttttcgcttttactgggtcaaaaatattgtgtattaaacacgtctttaatggctgaatatggagatgtctcgacagaaacttgattatagtgatccgaatggcgagctgggactattcttctttccgaggttgacaatgtatgtctacgtcgatcgcgggtataaataaattttctaacttgccaggattatgagcctcgctcctgttagttggatgaagctattggaagtcttctcatagcgagatggtcatctcgcatacttgttcttcaagccgagacgacttttacccttagtttgcttattgcaagctaaggtatgcgccactcttcttcggtgcctcgttattcaccgacatatagtttctcgctaatacactaagtgcctatttgtacattgattcctcgcctaagaccttacagtcagcgagttacaaatatactctgatacttacgtaattaatgagttattccataaaaagctattgtaccgattcacattccctttatcttgacacttgtcctccagtcgaattttgggtataacaattgtcccttaaaaagttcttttttagtaaaaaaggctttttaataattacagagggcattttcgtcaagatcttttcttagaaaaaacgcatcttttaattttggcagttgtacggtttcgagactcattatgaatcacctattcatattttgcacaactttcaaccgttagatttctcaatctttggctttcttatcactggacttcgtgtataaaagggcggctcannnttgtcatttttcacaaaccttctagctctttagtgagatccattttcagaatggatcatttgtttcgtgccaaaatgtcccttttgagttcaaaagttcatccttccaaactcataataccttgatgtaccaaccattttgcatttgttccaacagacttcaagcctcaattggagtcggaaacgatagattctagggctgaggagcttccaaccaatccaaaccagggaaaccccgtagcctggctgatcttcacaagtgatccctgagggtatagatcttgtgaacgatctcaaaggtcctcctcatgctgatgaagaattctagaggaagattggcatggttttaagtggatctgggaaggaagttggagtggtttctatcagagaatccagccgacccaaggcccaaaactgtaccaagagatctttgtgtcaacctctctccaatgttgagaaatttcctgaggctgggaaaaagatctcggcttcaggaaatgggatctgatgatgaggagaatagggtgtgtgcagagatcaaggctctctatgtgtagatggtctttctcgtctacattagccgatctttctccaagctatgtgtagacggtctttctctctcatcctttgtttaggagaatgacttaatggtttgcnnntagtggcatttttgtaaagacaagtttgtaaccaatcttaggtttttcttatcttaaatgcgttaactgttttcattcgaatttaatacaattgtatttgcttgcgtttttattcacannnnaaacaactatattttgatcaaatatacaatacttttgggtttctccattgctcgtaatcttcttgattaagtagcgagtaatctactaaactttatgattttcgagcagttgtcaattctgcctcgcaattgcagttataatctgccttaagcaa

SEQ ID NO: 34416 - DNA, 1218 bp, Cannabis sativa
gcccatgcttggctggcaggtggccttagtgtacacctctattgggtaagactggaggtatggccttagctttcttgaagccaagagtaagtcgatggtcagcttctccatgattgggtaccgaatttcagcatcgattagtctcttattgatgtagtataaagggtgttgtactcttttttcttctcttgtgaggacaacactcacaacatgttctgtgactgctaggtacatgcctagctcttctttgtctaggggttcgggcaacacaggtgactgagccaattgtttctttagctctggaatgcagtttcacattcctttgctcactcaaaatttttgtttcctctgagaatgttgaagaagggtacacatttgtctgtagatttggacacaaatttgcttagtacaacaatgcatcctatttgtctttgtactttcttgatggttgcgggtgacttcatgtccaaaagggcttggatcttttctgggtttgagctccatgttatagctacaaaggattttgaagcatttgtctagatcctccatatgtccccaaccttattgttcctacaaatattacacatagtgttattgttaatttgtgaaacatgtattggtttgttactaattgacttattataagtttatttgtgtacctaggttgcatttttgaatcatgtaaaggaagtgtcattgaggatggttttcataaatgatttctaaggagcatgtataagtgtcattgagttttctgatcttgaacatgcatgttttgatgctaggaagtaccatttagtcatttacagttgttatcgacacatattaggctgcagtccttagatgatgacttttttactttgtattgttgattcatttttatggcataaaggcttatggcaagttttattgtatcttcgtctttgtaaagttgtccaacttgtatactatcaacttggatatacaattatgtttaatgtgttggttgctttctcaacttggtctgtaatatattctgcaattatttgtgcaagttgagttgttgtaggtaactcttcagttttttgtacaaatggttcaacattgctatctatttgagttgtgctaggaatgcatgataattgttggtcagatagactttggttggggtctgaagacactcaaaagtagggttgtacaaaaaaattcctaaaccgtccaaaccgaataacccgccca

SEQ ID NO: 34417 - DNA, 1235 bp, Cannabis sativa
tatacgtaaccttcatttcaaaaggaatggaaaaataaataaaagatagaaaaatgaaaataaagtgaagtgttaaaaaagtaaaagtaaaaaaaatgaagtatatggaagaatgagaagaaaaagactgaaaataaagagaaagaatatatatatggagcagggtacgggtggacatgattaagttcactctaattgagtccgaagttaaattctaattgaattagatcaattattgaatattaatcttaaaatctaattaaaaattaatttaatttaattacattcaatatatattaaaaaattatatttattaaaatataataaaaaaatatatattttaattatatttattttgatggttttttttatttaaattgttaatacttagttgttttatttatttgatttcatgatattttgttatattttattatttgatactatcttaattattttgaacttttaattgtattaaatttgtcaagatgatattttataaaggattaaactaaaatgaagggtgatatatactttatatcatttttcatattttttaattaatattaaaaattaggcgtataatatttaattaagaaaccgatctaatcaaattagtagttggattggattagattttaaggtctaattagaattgataaaaaactactacaaatttgagttttaatggcattgtttagtgacccgcaaacaccctcctaactataggtgtgctatcgtgattttttattaattgtgcaatttgttgctaatcaacaaatttattaaaaaatcacgtttaattaaatcttttctgaaattaacttttgcttaaataaaataaactttacaaagtcgagatcctatattcaaaagttataaccacaatacaaaatactaatacaaacttgtcgccaagcgactaatcaaaatgcagcctattgtcccgaagactgatcactccaggtttaaccgcctcgatatgtacaaccttcatctgctcgaactcactactgttcagccttagctttgcccttacctacacacacaataataattgtgagtcgatagactcagtaagaaaagcatatataatcataacataaatataaaccagattataattaggcgcacatacacctaatcataatcctaaccccgtgtcccacgtgatactgagtctagaacattcgtacgatagtactattgaccataatattagcctatactcggta

SEQ ID NO: 34418 - DNA, 1215 bp, Cannabis sativa
tgtttattttatatcattttagaagttcatgtttaggacgttaaaaacatacttgttagtaaatctagatttgggttaaatatattccaacaactgcgctcaaagccatggtaattgatttactttcaagaaatttagacttaaaacgatgtatgtatgatttggatgtgattcatgttgatctatgtgtttagtgatgattgtttgatgtttgcaaattttttacgtaaaataattataattttattctgaaattattttttttgatagtatggaaaaaattaagcaattcacttttttttttacagaatttaatttcgattttatttgaattagttataaatttttgagaattagaaaaatcttaagggtggtgacacccacacacgcgcgcggatgccctattttctcgggtgcacacgtgttcggacatgtgcatgtccgagatttctcggtcaaggtggacattttgtgtctgaataaggggccatgtgcgtgcggagaggctgcatgcagcctccctatgcatgtttcgtcggccaatcaccccctagcacgcgagcggatggtatgcaatgcataccatccgtaccaaatccatttttttttttccatttttttaccttttcatggtttttcatggaattaacttcgaattaattgtgtcattttgtatttagattttttttttcatatttcaaatctaattatcagaattaaattaattattattttttaattcatttaagatattaatagtttttgaaccttaagaatagataaaaatctatgttttttttcttagttggttatcttattttaaattttgattatcttatcttatttttaaatttaagatcagatatttcatattatttaattaattttataaaatgactttatttaaaatttaaaataagattattttaatctaagatttgttgaaaacctaatttttcaaatttataggtttaattttgaaattaataatttaattaatttaatatttttcgaaaataatatttttttattatttagatttttcgaaaataatttaataatttaattaatttaaattaaataaatcctatacccatatatctaacttgttacatatatgtgtgttttatatattgtttattatcaaaacttgttttataaaacctattatagtttgatctaaattgctatggttaacttattgacaaatccaat

SEQ ID NO: 34419 - DNA, 1880 bp, Cannabis sativa
ttttttttttacatttttatatatatttggtttttttaatttttttataaaatctgtttttcaattttatttttcaaaaaaaactctctatttataaaaatacttttatgcttatgtcattttttctctatttctttattagtctcttttatatgttaactctctctctcttccattttctctttcttctcttcatttttgtctcttcaaattaaaaaaacaaatgtgatattaattaaataaaggatatttactcaattcaactaaaaattacatattattactttcttattagtgggtggcgttgtgaataattttaccattgattgttttctttaatacatttttagaagtttgaaaattaaaaaattactacttacacattaatattgatatgatgtacttttcacttttttttttttttttaatttttacatgttagacattattttttctctctcgtcactcaaatactctttttttttgttctacgattttactacatatgtttcccattccactctattttttatttgtgaaattattttttttagttcataaatttacaattcactatggggtttttttttaaaaaaaaataaaaaagtaccaagactatggctatttctagagcttctttatcctttcttctaatcctagatcctagaaatgttactaaaaaaaattaagaaaatccaaaatgcaaactaaaataggtaaaaacgctattgcaatggaggatgaccatgtttctcaacctattgcaatggaggatgaccatgtttttattcaaaaaaaaaaaattcaaagaaaaagtcattgccatataaggttgaaaatgaaaaagcaaaaaaaaaaaaaataaaattaataaataaataaaaaaaaataaaaacaatgcaaatactagtgtaagtaatgtcatgtataaataccttacttttatgttttatttataattttacggcctaaagtttttatttacaaaagtacacttttaaaattacaaaatactctttttctcaacaaaaaagtaagaaaacaactaaaaacaacgtgaaatcaacatcatgacaactaacaatcataaagaaactacaaaataaccaaaaatacaaaaaaaaaaaaaaaacaacaacaacattgtggcagctacaatacaactttaaataaactataaaacaaaaaaaaaaacatttattatttttaccgaagtacgtatttttgtaaataaaaaaattcaaaacgtaaaaataaaaaaatattcgtgttaacatatttttgtaatttttttttttcaaatttttagtctattatgcaaaaaaaaaaatattgtttatattttgtattgttttcctctattttttatatttgtaaaagagtacttttatgtttttgtgattatacaatattgatcttaatttcgttcatatttttattttgattctacttagccatttaatcattttttgttgttgttcagttttattttatcactaagcaaatgtatttttggaggtattttttttgtagttttttagtttttaatgttttattctaagtatgataacctgagtttctttggttggattttaggatttatgtaatgtttttcaacattatgatggccaatttcattaagtttgatttatagggggttttttcctgtaatttttgtgtcttagaagaagtattaatgtttgattacgggttttggtggtagtttttgagatgctatgtagttttttttagttgttcttatctatatactagtgtcattttccatttgaattttggttgttacaagatgtttatttaggtttagttgttttatggtttttaatcacattttttcattatatttgtgttatttttgcatt

SEQ ID NO: 34420 - DNA, 2356 bp, Cannabis sativa
aaaacttcaaaaattattttttgttctcatttctaaaaacaattttttgaaaacaaaaaacagaaaacaataccaaagatactctaatactttctattattcttttactttccaacattaacagtatgatcgcacccaacattatgcaaaacaattagaaataataataattcaatttgtttagtactttactttaaaattttacactatattttctttaattaattatttttggatgatctggaataaaattataatagtaaaagggaaggaataattggtggttaatttaagtactgctcatcgccagtgtcagtgcagttaagtagtacatccaattaatacccatcaaataaagtatatcattgttcctatggaacccccaataagggagcatataatcagtatttacagcgttaattacatggaataattggacagcaaattatgcatgtatagtatccaaaaaccaaaaacagacaaaaaaatgaaaacaaacttcatgactgtactgtactcaatcattttaatttgttttgctgggacaaaaagttacatgttaattaaaaaactatgttatatacaaatgtctccagctaatattatatgtatgttctacttcaattctataagagaaaaaaaaatatattatattatatgaatttaaattccatgtgactaaagttaattactagtactttccttgataagttgatatttatgtgaaatataataataaaattaattagtttaactcagcttaagctagaagcaccgacaaagactgaagtaaatgtatgatttaaggccttcacatgccttacatattaacccttattaattgggaacaaacaatattaagttggccatcaacaagagtgattaattatatttgaatctcagttcaaattaaataataataaattgagttactagagttaattttatatcctaagcatggggaacatcaaccaagaatagtggcacttatttacacacttggtaacacttcttcaatcttcaatttctattagacaagcttacagaacttagtagcattaaagatgaatcaagattccaaaatggaattgttaatacatgttatgaagaagagcccataatttggatattacaataaagtgacacataatgtactccatcttcatacattaaaaggtgggccaattctcactatttttatatactgtttctatcacttctgcaaatactggtcaaaatctaatcatattcatatctcaaaatttgtagggccaaaaatatgtaacttataataagataaatgtaaactgagctctttctgacttgtgttgtgtgtgactcttgaaacttttttagtttctagtcaccaaatctatcaatatatactctactttcttttttcctttttacaattttttattgagaaggtatttgttttcttgaaaaccaagatatactatttttatttattttttgaaatatgtgtagaattatttaaaatgggtcactgtccgttccctttagaaaataatgaataaataaataaataaaaaattaatctgccaagtcaatatgcatcatgataaggaaaggcccaattatactttcccagacaaagtatcaataattttcaacggcaaacttgaaagactatgtcttttttaaaaaaagaaaaattaaaaaaccaaaaactatatacatatgtataatattttttagaaaaaaaaaagcgttgcataaaaacagacttattacacaaaagttaacagaggtggaagagtatcctccaaacatatagactctgtatccactaaagagagtatacttagctaatttatgaacattagtgttagcaaatcaaacaaaatattacatatgagatctttactccaaaaaaattagacacaagatttttaatattagttaaaatacaatgaaaatcagaaactaaagcatcagcaaattgtaatcctttgaaatgagaatcagtttcagtcaatcaaccattggagactaagagagctacaatttccataatttctagtttaaaacatccgtcaaaaggcttagataaagccgcaattatatcactattggaattacaaagaattgttccaaacctacattttttattcatcatgtttaacgcaacatctgtatttgagtttcaacctaattagtccaatttgggactgctatatgtgatgtagcagctgcattgttaatatcactattcgagggatgcaaggaaatgggcatttttataatcctccatataagccatagcaaaattcaacaagatattattagaatattttatatatggaagttattttctaattaaggaaatgatttt

SEQ ID NO: 34421 - DNA, 2149 bp, Cannabis sativa
  modified_base (469)..(480): a, c, t, g, unknown or other
  modified_base (536)..(536): a, c, t, g, unknown or other
aataaatagttttggtatttataggattaaaattaaaaaatatgacataagtgaaagaaagataaattgttgaataaaactagtgggacccatcttctatggccggccactatgtggtttattttactattattttatcttttatattccatataatttgaatcctaatcctaggtgaaaatagtataaaatgaataggatgctctcattctgatccaagccttcaacctaataacctagttttcattctattagacagctagaattttggagagctccttcctttactattttcaaattcccctctcttgttcttcattatttttgagcctatagtgatagagtacattcccactcatatcaagtcaactactcaatgatagtgtgaaagactgaagaatctaacacctgaagaagaaccaagctcagatcttgttaatactttacgacagaaaggaacaagagttannnnnnnnnnnngaaggagacatattattctgttgccaccaatgaaggttttcttaactttatatgtntttattttcattgttttaggaatttatgtttagggttttaggttatagtttataatcaacatatttgttagtaaatctagatcttggtaaaatatattccaacaactggctcagagccaaggtaatgatttactttcaataaatatagatttaaaacgatgaatgtgtgatttagatgtgattcatgttgacctatgtgttatttgatgattgattgatgtttacgaaatttttacgtaaaataattgaattcacgatctggaattattttatttaaatagtatgaaaaatattaagcaatttatatttctatagaactaaatttgatttaaatgaattagttatgaatttttgaaatttggaaaaaaaattagggaagaggatcattcccctgtgcgcacgtacaccgagtgtcaatcgttcaacacgcacattcggacaattcttgtccgaggaagctcggccagggttcttgtttgaagccacttccgtgtgcggacaccctgccagcagcctcctccgtcgaggtttctctgccagcctcccttccatgcgcgcgcaatgcataccatccgtaccaaatggaaaaatttctaaatttttatttttttcatagtttttcatggaatttaatttcgaattttgggtaagtttttatgtagatttttatttttcaaatctcaaatctaattatcagtttaaaattaattattattttattaatcaattttagatattagtagattttaaacctgaaaaaggataatttctatatttttttgcttgattgattattttatcttatttttaaatttaaggtcagatattttacatttttaattatgtaaatactttttatcaaataaccttatttaaatttttgaaaaatatgatatattttaataaaataatctatataattttgaaaactaaccaaattttatcaatttttcaaaattttgttatttttttttaaaaattaaattataaaattagataaatgataattaattattattttattttattagatatgtaattttaaaattttaaaagtaacaataaattttaagttagttaataattttgaaaatatttttaggtttgttataaacctaattttaaatttataggtttaattttgaaaaaattatttaatattttcaaaataaatatttatttatttaagatttttgaaattaattaattaattatttaattttaaattaaataaattttataaccaactatccaatgttgttacatgtatgtttgtttattcaaacttgttttcgaaaatctattattgtttgatctaaattgctctagttaacttgttgacaaatccaatgatctgattttagccatattctaattgttaatagatcaaataaataatatgtaacagataattttgtaatcttctttcatctgtgtatagacctagtaacatgatacgatccatccaaatcattgtgtatacttgagcctatatgtttgcttttgggtatggatgcatatagggagccaatttaattttgataattaaaatggactaggttgttaaaataaaaaggtcactttgctagtttttatttaggcccaattagtat

SEQ ID NO: 34422 - DNA, 1813 bp, Cannabis sativa
taacaaaaattttaagcctaactctaaatctaatttttagtttattcttttatttagttttatgattgagatattttacttataggtaagtataacaaattgtaattattaatctaattaaatggtttaaattaaactttgaaaactataactaactaaaaaataaaccgcgcttcgcgtgcggttgtaaattatttaaaattatttgaattttcaaatttttatatattttatatatttttgataataatatgagtaaatattaactaatttttcttcgcatttaataaaaataattttgatattgtaaggcataattttattaattgttttgaacttaataaatatttttcattatattatttattatacatatatatattattactttacaaaatatacacataaattaaaggacttttttcaattttaatcaaaaaaaaagtaacaatattacaaaaatacttttagttgaccaaataaataaatatacaactcaaataaataaaattacacaaataccacttacacacaccttccacccataatccatgcttttttgggcaactatcgcgcaaccacgcagcaacccaacgcaactgaaacaaaaattcaaccattaatttcggcaactttacttgagaagacaatcagaatcaatcaaaacaggggctgttttgaattcataaaaaaaaaagtgtagaaaaactactgcgaaactaaaattcaacccaaaatccagtttaatttgcataaaactaatgtcctgacttcaatttttagatccatgaaaagcagatctcaaaaagttgatctagagttcccaaacaatccaactcaagtataatccaaaaaaattacatcaatactataataaaatatttatcttggtgtatcttcgttgttttctgaatttctaatagtaaatttgttcatattaaatcatatagagacatatagatagagttacgtacgtgaaaacactgttctaatatttaatgtttcataacagttgcattacagttgcataaatattttgctaatagttattttatttgattaaaacctccgccggatgcaaccttcggccaaccacctaaaaactttcgtctgatgcaaccttcgaccaaccaccctgcaactatcgtctgaatgaaaccttcatctgatgcaaccaccgcgcaaccacgcagcaaccaccctgtaatcattatttgattgtgtaagtgatggtgtaagtggtattttggtaattaaaatcatataaaaggtataaatgttgcccacaccttagaggtatttttgtaaataaagtgtcaatttatattttctatgtaataattcataaattaaaatatatacctataataattgataaatttatagaaaatatttttaaaattattatcatcatcgtaataagtgtatttcatagtccttactttgctttttaataggcttgctctctcaggcttgctctttatataaaaaaagacaacgaacgaaaaatcctcacacaaaatttaaatctaaaaaaaattacaaataattttaaaaaagttgtcttgtatttcacttgtagtataataattttttaaatatcctaaaaaaaataaacaaaggtaaaaagtcaaaacataatgatagattttggagttatcaatttattaaaacatatcattttttaatatctaaacttttttttttaaaaaaaaaaaaaggccaaaaagacaaaaatattatagctaaaaattttagagttatcaatttttttaaaaaaaaaaaatgtcatttttaaatatcttattttttt

SEQ ID NO: 34423 - DNA, 2441 bp, Cannabis sativa
  modified_base (545)..(547): a, c, t, g, unknown or other
  modified_base (1263)..(1265): a, c, t, g, unknown or other
  modified_base (2068)..(2068): a, c, t, g, unknown or other
ctaaagtctttgtatgtctaccaacgagagacattaatagttttctattaaattattttttttaaatatatgtttacatgtctactaatagtagacgctgaaagtaggcgtgtctactatgataagatgtcataaagtgtaatattttttttaaaaaaataaattgaattttatattaatatatattcattattaaatatataaataaattatagtatatattttttatttaaatattatactttatacaaaaaatgatgaattaaagttaatatatggtaatataattatgtttattaatcaactataggatagaaaatttattgaactccttgaaatatttattaaataaaaatgttccaaatggtatcaatatttgttacagtaataaaaattgtaaacaaaattaacaatattgttttccaagttaaaaaaaaaaagccttaagtcatataaccgcctttaggtttgtgattttggattgaaggaagcagattagctgcccattgttggcgcatgtcatcaatttgcttttgtgtatatgnnntaagtgttagctacaaaaaaaatacaaaataaatttaatttataagttgattataaaaatatatataatataatttaatatataaatgataaattattatatatacctaattgacgtaagcttttggactttcgtcaccttcaattaagtctttcatcttcctcaacatgaagtatccacacaccacatcgtcttcttgatgtggacactagttatttaaaaggtttaaattaataactttgtaaaaacaaacattatataaattaataaaaataaaataattaaaattttgttacttacaataggttttatgatttgtagtttatgcttaattaagtgaggtatttctttgaattgaagaaaacggttgaaaacagtaacaatcaatcgcacaatttcctcacgattttggaaatcaacactatgagaatcacaataagcagcatagtaagcatatggcgccaatataattaacatccagtgctcactacaaaagaaaaatataattatttcatataaatattatattacatttaattactgataaaaattttagtttacacacccatggacccaaggaacaatcataagctgtccagttgattttaattgcttacatagattaaacagattttgggcacgatcctcaaatgaacctcccgaagttgccacaattataggattgacaaataaattttttttgtgcgattttgttnnnctacatacctgtgtaacaacctaataaaatatataatataggaacattcttatataaataaaatatataattatttttaaatataatatattacaatacatatatacctcatgtagtatatgacaactgcttgtccaatcttctccatatttgtaaactgaagtatatcatccctacatatgtaaaaatgtgacaaatcttgaccaaatacttcattctctatgatatatttgaaacactcatccttatcagcccaccgaaaaacgatattatgtatctgttctaatggagtctgtgtctgttgtgttagacgatctattagaggtcgtttctctagtgatggtggttgtattaaaggagttggtggcatttgtaatcaacctccacttgttgtttcatgatgagcatgtgtaactaattaaattaacacttagtatataaaaataaacactaataataggtatacataattatataagtatgtgatatgaaaaattacttgttgatgtacatcatcaattataattattaaatgacgaggccaagggatcggtgtcccaacactttgatcaacataaaggatgtccaaactaggacatggaataggggcaagaaccattctattcaaaactttaataaccatgactgtcatgtagtttgagcctggtatccctttgtcaattgtaacatccccgctttaatcattcattgggtccttacacccacggaataaatggctcttatcacgattacgtcactctggctgcttcatggactgatgactagccctacagaccaacacnagtgtttccagcgtgctttgtccttactcgcacgcttcctgagaaaacttccaaggaggtcacccatcctaaaaaattgcccaaggtcaagcacgcttaactatggagttctttcgagatgggctaccgaaaagcaagatgcaccttgttgacataggtagtaccaatcaatcaatttaagctctcttcaactgtgcagtcccacacctacacagcctcaaaatcatcacacttgaccttccctaggcgatgtgggattgcatagcttacccggtgtttccccttacggatcacgggaccactgactgtcacatcaatgactatactagaggcaacaatattagcctctttaccaatagctaattgacaacta

SEQ ID NO: 34424 - DNA, 2953 bp, Cannabis sativa
agatagacctattttggtggttataaccgccgaggatctgaccatcaacatatagttgttgatctatctcggcagttgagaatcgccaagatagggtaccctatctgtaccctatcttggcagtttaaaatataactgtcgagataggtgtgccacatcctctcatatatgtgcaatgtcgatgctagaattgtcgagatatggtagcaatctcggtagtttcttttgaactgcggagattgctattatatctcggcagttaagaactcacgagataggttaataacagtggtttgttaagaaccaccgtaattggttttaggaggaaaaaaaatatattttaaattttctcctgcatcggtagtcagatatatataatactatatatctaatcaaattcataatatatcaattttatatataaattttgttaatggttatatggatgacaactatatgttctaactttataaatttagtatatatatgtatgacaactatatgttctaactttataaatttagctaagattatacttgctagtaaaaaaacaaaagtaaaactatttttgaaaatatttcgtatagtagtcaacccattcttcacgcacagtgttaatatcatttattgtatactcggtgttaccatcacacttcaatataagagtaaatcaatatcttagtttcttgataattaaaattgatcaaatttaaaagaatatgttaattacttatgtgtttcaaaagatattcttttggatcttttgccataaaatctctcattagtcgcatgatgtaaaaattgcacacaatttcattaggttgcctagccctacatataatataatatgtattaatatttgatttatacataaaataaatgattaaataaaataattttcagttttagcatcataccttcattggaaaccaaattattttcttactctttcctcttggattgaaaacatcattcatgtcaaatgtccttaacaatgaaataaatttttaattagacaatataatgatttattaacattgtaagatttgcatcttagataaagttaatgtaaaacttacgttctaaccacaatcatagtgtcctcccttggatcgctaccagccagatcgtaggaataacattcactgctgaatgaaaaaatgattatgcccattcaatgtgttctatataaatacatattatgtcattatttactatttgaaaataaaaaattacaaatcaaaatatgttaacgcagattttcgttaaccaaaattaattagcttttcagtaataaataatttacagaaattacaatattggggtaaaaaaaattgagcgctcttgtaagtactgtggggaacccgataatgattgacaagcacactaaggaccgaactcgagttcaattcgctcgtgttcttgttgaaatggaaattacagataaaccggagcaaaccttttggtttgttaatgaatatgggcaattggtagagcaggaaattgagtatgagtggctgccggtgaaatgcaaacattgtggtggatttggacacattatggctgaatgtaggaaggtagaaaagtcgaaagaagtagctaaagtgaaagaatcacaataagcaaaagaaggagtaactgctgaagctgttacagtagttaataacgcagttgaggagactacagaagcgtctacagttaatgaaactcaagttgaagctgtctcaagcaataaagctatctctgaaggaaaaaaagaaaagggttagaaggccaggatcgtgaaactacagggaagaaaattgatggggaatggaaagctccaaagaaccgaacatccaagggctcgggctcaacaagaaaagacttggactctagcgagaaggttcttaggaactcttttgcgattctaacgggggaacaaattgaagatatatggtgagtaattgaagagtctaagcaatatgttcattgtcatatcaaaatgatagggtagaaaaaagattactttgcttcctttatctatggagccaataccatagaaggaagaagtgatctttggtctgctctttcaatgataaatgtaactaaggcttggattattcttggggattttaatgtggtgttcaatcatgatgacagacaagggggaaatgcagttagtgcttcggagctagtggattctaataactagattttcaactcttctgttgggccgatgaaacgtacgagatcgaatttcacatggactaataaacagaatagtgggatcttttcccacataggcaatgttttccataatgagaaatgggttgacgatttctcgaatacttcagctcacttctcttgggagattttctcggatcattgcctttgtgtggttcattctaatgctactgagtttattggtagcaagcgatttcgattctttaacttttggaccgaacacccggattataaaaggactattatggatagttgggggaagtctttgagatgtagtggtttgaaggggatttatctcagaactatgcgtctcaagcacaaactgaaagtcttcaatagaaatgcgatagggaacattggagaggcgtatgagaaggccaaagattcttacattgaggcttagtttcaatgccaagctaatcctaatgacaattatttccttggtttggagcttgaggcgactaaccagttttacattcaggaaaaaaatgtatcaaagctttgtgtatcaaaaagcaaagtcaactggattcaaaaaggggatagcaatgcttattttcatgctttattgaaaaaaaggaaggaagaaaacatgattgtttcgtttgtgaccgagcaaggggacttaaatgatcattttcctgatgttgtgcaacactttcttagccactttcagagcgttatggggaaagcaaagcctactagtatggagattcaacctgattgc

SEQ ID NO: 34425 - DNA, 1601 bp, Cannabis sativa
agtgtaatttcctctattttttttggtctgacaagccctaagtacggacttgcttagcctgctataatccaagcccagcccatgaacagtcctcaatatcaatctcatatacatcggccatcgttgggactaggctttcaactagcctctcaaagtcattatgtggtaagctatctatgtatatatatagtatcgaattgatataatgataatatatataagtccatctgtatatatcaatgtcatgacacatatgtatatatacacatacacagtttttttctttaaaagttatatagacagctttacgatgaatcccgctgcttgctataagtgtgtcgttcttaaagtatacagttgataggaatggcttattatttattaattgagattagtacgtacgtaatatattgaatttgatgcgtgcatacactaattatatatagatatattacgtagtttggaatattgcgtgcggtcagagaattaatcatgcaatattaattaaagtgacaaaactcacggacgggaaaaatctatacataaagcacaataataaatacatgattaacggaccgtaattggcaaaatgcggtcatcgaaaccgattgtttaacagtagttcaagctcttcgaaattcaattcacatgatttcgttactcggtcaagttattaatgaatctaaacaactttcgttggagttggataatgttaatgtttttttcattaagcaatcaacaattatagtagctcataatttcgcaagagtttctcatttataccctggttgttgctttggtttagagaatgttccgaccaatttgttaccttatttggtaactgattttgatggttaataaaactataatttttcattaaaaaaaatacatgattaagaaatgaaattgttatttgattgcttgctattatttaatatattattttttaatttttattttattttacagtttgagttgctttaataatttctttttgtgttacgatgtgagaatttaagttacagtttaggttattgcctcatgtatttttcgtagaaattaaaaaaaaaattattttaaaatgtaaaacttaaaaaactcctaaaaattatcagcatatattattgttattatattagtgtgtaatttaatacttttttacacataataactattataaaaaaaattactaaatagtagtcactagcaactcctatacttgggtgatgcttaattattagcaatttaattccttttcttatgtgaggctataatttaatattataataagaggctatcatttaattaccttaattagaagagtgaggaaaagaaatataatatggactaactaatataggtctaataacaactcaaatgggacaagtcgagagtgtagagcaaagagataattaattatatatgttgcaggagggtagatgaatttgtttcaggatggtttgagatgagaacagcgatttcaaattgggccaaaactttcattttgttccccctagatataaggttgcatttgggtattcttagtaaaaaaaaaaattatgtgattgctcatcacttaccaatatatattggtttgacca

SEQ ID NO: 34426 - DNA, 4906 bp, Cannabis sativa
  modified_base (614)..(616): a, c, t, g, unknown or other
aggcccttattttttcagattggcttcagttcctctcgcattgactatgaaaaccaaaaattttcctgaggaaaccccaaaagagcactttctagggttaagcttcatgtcatatttccagagtatgtcaaaacattctgtgaggtcctttgtgtgatcctcgctttttactgacttcaccagcatattgtccacgtatacttccatattttgtccaatctagttctcgaacataccatttactagtcgttggtacgtttgtaatgaccgctttagtaatttggattagtaaaggcaattagcactagttattggtatttttataattatttatgcattttaatttatttgtgggccccattgttagaaataggcattagagttataatttctcaatttcggagattttattaaactctaggtgtattatttgaattatacgtgaaatatgttatttttgtaatttttgctcggcgacaacagaaaatacgatggatggctagtttgatcatatgagtgagtttagaatcttatttcttagtggaataaatattggagaaaataatatatcggggttgagcggggttatggaatttgaccaatttacccctagnnntgaaaaatacctaagtaataggtttaggggcattttagtaaaatgccaaatgaagggataggtggctgcctagattcatgatacctagcaaatagcatttcagctaagattaaatcatttaatcttttatcacttaaggaaaataaggaaataggtggaaaaagccaaaattgaagaacaccctttctttccttctctctctctcttcgaacctagctagaaccagggagaattgttgctggattcttcagttcagcaaggaatacaaggagaaatcaagtggaggtaattcctagattatttgttgtagtttcttcaagcttagatatttgtttaaatatgtgattttgtgaaataagggctgttagggttagaaatgcttagggttctgattttatgttaattttaggttgattctaagttttggttattaattttgagctaaggaggttgggaataaaatacaacgcaagttattcaaaacattgctggctcgcataatagtgttaaagttgtttaaataagcgatcaggtctgtggtcccatcgtacggcgagacatctgggttcttgaatccctgaggaaattccaaatttaagatatctggatggaatgactcagtttcttcatctgagtcgtagcttggaaatttaccatgttcttcatcttgatattttctgaatttatcctctagttcaattattcatagatggatgggattcgcttgttgttgatttgcattttggttaagttgatggcgcaagtcaggcacattttggtctagacgctcatgaaggtcaggctgccttcgatttaggtgcttgtgaaggttaggctgcctttgttcatagttgattacagatcttgtctctgagtaactctcagattgataacttcgtgagttacttatgctttcttagtcagcataataacgttacttccttctcacgtttgcctacttgaccgactatgtcctcgagacctcgattgtcctatgctcgagcttgcttcatctcgcactagccctcttctctggaagagattagacacacatactctatttaagtacgtgtgtacattttctctatctgctcaagaaggacgttgaggatgtctcagaggaagcctgtttaaacttggttgatttctagggtttctctcattattgcgagggattccctagttctctgatcgaggctaccttgcctcttcattcatgtgagatgcttttggcatttcagttcattcattcccttggttagcaaatccatgggaagtttgtggaacatctcgtcgatgttcatgattccttgcattattaggatatgtttgattatccattaggatatcccttgtatccccaggttgctcttcctgggtgttttggggattcccctagtttgtttcctgcctcctggtcttagagcctcgaggtcttcctcacgatcttcttactgtaggatcaggttggttctgaggaaccgtcccttgtgcgaccctcactgttgcaacctctcgttctaactcagtgttttgtcggtttgattcagccaaacgctgtcaaagttgcctatttcttaactccaccaacaatacgtatctagttgggtcataagcatcctcactcctaggcacatatctggcagagttattggcaccttcgctcattctttatgggatttgatcaccattaccatcattcctccttgaatgtggtgtttcagaggtgttgggtctttgggatcccatgggttccttgccagggcgatgggttgtttcctcaggttgattactattgtgttgatcatcaccagccattgaatatgggtagataatgtttataaggagggatgagtttttatcaccaaggccctcaatgaaagcaccaaactgttgatgcagattttcgttaaccaaattattaaaatttttgtaataaattcaccacaaaaataaataagttataaaaatgataaaataacatcaaatattttacgtagttttgtagttaaaatctacttactccacaagtcctttttattagggatactttctgggttacagtgtacaatatcagtatttgaataataatattttttctctcaaagttactgttcctttttctatggattctgctcctatttataagaatataggttggcagttactctttttgggattggttcattcatatttgttcatgaaacgtggacaatcctgacgtttcatttgattacacatgggataatatctaataactacccaactactctttattcttatcctctagacagttattgctaacttggaaggtcgtgtgtcatcagatatgagttctccttcctatccatctcaataggaaaaaatcgctaagtgttggaaaataattcacctcgttgtattcctttattggcattagcaatgcgaggtgatcttctcgctatgtgtaacgcgaggcggttggcaaatatatgtctcgtcaatactagtttgatagttattattttggtctcgcataagactgaatagtaggggtgttcgcggtgcagtgcggtgcagtttttacagtttggactatcactaataattaaactatcataaatacaaacaaagcttgagcaaaacttttcaaaaataccataaggcttgaaaataaatatgaaaaaaaaatttaagtttcaataatacaataattagtaggctttgggttggacattcccatattagacctaaataaatataaaattttttttatgatgtgcggtgcggtttaaaccgcatattaataattcaaaaccgcaaacagcactgcactgcgcgatttaagaaaattcaaaccgcgaccgactgcaaagaatttcaaactgtattttctttgtggtacgggcagtttgatgaacacccctactgagcagcccatgagttataacattatctatcaaacttatatttaataggggtgagttattttaatttacatttaatgatacatcattattatattatcagagttgattcacattccttctgtaggacacgtgtcagcttctagtatatagccgaattttgggtataatagtaatttacttcggtagtttacaaaaacataataatattattatttaagcttttttaattattcttttcttcttcttgttttgccatatttaaaaaaatacatataaataaaaaaaaatgtatttatttaatttgataaaaactatttaaattaatacaaaaataaataaataaataaagtaccaacatttaagattgaggtatttatgtctctaagaaaatgaaagtttgaggatcaatttgccaaaaataaagtttgaggaccaatttgccaaaatttatataatttggggaccaatttgccaaaaaataaaatttagagaccaacttgccaaagtatatataatttagggacctgtaatacaaataagcttaataattaatgaataattaaataaccaaaccaagttatatatattcgagccttttatttgtgtattggtttcttactgttttccactaagatcatctccaatctaaatattttgctaaatttgacataagaaaatttacaaatgctatatttgctattatgtttactataatatttgttattgtgctccaatacgcaataacattctatgatgcaaattatgacaaaaagtaaaatatcattaataattatcaataaattaaatatttaaagaattaatgacactattataattaaaaatgtgtattaaaatttttcattaatgatcaatgacaaaattgtaattaaaaaatcattattatgtgtcaaatttggctaaatacgacggtaaaaattgtatttcttgtagtaagatttagcacaccattagagagctaattttctttaaaatgctaaaatataaagcatcgcactactattttagcactctattagagatgctctaacttaattagattttatcattttttttacaactagcatttatacctcttctacatgattcaagtttaagccaatctaatttatgacaataagaagctataaaaaaattacaaggtatggacaattacaaatgacatacgatgattacgattttgaatgtaatggtaactgattataagtgagataccacaatataattaattttgaatatagtgataactacaagtaaaatacaatgataataattttaaatagagtaatttgcgacataaatatctaagtttaacttctagttacaaataaatacataaatttaatttttggcggtaataata

SEQ ID NO: 34427 - DNA, 1571 bp, Cannabis sativa
tttagtgtgaatcaagtacactataaacaaaaagaatacatattgaattagataaacactttatttattaggtatgattatttatttatttatttattaagtatgagtattctatttttttatttctagtacctagatcttaattttttttttagggtatcttaatttttttatttgacaatttatattatagttatagtagatattcttttgagatattctaaataaattactgttatccatgtttctagataggtgacatatatacttctaagacctaagattaagtaaagcatgcccatttgtagacccaattacactagtgggtcagcccacaacgaagttagactatggctctccgagtctaattgtaatcccattccattcacgataaagccagaccttcttggtcttggaagagcgactcacccaaaaaatggaagactcagcgaagcatacctgaatacccctcacagggtaatctaagaagggacattgaagagacatccagagacattcgggtgtcatcctacgtggcacccaactaacactgaatcctacaatatgaggggtttgtcccttgtgccaagcctgagaaatacgcacaacacctaaagggacatgttttttgtccaacacccattattctgatggataatgtacaattggtggcgcatgccacttgtcactgttatgtggtccccttctgtatagatgattgttgtctcatgtattgggcctcacctgaaataattatttttatttttaaaataatttattttttatttttaattaatttttttaatttttaaataattatttatatggactaataaaattgtgccacatgtatactatgtacacgtggatgatacaacatggcagttaaaaggtaaaaatcaatggaaatggcaaattgctaacataatatagttttggagattttgcctccaaaaaataaattttaagagttaattgctagcgaagtgaaaatattggagattatgtcgcaatttactttaatgtattttaccctatgagtggacttagttaatgcaactaaaccctagcgggtctgaatttacccatgaacccgactctagcccataaatattacttcatccctttgtacaaaaggttcgagagggttctaaaactttggcaagagaaattcttgtgtaaagatatttcacagcctttgagcttaataatattgactcgtggactaaggctcattaacaccccaatcaaataaaaatcgttgttgcatcatcttttaattattcttctttaagcttaatttattttttattcaacttccaaaaatccctgtaaatatttacagtgtcaaaagtaaaatttaaaataattagttacacgtacataaaataaaataggtacgagtgctacttttttttttttttgataaaatcacaccaaacatagcttttatcttaataacaaaattctattatggggttataagtgtaatataaaccccataaatcacttacacataagagatgtggtacaaaactcacacaatatttttttaataaaattacaccaaa

SEQ ID NO: 34428 - DNA, 1589 bp, Cannabis sativa
gtcttctcttgtaaacattttctctttaaatttgaatttaccgtaccgtaactttaacttgtcttgtcgatcgaagaagaaaatggatcgctaaatccaatctcattgctcccttgagcttcactaggaccaatagaatcattggtctctctagcattattggaacctgtattgtcaatagttcctctagcattacaggtttttcttggatgactactactagtaccgggtgtttcacaattttctctacggggtatgcttttccgtgttagtggtctgggtggcattttgtacgatagtggagtcaagttcaaagatacagcagtcgggacctctatatctcggtcgtcttttacgtcatcattgccctcaacacagcattcagggtctggaccatcataataaccatcaatgaagggcatttgcgctacaatatccgcacttggcatcatagtttttaattcaagtaacacatcggcaacaaacacatctcgatttgtttcttgaacaaaactcccaaccttgctacgagtttccttaaaagaacttggtatgagactagggtcgacacaaacattcttctttaacaaattaacaaataagggagtaaattcatctggcttcttcgcaagtgtagacaaaaagaaccttgcacgcttatcatttccaataagttcaaggtgatacattaagccttttatgtacttgtaatttacttctcattttaagtcatactacactttgtcaacatctagttcttcatacaaaagatcaaccaaacatgagtagcttacgttcgtatcaatgtcaaatgtttcgacccggttataaacccaatctctaccctcaagctctaaaataccattatacataacaaccacattaacagttgaacctgtcacatagattaaaaaaaatacaattacaatttagaacacaaatctcacaaaaaagtgatccaaattcttgaaaaatcgaataaatctataaaccatcagacaacccatcgagcccaatcaaaaaaatatcccaaaacccatattggacaacacatcgggcccaatcaagcccatatcggaccccaccaaaaataatgtccccaaacccatattggacaacccatcgggctcatatcggactccatcaaaaataatatccacaaacccatattggacaacccatcggaccacccatccggcccaatcgggtccatatcagaccccaccaaaaataatgtccccaaacccatattgggcaacccatcggaccacccattaggctcatattggacccatcataaaaataatgtcccaaaccacccatcgggccagaatcgggcttccatccttgtcttgatacttacattatgtatcggaccaccatcaggcccacatcggatcccatcataccagacgaaaaaattgcaaactctaggaaaaatgcagtattcagtgacaacaagtatttcaacacataaaacagtaaaataatagcaacaactcttagatcaagcatcaaaataacattctaaactaaatataacaacaacaaacaagattacaaaaataaataattacccattgatgctt

SEQ ID NO: 34429 - DNA, 1274 bp, Cannabis sativa
aacaaaatttaaccagaaaagtgtacgatctaggtttaagaaagtactgattcatcagcgatgtcttcccaaccctggcaaaagaatcatacaaaaccatatgtcaatacgataatcaaccattcattatttcaaatcaaaacacaaaattcattcaaaccaatacaaataatcaagaaaataataataatttacccgctgtcgccaaggatgatcacctttaggagcatacgcctacgagaagccatggatggaattaaggttttatgaaaatcgaaacgaaaatgagagaaaagggggtttgaatttgggattcaaaagttattggagagaggaaattttggttatgagaccgtaattttgtcgatcgaggagggaggctctggttttggattttggtgagccaagccagccgagccccaaagaaacgacagcctggattggatactcatcatttcattatatttttattatttttaagttaccattaaaaatttgatccacaaaaaaaaaggtcaatgttgaaaatttaattattataggtagaatttttttagaataattcactcgtgaaaaaaaatattaaagcattaattcatcattttattgttcaaaatatttcataaatttttttagtattatttttttgattgaaaatttgatgtattattaaatttacaaatatgctaataaaatagtataaagttaagttgggataaactttcattgaagtaacgatcttaaaaaaaacaaacagcataagtcaaataaatagttattttgttcgtcgtttaacaaaaatgataaaaatattatttataaaaggaaataaagacctacaatctaaaagtgttaacgaattggtttggtctaaattttcaattttttctaaccaaactattattacgattttttaaaaatttaaaatcaaaccataccaatgaaatgatcaaactaaactaaatcaaaccactcagaaacggattgatttggtttgaaccatgatttgtattttgtagttgttctaattttttttacaataattgtttttcagtattttttttaatttaataagtttataatacataaatagcaataaaaaattattatcataacaatataagttcaatatcaatattttacataaagttgttcccaaatatcaacattttgtctaaaaaaaatatattatttatatatataataattgggaaatttgattttttatgcttacatttggttaaaaaaaattttctaaacaaataataactaat

SEQ ID NO: 34430 - DNA, 1461 bp, Cannabis sativa
agtagtctcgtgatccgtaaggggaaataccgggtaagctgtgcaatcccaccccgcctggaaaggtcaagttggatgattttgagattgtgtaggtatgggactacacagttgaagatggcttaaatggattgattgatactacctgtatcaataagatgcatcttgttttttagtagcccatcacgaaagaactccaaggttaagcgtgcttgacctaggataatttcaggatggatgacctcctgagaagtttttctaaaaagcatgagagtgagcaaaaagcatgctagaaacactcgtattggtctgtagggtcagtcgtcaatccaagaagcagctagagtggcgtatttgtatataagagccattatttcgtgggtgtaaggactcaatagaggcttaaagcgggaacattgtaataattgtgtaatatttttacttttttagtatatacccgaaaaaatctcgtagatcggtaaggtaactaattaatatatggagatttcgaaagattattttcccgtgggcttaatcagacaattgaaaagaattcaaggacctttggtgcaataaacctaaatagaaaaaattattataaaacaacaataataaaaaagaatagtaccatcaaccatgatagaaattaaaatagcacattatgtaaacgtttgagagagtagaaaaggggttggaaacaatggatggttacaaatagttgtcattttgcatcaaaaagggcatcttattgattgtcttttaagaaaataaacaaaaaccaaccacagcccatcccaaaagaatccttatctcttttcattggcttcaatcaataaatatgatatggacacgtgtcactcacacaatatgaaagaatcttacaacaagaatcctagctcgaggtgtgaatttcagggaaattaaaatatgagagaattgacgattgtaaaatgaatgatctaatcacttgccacgtgtctgtttttggttggtgaggataacacatatttgtttttttatatgaaattataaaaaagaaaagcaataaagagtggaaggaagaaatgtaacgaaaccaaatatgtcattgtcattattggatattattattattattatcaatgtaacaaatcaacagttactaacagtgcaccaaaactattgctttcttatcaatggaatctttcacatcacaaacgtaacaaatttgcttttttttttttttttgagtttctattttctataattgtatttttttactaggaataactgcattcttatttatgggagaacattgtcctacaagaacatgagctactcctctcattaccaattggttttgagatggaatctcatgattctcaacctggaatcagagtcatatccctagcgggctttcgatccacacttatcaaagagttagccagccgcaagcgagcaaaatggtactcccagccgcga

SEQ ID NO: 34431 - DNA, 1615 bp, Cannabis sativa
caacgtcgtactataaagttaattacgtgtcaattaataagttagctggtaactagctagtaataacactggtttggcactttaatttactctctcctttttcttaatatatatgtatctagctaactagttacgacaaattacttataaatagttgcgatagcaattagttaggaggaataaaaatataggaatagaaatgggaatgagaattggaataggaactgaatagaataaattttaaaatgtgtaaaaaaattgataaaaaaattattaaattttttcaaatttcacaatagaatggtcttttcttctattttaaaatggaatagtcatttcacgaaaataatgaaaaggtcattcatcggattggtattccaataattttaaatgcaaccgaacaaaagaatgaaatgaaaattgtttcctttctattccatttcattttattacctccaaccaaacgccaccttgccacgaatatttaactattacttcttgattatatttaaaaaagtctttgtaattctatatatagtttcgtgacattttacttaattagtgattggtctatgtgtaatgtttaaaattcatctatcatcatatttttaacactttgtataagtttttcttttctttccaaaatacactttttcaagatacactatagtagcggcggctaaatatgaatttggtttcatatatatgcaccgaataaatctttgataaatcatagccaaattcaactaattttatgttgattaattgaatataacttgtaataatttcattgaaatatttactttagtccattttattgcaatcaagcaagataatttttgggtaaagatagtttatgggtaaagtgatttaatagtgtatatatgggtatgataaaaattggtggagttttgaaggtccaagctgatattggcaacaaaagctgtatgtgaaaaacaaattattcagaagctcatgtcactttaatctcttccaaggatagattcagtttttaggaggttatttggagtaggttgaatatttccaaacatagttttattggttgggtgtgttgaatagattacatacaaaaaagagactattcagatatagcattagttgattaaaacaaagattgttgcatctgtgggactacatatgagacaattcatcatctttttttttttttttgattgttgcctaaatactagttgtcttgaagatatgaagaattagtggttagagtgaagggtgtaaggtgttgatatattcttatactttttaaaaaagattgagaagtcgttacggagcaagtttcgaagacatatgtggattgcaatataatggtaagtttggcttatgcgctttggaggaatcgtattgaagctttttaaaatcaaaaaaatggcaatgaagaattcaattgtttcgattgtgaaaaagagaagttaaacatagaattgattatattgtgtctaagaatattaaacaaaaggatttgatatttggtttggaaggttgtaataattagtcgatttgctaggcctttttttcataaaaagtgctggtagtttataaagttgattttgatgagtgatacacatatctcattttt

SEQ ID NO: 34432 - DNA, 1471 bp, Cannabis sativa
gcaaaatgtattagtcacaaaaattacaatttcttgttactaaatctatttttagtcacaatatttattgtgactaaaactaaattattgacaatttgtatctaacaattatgttttagtcacaagcaatgttctgttgtaacttatgtggtgattaaaaagttatcactaaatgtaacaatcttttgtagtgaagaaatgaaataaaattgtttttctttctattccattccatttcaatagccaaacgccaagttactttagagaaattctaagggcataagaacacagaggtagcaaattgttactgctgtattttaatttaataaataatataaagttgtgcgctaaactgtgcgctaactaattgtgaagtcacacatggatgttgtgttgagtaattactgaagaaatataaagaataactctaaagtcacctctacagcaaataatataaagcaaaagtagaactgaaaattaagtatgagactaattttctcaaaagatggatggtgatggtgtgaaagtagttttattctctccacaattttacctttgtattaattttatgtcttgaaggttggaaaattacagatttgtaagatataacatatataatatatatatatatatatatgtattaagttggtttaaatgtatctaatattttagatttaatattgtatgggttaaatgacttaatagtttttatttgcgatatgtaggagggttttggaggatgcgctttaagtctcattagtcattatgagatggtgtgttgtggggtgaggtcttcctttcctctaacactcttccttatacctattcattctatttaaatatttgttcaggattactttatcatgatttcttattactcttattaatctacatctttgtatcactaagaattgtttttttatgcccctaattagacagccactttgacattttcaattgcaaagtcatgtttataatagagctctaatggcttagatgtggtcgatcccctaggtgacagcctacctagtaattgcagtgtactatatattaattagtggggcatgctgttgcaagtaggtagtaatcccactaaattaattaggtcattcgggttaacaaatgcaccagcagcctttatggatcttatgaatagggtgttcaaggatttcctcgataatttcgtaattgtatttatcgatgatatccttgtgtactgtcggtcagaagcagaacacgatcagcatctccgaatggttctgcagcgactcagagatcataaactctatgtgaagttcaagaagtgtgagttttggctgtcacaagtatccttcctatggcatatcgttggaaaagacgggattatggttgatccaggcaagattaaagcagcgaagaattggcctagacctaaaacagtcactgaagttcgaagttttctctggttagcgggttattatcggcgttttgt

SEQ ID NO: 34433 - DNA, 1247 bp, Cannabis sativa
  modified_base (26)..(26): a, c, t, g, unknown or other
  modified_base (140)..(142): a, c, t, g, unknown or other
cactctgacgtggcatcacatgaatngtgacacgtggaatccacttggagcatctgctcgagaagcataatccgaggaggatgttttgctagcgtgccctgagcaaagttctcaacaatccgcgcagagcaaccaacacnnngcgaattcagctttcgcattgtgagtcatcaacacaatccccataacttaggtatcagactacatggatatggtatacacacgatcccactatcaggatatttaacctcaatcccacgatctttgtactcagcattgatcccacgatctttctgtttatacacattgtaacgaaagggaaaacccttcctctccaagcttactagccctataactagtgatgcatattcactgggcaaagggtggaaaacagtttagctaaaactataccctaaagatattatctaagaattatatattcagagataccattgtaagagctacaagaaaaggaatctttctccttgttcttaagtcaatacatgtaacgaggattaggctattaccgaaccgctcggtgctgaaactctataaaattcttatgtctttatattgctttattatatatcgattgctataaatcacttatcgcttattaaactagactcgttgttgttagctaaatgcaaggtcaacacattccatttgtatataaagtttaatttttgcactattttgttagtattcccgtttaggggattagggtttcctaagtatcttgggtaatgtgcctaattagttagggtgttatagggacccgggcccggacccaaacctagaccaggacctgaacccagacccagactcaaacccggtcccagacccaaacctggactcgaacccgtaccctgtgacccaaaattggaaccgaaactggaagtagactggtacccagaaacacgaccagaaccaggacttggacctggacctggaccgtagccggacctagacctagacttgaaactgtaaccggaccaggacccggaccccaaccaaaaactagacctgaattgggacctagactcggatgccaacccaagagcgattcttgattctgctctcaatgaaagcacctaaatgttcacctcgcttttagccaacgatagtgagtctaatttagtaagtaacaagtagtttataacgattgaaatataataaagcaatatgaagacacagtgagtctaatttagtaagcaacaagtagttcagccccgagcagttcggta

SEQ ID NO: 34434 - DNA, 1882 bp, Cannabis sativa
atttgaactttaaattcaatatttatatttatctcattatcacaattaactaaaagataacaattgaatgtaaaaaaattaacattagtgcgaccaattcattaaacgggttaaaaaaaatttcttaattgggcgggtcgcacttaaatttttgtaacccgatctttacattgggttgaataaaatataacgtaaaatgaccaaaccgaccaacgtacacccctagttgaaagtgtctatgatataactaatgtgtttttattataccaaaatgatcaaactaatcttacaaaacaaaaattagtcatactgaccttgcaaaactaaaactagtcatactagctttacaaaattaaaactaggaatactagtttaacaaaactaaaactaatcatactggctttacataaccaaaactagtcatacttaccttttacaaaatcaaaactagccgtaatgactgtacaaaataaagctagtcacattggccttacaaaactaaaactatccacattggccttacaaaattaaaactagtcacattagccttacaaaattaaaactagccacattgatcgtacaaaataaaattgaagataaagactcaccaacctagctaaacaaaactgaaaaacagaccattactgacaaaacaaaaccaacataggtcaatctcaatcatgatgggaatataaaatttattgttgatttgttatttgtatgctatttttttttatgttaatttcctattacttttatgtaattttcttgttgttttgatactatttttatagaaaaccgtaaaaaagaaaaaaaaaaaatctttaaacgtaaacatgtaaaaaatttataaaaaaactgttatacttgaaattcggcgagcacatcaaaagaagatacgtgtctagctgggaagaatgaagaactcaaacacacaatcataagtacacttgacgtggaataactcgttaaaaacataattagcagagtatgtttataactcggatgactgaacagtcttgtgcgagataaaaatgtactaactattgatttgtgtctcgacgagaaaccatataaatgcaagtgtccatgacgaggcatttaacctcgttgcatggaggagatgtaataaaataacaatacttagcgtatagtatataacacggtatacaaactaagtatgagcagaggggtagaacaagctgatagacagtgaggcgtctatctcgctgtaagatggcatgcacacgagaaagatcatctcgacaccagaaactgaagttatcaaaattaaagcaatatcaacctcaagaagttatatgacgaaccccagctcgccatcaaagttaactcggttccatttcgagcgaggcatcctcatgagataaggcttaccacatatctttaatgtgcgctcatctttacccaataaaagcgggatattcacagctgtgtgtgaattctaaataaaaactacatttacttagcgtgatttgtaactcaaatcctgtgatttgagggaataattgttgtaatacagtcaaccttgtaattaactgctcactatattattataaatagtggcaagcaagatgaaaagagggatgaaaaaactcatacaagaggagccctgaaatgttattattatttattaaataatataatgtttaagattaaaattgtgatatattatatatagtattatgaatataatatataatataattgggaattatatacatgtaataattacaatataatgtgatttggaagttacatatatgtaatagttgtaacataagaggtggagttactaatattttgtaacttccacatgatcactaattaagtgtgtaattagtggttacacaacttaattttt

SEQ ID NO: 34435 - DNA, 1370 bp, Cannabis sativa
  modified_base (156)..(157): a, c, t, g, unknown or other
tgctatagaaagaaatcaagggctagagatattgaacggaaggagtcattatattctgctgcaatcaatgtaaggtttttttaaacccttatgtgtttaatttaactgttttagtgaatttatatttaggatattaattcaacatacttgttagtnnatctagatcttggtaaaatattcccaacaattactaggcagtctcattttgtccatggcttagaaaaaggtgattgagaatttctcaatcacgggaacatttctaagcttatggatagaagtgagagcctcatgtactcggtaaatataactctataattactaagagttcaattctatatttatagtgaagtaatcatgaaattaataaacatattatttggttgatgagattcaataaataaatctagtttattagagcttagaattataggtccatggtccgcgaatcaccaccttgaaacattgtaaaggggtgggataaaagttgtagatgaaagttcaaaaaaaatttattttgaattattaaaataataattatttatttttgtaataaataatttatttttcaaattaatttaatagggtaaagacaaaaattatcaggacaaaaggcgaattccttgtctctaacaagacataggaggcgccacatgcattgtgtccaaacacggtgcatgcactccacatttgtagggtgtccctattagttttacctttttaggttaattaattaattgattaattgattaattaaatagataaatatatgaatttaaaaactagttgagatattctctcaaggtagttgagggattccctcaatcgattattagatgtaaatatctataaccgaatttagttatattattttattcaaataattaaatatgatttaataaataaatttgaatttaaataattaactaaataaaatttttattgagtttatttaaatataacgtataacaaagttttgaatacaaggttttgagaatagaattttcatgtaacttttttgaaagcctaaaaaggattttactagtaaatattttttctctctatcacataagaaatagttcttgctcatgtattgagatttatacaaaagcttcatatacactttgtcctagtagcctacactactccttgtgtgtggtggattaatttggaagactagggtgtgagatttagtggatccaacttacaaaaagtttcgagaataccctaatagtcatcaagaggtatttatttctttcatgcaatttatattttttagatttaatatatatacacacgtggccggagatccttagaactacggtacaatgataatcagttgattattatttcgctgcgtacctgatttagta

SEQ ID NO: 34436 - DNA, 1469 bp, Cannabis sativa
ctgacctctagccaaaccttagcagatgattaggcggtcttccttcttctttcctcgcatgagcccttctgtttacaggcttgtgccagtgaccaccgtgcatggttctttatttctttagctctcaatgaaataccaaaatgtttaccaagtttttcagtaactaagtatttttagagcttaagaaaggaataacataataaataacaaatatgagatttttacgtggttcaagcgttaactatccttagtccacgagtctattttattaggctcattggccagtaactgtttgtacaagtaaagatacaatggactgaaactcggtttccgtagggtttctcttgaagaagaggaagcttagtatggatattctggagtttctcagtatgctattatttagcttattacaagcatgtttgccaaaagttggaagaatgagtcttctctcaaacaaatgtctcgctcccccctcttgtgctttacagtggtatttataggccaacttctcttcatgtgctggcttggattgatcatccttgggcaaaatccctctgttggatttgtaggtggcattttctccatatggtatttaagggtgtcagattgtacaggctgtgcgtcatacgtgtgtcgccccagggtcattcctttttgaatttcccttatccctagtcgttggatcattcggttaggtacaacgagataaacatgttctgtacaatagcttattgtgggagacaaccttttacgtggtacctgaaaaagcctggtcattaggtccgtagtctgacacgtactagcaaagcctccacagaataggagtgtagcctagttagacatatttcaaaaggcctttgttcttttgggaaaacccatactctttgcgggagtagattgcttcggttctcaagactgaggaagacttcgagtcatggatactctccgcatcgattcacgaaagccctttccgtgagtcagggcctttaccatcccggggcgtcagttgaggaagttgatcggctaatgacttcttaacctctcttgattaaaatccacgtgttgtaattacaaaaatgcggataacaggtgcctaaacctaatggaaagtggaggactcgcattgacttcattgacctcaataaagtatgccctaaagattattttccactatcaagaattgatcaattggtggacccgatagccaacttgaactcctcacattcatggatgcatattctagtttcaaatagatcaatatgcacgcaccagacgaagaacacacgagtttctgaattgacatcaagctttactgttacaatgtaatgcccttcagactcaagaatgcaggtgcaacttatcagagactagtcaaacgtatgttcaataacaaaattgggaacaatatgaaagtctacgtcgatgatatgctggtaaagtcaaaaagatccaaagaccacatcaaagat

SEQ ID NO: 34437 - DNA, 2238 bp, Cannabis sativa
tggtttaagttggagatttcatggttgggttgttgtatgttggataggaataagaatgttatcctaggtttttgttgaaggtggtttggttgccttttagtgagttttctagctagttggttagagaaccaagcttgagttctcagaactcaaagcttgggcattaatggtgaatttgtatttgtgattcgatgttgatttctgttaattggagaatgttattttgatgttaagtaactgttctgtgattgcatttgagattgattggaccaagttttgggacttagaataattgagttttttgaggccctactgttgtgaaccaaaattatggatgttacagggccacccaaaccgaatttttgtttggcagtagttgggaaacactgatttttgtattttggccataactttccactcaggtgtcttttttagatgttctatatactattttgaaacttgtgaagagctctaaagtatgatacataaattaaagccaaaatatgtattttattttaggttattttcaccacgaggtttggtagaaaaccttagatttttttatgcgggtattaggcagtgttttagaatagacacttatcgatttaccattgttgtgacatagggccaggattttcgggcatttctccacttgggttggccagcatgcatgaatctggattaaaggtaagaaaataatatttttactatataacatgtcatgttaagatacgattattatcatttgtgaatagattgttatcgagattaagatacaattattaccgttatgtgatgaaaaggttatcttattaggcaatgataaaaaggttgtcttattaggcaatgataaaaaggttttcttattaggcattggtgataaggttgtcttattaggaaatgatatttggatactgaaagattaggtatcaaaagtcatgactataaactgaaactattgttaggcttctcttatcagggatactagtggctacgtatctgggttgtctggtttgacaatgacagtaacattcggatatcagtgatatgtgtcaaggttctcttattagacaacaatgatgatagtgggataccagaaataggtatcagggttgtcttattagacaacgattgtgatgtttggatattagtgatgagtatcaaagttgtcttattaagcaataatagagattttgggatgcccgtttaggcatcagagttgttttgttacacaacaatgaaaaaaggttacttggtatggattgtattatttaataagtaattgtatattattggatgtttttatattgatttttatttattactgaacatctctattgatttggatttaattacgtgtgtaatgtgtgattatttgacccttcttattgagtttaataattgatacttgtgtaaggagttatgatgttgtattactagcctgttccaacttcccatgagatcaattttctatgtgatctaacaaaggagtgccactcataaagaaaaaggcttctatcatctccaccagtttagtgtatacatcgataacatcactaagagaaattttggtttttatcataaagagtacttttatactcccatcatcctttgaaggcatgttacctttcaaaaggttggccctttcaaaagacttgctccacttattgacatgaagtagagagcagggtccatgttgaatgatattgatttatgggagaaagacaagagacaggaagatgttgtttactagtgacaacctccatcgtgtttggcagatagcaacttgtcaacgaatatatgttgatgctagatttgttgatgactcttgaataatacccctagaatatgaagaaagtgggcaaagtggtaccgtcattgggtctaaagtgatgtcaaaagacgatggtcctccttgtaatgacccagattatttgaggagaatatatgtctcttgaccgaagtggtgatggagttggttctggagataaagtcaaaatagaacccttgggtcactctgaagcttgtgtgcctgaggaagttagggaattagcaggtcgttgatgcaccactgataaaagccatcattaacttgattgttcatcttgttttctgtatttttcttacatactaaccactcattgttttttcttgcaaataagactagttttctcacttccatgaccacctactccaaacaaaaaaagcctccaaccaggattaacgaacctcttggtc

SEQ ID NO: 34438 - DNA, 1353 bp, Cannabis sativa
tatttattaatttaatttgtaaatatctgtaatttatttgctaattagggtttatagttatactctcctatataaagggccttaactcaaccttaaaaacctaagtcaccctaagtctcatttaagcctctaagtccaaagccctagtctctctccttctctctatcttatacacgtccaagtggctctctcttcctctctctcacacgcctccaaggcttcatctctctttcatttaagatctacctactgattcattcactgtaatttaaagagagctatatcagatcccacctatagtgatctgaataatattatctctcagtatcaatacaacaaaaaggagagtaagtcattacccgctaataaggggggccgaacctctataaatcctgtgttcttttactttattgtcttactgtgtaacacgtgacaaacatcaaattaatacgaccccactgtcggttggccactatttgaggtcaacaaaatgcatattgcaccatccactaggcccttagctcttaataccaattatagaaaatgacaatgttctaaactgtgtagtcgcaaatccccaaaatattgaggcttagattcaattcacttcctgtatagattctaggtcttacacctacatgtgagtgcacatctgatttacttatatgatgacactgagactaggtcgtgaaacaacaatatgcataagacatgataaatatggctctcatcaataaaactaactacaagcctcaagaatggcactagtacatattcctttattttaaaaaattaggtagtataaatgttttgggacacttagtgccccaaaacagttcagaaaaaatatgcagattaagtttttaatttttcaaacattttataaaccataaaaattggaatatatctaatgccattcaacacatataaaaacaagtccaataattaagttaagtctgtacctttcccaagtcattaaactttgttcaataaaagacgatcctacgttcttaagttccgagctccaattatttagtctaatcttatcactactacaaaagccaaaatttgtgacggtcccaaaaatacttttttttttcatggaccatcgcttaaaaaattgagtattttaaaccgtcgggaaaaattgagtattcgcgacgatttagaacactagtgagggaaatagacaacgattttcaatttaaacgtgattatttagtgtgggttataattgacagttttaggttataaacatcgggtataacccacactaaacaaaaccctctctcgcctatctcatattagggtgcacatttagacccgctaacccgaaaaacccgaacacccgcc

SEQ ID NO: 34439 - DNA, 1564 bp, Cannabis sativa
caagaggtcctcaaaaggcagtaattggacggaggacaagcgccaaaaaagagggtatactctccaatatacccaatacacggagctgacggactcataagagcgtgtgtatttctccacaaggcaaaagacgtactaccggaggccgcctcctctgtacagagatagttcgtgaagggatcacaacaaagatgtgaataccacaatgacattgatcacagtactaatgacaaaaatttgaaagatgagatcgaaaacttgatccgattgggtcatctgtatgagtggattaagaaccggctcccccatctcaacccggttccgacagggggcccattgccccaagggacaccaggggatgcactcggagcgttggcaccagctgcaccctcaggaggaccaatccctcagcagacgcctggcctgccaccaagacccaacggaagagtggctatgatctcgggtgggccccatgtcggggggaccactcaaaaagagttaaagcgctatgtcagggccatctaacaagacgaagtgtgggaagtcactcagcttccagcttaaaggccccgactcatggatcagccgattactttcatggaagaagacgcaaggatggtgcgttttcctcaccatgatcctctggtcatcgagactcccattgccaacaagatcgtggccaggatattgatcgacaatgggagttccgtgaacttgttgtttaaagaagccttcacagcgataggtctcacagaccgagatctgtcaccaagtagttctcagctcacgggattcaatggaaccacgcttatcccaatgggaaaagtgaggttgccagtcaccttgtgtccggactcaccccagagtactttcaagtactacacgtttgtggtggtggactgcccaactgcctataacgcaattcttgcccggccgaccctagtagactttggcgcagttacatccattcggcacttgtgtctgaaattccccacccaggaggctggagtagggaccgtgagtggcaatcagggtgaagccaggtaatgttataatgtcgcggcccacttaccagtattgatgctctgtgaaggcatcgagccagaattggcagaagaagatgagttggatccccgtgtgggatctgaaaaaattgtagaacctatgcaagacatcgagaaagtgccagtatgcaacctcgaccccaccaaggtccttcggctgggaaagagcctagaaccggaggaaaaagataaaatagtgaaagcactaagggcaaccacaaatatttttgcatggtgccaaggagatatgaccggcataagttcgcatgtaatagcccatgtccttagcgttaatccggatatgccaccagttcagcagaagcggcgcccccttgatccagtaaaggcggaggctctggaaaaagaggtggacaagatactagctaatggcttgattcgggatgtatatgttgggttttgtgccataattaaaacccattacaatctgattagttatcaatttagaattttgaagttatttatgttaacatgtatttttc

SEQ ID NO: 34440 - DNA, 1457 bp, Cannabis sativa
aatataaggttgttgtgaagattgacacttttagttggacttaattggattcttccgtgcgaaatcttaatttaaaaggtttgttcagattcgttgtcttcggtcacagctattaacaaaagaaatgtgttctttaatgagttgggtgtgctacttaacgacgtcgtagttttattttctaaactttcggaggcaattttgtcacatgtggctcggaattagaattctgtagaacagcaaaacatgctcttcggttagagaatgagttatcctggttcgaggaggtgttgccggtaattgtgaattgttgctttgttaatcatgtgtgattttgatcacccagtcaaaaataaatttgtgttgtgatatgggcagttgagagagaaaagataatgttaaagtcgatgcttggttgttgtaaagtgtacatatctgaaagtagaaacagggcagcactagagtccattgaaagagctgctaagctattcccaaaagctcccattatcaacaaatttgttgatgagacttacaacagagttggctacacacttgtttccaagttggttccatgccccttgagaacctcagtcctggccatggttaaggctgctttggagtccattgaccttgagttgcacagtggcagccatcccttggtctctacttctctggaccaggctgctaacattgccaagtctttggctgcacatgttggttatggtcttcaaggttcgtctctttaaagtttgatcttgtttgaattttgtagaagcaataactgtagtagtagaacatcaaaaatggtctaagtaaaattcttcatgactgtcaaatatgtaaagataatgtttcatgacacatttttggccactaatatcatctacataatacagctattaaattgtatttcatgcaatatttttaaaattctgtgtagtattgatttttataatacaatacaacctgacttaatacagcgtaccaaaccaacacttattatcttcttatttccattgctaaaaactttatatgtaatttggagtacctacttttctatatggagctgcccatgtagaagggaaaaagcttgatacaatcagaagagagttgggttatttcaagccaaattcaagtggaaaccagtggattcacctcatgtgtgattccaacaaaaggagtcattgtcatcggagcaacccggtgggttgacaactataatgttcctgttttctgtaccgatctcttagcgattcgcagaattgcaaagggtgtaagtggaagaggaggaggccttccttgggtccaggccatggcacttgcacttggtgagactgtcattgaagtagcttgtaatttgttggacccaaatattgtgggaggagatagagttcaacttgaaagttacttgaagttggacttagcgtaaacggaggatttatttattttaattttttatt

SEQ ID NO: 34441 - DNA, 4393 bp, Cannabis sativa
  modified_base (919)..(922): a, c, t, g, unknown or other
cttaacttactttatattaattatatttttattaattaaaaataaaaagataaatatgtctttcaaaattatataaataaaaaataattatatgttctaataaaagtaattttatcaaattaagtaattctaattatttatgctgattatgtaaacagattgatttttttaattaattattttggtttcaattacaatttaataaacgtaccataaatctctaaaagaatgtatataagaccctcaaatattttgtggtggtggttcccacataacatgtaaatatgtgacctcctatgtctaggtgacacataatccatgccaaaaacctaatggagccaatacaagatattgcacaaaaagagaaaagagatgttgtgttaactaattggatcaaatggtattaaatgataacaaaattcttatgatctaaaaggcatcaaaaatggattccaaattagaatatgctttttattttttggggtttcgaacttttgggttacctttgaatgtcgattgatgtacatacacgtaaagatataattgggggggttttcttaattaaatttatagttggaaaaatacaaattaaattatgctttgaaatggaatttgactttgtacgaggcgtttttgatgggtgtttggtgggtaaagagtcatgggacggtctccatcaaaatggcacactttttggggttttttttttggctttggaggctctctacttttaacatggacctctcatgtgccaccttgactttagcccaaaaggggcaatggaatcagagttttttttttttctattattatttttaattttcatacaataaataaatgaatattactattgggcacagtagtacttagcacccttaagacgtatcgctttacgattgaatagcgatactccctaaannnnattatattaaattatatgggaccccatactaaattacaccaatagcgatattaacacgtaggatggtgtttgacaccactagtgccttttagcatttctctaaataaataaatgattttcactctctggactcatgagcttggctagctagctcactattagccaaccatgtccatggatacactatactcttatatttggcctttattattattattattactttattgtgattcttcttgtcactaaagacactataacaaaagaagaataaagagtcgtaaaaagttaagccaggaagagttatacgtatatttaggaataggaaaatgactggtttacgtaccccgcaaaagacaccaaataaaagtgttttttttttttttttgtgtgaaatacaccacagtaaccacacaaattaagcttgtctttgtttatgatacacttaaattatacatatttttacgcacaatgtaattctatatgggtgggtacctaccaaattatatactactaaaattgaatacacatctttgtgtgtaaaagttatgtacaagtgtgtctctatatcattaattaatctatattattacacatgcatgtctaaaatgtggcattaaaaatatttttaatctatttattttttttcttatgtttatagttgacttaatatttatcaattagtcaatttaccatttttttttaaataaaagccaaataataataatcaataatctaaatgttgctaagagttcagaagcaaggcatgtgataatagaattcatattacgggacgcaccatcttaatcatttttggagcttattagtataaaagaataataacagattggtcatttttgggagggtccaactagacgaagggtatttcttgtctcttctacttcacgagtaaatttgacccggaaaaggacacgggaggacaggctgagtgtaacacacttgaggctaagtactgtatacacagttaatgggcatagggaagatcatctgacaccttacgctaaacagacatgcttaagggtttaaactcataattttctgatttcacgatacctcataaatgagttttcaaatcataaacaatagataagttaatcccaccaaacacctatagacaactcaaatacattatgaagcattgaaaagtaggcaatcatgccttaagatcaaatttgagaaattgtacaaatcatggttcatacaaacacaacaatggtggcctttcaccaccattatgagcctataaatataatgatgtatataaaaaaaaaaggattggaaaaattatatgtaataaacaatcccattaataacggtgacttatggactaaggctcattaatgcctcaaccaagtaaaaattatcttctcaaatactcatttattgcttcacacaactctaattaataattaccaaaatcttcagtcaatattttggtagtttcattgagcgttgtaggaaccaaaagaggaaatcataaatagcctcgtggtacaatggtgatgacaaggaacacttcacgtctacaacaacctaataacgcaaaaggtccagaagaagaagagacaacttctagggtggatgctgaaggagaatgagacactaatgaccccaaggatatgaaccaaaaggaatacgaagaatacaatgaagataactatacaaagctagttgagttaaggcaaaaggatgttgaccatgaggctaagttgaaaaagaagaaagaacaaaataagagaatacaagagatattgattgccatgaaaatggcaagggaaaatgcaggcattcacgtggatctgactgcagtcctatctgtacaagaaaagacatgagaagagctttctcagcccgagggggccaaaaacagaagaatagggagcctagtctcatcatgtaccctacaaaaagacctaccccaaaggggaattctacggctgtatttgaaaagaacaaaaaggcccaagatcaacgaaaagttcgttctgatctcccaaaaggaaaagttccacagggggtaagtttcccaaagagaaaattggccccaaaactgtggagatcggaggagcatatctatgcatcaagagatgagaaaaaaaggggtctgccaggaaagatcccccagtcgatttgtgacatgaactcaatgtcaaacacggaaacctcagggcacgctttgactagagaaaaaaaaaagttgctccactccaatagtatcataaatgaaggacttctggccaaacttgctatcctccagaaggacatagcaagggtctctcagagacaaaaggaagatgactcagagtcagattgtgaagaccgagagccttgtgcgaggaatatactcgaggcgaactcctaaagaatttcaagatgcctaaaatgactatgtatatgggtgaaatagatccaagtgatcacctatctagatccaacagaatcatgacagtcatgagggtcaacaatgacaccaaatgcctatgttttccactgacatagggagggggctgaagaatggttcaagaagttaaagcccagctctgtagattgttggaataaattacaaaataattttagaagacaatttgctacaaccatgaagataaaccttgaagtcagtgtcttgactaacatcaaacaactacctatgaaaaccttaaagaacttcatcaagaggttcaaagaggaggcttcaaagacaaagaaattagatgacgggcaacggttagctttattgcaagctggtatattcggacagaaattccctttgggaatgaattacaatatttgtgactaatccaaaagtattagtcacaatttattatgattaaaaaagaaataataataactttgtatttaaatattattttttaatcacaaataattttttattagactaaagtaatatttattactctcaaaaaatagtaatatttatttttcacaaaaaaatttatattgcgacttaaatttggtttttttttttttactacaagggagcttgctatttgtttcttcttcttattttttctgaaaaggtttcttcttcttttcaaatatatatttttttttgagaaaactcttttcaaatatatatatatatatatattcacacaaaatgattttattatatgtaaacacaattagtcaattaaatatgaagtgtcaatttataccaagaaaagtctcctacaattccattgaaatgtatgaatgaatcaatgaatgtttgataatgatgtaagttaaattatatatatatggagtatagttccatcaacaaaattatattttcaatttccgtgtggtatttgaagatatttgtcctatgtgtatggtctaccaatcacaattcacatgatgacatacatctatgtcttataaaataagagtaataacatgtagggaattttgaaagggaaatttgattttctatacttagaaaatcaa

SEQ ID NO: 34442 - DNA, 1500 bp, Cannabis sativa
  modified_base (416)..(417): a, c, t, g, unknown or other
aattaacaaattgagagaatataataatgagttattttgtgtgtacttacattatagacggacactaatggaagagggtaccttccacatattgaggaaatcactactatcttccctttgcttcttttcaagtgtggaattccatagtgaatgctgttcactgtaccccagaaattaacatcctaccaaaattaagtaaatagcccatattttaatttttattaaataagaataaataaatgtagtcatgatgaaattataccataactgattggtgatcagagatccgcccaatcttttcaaacttgctcagtattactgtcccagcattgttcaccagatgatccactatacaatattaatttcataacacattaaaattcaaacaaattttgagatgatatatatatatatanntttatatatatatatatatcttgccccccaaaaataaaattgaacactaataattaattacattggccaaaatgttgaactgtttcatctatgaacctcttacaatcttccaccttggtaacatcagcaacaatagatataacatctggagatcctaatttatgagcttttcttttgacttcttcaagattgtctttaatgtcaactaaggtcaaacaagctcctcttctaccatactcataagcaatttgcttcacaaaattcataaatcaaaataagttgtaataattaaaacaaaaatgaaaaattatccattatactatttttttttttaacttgtcttccatgggttctcaagtagtttttgctatacggagtttggttgtgatttaagttgcaatagggatttctgtgtagaattccgtaaacatacaaaaaaaaaaaattatttaagtgtaaaaatgaaaaaacccttaaaataaaagtaatatatataattagtagatgtagatgataataatttatttttatatatatgcatatacctctccaatgccttgagctgctccagtaatgagaactactcttctagccatgttttcttgattggttatggatctttttatagattgtagaaacttgaatggaatgtatattggtaggatgataaaatgtagaaatatgattatgggaggaactgcaatgttcaacaaggtgtgaatccaatcccccatttttgttaatttggtaagtgaaagttgaagagtatatatttttataaactatttttattatgaagtttggaaggttttgaatgattttgagttttggtagtaggtagctaggtaggtggtagaagtagatagagtaaatgccatatagagtattactggttcaacaatttccatagggatgtactccacatgagccacttgaagtgtaatactatttttatgcttttatcttacaataattttatcaatttaatatatatatatatatatatttatatattgtagaaggtcggtttggttttggttgtgtggctcacgattccaacagtaatttggtagaagcttacac

SEQ ID NO: 34443 - DNA, 1435 bp, Cannabis sativa
aatatataatattttagtatacaataaaatttaatatagtattatataaaaatatgatatataatcaaattcaatataatacaatacgacctaatataacgttacaaacgagcccttaaatatctaaaatataaattaccagttagactaccttaattgtattctttgttatactttttttttttttttgaataagtgttcttcattagatcgagcaatcactcgcaaggatagacataagattcaaagaaacactgttaatggaaaacatacgttcagctaaagaaacagagtgctgggcaacaaagtgcacagcacgattcgcagaacgcttaacaaacaaaatcgaaacattgaacaaatttttaaggatatttttgcaatcatcaaccaccaatccgaatgtagaagaaaaagtttcttcactccgaatagccttaacacaaacaagactatccgtctcaagagtagcccgtgagaaagcatgatttttgagccaacttaaagcttccctaatgctaatgatttcagccaattcgggagtcacagagccatttttaacccctgcaaaagcagagaccagtccaccatctgtgttcctaaccacacacccgaagccatgcttgagaagagaagcaaaaatggcaccgtcgacattgagtttgatacctgaagacggttttatccactgctcagcaccatctccatctttgagaggagacaacaagggaatgttaccctttccttgagcatttacccattgatcaagagtctaattagcaaaagctaccacatcattcacacttctcaccagctgcttccaaacaagatcatttcttgctgcccaaatagcccagcataacatcactactctgcccagaacctcactgctcacacgcctagcagtagcatctagccaagacagcagagaagtaaaagaatctctccccacagcagctaaaccagcatatcccaggcaagaccaggcgaaatcacaagacaccagaatgtgccattctgtttcagcaaagacgccacacataggacaagtactatcaaccaataccttcttaatacacaagttccttttagttgcaagacaatttgaagccgccctccatacaagatccttggccttaggaggcactttgagggtccagagattcttccaaaacacatttatctctgagttgtccgaatggtgtttaaggtcttgaagcaaattgtatgcacttcgaactgagtagaacccgctcttctctacaacccaataccaagagtcaactccacctttttgatttatgggaatgccgagaatgatagtcgcatcttcggggggagaaaaagtctttcacaacatcactatcccagcaacgattattgacttggaagaggctgttgacagtaaaattctcaagaccatgaaccttaggaa

SEQ ID NO: 34444 - DNA, 2356 bp, Cannabis sativa
aaaaaaaaaaaaaaattgaactttgattaacttttttaactttgaattcagctaaccttatcttcaatttcttcacgcttcacatgccttttggaaatcaaagtgaaatctcctaaacaagtttgaagattaacttttcagtttcagagctaattaggaaatagaaaatcattactagtctatgatacaatttatccatcaacatcttcttaccttcagctgtagcgaatttgaataatattgagaccaaaaaaagaacaaatattgaaatgaaaatgagagcaaccgccattgttgtctgctttcacttttcaccctctcaactctcaagtaaatgctgaatacgttaagttcaagagatgcggacgttgaagacgagcattggtttgggccacccttaaatgggcttgaaaataccattaaaggcccagtccatttcgccagacgactctcaaaaacgacgtcgttttgggcgatcaggtatactaacttctcatgcttcgcagtgcacacgtttctacaaaggtccatttctcactcttccccttaaccgctaaagagagaaagaggctgtagaagtatcttcagaaggtcttccaatggcggcgagaagcgcactgataaagtacctgagagttcaagtccaggcagtacctcaaaaccctagcaccactttcctctcttccttcaattcgatacgccgccgtttcttctcggaggaggtcaggggctccttcctggataagtctgaggtcacagatcgtgttatcaacgtcgtcaagaacttccagaaagttgatccctccaaggtattattacactctatattttgatctcgttccgaaggttttgaaaaattatagcataaaccctaatttgatgcatcttttacgaatgaatatgtaacgtattccaagtttctgatcttgacattttagttattgaacttctcgttcattagctagcaaatgggtacagatgcatataaatttgtaggttttaggaaaggttgggtttaaggggaattttttttaccactagtaatggtattttgttttgaatctgaagttacaagaaaatgaatgaagagcagttttccatttttaatttaatgttgtgcattgctataaatttttaatcgtatgtacaatgatcaatatgagagctcagaagtgaaaaataatgtgaattgctcttaaatcttcgaagcaccccacttacaatcttagtttgtcttggataagatacagatattgcagcactttttagatggtttatgttgatgttgttatggtcttttagagttggcaacatcgattttttggtttgttgatatatcagattaaccttaattaactgtcatgcttgtgttggataaaataactatagacttgtagagtgaagatttcatcttgtgcaactttggaaaatttcatgttgttttttcgttttgcataggatgatttaggaactttcattagttttatcctcaattctacggttcttttgggatattcatctgtactctgtaggatcttctgaaaaatacctttcttgtatatttcatcctaggtttcaagagattagtatggctagttccgtaatgcaagaaatttaggttgtgtttggttggaagaaatgaaaacatgggaatgagaatataggaaaggaaatgggaataaaaatagaatgtaatgaaatgaaatttaaaaattttaaaataaaaaaattgatagaagaaacaattaattttttttccatcttgcattaaaatggttttcttccatttcataaatggtggaaaagtcattctattgaaatgacattccaatactttaaaatgcaaccaaacaaaataaaaattgatttatttccatctcattattccgggtgaaaatatcagtaatgcaataatgctatcaatggagttggatattagtagcactagtttacattaaccagttgttgtccccctcttatcttatctgaatgcttgaaaaagaatgtaattatgccacttgccaactaattatgattggaaaaccttctactagtgtttgtctttttactcttcttttttggctcttctgacttgctttcatatctcttgtacaactgtgaacaagcaagagctcttatgtctcaattattctgtacttggcaggttacaccaaatgcgcattttcagaatgaccttgggttggacagtttagatactgttgaagttgtgatggctcttgaggaagaatttggattcgagattcctgatagtgaagcagacaagattaacaacattagtctcgctgttgattttatcgcttctcaccctcaggccaagtgaaagagaatcatgaag

SEQ ID NO: 34445 - DNA, 1569 bp, Cannabis sativa
attatccttttattgaaaatatataaactctaaatttcccaattttataaattctcaaattataaatttattaaaaaaatttcttttttattttttatttgaagttttttttaaatacaattttttttaggaaaagaaaaaatacaaaaaatacaaattttacaaatttcttatttctttattttctttattttttttattttttttaatttaaaactttttaaaagtattttcttttattaaatacaaatttttttattaagtaacaaaaattctttttttttttttaaatcggaaacttttttttttggtaaactaaaaagaatatttcccaacagtttataactgttgggaatactaagtaaagccaacggttgtacttaatattcccaacagttataaactgttggcatttacaattttttttttaaaaaatttcatttagtattgcccacggttcttcactgttggcatttatttttcccaacagtttttttgcttcggttttaaatcgttgggaaaaatctctacttactttttccaacggtttttaaaattgactcctttataaaccgtcgagaaaagccacttttgtagtggtggatcaagcataaatgtacaccttcatcctctcaaggccataggttcggacggtcttttggggtgttttttttggcaagtattgggacattgttggcgggaatttttgtgatgtggttataaatttctttcatacggaatctatgaatcaaaatttaaattcaaccttcatttgtttgatcccaaagtctgtgaatccaaagaggattgagcaatttaaacccataagtttatgcaatttcctttataaggtaattgcaaaaattttgtttagccgcttaagacctttaatgaatgttttggtgtctctctatcaatctgcttttattcctggaagatgaattgcagaatctttcattctcattcaaaaaattgtccataagattcgccataaattgggtaaaggaggtttgacggctattgagctcgacatgcataaagcatatgataagatggaacggagcttcctacataaagtttttttggcaaacgacttcaatgagaagaactgtaatattattaatttagagtgcgtgaactgttacgtatttagttctcctcaatgggagccctttacgaaagttctgtccaaatcgtgggcttcgtcagggagatcctctttctcccttgttgtttctcttgtgccaagaagtgctatccgtgattcttgcaaggactaaagataggggtcatggtattaaaatttcaagaaataccctgccaatttcgcatttgatgtttgctaatgatactattctaatatttgcccgttctaacgaaaaagaagctatggaaataatcaaatgtttgtctttgtatgaagtctggttaggtcaaacttgcaatgaagataaatcttttgtcctcttctcaggaaactttgactggaacaaaaaagctcttattctcaatcggtttcgtatggctatctacaatacaaagctgtgtttaggcacattatccacaata

SEQ ID NO: 34446 - DNA, 1661 bp, Cannabis sativa
aactagcaacctgcgtgttgaggatgaagacggatgggagattaatgaagctagagaatcggaggtgggaaaatactgtctgatgggtaggttctgttcgaacaaaagtattaacagagtcctaattcgaactattctgggaagagtgtggggtttagccgaagtggactgggaagtaaagatcaagaggattactactgaagctacattcttggttttgatatctctcaaaacacatattaatctttttgctgtgataacttttgcatcataaaaagaacaagcagccaatacgacttttattcttagtctctctctctatgtcactattaacccctagttatgtccatagatttgtcttgtgtcatgtttgttgttctttcaattcttagcctatttctatgtcactattactaactatataataattggcactccttacgcattcataatttatccataacgaaaatgtaatgttttgatattttgtcttactttacaaaaatattatttttaatgcataatttgaaaagattcaaaagtacttgaaatacaacagtgagttttagaatcaaaatataacagacgtaaaacaaaatataataagtaaatgattttaaataatacattttcactgtctttaaaattatcaactgcttaaaataaaactaagacaccacaggcattttagatcgtttccgtagccgcccgcagtatacacaccaaaactctccctgctcactatatacgtagtaagagtacttccctatctaatatctgtaggggaaaagtaagggggttaagctaaaaggctagtgaaaaaatacttatcttactaggaaattttacatggtatactaacttttgctaatttttttacaaaaatactgccaggcggtatttttacttttttactgtgtatatttttataagtttcatactgcagtatacagtgtttattattattatttttgatttgttttagtgttttttatgcttattttccataatttatttttttaacgtcgatttcactgttcttgctccatcttgctggaattaatgattattttctgggtgttctcgtggtgttgtggtggttctatccgtgtgtgtggaagatggaggctataaaatacatttcttcttccttttctatggttattttgtggttttttattttggttctcctaaaaatacatttgacaagctcactacaaaaaaagttttgaggtgtgtggttcttttatgttttttaagtagttacatctgcttattgttttacatttatttttgtgttgttttggtattttttttgttttgacaatataagattggacttacaaatataactgctattgcattgaatattgaggttgtgcagaatatttttttagttttttttaatcatgtttttctttcttttgtttgatttgttttagtccaaaatgcatgtacatattgtcttttataatttttagttatataggtagattatatattcatttgttagtacatgtcccctttatagtcaaactaaaattaaagcattgatggtaaaaaaaattgtcacagcattaaaacaaaaattctagaatgctcaatgcagtattattggaagaaaaaattacttggatgccggatatatatgttatgtatcg

SEQ ID NO: 34447 - DNA, 1283 bp, Cannabis sativa
  modified_base (614)..(615): a, c, t, g, unknown or other
gttgtcaaattttacttgacaacagactaaaaccgcagaaaacacaatcaagattaatgtagatgcaccactctttgatagagacaataagtatagtttcggaattgttgcccaaaacaatcttggtcaccttgttgcagcacgggccggttgccatggtggaagatatgcagctgaagtcattgaagccacgaggattaaagaagctctcagttgggtaaagaccaataattggcaacatgttcaaattgagacgaacagtcttgtttcagtataagcaattcaaagcaaccaagcaatgaagtccactttcggccttttaatcaaagattgccaacttttgttatctaccctcccaaatgttaatttattttttattagacgatcagcaaaccaagtagcacattatgttcctagtcattctcggtatcaatttgatcgtaatatttctgatatttctatttctggtgaactcttacatcttttgtattcagaatgttaatttattcaatgaagttgatatttcataaaaaaaaaactaatttgtcactgtaaattttttacggtaaattttaataattattattgtagaaataaattattattattattannattattattattattattgcaaaataccgattttcattcattgatttggaattgaataaagtacacatgtcatgtcataaaataaaataaaaatctgcaagataattatttgcataaacgcatgataatatactttggtattaactaatttgatgaatatgcaaataagaaattttgtaaattatagtaaactcattatacaaaggatgacatcaaagttgcaacggagtcgcgactaccaattgagacaaaaactaaggcctcaaagtgtttttattttttttgttatgcatatctctttgtcgtttttaagccaagtattataaagattaggttttctttcattttcacaatagaaattgtaagatggtatgcatcttatacatatttccaatggtgaaattgattgatgaaaaaggtgacattaatattcaaattcagggagtcaagaaactctagatgtacattgagcgttgattggcctcttgtatatacattttctatcaatgtagcaaatggtctcatattttacatgtgaacatggaattaaaaacacaaggagagaagattattattcaatatttaatttgattattttttaagtatgacgggttatattatatgtgatgatgtatattctttgatgaaaagtgattccaatcgctcac

SEQ ID NO: 34448 - DNA, 2648 bp, Cannabis sativa
  modified_base (2501)..(2501): a, c, t, g, unknown or other
caaaatttctctatagtaaaatatacgttcataaaagaatgtaaaaaatattagaagtgtctcaattaaattgttatgattttggcagttagaagacccaactgtaatggttatggttcactctgctacgatccacgttttgttggcggtgacggtgtaatgttctacttccacggcgcaaaggatggaaactttgccatagtctccgacgaaaacctccacataaatgcccacttcatcggaacaaggcctcaaggaaggactcgagatttcacatgggtccaagccctatctgtcatgttcgacacccacacccttgtcattggagcaaaacgtgtctcacaatggaacgatggcgtggatgccctcaccgttagctgggacggtgagtccatccaaatcccaactaacggagaggctgaatggagagctgacagctctctcagcaaacgacaagtcgttttggagagaactgacgattataacagtgtcagagtaacagtggcaggtcttgtccaaatggacattaaagtgaaacccattggaaaagaggagaacaaaatccacaactatcaaatcccaaaaggagattcctttgctcacttggaaactcagttcaaattcttggatttgtcagattctgttgaaggagttttgggtaagacttacagacctgggtacgtgagcccggtgaagattggagttccgatgccaatgatgggtggagaagataagtacaaaacgacgtcgttgtattctcctctctgtaagcattgcaagtttcagaggccaaacaatggtgatgaagttgctcaattctgatgataataacatatatagaaattcataacaataaatgttatatttggttttgagaaacatactttaatttcttatgtatgctatattttgtaatttaatattgtaaaacacaaataaagggctaaaaaaatgtccatgtattcattttttcattaatctttttcacttgttttatattttatgctgcatttttttttaacaatgaacttgtaattgaaataatcaaactatgaaatgatggactgccttattcattgatgaattattagtttaaattattatacatgctatatacttacaaactaataattatgtgaatttttttttaatttactctatggtctcaattgatcaccgagaccaaaggtttaactgtgggtttggtctgatttatatactctttggtctcggtttgtgttttagtatcagttagctagccaaccaacactattagtttttcgtaaagttgattacaaaccgacacctcaaattgagagtactcatcggtttaaaaaaaaaaaaaaattaaccaactctcgaaccaacacaaaacatatattttgactattttttcaactaacttgcacatttggtttttccaattttccaaactacactcgcacaacgaaactaaaaaatcgcagaaaccgcactacaaaaaatagtatggtgcggtgcaatttttacagtttctactgtttggactatcaccaataattaaactatcacaaatacaacaaaacttaagcaacacttgtcaaagttaccataaggcttgaaattataaatatgaaaaatattaagtttcaataatacaataattagtaggctttgagttggacattcacatattggacctaaataaatataaaaaatattatttttatattggacagtgaggtgcggtttgaaccgcataataacaaattaaaaccgcatgcaaactgtaccggccgtacggtttaagaaaaatttaaatcgtgaccgcaccgtaaataatttcaaactgcattttttttttgcggtgcatgtaatttaaacgggttgatgaacacccctaagtgtagaatgatatttacgctaattattattatagttttgaaaaattctgcagtagattcttttaaggttgttctactagattattatcaagaaaagttttttgctcaatttttttatgatcgtgtatgttataattatttaggattattcgtaagctttacaaaattatgaataatttacagtgctgaaaataaagtttaaacaattacttaccacgcgtatacaaaaatagtcgcaagctagtgcaacaaattgtgtaaattttatttttgacattgtaaactacttattttttttttttaaaatttgactgattatcataaataactataacatatatgatcatgaaaagaaattaaactgaaaagctctcttatatgttgaaatagataagagtataccaaaacactatttaagagtgtgtacattcagtgactttgtgacagtcagtagtctcgtgatcagtaagaagaaatactgggtaagttgtgcaatcccacactgcttagggaaggtcaagttggatgattctgagaacagttgaagagtgcttaaatggattgattgttatcaataaggtgcatcttacttttcggtagtccatcacgaaagaactncacagttaagcgtgcttgacctaatttcaggatgggtggacctcctgggaagttttcctaggaagcgtgcgagtgaagacaaagcacactgaaaacactcgtgttggtttgtagggccagtcctcagtctatgaagcagccagagtg

SEQ ID NO: 34449 - DNA, 1304 bp, Cannabis sativa
aaaaaaaaaaaaaaaagagagagctgaatttaataaatgtattattgcttgatttataattaagaatatacttaattatttagtggcgtaacgtgtcatccgacaaatggaaaataatgttaattttttaatatatttctgcacttttttaatgtaccaatcacatgtaatgtttcatctaaataaataaaactaaaaaataaaaaaaatccacatccaatgtttagaaataaataaggaatatcttatccattttctaaaaatttttgctacatgtaatgatttaattgcttgatttttttcctcaaaaacttgattttattgtaaaataattcagattaaggatttacttatcgacctcaatatattaaaaatagttcaaatcaataaaatgactcttgaagggattttaaccactcattttgattaataaataaaaaaattatgtaaagtaatgttttgtatgtagtttgtgaatatattagttacatatggtattgttagatcttagtcaataattgtgattagtttattagtatgtgattaaaaaagttaatgcataaattaataccaatacattttccttttatatatatttataatggagaggtggcattgaagagtgttagaaattctattacactcacttaattgacaagtggcattattagaaaaattcatattttaaaaatattataagtaatcaacaattaagaagacaacataaccgcacacatattttaaattgttatgtaaatattttttttttttcaaattaattgggttattacatgatacgagatctccaccaccaaacttcaaaggatcaaacggattgggccatagttaaagatctaaaaaattgtttcttaaactaaaaaattagtttcataataaacaaatattgtatgagttttgatattcctaactagttagtttcttcattaaaaacactaattttaattacatagtatttggtttcttaattcattaccttaataaaattatttttaactgattttttcatcagaaactagtttttatatatgagtttttaaatttttaacagtatttttttttaaatacgatatttatctcatatttttaagtttttttttttaaatattatatttagtgtttagatgccatatatatcaaattttgttttttttttctatagtatttttgtaaataggcctaaggaataagagtttgtctacgaagaacatggtaagcttaactattgggcccaagtgttagcccaacacgaggcccgtttcgcggtccaaaaaacaaaaagccca

SEQ ID NO: 34450 - DNA, 1451 bp, Cannabis sativa
tttttaattaaataattatttataatatttattacattttttattttttttttaaaaaaacattattaccggcggacacccgtcggtaataatgtgtcagtgttcagtgttcttacgcgtaatcaccggtggaccccgccgctaatggtctgccggtattaatcattattaatagcgacatgttattaccggcagaccattaccggcggattctcgccgctaaagggtaataccagcggattccaagattattaccagcgaactgttccgcctctaataatggtatttgttgtagtgacaataaaaaaaatgtatatgtattcatattgatatttataaaattaatgaatccaatataacattaaaataatttaaaacggtcatttatgtaaaccactattttatacactagctcccaccttcttttaaagtaggtttgacttgtgccacaagaaaaattatataacatataagtgactgtacattagtgtccaatatatatatcatcaaggtcggtctgaagttaattgagttttggactaaaaaatttgattgagtttttcttatatgaaaatgtttgttttttttatacaggttaaatattattttagactttattttttataaaagttattagttggatcttctattttgttaaatgataaaatagaccttatatttttcaaaatagtaaaaatagaaccatatgcttaattttcaataattttattttttttaatataataaattttaagacaatttttaacacgaataagtacgaaaaatgtaactaattttgtcataatatctttagatcagattattattaagttttattatgataaaaagatcagttcagggtcctatttgtacaattttagaaaatacaagatctattttgtcattaatttaacaaaacagagggtccaattagtaacttttacaaaacacagagtctaaaatagtatttacccttttatatatagtagtaatatatagtattttgaaacagtaatttacggtataaacaattaagtttctggttgtaaataaatatttaagtttaatttttagcgataataatacttaaattatatttttagaacttcgtaggtatttgatgagtcaattattcacgtgttatttttttattggtatatttaaattatttttttttaaaaaaataaaaatgtaattacttaggctaatcaggatatgccaccatggtaatttacttaacacttaacatacctacaaaagtttcaaaattataacttaggtattattatcgccaaaaactaaacttaggtatttatttgtaactgagagttaaatttaagtttttatatgcaaattactctattttaaaaatataattagatatttttcttaataaaatattaaatatagtattttttttttaaaaaaaatagttatatttttaaataaat

SEQ ID NO: 34451 - DNA, 1545 bp, Cannabis sativa
tttgggttccacccttatgcaaacatctaaagctccctaacctgtgttttgcaaatgatcttattatattttgcaaggggaatcttaactcggtcagttgcttacatgaggcatttttgagattctaccaagctacgggtctctcagctaataagtccaaatcccacatttattttggtggggtaaaggatggtatcaaagctcagatcttggacctcgttaaaatagaaaagggttccttccctctgaaataccttggggtcaagcttcgtccaactaaatggaagactgaagactgtggagtgattctagacaagataaacaagaacttaaactgctgggctagcagaaatctcttgcttgtgggtcgtgctcaattgatccactcggtcctcctcgacattagaaattattggatgagtatttttactcttcctagccatgtcatagcagccattgataggagatgtagagaattcttatggggaacttctgggaaccgatctaagatgcactttgcttcgtgggagaaggtttgtctccctaaaaagtatgggggagttggctttcgtgagggtaaaaagtggtataaagccttgatggccaagttcatttgggccattgctagaaaacaagattgcctttgggtgaagtggataaactctatatacctaaaggatcaaaatgtgtggagccttcctatcaaataagatatgagctactatttcaaaaagtttatgaaactccggtcaagcacaaataaggcatccttattgcttgctgaaaagggaggtaagttccgtgctaaactctttcataacatgcatttggaagctcaggaagagaaacatagtagagctgtcgggaataagctcattgttccaaaacataggtttattttatggcaggctagcaatgctcaactcctcacccgagatcaattgagcaagtttctgagtttactctcgaacctttgtccggtttgtgagagtgatatagaaacacactcccatatcttctgactgtgtgtatgccaggaaaacttttgctgaaataggaagatggttgggatatgtggattctccgattgatgctgagcacattcagcattggtgtatccggggcccccttaatttcaagaaccgagtgataaacactgcttttgcagcagcgatttacttgttgtggaaaaatagaaatggttgtatttttgatttagtttgtacttctccttttaagttgagcatggaaattaggaagatttctcaatctagaatcttaagtatgacttgtaacacccttaaaaagcaggataagtacattattgatgtaattaggggctggtagctttgtcttttggttgctgctgtgttagcagcccctttggctcgttgagcctttgttttgttttgccttcagctggttgttcctgcttgttttgaataaagctcattttgttcaaaaaaaaagtataattattgctttaaaaataaatttaattaaaatatttttctaagcacaatcgaaattaaaaatatatatata

SEQ ID NO: 34452 - DNA, 1407 bp, Cannabis sativa
  modified_base (1369)..(1377): a, c, t, g, unknown or other
gactcattgcattaagctctgattaggtgtaatttttcgtttatttcaagaaactgtaattttttggcccataatgttgctaagtaggcttttactactaatgttactggaatggttgattttttttccatctcaaggaaccatttgtgtagcgatcaggaggtataactcgtctttttagttttattaatatatatccttgcattttattcaaaaagagttcagttctgactgtattttgaaacaatatttgtcttattgtagcatataaaatatagaatgtgtcattgcaacattttatacttgaattatagagccagcctaattttattcaataggtcatctgttttcttatacatgttttgatttaggctccatttttttcatttttcaattacaattaagagattttttgtagctaaaccttttcaactatcgttttacttgcacttaatcctctaagtttaaattttagtgataaaaccttctaatctactaaactgttagcaaatctaaggtgtcatccggttaactgccaatatagactgcttatatatacactcttgtacacgtggcacatttatattaatactcaaaatactattatttcaaaatttattttaaaattaaataaaatgataaaaaaataaaaaaaaatatataaattttgaaatattcttttataattttttaataatattaagtgtaccaatatacacgtcacacgtgtacaaaagtgtacacataagtagtctatgttggtagttaactgtgaaaatagatgtcaccttaaatttgataatatttcagtagtttggagggttttaccactaaaatttgagcttgaaaggttaagtacaagtaaaatgatagttaagagggtttagccgcaaaaaaaattctacaattaataagttaagctttaaattatattatatgttatctaacaatagttcacacgcaattatatataaaaattaaggatcagaactaagtcgcgctttgagcgtgtcaatttttgtaatctttatatatacacatatgtacttataaggctcgcttggtaggccttataaggatcatgttgtattaaataataaataacactatgtttagataaagcaatgtattgtattaattattatgaaaaaaaaattaatacaatgtatgttgtattatttaatatataacaaatggtccatattagattatattttaatatttacaaagaacctggatctagacccagacatgaacctggacccaaacccaagatccaacctggaccgggactgaaccttgaaccggtcccgggacaggacctgagaccaagacttgggactaggactgtaacaccctaactaacatnnnnnnnnnacgtgatttttaaacgtattgtgcagctcg

SEQ ID NO: 34453 - DNA, 2015 bp, Cannabis sativa
tatcatattcttatcatatattttagtgaagttaaaagaattaaggaaaaagcagagtaaatggcagagcatctgacagagggcacaatcgactttctgcttcctttgttttccaaatttgttggagtgttgatgtaatagaatttttgtgattttatgcctttatcgttaggattgggatatgcaatattccctttgttttgctttaacaaactatgtacgtgtagaccatttattggctcttgtaatattccttccctgtgcccagtggctatataatatgcagcagcctcactcataattttgagctgagttttaccatttctattctctgttactttcttcacttggtatcagagcaaaccctaggcgtctgccatggccgatccaacttcagctccagaacaatagcaacaacatgtggaaggttcagctactgcgccctcttcagaaacttcacaccagcaccaatcgagaccatcatcccaagctatgagtccctcactagtgactacacctttcagtttcactctaagccaaccattcacaatgaagctcgacagaaacaattttcccttgtggagaacgatggtctttaccatcattcgaggtcacagactcgaaggcttcatcaacggcaaaagagcgtaccctgaggagttcattacttcaggtatccctggctctcccgactatactatttccattaatcctgactatgagaactggcttgttcatgaccagttattaatgggttggctttacgattcgatgatggaaagcatcgcgtccgaagttatgggctgtcaatcggcctttgctctctggacagcccttgagaatctctttggagcctattctcgtgctcatactgacgatcttcgcaccagactacagacaacaaggaagggctcaacaaccatgaccgagtacctcaaacaaaaacatatgtgggctgactcactcgcacttgctggtgaaccatacccagaaagacatcttgtgtctaatgttctctctggcttggagattgaatatctctcaatcgtctccctcattgagtccagatctgaaacaacatggcaagagttacaaagtatccttctcagctttgacaacaagctcgaacgtctatctgccgttcctccaagctcacagacccactggtcagtatggaccgagaaatacaaaccagcaacatcagcaagggcgtggttcgtcgacaaattcaggttcctgtggacgaagtggaaaccgaggcaggggtcgtggaggtcgatttggaggaccgaagcctacttgccaagtctgtggcaagtatggccactcagctgcaatttgctacaacagatacgacgaaaattacagagaaatcaaccaccaggagaccaaaatcaagataaacagatcaatgctcttgttgctactccacaggttctaaatgacgatagctggtatgtggatagtggggcaagcaaccacttaaccactaatgaaggacagatgaacaataaaacaatgtatggtggtaaggagaagattactgttggtaatggtaataagctgactatttctcacattggctcaagtcaacttaaaattatttctcactctcctttagttcttaaaaacttactccatgttccaaacattaccgaaaacttgattagtgtctcccaacttactgctgataatgatgtatctattgaattcttttctcttgtttgttgtgtgaaggatcgagagacagggagagtggttctgcaaggagctcttaaagacggtctctacaagctcaagacatctctttcctcacagtaatacaactcaagtgtccaacctcctatttccaagtcgtccccctttacggatgttgctactgcaactttagagtccaataaacctagtgttagtgagtctgtcttaagtttgtggcatagaaggcttggtcacccttctcatgccgtgttgaatcaagttttaaaaactattgatgtaaggccttttatgaatga

SEQ ID NO: 34454 - DNA, 1790 bp, Cannabis sativa
tcagacaagctacatcaaaaaggttttgaatacctttgaagtgagtaactctaaggcagtgagtacttttcttgcacaacacttcaaattaagtgttacttagatgtcggaagatgaaactaagaagtcagagatgccaagagttccatatgctagtgtcgttcgctccttgatataggtcatggtctgtataagaccaaatattgcatatgcactaagcatggtgagtagatttatggaaaatcctgaaaatgagcattgggaagccctgtggattctacgttatttgaaggaaactgctgagaagggacttgtatttggtatgaataaccagaatgaagacttggatgttattaatggttatgtgaattctgattatttaaggtgtattgatactcgaaagtctttgatcagatatgtgtttactatatttggaacatctattagttggaaaataaaccttcaaaaggttgtggcgttgtcgacagctgaagtagaatatatggattcgacggaagcagtcaaagaagcactgtggttaactgggttgatggaggagctgaagctcaatcaaaaggttattactgttcattatgataatcagagtgtaattcaattaactaagaattttgtgcaccatgaatgtactaagagcattgatatcaagtttcatttcatatgaaaggttgttaaaaaaaagaagctataaagattgtcaaggttccagctgaagagaattcttctgatatgattacgaaggtagtgccaagtagtaagtttgagcattgtctaaagctgattggagtcagttgagcctagaggggctgaggggattgtagcatttaaaataattatttatcaagtgacttcaacttgaaactaaggtggagatttgttggttatggttacaagttttgtcatccatgatcgaaaatattgatccagagagcaaataccagaggcttagtgtgtattcaaaaagacatgcagaagatcttgtaaaatccagaaggtacttccagataagcttgtaccgcatatgtaatgtctctctcggataacttgttattaattcggaggtacactcttggacaacttattgtcagtcttgaaggaccatccaggaaggaaatcatgtacgtgtctggaaggtttttgtgtttataaagtttttgaattgttcgtactgaaagcattttttttcaagataacatggattattattgctggagaagagtggatcatttaaggcggtgtaaatatgtcacgataatttaggagatacttttggcaacaatataaatctataaatagttgtaaattatctttctaacctgtgtaagaatccgatcagatttgattgagtgtaaatataatagtgtaaggttgagtgagagagtctaaactagagagagaaacttcttctcgtaatctctgagagtttgtgaagattcttgtaattttgtaataacatttatatcaataaagatatagttgctattgttttggctaaaatgtaaaatattgcacatgactcgaacttattaaacttgatgttatttttttttttttttttttaattcattacttaaaatttattaagatctgttggtgtgtagtttcttgtttatgttgtgtgtttgttggctcactaaagtgaatcataaatcattaattatttctgttttgcacaccaaattaaatattgtgcatgtatattgacacacttaaagcttataatcatattatatatttaagaatattcttataataggaaacaacaaaaaaaa

SEQ ID NO: 34455 - DNA, 1252 bp, Cannabis sativa
aattaaaatatattcatgtatttttccttttattttatttaagttatattgtcttttattatattaatttttttaagtttgagttatttgttatgatcaaaatatataataatttaaaaatatttagtagacaatatttatgtagatttattattattagtagtagtaaaaatctaactaattattttattatatatttaaaagaattaaacattataagagaaaatttatattgtaattaaataaaaaataattataaatatattaatatgtatgaatttatttaaataaattaaataacaaatatcatacctattttagtaattgtatatttaacagttattcaatcatctaaattaccaaacacttatatacaacttttctaactcacagttattttaaacttatctttaccaaacactaagtagttttttctcacagcacagctacagttgttttttctcacaacacagctacaactgctttttcccacagcaaagctgggccaaactggccctaagtggttgcatattactaaaatataaagaattatgaaaaaaaattaaaaaataagaaaacttacaaaatactggaatttgagttattttttataaaaatactgcaacacgaattttttttcaaaattactgtgtttttataaaataagagtagaacacaaaacagaacaactaataacaatagtgaaataatcaaaaaacaacaatagaacaacagtgaaaatttaatacaatactcaacataaaacttacacaatatttttttaaaagaattctgtcacgcaataaaaaaatttaaaaattaaaaatatcactacgcgatggaaataattctaaacaattcttaacggaaggtccatttagaatggtgatgtatagacttatcttataattcatactgcgattaaattaaaatttgagctaagtacaaaaagaaagattaaaaaaatcagaatatatatgatatgatatgtgtgtggataccaatttcaaagttaagagagtcaactaagacggtctccaatttcagccaggtaatgactaaaatgaattgaaataattaataaaatgttttggaaggaggtggtattgtattggaatagtatggtatagatatagaatatagatataggtgactcctattcaaatcaactcccactatgccttataatctttcaacagccaacatggctgactcgatcgtaatggatcgatgtgacttgactctttttttt

SEQ ID NO: 34456 - DNA, 1626 bp, Cannabis sativa
gtatgtgaaaattggttatgagaattggttttttttttggaacaagtagcatatagtttctgatagaaagaatattaagttttaaaataaaataaaactaaatgcaatgcatctgaaccctccacgtgtctatatttataagttaacggaaatagtagtaacggtgtaagagaattgtaacattaggtatttttgcctccaaaaataaacattgagtatttaagtgtataaaatatgaaacattaggtatttgtgccgcaatttactcttattttttaagattttaagattatatttttcaagatttgcagtgagaatgggaggtggagttcgagtaaaaacaaacaattttggtcaagtcctttccttaaatgataaaatatataaacatgttccagcaatgcatgtgaattgaaatgtgtaagcatttattttcttcagggtacttagtaaagtgaaaccatttattataaagtaacattcaatctcatggtccactctgcgggactatatattttgacatttttacattactgattttttttttttttatttactgtaggattgaatttttttcagtattttttcctcaaaactactatatatttttttatattgtgtattgtcttaaagtttttctgttattctactattattttttaattgttacactattaattttaattgttctgtttaatattttacaattattttataaaaaaatagtatttttaaaaaaaaatccatatagtagtatttttgtaaaaattaatctaaattctaatatttttattaattttccatatagcttagagtattactatattattaggtattttaaagtcgatgatactatattgatgtgacacgttatgtgtgattaacaatttatgccttttatagtatacacttgttaatattagtacctcttaaagtataatttttaggataacttaatctttctatcacattctatttaattttattgtgaaattagtacaaatggtaataaagaaatacaaattaaatatgtttcaatctttttacataatataaatataataaaagatataataatttatatttatatttttggttttttaatatcattaaagtaaaaagatgaaatattttatttgtattcatttatcaataataatttattgtatcacttttttttacgataaaattaaataaaatataatagaagaatcacgtaaccgtaaaagttatatttcaaaatgtattttattagtgagatatatactatgaagagtataatttagtagtgtaaaaagaaaaaaaaaaaaaacaaattattctattatatagtaattaatatatatgagactcatattagattatataccaatgataagacgaaatagtggttgaactagacaaagactcgaggaggggccaaataggaaggtcaagcgaattatatttttacttatttctttttagaaaataataataaaattaggctatttaaaaattttataaccttgaactattattacaatgatcgtatcataccccttgaatttttttttgctaaaacatgtcaatgtagttgatgtgttattgtcagcgccacatatttaatttaaaattttaaaaaat

SEQ ID NO: 34457 - DNA, 1944 bp, Cannabis sativa
tttaaaaagtaaaaaataaaataggttgaatgtattttttaaaaaaatggctaaactcctccatttttttttataagaagtcatttactcaaaaaaccaaattaaagtcaaattcatccaaaaaacgaagcaacctcaaactcgaatagaaaaactcatacttagttcttctagttataaaaaaataatttaatcatttaaaaataattaattatttaaaaatttattatacaagaagagaattctaatttgtgtacaaaaataaagttttattgtaaatattataattaaatggtttaattgttaaaataattatagtatggatttatataaaaaaatatttataaatattaattgctaaaataagtcttgttaaatattcaattaattatttcaagaaaataattaattataattaattgattttaaaaaagaagttttacctattagtcacctgctattgcaggtaaaagaataatatcaaatattaaaatgtaactaactgactttgggtccggggttcaatacgaggtctgaggccgggtctgagttcgggccaaggtctagggtcgagtacgagttcagggtcagagctgcagccgagtctaggctgggatcgggctcaagtccgggccggggctggggcaaggtccgaggtccggtccggtccgggtccaagtcctggtcgggtcttgttcatatcaggatctcaagttattaaagtatttttccaaaaataaaataaattaaaaataaaagtaaaaactattttttttgaaaaattagccaaacacgatttgtattttgaaaacttcaaaaattattttttgttctcatttctaaaaatatttttttgaacataaaaaacaaaaaacaatgtcaaacatgctttaaattgtctaaaattgagttcaagatctgttttatactattttaaaaaatacaatatttaaattgtcatttaacaaaactaaaagttaaattagtaactattataaaatataggatccaaaatgatatttaatatatttatttgggcaaacttctaaagtatttggtattgaaccgcaggtcatagcattctgacatcgcctgttacaagttacagcttataatagtaaaggaggccataagcactactataatgccagacttgcttaaaataataaaagaaagcattcataatggtaatgcaagtaagagactgaactcaacattattgtgtccttaaatttgtgcggtaaaagagctcgtataattttttcactatatattctcagccaataatatttattttgtcattttcatgaagagtttaaactgaaaagatagtctactaacttaacattaacagttaagtgggtagtgacaaaactattttcagcatgggaattgctgactgatatgtggattttacctaggctgaaatcccatactgtgaccccgaaggctctgcctgatagaatcaaattcttatagaggggagaataaggtagctaaaccttgatcaactgtcagttgaagtttatcataggacatcaaggttttctggtcacacttgtaagttcctttacctctggccaaaacctcaccatctgaatctataataccttcctttgcagggttttcggtaagcgaaccaggttccaagatgaatgatttcacctgtagttaattgtgaacaattagagagtatgacagtaaaggactctagttctttgcaacttaagggaagcaggaaaaagggtactaaactaggtgacattaatttcataatcattaacttattaccttgaagtacataacataaggcgaatggacatggtttccattattcagttgggtaattaaggacagcaaaggtagttttgggcattccctcataatgatcacgtctatatagccatctgaaaactgtaaaaaacaaatataaaggtttcattt

SEQ ID NO: 34458 - DNA, 1093 bp, Cannabis sativa
aaattaacattttgaaactatcgaaagatcagctttattgtttatgatgtttggaatgaatgctgttaaacctactataaaactagcttgtatttctgcgtggacagggttgggggtggtagtcattggtcggtttagtttgtgttatcactaccacaatattgttcattcgcgtttgttagagagtcgcacattgttaatgtgtggaaagataatagaatatataagagtaataggctactccttctattgccaattagttttgagatggaaccccattcaccttatatcctgaattctaacaacgtcaattaccaagcgacacattagtcatttgaatctatccaacaaacttacatatattcagtaggcatatttgtttaagtttttgcgttagtctagaattgacaaagttgagcgtttgaatcggccagaactggcgcaaacaatacttgaaactctcatctccaattgtatcgatctgtaaacaatgactttggacttctgctaatctgtaattgatgcaaatgccccctatcgcgtggattacagtttgatatatagtggtaggctaggaaaaaaaatttctacctacatttttagtatccttatgagtttctaaaacaatcttttataatagatagcacaatttataataatgatcattttttttttttaaaaaaaaggtaatgataacattttttatataaccaaaattgtgacaatttcaaatccgaaaacagtaaccgcaaaaatatatcctataatcactataacttaaattaagccacaataaagtggttgcagcgctagttggaataagagtttctatacgatttttttgttataatttaggttgcagcgctagttgcaataggagtttctacgtagaatttcgtaaaaatgcaaaaaaaaaatatatatatattttgaagtgtaaaaataaaaaagccccaataataaaagttatctaattacattaataactataacaaaaaaaaaaaaaaaaaaactaaaacagaaaattaaaacgcagaaattaaagtgcagaatttaaaatttttaagtgtctccccccaaactaaatatgaca

SEQ ID NO: 34459 - DNA, 2210 bp, Cannabis sativa
  modified_base (598)..(601): a, c, t, g, unknown or other
tttcctcaacagcacagctcagctgcttttccccacagcacagctgtgccaaacttaaaattatggagaaatcatccattagaataactctttttttttttttttttgaataacgttggaataactttctaatatttttaaacaacttattatcacctctaactaaatggcactttagttttatattttgtctttttcttttttcaaatacattatttttttagaaaaactatagcaaatgaccctaaattataagactatattagtaaatatctatatttcagaacttttagagaaatgatcttttagactattattatttatattgtttttggctacataaaaaaaattaataattttttttcatattttttttagaattagaagcaaatacttaaagtttatggtatatctatattagttttgttaaaaaaaattatttgaaagttatgtcaatttttttaattttttacgagttattgttggttgttgatatgtagattttattgtatagtattattctaagaagatctttattttttatttttctatgtataatagtaatatataattttgttagcataatacaaatattttnnnntatgtatataattttattggcatgctacatatatataattattattgttatattttaattgtatgatatattatttattttaaattatatttaattagtttatactttattatataaaatggtggtatataatttaattgttatggtatatatattttaattgtgatatatattttgattagtatagtatatatattagtaatatattattattattattattagtagtagtagtagtagtagtatgtattttttgttatacggtatgttatacccgaaattcggctgccacctcaatgaatgacacgtgtcaagataaagggaatgtgaatcgatatcattgcttttatggagtaactcattaattacgtaagtttcagtgtatatttgtaacccgccgactgtaaggtcttaggtgaggaatcaatgtacaaactgacacttagtatattagcgagaaaccttatatcgctaaatgcgaatagcgaggcaccaaagaaagcaacccgtatcaattgtggaggtacttagtgcataatgaacaaactaagtgtaaaagtcggatcggctcaagaacaagtaagtgaggtgaccatctcgctatgggaagactaaccatagcttcatccagctaacggtaacgaggcttacaaccctggggagtcagaatggttctttgtaaataagaaccgcgattgacaccagacatacattgtcgaccttggaacaaagaatggccccagctcgctattgggatcactgtaacaaagtttctgtcgagacatctccagatacaacagctaaagatgtgttcaatgcacgattattttaaccctataaaagcagaaaaatcacagctatacaattttcaaatcataaaacgcatttacactacgtgatatgtaatcaaatcccacgattttagggataattgttgtaaacatatttcggtcaactttgtaattaattgtccattatgtaattataaatagtgacaaacaagagaaaaaaaggaacaaaaaaaactcatacaagagagttcctaaaaaaaataatcaaaaatctgaataagattgactcgtggactatgtagaattttaactacaaaaccacataaaaaaagaactatgtgttcatatctttatttttattgcttttattttttctgtgtgaaatcaatattgtgaggctcgaatctagttaacgaaaatctgcgttaacagtttggtgatttcattgagagcctctgtgaaaaagctcagaaaaaaacctcctttcttttgaagagaaacaacctccttcatggctgaaaatccagaaaatgttaacaccccacatgaggaaactaattatcgttctgggaaagagcccatgggctccagaagatctaccaacccgcagtccagaaggaccacccgttccaggaaggctcaacctgagggtggccctagtgcgcggaccacaagttctcggagaactcgacccaacgttggtcctagtacgcggacaacacgctcgaggagaactcagcgcgggaatggttagaaccctaggacgagagatgaagagcacaatcatggaggtgcccaatctgtgggagaaggaactt

SEQ ID NO: 34460 - DNA, 1805 bp, Cannabis sativa
  modified_base (56)..(65): a, c, t, g, unknown or other
gataatgacttaatctttaacggttaggtacatacaaagttctaaaaatataactnnnnnnnnnntaccgccaaaaattaaacttagttatttatttgtaactaagagttaaacttagatatttatgccgcaaattattttgttgggattagactcacttaatctatcaaagtcagtagttccatcttatcactcataagatggatatgaagaaagcagctgttagctataactgtttattgagatttttggcaactgaatatttagagcttagaaaagaaataacagtttaaataacaagtgcgagatttttatgtggttcaggcgttaactatctttagtccacgagtttattttattaagctcttcggccggtgaacatgagtacaaatgtgtatacaatggactagaacttctttttcctcctgttcctcttgaagaagaagaagctttatacgaattttttgtggattctttttatgtaagtagtatagtattttttctaattccaaaaggtctttaaaatgtctctttccttatcttatggaatgcaggggtatttataggccaacttccctccatgcgctagctggaattgatcacctttgggcgagatccaaccgttggtttaataggtggccttttcaccacatggcatttaagggtgtcaggttgtacagattgggcatcatacatgtgtcgtcccaggattttcctttttgaatttcccttgtcaatggccgtcggatcattcaggctggtacgattggactcgcatgctctatactatggcatatcgtgggggacaaaccctgacgtcgtacctaaaaaagtttggctactaagtttgtagtctgacatgtacaagcagagctttcgtgaaatgggtttataactcagctaatcgcattccaagacaccttcaggcatttggtgagaaatccataccctttacgagagcactcaactttaattctacgagaatagctggcttcagtttcagtgatgggagtgagttctctttgaagaattttcccgcaccgtcgcaattcaggggattagttcctttcatggtggccctttccgcaagctaaggcttccaccttcttggaacagtgatcaagagagttgataggctacttatcacttagcctgtccagattaggatccacgtgtcaagcttacaaaaatctggacaatatttacaccaaacttttaggacgtaacacgatccgggagcttgcagtgcttcctcatgattggttccaaacacgtgggataaattcgagcttttcatcatgcaagtagccaccagctgaggtgtcacttggcagaaggtatcacttcttctatttactaataaaactttaaatgctgacctttgcaatttgcgcgtgctcagggcacgtatctggagaggtgccaaaatggtagcgaatcgattgagcagactcttcatttattgagcacatttcacgaagcatgcaatgatggaagttaaatcttgggagtcgatacatcttcttaatttcccattcgcccaatctttcaagtacccttttattgggtgattcaaaccgttcactcctcgtggatgacgcctcttcttggtgctcaataaatattataacaaccatcattttttaaatttcacattttcttttcctatcgcactagagctttggcatttggcttcatcccctctcctgtcttgcaagacttttctaattgcatcatctccagacgcacacatcgccagacacgacgcaatgtaaccatgtcacacctctacctgttgaccggta

SEQ ID NO: 34461 - DNA, 2590 bp, Cannabis sativa
aaaagagaaaagaagaaccaagcaactaaataactaacaaattcaaactgacaaagaaaactaactgttacgaagtcaccacagctatctgctcaaccattaagcagggagctgtcaaaattaaacagatcaatgttcccgaatcgattggaactaattgcccatttagccacaccatgggccacaccgttaagccttatagggattcagcagcctcgcatgcttctgaaatttcactactacttgctgaatattgtgatgtcgtacctgaatctcatggcttttcctaagcaccgcagtagcagcgtcgatcgagtcgcattgaaaaataaaattgtgtaggctgaggtttctagcaattgtagcaccccagcaaagaacaactatctcgcttgccaacgggtcacagtaattgagcctctcagtatagatgtaaaggacaatgccttcctcatttctgaatataatcaccaatggcaacatctgtgttgcagattacccatcctagaggaggtggaagccacttcagaagggtgttactttgaggtgtgtgcaattcctccatctctctcagccttttattgatttagggcattaaaactgtgagaggagtaggattcccacgatggatactattggttctttccttccaaatgcgttcaaaaatgattgttgcgccttccaactatacgttaaatctcatagcccctggcctgttgttctcatccttgaacttctacagccacaaatcccaatctgtaaagtagaactcagtggttttgaggtgctggatactgccgaaccagatagctctagcgaaatgacttgtccaaaaaatatggataaagtcttccacagccgaagcacaaaaaggacagctcgagtcattcatcttgaacatcgaaatcagtttgcctcttgtgagtagactgtttgaaagaattttccaccataacatcttcaacctactatgaatacgagctccccaaatgattctccacttcgcattgttgctgtccctatgatcgaaattcttaaccaatatgtaggccgacttaatactgaagttaccattggcttttggaagccaaatccaagagtctttagcaggttggctaggcagagtaatgttgagaattctgttaatatcgtctcgaaaaaaccaatgtcgaaccatatcttctttccaattgttattgtgtatgaaattacttaccaggctgatcccttccgagccatcaagccgaggttgttgttggaggattccgtttgggacccatgggtggaaccaaattgaggtagattgcccgttgcctatcttcctgcaaagacctctattgataagacttctagtttgcatgatggccttccaaagaagagagtctgaggtattaatctcaatgtccaggaagctgcgattttttaagtacttggctgtcacgacttgactccaaagactatcgttgtccatgaaaaccttccaagcccacttcattaagaaagccttgttggtggcatcggttgatcggaatcccaaacccccacacatgtgcctatttgattttatactcatacaataactagtttttctttttttttttctattgcaaattatttttaaaaaatgtaccacttattataattagtgtacacagtcatatagaaaaataaaatttaatttatgcataggccaaaaataaaaaatgcttagaaataagctcccaaacaaaaaattacaaaagaaagaaaaaccaattgaactccaagaataaataaatttacagaacaaaaatgtgatgcagtaggcaatcaaaattacactacggtgtcctaactttatgtcataattatatttcaaatgttgtcaaaacaaaagtatatttttctgtctgaaataaatattcgctgtgacgaaatatacgtcttccaatttttattttacatataaatattccttttatttatttttttcaatgggccacgcagcgataaatcagagagcttagattggaaattgcctagtgcaagttgcaacgacctctctaaagaaaaaaaacgcaaactcaactaacagcaacccaaaaacctcattcactgtacagactggaccagctttgccatggccggaggctccgatcccgataaaatgatcgccaaggccgataaactgtaactatgtttcttattcttgttttcgattctttatttctttctgtaatcaatccgcttttgttgctttagatgatttttctgctcgtatatatttccttaactgttctaaatttggattgttctgtcaattttgatgcggtttggaagatctgaaactgttcgtgttgatgtattgttaactttttcatctcgagttgggaaaaccatgtgattggttttcaggacaattttttactgtacattgtgtgattgattagatttgaggattttggcgaactctgttgatttacatgttgttgaatgagacttaagaaactgaaatatttcataacacatcttttgattacatttttgtttttctttggattagaatattaggacaattggtggatgcatattagagttttttttttttttt

SEQ ID NO: 34462 - DNA, 2389 bp, Cannabis sativa
caaatgatgctgatcatctcaattctgtctctaattataaaggcaaagtcaaagtggttgtaggtaatggttcctctcttcccatacatcatattggatcaagttctgtttgtaaaaattttcctaataattcattggtcttgcaagatattcttcatgtacctagtgtcaccaaaaacctacttagtatttctcaatttaccaagcataatcatcttcttgaatttaatgaattgtcttgtctcataaagggcaagacaaccaagcaagttcttctgcaggaccatctcagtgaaggtctctataagcttcaagtcccagcatccaaatctcaaggtgttgtccctgcctctgtcagtttcaaacccaagggtctcaatcatacaaccacaagtaatcatgttcatgacaagtccaaaattgtcaatgtttggcactgctgacttggtcatccctccaagcctatattaaataaagttctttctcatgttgttccaaatgtaaagttcaagccaatagatctttgtaatgcttgtcaaactggaaaattgcaccagtttagtttcaaaagtattgaaaataaaaccacaaaaccttttgatgtgattttaaatgatgcatggggtccttccttttatacttcagctgatggttttaaatattacattagttttcttgatgatttcaccaaatttacatggttatttcctatgaaaaataagtatgaggctagtaacatctttatatagttcaatacctttatgaaaaggcaatttcaaactaaaatcaaataagtgcaatctgatcttggtaaagaatatgagccactgtataaacattttactaatcttgacataattcaaagaaattcttgcccacctacacaccaacatcagggacgagttgagaggaaacatcgacatgttgttgacactggactcacactgctgtcacaagccaaaatgccattatctttctggtgggaagcttttgcttctgctgcctacttaatgaatcgattacctactcccacactcaattatcaaacacttttcagcaaacaccatattacaacctgctcaaagtttttggttgctcttgttttcctctttgcaaaccttatgcatcacacaaacttgttttcaggtcttccaaatgtgtcttcatagggtacagtatcaatttcaaagggtataggtgtcttcatccctcaggtagaatctatgcgacaagaagtattacttttaaggaacaagaattcccatatactaatctctttcctcccattcagtccactgtcaacacttcaaccaataatcatcaccccttcttcataccaagttgaaacaccattaatccaccaacccaaaatcacatttcaccacctcccagtcctccaccacctccaaacagaacatcaatacaagacagatagtctcctgttaacaccagatcctctggttcagcaacttcaccagttgccaatccacccacctgtcccaacaccaatcatcaccctatggtcactaggtccaagttaggcatctacaagccaaatacatttcttgcataatccaatgatgaaaaggaaccaacttcatttaaagaaccctttgccaatactaaatggaatgcagccatgaacaatgaaatgagtgctttaaagaaaaagaaaacatggactcttgtgcctaaaacttctgagatgatcattgtgcaaaataaatgggtctataggattaaacttaatgcagatggcactgttgaaaggcttaaggcaagattggtggccaaaggtttctaacaaactccaggcattgatttttttgaaatatatagctccgtcataaaaccctgcaccataagaattatgttcacatttgctgtctcaaatggctgggaaatccaatagattaacatcaataatgcttttttgaatggacaactacaagaagatctgaagatgtgtacatggcccaatcacaagggtttgtagaccctacttaccccaaccatgtgtgcaaacttcacaaggaaatatatggtctcaaacaggctcctcgagcctaatttgacactctcaaagctactctggttcaatggggttacaccagcagaaaatctaataacaacctatttttctcaataaaaaatggtaacctgctacttatattggtgtatgttgatgacattctcataacaggtgctgatacatctgaggttcaacatctaatctctgccttgaacaacagtttctctctcaaaaaccttggaccaataccatacttcttgggttttgaagtttagagaacaactaatgaaatttgcttgacccaacaaaagtacaccagggatcttctggccagaacccaactacttgactcaaaac

SEQ ID NO: 34463 - DNA, 1137 bp, Cannabis sativa
tctttccaagagaatgtgtagtttatagtcaatgtgttatattcatgaagttaataaggccaccctttggctatgcttgattcatctctgtcaaaaatccatagctatgtataatagtggagaatgttttcaacttctcaaagacactaaaatataatagtggacagcattcaatcacatagcactttgatgaatgtgaatgatttgttgtaatatattctgctgtgtcaaagtgaagatatgtgaggtgaggatgtagttaaagagagcaaaacttttggcctttttttctttttaaagcaagataaatatagataccatctcggtcagtcctcccaccatatgatgatattcaatggtgtggtttagttgctgaattcgcaaatttctagtctagttttgagtaggtgtattcttaggcaacaatacagtcttgaggccaaggtttccttgtagaagtgaataaggctaaatgtctatttatcaaaagaaaaaacaatgagagtttttttcttatactctcccttgtttggtcacctttttctttgtaagctcaacatagggccaccaaatgtagtttcttctttaatatgaagtcattaacacagatgaaaaatgaaatgacaatatagaagcctttgcttgtggccactcgtgtggattagaactttaaacttacacgacttagatctactatttcacaatgaagtaggtcaattatgatgcatagtgaagcattgacaatttattagtaaagaattatcaattcaaaaaagaatgtagtgtagtgtacaaagtgttttactaattaatatataatttctttctaagtttttttttttttgcagggttagagcgattcgtactcaaataacaagatgaatattatgcgtgatcagtggattgaatacgtccgagcataggcaatgcgacaagggctagtacaatgatcagtttttgtttttttgtttacacttgacactataactaattactttcatatatatttaaaagtaaaattaattaatgtagggaaaataaaagtagattcttcttttttttttttttttgcaatccaacgacgggcaaaaatcgtcgatgaaaaataagaaatttataattaaattgaaaacttta

SEQ ID NO: 34464 - DNA, 1454 bp, Cannabis sativa
atttgtaacgtaaatagcacacctagaacacaaatatatctccatatattcataattcataactaaaagtctaatttcataattaagttctaattatatgttaatttatcatattaaaatttagcggtctttaccattatcccccgttaaaaggatttcatcctcaaaatctaacttgaacaactctggatactaagccctcatgtcaaactctaactccaagatggcttcctccacctttctaatttttctttagcactttgactaaagctatggtcttcttctgaaagactttatgttttctgtctaagatgtgaactggttgttcttcgtatgataaatcttattgaaaggccttataaacctagggcataacttccccctttttcctgaaacatttgatccccccttcatcggagacacccataggaacacatgacctctcaactgagatttcatatttctacgcttcaagtcttcataacacttttgcctaccctaagaggcaagcattctggcattgatctttcctataacttcattagtcttttgcactgattttgtacctaggtatttcttttctcccgttgcaccctagtgaataggagatctgtacttcttgccatataaaatctcgtagggaaccatccatatcgcactctaatagttgttgttgtacgaaaagtctatcagtggtaggtacttgctccaagcgccctcgaaatccatcacaaaggcttgtaacatgtcttctagtatcataattgtccttttagactgtccattagtatgaggatggaaagcggtaatgaacttcagttttgtacccatagcctgctgaagactctgcgagaattttgaagtgaactttggatctctatctgatataattgatcttggagggccatgtaaccttactatctctttcacatataactctgcatactgatccattacaaagattgtttttatcggtagaaaatgtgcagacttcataaattgatctatcacaacccaaatcaaatcgtacattcccatggttcttggtaacccaaccacaacgtccatggtgaaatcctcccacttccattcaggaagtgttagtggttacaataatcctgacgatctttgatgttcaacctagatctgctgacaaataagcatcaggatacaaattccacaacttatttcttcaatccgcaccactagtagtagggtcttagatcttggtacatcttggtagtgccaggatgtagtgaatattgaatggtatgagcttccttgaggatttcacttctatgtttcagattacttggaacacaaaccctagtctcttacaataacatcctgttatctgacatcgtaaaatctttagcttgactagcttaaacctcttctcagatcttcactcattctggatcagtaaatttagcagatttaattcattctaacag

SEQ ID NO: 34465 - DNA, 2685 bp, Cannabis sativa
gtatttttgtaagtttcccaaatggaatgaatcccaccacaagatatgagctattatttacgagggtatataaagtgcaacatttgtacttagggataaagccacaaggagtatctagttttgagcgaacgggtgaggacacacacgtgcatgtcgtccattcgatcgatcgtgccgagctagctggtgtgacactttattttttggagaaaatttatttattaaattattattttttatttaattaattaaaataatttcaaacttgtttaattaattggtaaggagagacatgttctcctcctccttattttaagcatcgttcccatgatcccacctaacgttcccatgatcaacatctttcttcttattagcactttatgtgtatcccctatataatgtatcagaaccagtggaaaaaaatatatctttctcacaaaaaaaaaaaaaagaaacatttacaatatatttatgattatattatataagtagttcgagcattaatttttgggtgtagtgtttcaacaattctctattgtgcaatagaatttcaatgcagcagtatttcgacgataattttcaactgtttccacattcttgagtagtgccgcaaatattttaaagagaacaacctagtccgatcaacccaaaaatttcattcaatcatactcttagggctcgtttggtacgttgtattaagtcgtattgtattatattgtataatattccattagattatatatcacatttttatataatactatgtaatactatgttaaactttaatttgtactaaaatattatatatttaagtaccaataaaagtcaatactatatataattttacaaaaaaatattacatgaaatacaattcaataagccactaatttattttttagtggcatttactcaacacccacccaccctccacacttttcactcaccaatccctaaattttgtcgtacaatttcgtctcatctattcaatgccgaacttactggtaagaaaaaagaggaagcgatatatgtccacatcgaagaataataagaataattaaaaactataattattattcataatgataattaaaataaaaacatctgcaattaatacaatgcaataattaatttattcaatctgatcgagtacgtagtacataatgttggagacagagactagctgtaagtttaggttttatttggaattagagatacaattaagtacgaaatccttgagttgcgtgaacaattggtgagacccgggaatctcaggaaacaaataaaaagcgtggatcatatccggatactcaatcttctcagcttctttccccgatttcttcaaccactcataatactttctctgccaatcttgaagcgggtcccacccacccacgaacaccagcgtcttcggaaaacacctcaaacccgatatatctttcccacgtggcccactcacattcgaagcctcgtggtcccgattcgaaccctctggcaagaacgccttccacatccaatcagtccggtccaagttcacaatcggcgccgatctcagccgtagctccgcctccgtcctttcctcacctccgaaaaacggctgtatcgtcaccaaccccaacaccctaaccgccttcaagctcgcactctcctccgcaacacgcactgccacgtggtgtgctaggttggccccggcgctgtctcccgctaaaaagcatttggatacgtcggcttcctccgggaggattccttctccgtcaagatacttgatcacgtcgaacccgtcttcgtactgacaagggtagcggtgctctggtgagagacggtagttgacggagattacgatggaagggatttttctagctagtttacggcagacagcgtcgtatacgattgtatcggggcttaggaaggcgaagccaccaccgtggaagaagatgaagacggggagggatttcgggcctgaggcggaagctgagctggggacgaagatacgaaaccagaggtttctagatgagtcgagggtgtagtcggaggaagagactcctttcactgcggagggtgtggtgggagatctgatatcgaagagactgagtaagcggcggttaatagtgccattgtttcgacgagagatatcagtgcagaaattgagtaatccacaggtgatgcgagtcttccatggaagggaaggagaaagcactggatctttgcttgccatgaattagcgattatgggttgcttacgatctctctgacttatgagttgtaactttataatgcgttaaaaaatatgaccatcaatttatagaactcaattttgaaatacatagggagagaaagattgcccacgaaaatatttaaataataaaaaattatagaaatttccaaaatatatatattattgtatggatcccatctttggtgccaattgccaatcttcattaattcttttgaactgttttttttttttttttttttgtctaatagttaatgagaatgactataattaatggaaccactttaggctagctcaagtggctaaaaggtgtgtgagtgttggaggtcctgattcgagtcccagataaaacatgttgtaatatataaacgcttaaatccaaaaaaaaaaaaaaaagacttataattaatgaaatttattatttggtatgattttgtttattattgtgattttttt

SEQ ID NO: 34466 - DNA, 2206 bp, Cannabis sativa
gttaatttcattaaaaagaaatatctatatatataaacataatttaaaacttaataatccaacatatataataaacattagtttagtccaacttaattttcatgatcgatctcataataaaactgttaaaaaataaaatttattcaatacgtattgacaattttattagcgtttaggaagatgagaattattattttaaatctaagatttttttttctttaatctcatgtgttaaatgtatattaaattaattaatatatatttttaaataaaattcattaaatatataaaattataaacgtattttaaaaatatataaatagaattggataaccattggattggatgataattggatcgatttggtcggttatccattgaatcggatgttcgatccaacaaccgatccgatcagattggattttcaaattttacatccgattcgatccaattataattgaatatccgtaactattagatcgatcggttgtaattgaattgcatacctttatgcactattatattagtatcttatttttcttccactaataaaattaagattgttatatattataactacttgtgagaatccaataggaatattagttagatactatttagtatttagtactcttctttattttgtattacatattaactttatttctaatacaattaattaaatagtttatttttattaaggagcactactaatcttcaaaattatttattttgatattatttagtattctattttttattttgttaccatatatattttggtgctatgagttaaatggatataatttgttgttattacttatatgtacaagaatataatttatctaatttaattttaatgatatattagaatctcacatacataataagttatctaatttgattatattattttttaactcacatatttgtcattacttttattaataatatgtaaagtcccctttgttttttctttttgttaagccaagccatactcctcagatatgcctaactgccatagtttaaatcaattcacaagacaagaaagcagaaaccaaatgtaacatttcaaatgttgatgatccaatcccaacaacaccaatttgcaatatagaacaaactgtttttttttaatggtaaaaataagaaatataatataagtaaatacattatatttattttgaaattgagaaggtgagatgtgctgaaaatgaaatcgacaaagctcagaaacctttttcttcctttagactgtacactggacaaaatttatttcctacatacacagaatgtatgtaatatgagctcagacagacattaaatctgatcagagctcgcaaaagagtaaacttacccaaagaaaaggagggctgttgataaatgccataaaatagtcattttaagtgtcctaaattctgtacatctaaaccactcaatagcttgattcttcttggatttcaaaaaccggacgttttcctaacacaaaatagagtaagctcctgtcctccacggctgactgtggattcaaagcttcatacctacatgagatcattacacaaggtagattcagaccatgattatcttacttctaacacataagaaagcatttcaggttgagaactaatgttaagataataaacatttttgttctgataataatggacatttttgttctattatttaacaagtcttcaaaagatattttcacatgatatatctaaaccgaatcctagtttataagggcagatctttagctgatcatccaaaaaacgaaccgctaatcatcaaggaagacagttataagggcagacaactaaaaagtatttgagcaagatagcagaaacactcccaagcgagcaataagtctatgattcatactagagatagtatcactgaaccaatagacaataccttttctattgacaatttcttcttcctatttttccggaatgacctctttccaagtacggactaactaaggcatctaatttcgacaaccagagtgcaactgcagatgtggtttgtggcaatgttgtaaagcatgcaatcaattcttcaccatcataagaacctggtaaaacattgcattgactcaaccagctttcattgatggcaccgataaaatctgtgagaacctgcaagatgagaataaaaagaataaaaatgtgcagcttaaaaactagaaattttcaaacagacctta

SEQ ID NO: 34467 - DNA, 4701 bp, Cannabis sativa
  modified_base (4644)..(4644): a, c, t, g, unknown or other
atccataacaagaacaaaaattagaggagagatagggtgtccttggcgcagacctttttcacctttaaaagaaccctggagtcttccattcatcattaggttgtaggaagtaccctttaggctaactaacacccaattgatgaatctagatggaaaacataacccatttagcaaatccgaaacaagggtctagtcaacagtatcatacgcttttcttaagtctatcttcattatgcatctggctgagatgttctttctagttagtgtatccctcccttgagaaagaaggtcttcttgaaaaatcatttgtgagccaaatgtcttttcttaacagaagctccttgattaggatgaattatatttgacaacatctcagaagtctggagcagatcagcttggatatacatttatatagagtattgcagcacgcaataggtctatagtcatttgcatctttgggactatctattttgggaacaagagatattatcgtttcattgagcatattaggcatcacaccgtcttgaaagaactccaacactccttgggtaacatcttccccaatctcattccaaagccctttaaagaatctcgaaccatacccatctggaccagggctcttggaagaatggatatcaaacatagcctttttaagttcagccttcgtgaaaggtcttatgagccttacttgctgctggatgtcaaggatcttaccctgagcaagaatattctgatctaatcttctcgttgctgaactccctttccccataaagtttttaaaatggtttaggaagtgctcaacgaccttcggatagtcttcaataacttcttcattcctgcagtaggttaggatcctgttttcttgtgttctttttttcaaagaggaatgaaagaagcttgagttctcatcaccaaatttcatccaatttatctccgcatgctgctacatatagctagtataatcctttttggcataaatatacacttgtagagtgcttttctcagcaacttgaaaactttggttgctcaggtctgttgccaggttccctctagcagtgttgaattcctctttggctactttgtaagagccaattatgtctccctgattgtctttgtgaaatctcttcagcacgtgcttggttctcaacaacttttgaacaatacctttgagtcccttgctactagtctgattatatcaacagcaaagaacagcctctttatacccttctctgttcatccagtaagtacaaaatttgaagggaatggtccctaagttcccatcctccacatgctttattatacagtagctatgatctgagatagcatcccatttattcatagcaattattttcggaaaaaaatctagccacttttcattacagaaaactctatccagtttagaataaattatgtcccccaattcatgattatttgaccaggtaaacttgccacccatactgtgaagctcccccacctagccttttgctaacaaatcttaagcatcttgaatatctctaggtgtgatctgacgacctccacttctatctccatagctaaacatagcattaaagtctccaaaaataatcttgtgatcttttagatgaccaagagtcgagaacttgtcccacagagaaatcaattctgtcatggaattacttccatacactgcagtacataacaactatctttgtccccaatctttctaattttgcaatgaacaaactgatcatctttcacaagaatctcaacattcacatagctagcttgccataacaacatgattctataagaaataatagggcaggagtagaaattccagctcctaaagttattttccatcacatctaacaccctgtttcaaaagagccaagaaaccaaccttgtttatttacaaacatctagaagcactttctgcttctccttcttattaaaccccctaatgttccatcccattaaactaacattgtccattaactggctgagtcttagttatttccccaaatccatctctattattctgtagcacatcatatccattactggttgtggccttcagacaagctatttccactagtttatgcctcttcttcctaggcgtaatccagttttctgaacctctcgaatatgttgtagttgttgacttgttcttctctgttttcttcctttcattcttcttcacaatggtgccttcaagtttctccataatagctccccctacaatctcagcatcatttttcacttttgttttagccccactatttggttcttgcttcttgctcgttgcactctttttcttccagacaaaccctttttctttattacaattagccaccgtatggcctaacatagtacaagccatacatttagaaggtaaccactcatactctattgattgttccaccatttgcttcttctcattaatgaatgatatagcttttggaggattgtctgaaatatcaatgtccaccagaattctcgcaaatttgatcattgacttctcctatgtgaccttatccatcatgattagttttcctatggtgctaactaaagcacttaggttgttcctaccccaatattgaagacccaagccatttaaccttatccaaactaggacagatttaaccatttgggcagtatccatatcaatagaccatggcctcaacaccacatgttttttgtcatagtgtatcacaccagtttcaagcactaaatctcttatagcctcatctttaaagctaacaagagtgaatccaggatgcattctcactatcttctcaactcctaaattcccccacactctcttcacaaaaccttcaaacactctaaaaggtgggttagcaccaagaactacacaaactatagcatttttctaataggcagcctcaacttctatttcttccatatcgaattttgcaataacctaatccccaactctcaaaggttctgtaaattcaagtctagtagaaggagttctcgtctggtttgttttgaaattgctccacatatccttagcactcaattgataatcgacttgctccatctcatctgcccagttctgcgataatgggttgatcactggtttctccattactggtatttccggttcaagctcttcgtaggggtcgagaaaaacctctacctggttctgatcttccactccatcttcgcttaaaggcagctcttgttcttcaggtacattggctatggctggtttagcaggcttcaaaacgtttctcttcttcttcgccattggaagagagagaacgcaccctacgccctttttagttacatgtagttatggtttgaaccattaaaaaaacttataagtttcatatttttgtaattttcttatcaaatcttatatcatatgtaatattaatttcaaccctgactcctgaccttagccctgacctcgaccccagccctagccttggcctcagcaccagacttgatccttaccccagagcctggcccagaactattggatattcaagactcaatctcacacaccagggattcacaacataaaaaagaacaatcctcaaagcacaaaacaaactacaatgcttattgaacacacttaagaacttaaaattgaaatgaatgaacactttgtttatttgctttttttttttgaattacaaagttagagagtagaaaaattattacaagtataggggtatttatagctaataacctcgagtatgctacatgaattaccctactctaactaactagatttactaacttttagagttagttaaaactggttgcttaggtgtcattttactaaagcatgctattctaacaaatctccaccttgactagtaatatgcaaagaaactaagcaaccacttgagtgattgaacactgcctaaacctccattacattaagtaggttcaaacagtgtcagaactttgaagtaggtagagctttggtaaggatgtctgctgcattgtcttcagttcccactttgactagctttacttttccaccaatcagtatatctcgaataaaatgtagcctcacatcaatatatttggttctctcatagaaaacttggtttttgctcaagtgcaaggaactttgactatcacaatggatagttatacacctctggtctataccaagttccatggagattcccttaagccatagggcttctttcacagctttagtacatgcaatgtactctgcttcaattgtaatcagggcaacaatggtttgcagattttgatttccagcatatagagcatccacttgactgataaacatacccagattgtgatcttctagtgtttaggtttcctgtataatcagagtctacaaaacctgctatgttgacagtttctgagcttaatccataaaccagtccaagttgttttatgccttgtagatatctcatgatccattttactacattccaatgtttcttgcctagttgtcccataaaccttctcaccatgcttacactatagttgatatcaggcttggtgcaaatcatgagatacataagactccctaccacactaaagtaaggaaccctgtccatgtagttggcttcttcatcatctgcatttggacaatttgaatagagtgtaaggagtttttgttgggttttatgttggatatattttaccagnatctagatttactaacaagaatgtttcattaacatactaatatgaattctaaaacaa

SEQ ID NO: 34468 - DNA, 1483 bp, Cannabis sativa
aaatttgtgtttacataacatgttaaaccatcttcaattcatgttgtaaattttaagttaattttggctcaaaaattgagtttatattatatttgatccaaattttataattatgctttattatgttatgtgcaaaaattaacttataaactcaacaaaaattttaaaagtatataaataaataaaatataaaaagttattaagtacattaacaagtgacaaaagaataaataaaaaatataatatttttgtactataaatttgacttatattattttttattgtgtcaaatttaatgtaatttttagcatatgaccaatttagactaaaatatatctatacaccaccttataaaaatttagttggagatgctcttacaaaaaagacatgaaactctagttaaatagtttgcaaatacaaaataagtaacaactaccaaaagtacaagtgaagttgtaacagacaaaacataaactcaacatctaataactatagttgtgagtaaaaacaaactaactaaccaagaaattgtttttgaataattagttaaaacaattgtgttagttgtgtgagagaattgcaaatactactaatactaacgtaaatattgtttataataaattaataaataagaatatatacatacaaagatataaggctggcaatttttatgtttttttgacacgttatgattatctttaacactgattcaacatcaatgttataaaatgtaaacaagaatattaattaatatagttataaatagataaattcatgatacacacaataatatgatatttaatacatgttaaagatcatgttaatcttacattggacattaatatattttttttaggaatattgacgagaatactatttaatacgatttgtgttacttaatttctcaaactaattttttgatgataaaactctccaaactcacaatttatttaggtattcactattttgttagtgtgttgtttttaaatgccaacttgtactatttgttgtgtacacagtgtatacatgactgatttttattgatctacataatattaattatttatatattattaaaattattttaaaatgtaaaataattaaaaaagaaaaaagaaattaaataataaaaattacaaaataatttttccccttcttgttctctcgtctatctctagaatcatcgagaaactgttagaacttattttagcaggatcttaatttactaatcatgtatgttttattatcacataataatcttacatcctaaaatatgaaatacttaaaacaatcaaataacacataagagattagaaatccttacattagttgtagcagaattaaatgtctcattcggttcaattactctaacctttgattcccgttctgtatcagagtattgccgagtaatgaacccgaaatttcttttcctttaatgagcaacatgttgttgggttttatgcactaaataaaactcatttca

SEQ ID NO: 34469 - DNA, 1862 bp, Cannabis sativa
ttacaaagtgttctttgacacattcactcatgaagcaaagcttcaattacataacaactctctctctcagaatcactctctgtttcactaaactagcactcgaacttctctcctagaattgctaccagaatgctgcagcaattggctatttatagccttagtttagagacccgatcctaactgtcataactgacagttaggtaaaaccgttagggtagttaaaacttgtcttagccgatgttgattattcctctattagtgaccaatcataacaattatccaccttggtcattaatagaggaaatgtatgatgataagggctgaactggtcttgaatcctcatttagcaattgaggatgtttagcaagtctaggcaaagcctaaacttggctaaacttacatactttgtcatcatgtctgcagggttctcttttgttccaattttcttcacactaacctccttttcagcaatcatatctctgatgaaatgtagtttgatatttatgtgctttgatctctcatggaacatggggttcttaattaaatgtagtgcactctgattatcacagtgcactattatgctttctgatttgaatcccaattcctttgtgaatcccttgagccagactgtctccttaatggcttcagtagcagccatgtattctgcttcagtcgatgacaaagccactaccttttgtagatttgatttccaactgatgcacccacctaggacagtgaatgcataaccggttatagatcttcttgtatctatacttcctgcataatcagagttaacatatccattcactttaattccttcttggaacttgttataatagacaagtccaacatccatagatcccttcaagtatctgagtatccatttcacagcagaccaatgttccttaccagggtctgcaatgaatccagtaaccatgctgagtgcataggctaagtcaggcctaatgcacaccatgcaatacatgagacttccaacacaagaggcatatggcatagaatccatgtacattttatcttcctcaattttaggtgactgattttgagttagcttaaaatcctgagccaatggagtgctaattgacttggcttcattcatacagcacttgtcaatcaatttctgaatgtaacctttttttgataatgaaaatctttcaggtctagctcttttgatgtcaatctcaagtattctcttagcttcaccaagatccttcatttcgaattcagcaattagattttgctttaacttgtcaatagcctgtctcttctcaccaattatcagtatgtcatccacatacagcaatagccagattggttcattgttgtaatttacacatggatcatagttgcttctgtcatgaaatctcaagtttcattgccttggagcttgtttgagaccataaagagatttatgtagtagacacaccttgtttggtttgttgcttttgaatccatctggttcttccatgtatattttttcttcaagtatcccatgtaagaatgctgtcttcacatccatttgatccatttctaggtcatacttggcaacttttgtcatcatgatccttatagatgtttgtctaaccacaggagagaaaatgtcattgaaatcaacaccttctctttgattgaatccctttgcaactagcctagctttaaacctaatttcttcacctggcaatcgttccttttccttgaaaatccatttgcagcctatccatttctgccctggttgtcttgtcacagttttccaagttttgttcttgtgtacagaactcatttcttcattaattgcagcaagccatttccttttatttcttgagttgattgcttcctgatatgta

SEQ ID NO: 34470 - DNA, 2193 bp, Cannabis sativa
attaagcttcatcccataccttcagaccacttcgaagcactccgtgacgtcatctgcatggcccatgcatgttttagatttaactaacatgtcgtctacgtataccttcatatttcttcgcaggaggctttttaaacattcggtttaccattcttttataagttgcaccagcattttttaattcgaaaggcatgaccaggtaacactatacccccttatcggtcctgaagctggtacattcttgatctgcgacatgcattttaatctagttgtacccggagtaggcatccatgatagatagtagcttaaatcttgaggtggcgtccaccatttgatcaattcgaggcaacgagaagcagtcttttaagctggccttgttaagatcagtgaaatctatacaagcacgctacgtcgcatttggtttgggtactaacactgaattagctagccattccgggtagtacacatcccagattaggccattggttaatagcttatccacctctttctctaaggcatctaccgttactggatcaagagggcgtctcttttgctacaccagaggcatgtttgggttaacattcaagacatgtgtgatcacatgggggcttatgccagacatatccccctggcaccacgcgaaaacatctatggctgcccttaacgtttcaatgatcttgcttctttcctctggcgtcaggttcttccttaggcagatgactttagtggggtcaaggttgcacatactcacttcctcggtatcctccataggttctacagctgtttcggatcccacacagggatccaactcgtcttcttctatcaaacttggctcttcgtccccgtgcaccaccaatactgacaggtgcatcgcgacattgtatttgaaagtgctctgtggggtgtctaggcatagggtgataggaagcctcactttccccattgtgataaatgttgttccattaaatcttgtgagctgggagccgctaagcgacagaaccctatccgtgagccctatggccatgaaggcttctttgaacaatagattcacgaagctcctgttatctaccagtattctttccacgaccttgttggcgatgggagtgtctataactagagggacgtggtgagggaagcgcaccggttccacttcatcctccgtgaaagtgatgggttggtccatgagcctgggcctttgttctaggagttaagtaacttcccatacttcatcgtgttttaaggccccagtgtaatgctttaactcgttcctagtggtccctccaatatgaggcccaccggagatgatggccactctcccatttggccgtgttggtaatctgggcacctgctgagggactgcccctcggggggtacttgcccttcgggcataccccctgctcctccctgaggtaaggggcctctagttggtaccgagtttaaatggggtaatttgttcttaatccattcgtacaagtgacctaatcggattaggttctcaatttcatctttcaggttcttgcactcattagtgttgtggccaatgtcattgtgatactcacaccttttgttgggatccctccgggagttatcgctgtacaagggggaggcttccggtaatgcgtattttgccgagtggcaaagtatacacgctcttgtgtatccgtgagctccgtgtattgagtgtattgaggggtataacccctccgttgtcgtttgtcctcagtccgggtacttccttttgaggacctcttactccgggagctctgtggagttcctgccaggctggcggtaggtgcagattgggatggggtttggacactcatccccgtgggattgcccatgggtggcccaaagtgtgatgatgcgggagctagggtaaggctttgattatatcctggggtagcgaagaattgtattccgcttatttgaggagtggcaggagatagggctcctagaagctgcgctccaggtgcatatctcgacactccggttgggtagtatcctccgtaagccactatttgggcttcttccaagttgatgtacttttggaccctttttcgaaagtcttagagattagctgctccatcttgttgtagttcattctagaaaggggtccccgtgcggatcccagcctggaggagggtcaactattgtctgtcatctaccttcttggtctttgaagcctcctctttg

SEQ ID NO: 34471 - DNA, 1256 bp, Cannabis sativa
tttcttctccaacagactatcttttctttcttctctctttactcttctttcctttcgtttgctctttgtgttcttcaatggcttacaggtttaacaatgcttgtttctgtttcattgatttgtagtaataatccaacaatttatatgtcgtttttgacaaattctgattgcatactaaaacggcagcaaagatcaaaagttacataataaaatacaaagttataagttggtggattatgtttgaattagtattttcaaggtctcatgaattccaattcccaaaatctcgaaatgaaagtgaaagtttggttaaaaaaaaaagagagagaaagaaaacaatatatagaatatcaagagtcagtttgatacagttgtgtagaaaaaaaataactatagctgtgctactgtaaaaaaaattgagcagagtatttgataaattataaatttttaattttgttagttattaagattatattataatgataatgataatgttataatttagttaattaatcacaatatatacaaaaacttatgttatataacaattttaatttttaatatatttttaattattttcactcaaaagtataaatttatatgcatttgataaaaataaattatagtatttttaaattatatttttattatatattaaaaaaaaaaactcaaatacataagaaactttaagttgatgtgggatgttaatattaaaaaaataaatattttttaagacaaaataaaaaaaaatgagatttaaatattatttattttattataatttatttattttaaatattttatttttttaatatgtaatataattttttaatatttttttttagtataaataaatttataatagagtcttttaattaaaattatcttttctaaaagttagattgtaccaattttaacttgtagccgataaattaattcttaaataaactgttttaaaattatttactaaacatttttttatgacagtattttcaaaaataattttttttttttcaaaagttgattgttaaatatgagctctgatataaaatgtggtgttaatgggactgaagatctagctcctataagttaagataataacttttatacactataactaatcaatgataggacgttacttttataagatgttagtcactagaggtgtttattggatcacatttaatgaatttggacccaaccgatccaatccaattatttattggatattgaatttcgtcgtccgattcaatcca

SEQ ID NO: 34472 - DNA, 2641 bp, Cannabis sativa
  modified_base (754)..(754): a, c, t, g, unknown or other
aacctgaaaacatagaaaacaagcataattccgtcctaacacagtgaaaaacgcacataaaatcgatccaaaatataggctaaaatagcctaacatatatagtatgaaaggaggtattttttgacattttctttaattaagtagctaaattaagcatagaaattcaaaattttcttttattattcgctatcggaccaaaatctaatagtttaattttttttaaaattaatatttataattaaatttatttagtactcataaataggaaatacccattaagaagtgttcctaatatttatatatatatattatcaatatctaaacacattgaaaataatttttttattaaaaaaatatttatttatagttataaaaaagaaaagtaaactcaaacttttacttagtttatacttaaaaagaaactttcttttctctcaattatagatttaactaaagggtaaatagtggcataagtacccaaagtttgaagtttgtaagtgtcataattttaatgtttatttttggcgccataagtacccaatgtttgtaaaactgtaatttttctctaatttcatcagtacaagcttcactattttcttaaacaggcacatataaggtctagattcttgattattgggtctagacataaacatgtagtatcagttacttccaaacgtttatttaataaattcaaaacggagtctgtattgacagaactgtaggaaaattatagttttacaaacattgggtactnatgccgctaaaaataaacattgaattttatgtcgcttacaaacttaaaactttagggtacttatgctgctatttacctttaactaaataacaacgcaccgcatgaaccatagtagatatatagagggatcaaccaccctaatacaaatcagaccaattttattcaggaactaattaaaaataaataattttaactaaacaagaactaataatattactacaatttttagatttctaagagtgtccttatcaattcatgtacgacgaacggccaatacagctgtacataaattagttatccatgctctttagatagatagacaacttatagcatgcatgatattatttatgttgctaacttatattgaatttttgagtttttttgcacgacacctattaagtttctaacttaggtttattctccactattattatgatatcgacaacaatgaacattctgagacaattacaaacattgcatggtctgaaatagcaaataattataagaaatgcaagttgttaagatatgtgcatttcaaaaaatactacaaaagtcctgctaactttgataatgttgttgcccacccacccagtgatcttactccaaaggattggcttcctctttgtaatttctttatcagtccatagtttattgcttgttctaaaattaatgcggaaaataaaaaaaataaaaaataaaataaaaagatgtagtaccctacaacacagggatcgaaatctatggctgagaggcgttttgaaaaagtaagttaaaagatttatttaattaagttattaatttgcacattttctattttttttaatttctttttgaagagtaagggttacattgagactggaaggatgttcatgtgtcgaaaagaacaaatacatttgttagtccattagctgcagaaaaatatgtaagtaattattcatatgttctaaataaaatactcttatgtatgtttataatgttttctaacttatatccttaatagagggtgagcttgtttcaacttatgaaaaataagccagtactcatgatgctagacctattgaggagattgaaatgagagtactcaatgaagtatttggtgagaggcgtggtcataatcgaggagtggggagaaaattaaagggacaaccttcgtcgcggcgcacacagcctactcccactcaagatatgcctatggatcccagagttgagcgtcaacttgaaaaattgacaggaacaatgttgtggatgtctcaaaggttgggacctgatgttcgtctacctactgaagtggagttgttcgcaatatgccaatgcctccaacatagacgttccaacttcaaatgtctggaggtggtgcttcatcttcacagcccgggacttctcaatatcaccaagcgcagcaaagtcctattccatttatgtatccttcgtcatcacctcagcaaatgtcctcgcttccttagttgtccttgccaatgtcgcagctgcaagtaaattatatgcaacagacaccgcaaatgcagcagactcaatagatgcaataacaatcatcgccgatgcagcaacaaccttcaatgcagcagacaccacagatacagatgcagcaacaactttccatgcagcacacaccacagatgcaacagccttccacgcaataaatgccacaaatgcagcaacagacgccacagatgcaccagatgcattcgatgcagcagattgcgcatattcagcatgtgtcacatttacattagatgccttctatgcagcaaacactgcatatgcaacagatgccaccgatgccaccgatgcaacatatgccaccgatgtctcatatggagcagtcaccgatgacatcagtacagtaaattccacacatacagcagccgt

SEQ ID NO: 34473 - DNA, 2707 bp, Cannabis sativa
aagttcagatttcaataacttgaatccaacttactatcttttgaagacatggagcaacctaatccgatccttgggaactaaaattacacaacctggaaccagaaagccaacctggcacctagggtttcaccccacgcccagattgacaccctcaactagggtttcaattttcgggaccgtcttagtacaaaagcgtcaaaactagcattggtacatcaacatgacatactgaggacatatttggggcggcatcaaaatcagaatcagagcaagttaattttttagcacccagggccccgagcaccatgcgcctaggttgacaatctgtcatctgggcaccttccaagtatccaatcagagatctgacttttgtatcttctttgtttttatcaaaaataaggaaatcgatcctttcagagaagaaacaataatttctaggtgaaaaaaatagtgctcaatgtccagattgacacttggggctggccctgtgaccaggttgacatttcgtcaacctgggccattttaattaaagtttttttagaacactcccaagcatcttctttgtttttaaaaagtattgagattcaactatttttggggagcaaatgaaattttccaaaggccaaaagggggacccagcgcccaggttgacatattgtcaacctaggctgtttctgaccaagttcagcaaaaaatcttccgagcattttttctgtcataaaaaataataaagattcaagcaagctcgagaaaaaaaccacaatcctgagcccttggaaatagggcccagtgcccaggttgacctggtgttgggcctagtgacaagggtgacaatcagcctacaacgctgccttcaattgctcaaataccaaatctgatgcaaccattgactttggaatggtcaaaaatgggataggagaccttgtcctcaagtttagaagccttggaagtacgaaaaacaaaatcctgggagctcgggagtaagtacctagcccctaaggttacaaataacctgatgtgctgggttctgcttattcaattctggtttttcacaataacaaagatctatgaagtcagagaagtaaaattcacaactttgcatttcttatttccaactcactcgaaaataaagagtttcaagtctctcatttttgtagaacaacaacatctccgagaactgataaccagcttcgccaaaacacaaaaacttactaagtgatgtcaaaatatcacttgggcatcttaaagtacatcccttggatgtttttacacttacccagcatctaggttgatgtcatatgtcaacctggcactgggatgttaacctgggcgctggatgtcagcctgggcgttgagtcatgaattgccttcagtaaaacagtcataacaactcactcaattttattaatccgattgatgtgattaaacttgagttttgaagctagtacatacaatgatctatcatggcatgtctctaaatgtaattctgaagctatcatcgtcaaaattcacccccaaggtagtgaaaataagctctgagttacccgcagcgggacttgttgggctccgaaaattagctatcaccacaaagagaaagagctaatttttactgttagttcatcatcaacggtcagaaacatcttatttgtatttttcttttattttttgggcctctttcacctataaaagaatagctccattagctcatttttcacatttagaaaactgcccacaaggtcagagcttctctctctagtttctctctctagaaatcggagcttctgatacttagtctttttctataataccatctcgtgaccatctcttactagtttctctctctagaaactagagcttaaacacttagcctttttctgtaattcttgtgagaaataaaaactcgaagtagatgtagctttattaccatcacgacatggggagtgaactactttaaattttgtgtatctcactaaattatttacttaaacttattaattattttgccaatctagcgagctgatgttggctactttttaacgtcaacacagaattttctaaaaaattaaataaattattttatcatgttgttgtgaagtttctttttatattatttttgtaacattttatgtgcaattttagaaaaatattgttgtaaaatttgtcacaagttgtaaatattacattgtctgttcaacttgtaaaaaacatgtaatttatacattttaaaagaaaaacttcattcattttttaattttaggaaatagaaatatacttatcttagtataaaattacatgaaataggacgacaacaataactatattttttaataaaatggaaatttgattggaaaagattgcgaatatgaagaaaatttacatattaatacaataactacattataatttgcaacaatacacgtacaaccatgtttgacgaatgcaaattttttattaagtacataataatgaaataaaaaaatagttgtgttaaccacgaggaagaaaaaaaattgtatcatcaacagcatctttgactcattccatttaaaaaatcattaaagtatttatttaatagtattatcaatctttctataatatttaacattaaaaagaaaaattaaaattaattaaaggctatatcattaaaagagtaaaatactactctaaaataagacaaacgactaagtaaataataataaaaaaaaat

SEQ ID NO: 34474 - DNA, 2973 bp, Cannabis sativa
tacatgtccgggccatatcagaccaagcgggttgagggtctaccagtgttttgcttttgagactctgttttgccgcttagaccggctgaaagaaaaggacttatcatattattttgtaaatgtttttgggatcccaactaccgtaacttttagtttataaagtttaaagtattttaagtttattttcattcctattgttataaaagtttaaattcttggctaattctattagtaatcccgtttaggggattagggttttataagtattttgggtggcgtgcctaattatttagggcgttacattgatgctcactaagagtgctaaacacaagaggtcttagcttgaaagattgatctctcaaatcatcattctcaatggcagctttaagaagctcaatttccatcaccttcccaccatgcgccttgtctaagttcttagacttaggcacacttcgcttagttctaatgaactgagacacatgggggtcatactcatcagtaaaccttctaattctcttcatcattgccatgaaagctcaacaatacaagttgcttacaatctaagaaaattctgattggattgtgaaaaaaattaagcaattttagaggaaatttttaattcactagaaaattgttttggaattttagaggtcttagaaaaaaaaaatacaaagggttttgggagtctgaaaatcattggattaagatcaacaaaggaggagaagaagaaatttctcaaaaaaaaaaaaaaattgcaccaaaaaaaaaaaaaatcttttctaccttgagatgaagaaaacttgagggcttgatgaacttttaagaggcttttcaaaggcttgggcatgtgggatggaatgagaaagtgtgaaaattttcatttataactctcttatttataggtgagtgttcaatctcctaatactaaagctaatgtttgtggtaaatttaaagctttaaaggaagatgtaaatgacaagtaaaagatataattatatcttttcccttctccttttaagtggaattcaaaattcctatagaaatatgattaggaatccaaatttaaaaggtaacgccaattcctaatgctattaagatattaaggataaattagagatctaaaagaaaaagataaatgataacaccaattctcttcttctttctttctaattttgaatggaatttacaactaggattaagattcatatccaattaatcctaattccatgacaaaaataagaaaattcaaaattttcaaagaaaaaggtaaaagatatgtgaaaaaaaatgataggtttttcctttttttctttgttaattaatttttgaaattcccaaggactaatcaagagagttcaaagtcctaattcaattggtaatgcttacagaatgataaacaattgcctaagaatatcaaaattgatgcccatcttgtagtttcaagcgaaacaggcttggttcacgtcatcaagccaactccacacaagtgtaaagttgacttggggggcaaaaaagttaacccgaaaactttccttggtgacatggatatcattgtttgatacgtgataagaatgatggcatcacagagttgagtagactcgactcatagcagccgacctgggagggaaccctagctttgcacccaggtcgacttcgggagcttcgagatggaagtttagacttcaataactttaatctaactcactatttttcagtattctataccatgaagacatcgagtaatctaatcaaatgaacttgtaacccggaagcaaacttgagcacctatcgtttcaccttgcgcttaagttgacattcctaactagggttttagtttctgggattgtcatagtgaaaatggatcaaaacttgcattgagtcatcaactaagacataccacaaatatatttggaccatcagagtcagaaatagaacaacattgtttttgagcagccagggccccgacgaagtgagcaacccagcgcccaggttgacgatttttcaatctgggtgccttccaggtatcagatcgacgatatccaactttttcatcttcttcatcttcatcaaaaaaaggggaaatatgtctttttggggaagaaacaacacttcttgggtgctagaagcaaggcctagcgcctaggttgaaatgtcaacctggggcaattttgatgatgtttttcgagaactctttcgagcatcttctttattctcaaaaaatattgagattcaactatttttgggaaccaaacggaacttccaaaggccataactaggagcacccaagttgacatattgtcaaactaggctatttccaatcaagttcaccaaagagtgctctaggcattttttttctatcatcagatataatgaatattcaagaatactctgggagaaaaccataaatccaagcccctgaaaatatggcccagtgcccagtttgagggcgctgccttcgattgctcaaatgtcaaatctaatttgactaatgaatttggaatggtcaaaaaaggcgtaggagacctcatgctcaagttcaagaatcttgaaagtatcaaaacaaaatcccaagagctcaggaatgagtacccaacgtcttttttgacaaatggcctggtgtgctgggttttgcttatccaattctaattttattatggtcgtccatctattttttcacaattctaagattcatgaagtcagagaattcaaattcacaacttcacatttctcatttccaacatagggaactcactcagaaatgagagtttcgagtctatcatttccgcagaacagcaacatctccgagaatcggtggaccagcttcgccagaacattgaacagactgagtgatgtcaaaatataaattaagaatcttaaagtacatcccttagacgttcttacacttacccaacatccaggttgacgtcatatgtcaacttgggcactggaatgtcaacatgggcgctagatgtc

SEQ ID NO: 34475 - DNA, 1796 bp, Cannabis sativa
tgaagttacatgctttagacataacttgaaaacaaccaacaacttcatatatgtatatttttatcagtaacacatattcgagatcaataaccaataaatgatgtactagctttattgacaatacataatcaaaatcaataattaatatataacatcggttgccaagtttatcaagaacacatgttcaagatccataaccaataacaattaataacttttaaatcttcaataatacatattcaagatcaataaccaataactttcaatttttttcaataacacgtattcaagatcaataattaataacagttagtaacttttaaacctttcaatgatatatattcaagatcaataaccaatagtgatcaataattttttatgaattaaggttatgggtgtaataattttaaattataatggatttattataaatattttaataatttaagtctaaaaaagttaatttctaaaagattcttatttagtaataaattgtaaaaaattaattaataattattaataatttaattttaaatataattaattttatttaagattttataaggaaataaatttttaggttactatcaagttacaagttatttatttatttatttattttaatttctaaattaatcaaaaccattcattattaattcaatgactaaaaataaatgtaaccatgatggttacatatttgatgtaaccattgaaacctctttcattaacatatatgtatattggtttgatttatatgtaaatggagatggaaatgaattattattggaaattaagaaacaatggtctttttttttttaattgttttctataatatattaaataatttattattaaaaaaataaccgatccaatctgcactattgcagattggattggattggattgggtttaaactgttatgcggattgaattggatccaaaatatgaaatccgcacttagtgcgaattgggtgttatttgaccaaaaaaatacggattggatcggatgaacacctctactgttttcacttcaatttcttcttcataagacgcttgtcatgttttgttgactgttcaacaaaattttcattaaatcattatctttcaccatagattgtttttctttgccttttttggtcatctactctactcctattaatggatctttagaacttttaagcaatgagtttctcaacagtaatttttgaattttttatgtaaatttttttaaattttaattagttatacactaaaatagagagagtgattttttttttccaaattttaattaattacacactaaattttataaaatatttttacaaattttattttataaataaactaagaacttagaaaataagttaaaaaagataataattaaagataaaataataatatgaaagtataaaaactattgttccatcttttcaaacttacaaagcaatatgaaagaaatactactttgctttccattccatccttcttaatgacatctttacttaaaaaaatgagagttaatggtatgcagatatggtatttatcccatacaattatttactagattttgaaaagagagaaagtagtagggccctcacaaattagggagaaaagaaaggaaaacattctcccctatttttatagggaatacattttcctttcctaacttagtttattttaattttattaattaaaaataaaaaagataaatatactctttaaatatctgtaaatggaaaataattacatgttttaataatagtaattttgtcaaattaaagcattccgattacttt

SEQ ID NO: 34476 - DNA, 2492 bp, Cannabis sativa
  modified_base (235)..(237): a, c, t, g, unknown or other
tatcatatgtcactgacgctcatatctacacatcgccaggaggaaaccctacaacgatttcattctatgccataacttggcaattttcatatcactgacgccgcatctacacgtcaccaggagtaatcgcctaatcagacaagctcgtacctacgcccgacacttatcatatgtcattgacgcccgtatctacacgtcgccaagaggaaaccctataacggtttcattctatgcnnnaacctggcaattttcatatcactgacaccgtatctacacgtctccaggagtaatcgcttaattagacgagctcgtacctacgcccggtacttatcatatgtcattgacgcccgtatctacacgttgccaagggaatcgcatcacctaatgaggtgagcccgtacctacgctcggtactcatcatatgtcactaacgcccgtatctacacccggtacgtctccaggtatattgcatcacctaatcacgtcagcccatatatcccatgcataatatcatcacattattaatactcaaccaatcaatcttttcattatataacaatattaagtatatctcaatattaatcaattcataacaatattaattgtgttacgtataacgtactattcagtacaatatacttttcttacctcaagttccagtttaggtaggttagccgacctacttggaggacaatcgatgatcccgggccctaaatcaaaacgataatagactaataagtgtttatcccaaaacactgcttaatagttgcaaaggacaacctagggtttcctaccaaaccccgtagtttaaatacactgaaataaaacttatattttgtctctaaaacatacaccatatgatagagctcgttgcaagcttcaaaatgtatatagaatgtccaaaatagacacccgagtgaaaagttatggcaaaattacgatttccaagttcccgaggctgcccaaaacggtaaaccgattggccagaaccggttgactggatttttagaggtaaaaaatatgattttcgaagtttacgcactcaccgaaacactaccggaacctgttcaaaccgccccgaactttatagggcacatatataccatacatactaccatacttacataatagaatctaaaatcgagcccgtaattggcaaacactactagtgttcagacttaagttataaaaagttctaaactcaatttctaacccaaaatcacttcaatttcatcaagaaaacattagaattagtcccatgactactcgagaacaatcttataaggtcagaacctttataactattctaattcacaaaaccctatacgaaaccaattgttttaaacttaaaatggaattaaaccttaccttaagcttttctgctctaaaaatttgctatcccgctactaccagagcttagatctctagattttggattgaaaatcgaagaaaatagatataggaaggagagaattttgttgaaaggagaagagggttttgttctgttatttttgtttactgttataaactaataatatataatatatatatatataacttatcataactgataagtttatttaaaaaataatattataataataacattaataatataataatattaataacattagtaactcaaattacattcacatatgcaatataaatctccataatttataaattacgcttattccaattatagcaaatttaaaattaatgttgaactagattagtaggatcataatcccacttattatctaattaatccataaaataattataaaccttaattatttaccattaggcttatcaggatattacaaccatcccctcttataagaatttcatcctcgaaatttacttgaataatttgggtatacaacttttgcatatgtgactcaaattcccaagtcccttcctcatgagataaatttttttggagttcaatatcatcgtaactcaaaatacgtgtcgaaactgacacatactttctcaacatagaaatgtgaaatagattatgcaccccgaacaatgcaggtggtaaaactaatcgataggccatctggcctattcgctccaatatctaaaaaggatcgatgaatctaaggcttaatcttccattcttcccaaatctacgcatcccttttataggtgatactcaatgaaatactgagtctcccacttgaaattcaatatccctacgatttaaatcagcgtagcttttttgtgtactcaatgaaacgagtatacaactcgaactcttggtatgattttataagttccttaaaacttttcggtccatcgtgttattttatcacttgtgttactctcgtgaataggtgcccaacatctttctcataccacacttattaaagtacctaactaatgatacatataatcatcacttttagacaaacacttcgctaaggaaaaaagtgttaggttttatgccctaactaaaactccatttcaatgtaatctatttt

SEQ ID NO: 34477 - DNA, 2422 bp, Cannabis sativa
  modified_base (38)..(40): a, c, t, g, unknown or other
aggttgttaatccaacatacatgatagtaaatagatcnnngtaaaataatttccaacagatctttcttattggtggtatgaatttcagtgtgccactcactctattaatcgcatgcctacacctgttcttgacaatcttagtccctatgaatgtctattcaatgagcaacctgattatagtgtttttaaaccatttggttgtgcttgttatccacatttgcgaccctataatcatcacaaacttgagtacaggtctgaagagtgtatttttctgggatattctccaaaacacaagggttaatttgtgtgaaaatgcagatggaagaatctttattgctcgaaatgttgtctttgatgaatttacttttcctgccctcaagactgctgttacttcatcaaatgaaccctctgaagctccattctactccatcatgcaatttgctactggctctcaaaatgttcccactgctcatgaatctgagccaactgaaatgccaaatgtggatattgctgctgatctgactggcttagatgcaaacattgacactgcagttgcgcatcctgggactggtgcaactatagaacctgctgcaaattatatgcctcctgctatttctaatgatcatcattatgcatcttctccaacatcagtatctattgtgcctgctcactctgttactcgtgaaaatgtttctgcaccagcaactactgatgccactactagtgcaccagcaactgctgatgacaatactggtgcagcatctcacagtggcaatctccctcgtactcactctatgatcacccgatctatgcgaggcatttacaaggctaaagcataccttgcaactaagcacaggttacctgaatacttgcttccccgtgagccaaagtctgtcagatctgctcttcgagatcctgtgtggaatggttccatgtctacagaaattagagctctcaaagctcaaggtacatggactcttgtcccttatgagcctcatatgattctcattgataacaagtgggtgtatcgtgtgaagttaaatgcagatgggactttggataaatgcaaatcaaggcttgttgcccgtggttacttacagcagccaggaatcgactttgaggacacatttagtccggtagtgaaaccagttactgttcgattgattctcactttagcagtcacatatcaatgggaggtacgacaacttgatgtttctaatgcttttttatatggagaacttagtgagacagtctatatgactcagccaaaaggttttgaagatcccatttatcctaatcatgtgtgtaaattgcataaagcaatctatggattgaagcaggcaccacgggcatggaatgataaactcaaaaccactttgtttaattggggttttaaggcatcaagggctgacacatctttgtttctttatggctcgggcacaactcagattatactacttgtctatgttgatgatattctcatcacagggcctaatgctactcttattcagcaacttattactcatctaaatgcaatcttttctcttaaggacatgggggctgtccattacttcctaggggtggaaattcttcgtgattcaactggaatgtatctatctcaaagcaaatacatcactgatttgcttgttaaggttcatttagatggtgcaaaggtttgctcgagtcctactagtagtgcacacaagttggctttaaccgagggccttccttttgaggacaaaactctataccgtagtactcttggtgcattacagtatttgacacttacacggcccgatgttgcttttataataaacaaactatctcaattcattcatgctcctacggttgttcactgggaagcttgtaaaaggctgctgagatacttaaaaggcactatttctcatggtttgcatcttacaccagcaacaagactttctattgaagcttattctgatgctgattgggcgagttgccttgatgaccgacggtctacaggtggctatgctgtctttcttgggccaaatctcatctcttggtctgcaaagaagcagcctgtggtggctcgttcttctacagaatctgagtttcgtgctttggctaacacagcagctgaacttaaatggtttcagtctttgtttagtgagttgcaggtgactcttgctgatattccaatcatttgggtggacaaccaaggggctgctgctcttgctgcaaacccggtcttccatgctcgttgcaagcacattgagattgatcaacactttgtgcgtgatcaaattctcaatcatgaagtctcggttcgctatgttccttcagtcgatcaagttgctgatattttaaccaaaactttacccaaagacagatttcattacttgaaagccaaactcaaagttgtttcctccccttttcgtttgagggg

SEQ ID NO: 34478 - DNA, 1349 bp, Cannabis sativa
  modified_base (453)..(453): a, c, t, g, unknown or other
  modified_base (722)..(722): a, c, t, g, unknown or other
gcaacatactcagtgatgtcatttttcatgcccggccactagaacatggccttaaggtcttgatacatcttcgtggacactggataaactgagtaaggagttgtatgagactcattcacaatctctcttttaataccatcatccataggcacacaaacacgattcatgaatcacagcattcccatttcatccactataaagtcaccagtcttcccaggcgaaaccctatctcaagattttactaactctggatcttgcaattgtgcttctctgattcgctaaaagagtagattgtagggtaatattagccaattgccctacaatcaagtcgattttagctcgggtgatctcattggctagctgctgggagatttgtttcacagtatttatctgactctgtccctttctactcaatgcatcaacaaccacgttggccttaccagggtgataaangatctcacaatcataatcctttacaaactctagccagagtctgtgtcccacgttcagatctctttgggtgaagaagtatttcagacttttatgatcagtgtatatctcacatttatcgctatataggtaatgccaccaaatcgttatcgcaaatagcactgctgcgagtcctagatcgtgagtagggtacctctactcgtactcttttaactgcctagaagcataggctattactttaccagtatgcataagaacacaaccgagacctngtctcgaggcatcacaataaacaaaagattttccttatcagaaggaagagttaatactggagcggtaatcaagcgctcctttaactccaaaaaaattttctcacacatattagtccaaacaaacttcaagttcttttgggtcagctctgtcaagggtacaacaatttttgagaaaccctcaacaaaccgacgataatacctagctaagcccagaaagcttctaacttcagcggccgattttggtgttggccaatcccaaacagcttcaatgttggccggatccaccatgatcccatctttatctactatgtgccccaagaaaaagacacgagaaaaccagaattaacacattttaaatttggcatacaacttgtgatctcataatcgttgcaaaatcgatttgagatgcagctcatgctcctcttctgactcaaaatacaacaagatgtcattgataaacatgatcacacatctatccaggtaatccttgaacacataattcacaagatccacaaatgctgcaggggcattggtaagtccaaaagacatcacaaggaattcataatgtccataccgagtacagaatgcagttttcaggatatcttcctctcgaattctcagctgatg

SEQ ID NO: 34479 - DNA, 1072 bp, Cannabis sativa
ttctatctcaattttgtaactctaggactctaaaattagcagcaaaaaaagttctatttatagtgctggaaaaaatagatgaatccccttggaatgaggatttttttaaaaaaaaaaaataataataataagtacggtgctattgattaatattttggccataacttcttcaatacaactcagaattagacgattcaagatattccgaaaagctaagaatgagataaaattttcatcttgagttccaagtccagtttttcttctatgattgtcaaaatttgtaattaagctttgccttgtaaaatcgagctccccaacttccactattttctaccaaaatatactaacatcccttcgaatgactttaaatgcatgattagtctttaaaatatccaaaacaattaaaatcacactaatcaataatttacagaatcaattcaagaatattaatactgatcatatttataagacaaatatagactcatcactacaacaaaaagtataattcccgtcaatttttaagtgtcacttaaagaagttatgtcagttacgaaaactgacgtatataccatagttgcaaataattttttattagcatcgtttttaaaacgacgtaaaatataattttctacatttagaaactgacgcaaattatgtacttttctattttatcttctgcgtcggtttagaaatggcgcaaaattatttatggcaatttaaaattgtcacaaaacacttattatgtcggtttaaaaatgtcatatccattacgaaaatactttttttttacctattgtgtcacttataaaatgaagcacaaatgtagataagagaaaattgtaaattttcatgtaatttttcccacctgctttatcaaattttagaataattctatataatagtaaatatataatataaaaaaaaaattaaaataacatttttaaaacttatataaaattagtaatcgattttattaactgatcgcataataccaaaattgttaatagaatcgatgctaaaactataccaaagttaaatcagaggcatacattgcatgataaggcaataatta

SEQ ID NO: 34480 - DNA, 1339 bp, Cannabis sativa
  modified_base (772)..(779): a, c, t, g, unknown or other
catacatgtatttttgaatttaaatcctattctaaataaattctatttatctttttaggcctatataaagaatgacgtaaatcaacttttggacgacgggagagatacaaacaagtaactttgagattagaaaacacattttttgactgggaaaatttccaactgactcagagtctaaattacgctaattaatcaccaataaagaaataataaataaatagaaaggactctgggaattatagaggtagtccccttatatatgggtaatgacctactccccttatagttgtattaatcttgagataatgtcgtgcatataactaaggaagacaaaatgaattctagttacatctgtcaagatatttacaaagaatatgtttcagagaagtgctcttggattcaagataatgaatttaggtcctttcccctgtgaattcattcactatttataggaggaaggttgttacaattagctccgtaaaaggagtaaccagaaagtaggtatccctatactccaagatgtagttacgatctgttaaaactcctacaatatgggaagaatgatcgatccacatttgtaggatacagttagagatatttgtggaagttattgaggaaaaaatcaaggcttgtgtaatatgccgaaaatctaattatgaataattaggatttattatatattatgggttaattaggtagtaatgagtaggattatgatcctattaacctaatttagcataaattataaattttgctataagtggataaatannnnnnnnttattaattacagagatttatttggactatatggatataatgtaagttatttgcaaaataaaaatattttcaagttcggggaccttagagacccgattggagaccaaaaatgtcacaaaggttttagttagtaatattaatgggattattgagataagttgattttagaaataccagagtattttagaatactagagttaaccaaataccctaaaattaaagatttcttagtggttgaaaaaaatagtaaaataattattattaataaaatttttatttataatattaatattataattaatatatattattattattttattattatatataaatacaactgacagttaagtttttttatatatatatattatatgtagaatatttgcagcataacttctttaagtggttaggtttttgcaattaagccccaattttaaaattttggtagtaaaacttcataaatccaagttttgttagcacttagccatttccatccatttttgggtgttaagtatcaggttggaatgtctacatgtacacaatgtacacgtgacaca

SEQ ID NO: 34481 - DNA, 2063 bp, Cannabis sativa
  modified_base (645)..(651): a, c, t, g, unknown or other
aaaacgtagttttgtttttcaaaaacaaaaattttacttttattttatgattaaaaaaataaaaaaacaaaagtgttaccaaacgacacctatatttattcattttgtacctgtttgtacagtgacaaaaagatcaatatcatataatttgtaaccaaatgtgaaaattttaattgaaatacaatgcattagccaattcactagacatttcagccaaatcaaatttaatgacttgtatgtagcaagcaccttctgaatttttcttgctatcactttttttacccccaaaatatttgagttttactcacctcttacttactcattcttttgcatcatcttcaactgagttgaaagtattataaagagctggaaaaatagatgatggattctttaaagtcacatagaccttataattgggtttagcaaccaaagattttcctttaaacttcttctttccctgcatgtttagtgtcctcaccttcttaaactcaaacccgtataacgattcaagaaccttcttgatttgtgtctgtgaaaaaacaaaaatcgagtaagcgaaataggaacatgtttgaatatgtaatgggaaatttgaaattcaatgcttaataaacccaaaaattggtcccctaaactaatactatnnnnnnnttgtaaaatgggataactttttctaaaactcaattttactcccatttacattaccccctcccccctctctttttctcaataattcattcaataactccagtcgaactcccctcctacactacccacccataaattttttttctcttcactcattctccactcattttctaaacttcatcacactataatatactacactacaagttattctacctattttttttaaaatttggagggagcatcatacaaggagcaacattctacaagcaatgggtaattttttttggtttgtgtaatcttgtttgttattgttatatttagtttagaatgttgttttgatgcttgatctgtggattgttgctgttattttgctgtttttttgtgttaaaatatttgctacctgtgaaaactggatttttcctggtttttggaattttttttgtctggcccgatagggtccgatgctggtctgatggggggcccgatgccctgtcaatatacttgaaaggggtgaaagtccgatgggcccgatatcggcccgatgggatgggccagatggtacccataaaaatttcattttttggatttttggggtcgggtccgatggccctgatggtacccataaaaatttcattttttggttttttggggtcgagtcggatgggccggatggcgggcccaatggcacccttaaaaatttcatttctttgttttttggggtcgggtctgatgggcctgatggtacccctaaaaaatttcatttttggttttttgggatcgggttcgatgcacccgatgtgtgcccgatggtgggtccgatgggaccttaaaaatggttttttgtttaatttttgggattaggcccaattttgtccgatggtcgtgtccgattattttcatatttattacaatgaaagattttaggtaacttttcggtgagatttttgttctaaattgtaattgtatttttttttaaaaatgtatgtgacaggttcaactgttaatgcgtatgttatgtataatggtgtttgggagcttgatggtagagattttgtttataaagggggcgaaaatttgacatttgacattgatccgaacctaagctactcaggtttggttgatgttttgtacgaagaactggatgttgataaagtggagtatgacttgaaattggaagtaaattacaagtatagaaaaggctatgagtatcgccctgaagttattggaaatgataagcgtgcaaggtactttttatctacacttgcgaagaagccagatgagtttattcctttgtttgtgacgttgttaaaaaagaatgtttgcgtcgatcctagtcccacaccaagttctcttaaggacaatcgtagcgaggttgggagttttgttccagaaacaaatccagatgtgttggt

SEQ ID NO: 34482 - DNA, 1680 bp, Cannabis sativa
aggaaaaaaggaataaaaaaaaaaactaacaatcttttgcatagcctcaacactagatgcaatagcagctatatttgcaagtccaatcctagaaaatcaaaataaaaacttactaaaacaaaactaaagtaacacaaaaataaatgtaaaacaataagcaaatataaccacttagaaaaacataaaagaaccacacactttaaaatcttttttctagtcagctcgtcaaatgtatttataaaagaaccagaataaaaaaaaaaccaaaaaacaaccatagagaaggaagaagaaatgtattttatagtcttcattttccacacccacggatagaaccacaacagcaacacgagaatgacaactacatcatgtgtgatatccttaaccaaagcagcaagggtgatatccttaaccaaagcagcaacgctgtcgaattcggccctacacacaccatgtgtggggatgcgtgtatcaactcgccacttcctattgatgttgttatgcaggctcttttgtattccaagtcgatcaaaggcattgattgacatatgtcttgtaattgtttcttggtcgtgtggccttgctagcaattatggagatttatcccgtatgatgatagattcatctctcgagtgtttgcttcatgagcagttgctcgcagtactatactgactatttttttttttcaaaatagtcttctttagatttacatgtatggagggagttgaactgattgctcaagttcaacacgtctccaagcacccatgggaagtattcgtactgttggtcgtcaggaccttgggcaaagtacctacaccaagaaccccgttcatcatggaagtaattctgattgtggagtagttcattgatcttcaccctatgaaactcatactcttcactttcgtggtagagcttttgagtttttcccctatgtctgactgcaggcccctttccctttgcaggatcacggggtggtataaactcattatacttgtgaagagaatcccacggaagatattagttccccacattgttcgaattgctttgagaaaattgtggttggtcctatcaactgcgtgtggtggacttgtaggactgcgatcttgagtctgaatacttttggacgctagctcattgctcatttccctaacaagcgactgttccatatcgagcagagatcccatagatccacatacccgagttcaagtcctttcaaatgctcagttgcagtttgcttccttatggagaatcttagtgcatgctgcttgctgagtagtagcctgactaccaaaagtggtagtgttactttgtgtgttcatggatgatcacttgcttaaacttatgtattcctttcaaaacaaagctttgagcaaagaaatcaaaatgtagttggggaactcgagctatggctctcaatgaaagtaccaatatcttaacgttgaaaagtggccaacaccaactcgctagattgacaacatgaaaattgaatgtaagtatataatttagagagacacaaaatttatagtagttcactccccatgtagtgatggtaatggagctacgtctacttcgagtttttatttattaagagaattacaagaaaattagcttagtgtgaaatttctaatttctagagagagatgctctgactttatgggtacttttctgaatgtgaaaaat

SEQ ID NO: 34483 - DNA, 1803 bp, Cannabis sativa
ttttcaatccaaaaactagcccttcaatctgctaataacatttagaggtgaatcaagaagattggaagcttaaggtaagggttagtttatgatttttatggaaaaattaatgttttaaaagttaaatttgtattttggagctgttgtggagtttgtgagcttatggttttttttgggatgatatgagattagttttgatgcttttgtgatgattttacactattttgagttagaaatcaagtttaagctttaaacgctcaaagcttgagctttaatggcattttttatttaagagcttaattttaatttctattacgtagagattgttgtatggatgttgcttagttgttctatgaagtttggaatcaattgattaggtttcggtggggttttgaggagttgaagcttgagatttttcgttcctgcaaaaaatagtagaccatttttagagctgaataaaacggtctgccttttttagtatttttggggagatcaaaaattgtattttggccataaaaattcaacatgactctcgcgtataagaaagatcattgggggtacgatacgtcatcaaccctccttcccggaatggaaggattgcttgatgtctgttctactctccgtgatgctttccattcaatttttttaagcgaagtctaaacttgaatttttatgcaacttcaaccttccttctcagaagccgaagcttgcttcataaaaattcaacatgactctcgcgcacccaacagtattttgcccatcgtcatcagcaagcaaggtcaatgtctgaattctttgtgctcctttagcctttcctagtgaaagccaaaagattggccatcaaaggactcaacatgatcttcagacctcaacgtaaaaaggaattgcccacacggggatacaggcccagctttcccttcgggaaaccaagagcctcctgcgccacaagaagccctgtgatttcccttatgaggttaatgtcacaaagggacaatttgggacctatcatataatcatgttttccacaaaagtacccaaggcctcgtctcacgaaagcatggaaattgtcgtatgctttcaaggaacttcctagaagagcagtatgcttcctgaaattagacaaggccacactcaactctactcctcaaaaactagtagaggatacaagttaggctactccaagcaaatgaccaagaatttgagtcaaaattcccagccacgccacgctatcctgcagagaatgtgtgtccttgtgtactaagataaacaatctaacggctagggataagaaaaattcaaataggaatggccctgaagtgacacgcctccaaagaccagcttgtacaactagtacaatctaacacccataaaagccacatgggaagtatgccacctaccaatccaatgatgggatttcatccttacgaagatccacccaagacagctcatgcgatgaagttggcatataaataccttagaaaaagcacaaatgagggattttttttttcggactttacctttggattaaagacttactcttcgccattctaagaaatcacatttctgtaaccctattattaattccagaatattcctactaagcttcctcttcttaaagaggaacacagtggaataagagaaatgtaatgtccccgcttcaagccttcattgggctagaaacggggacgttacaatcttgggaagttttcccaaggagtgtgtgagtgaggacaaagcacgctgaaaacattcgtgttggtctgtagggttagtcgtcattccatgaagcagtcatagtgacgt

SEQ ID NO: 34484 - DNA, 3285 bp, Cannabis sativa
  modified_base (42)..(42): a, c, t, g, unknown or other
cttgatccacgtgtccctgtctgattggtccacgtatattgngcaaaattaggggcaacaataatatattcattcactatctcctcttataccctattcactaactatatattcttcactctatcttcttcgtctccctacaaaagtagttaggaaactttatgaagctttcattaaagccacgtgcgtctcaaattttacctactctcccattcaatccgacacttggatatttggcctggcgttcgaccactccaagttccttaaaaaaattggcgcggacaatattagcaaggtttacacatgcaaactacttaattcgaatacttcttattactacgccatgaaagttgtgaacaagaaaattttagcattgaaggaaaatgttaacaaggcggaagcgaagagaaaatcttgaaaatacttgatcacctgtttctttagactctcttcgctgagttcgaagactcatatttttgtatatagtgatggagtactgctccgatggtgatcttaactttttttgccataaataacctcagaaacggttttcgcttaactttacaagataatttgttaattaggaaactctgataatttttgttgtatattttatttcatgcatattttttatttacagattttacgctgctaaaggtctagtagccttgaagtatgttcacatgttggaatcatctacattgatttaaaaccgaaaaatacactcatcaagtcagtcaatcacattatgctcactgatttcgacctttcactttactcggacacaatcccaggcattgttgaatcacttgaatcatcacctgactcattctcctttatttgattctccaactggctcttttattcgtgccaagtcaagacccataaggctgctaattggctctttgtggtcgagtcggtaaggatcaggtcttcgtctactgtcgatacaaacgagtacatttcacatgagacggctaaggataagtctcacgacaacaagatgaactggtggacatatggtctcttcatctacgaaataatttacgatcgtacactgttcgaggccaagtcccacaagacaattatctcaaacattatcaatttgccactagccttccccaccctgacgctatcatgcgagcttgagtttcacgggagggatttgaatactggatttcttaacaaagacctatttaaacgtctcggggccaaatgtagagttgtcggggttaagaagcacccattctttaaggatctcaatttagccttgacgaggtcttcgctgccgccaaggccaaattgagtcccttgaagaagggatgcttcttgacctcagcagctccgcgtttgccctcgagatgcttggtcgagtctttgtcaagcaacccagtagttaactcccttgcgtgaagctcaagctcgcatgatagcgtcaaggtggggaaggctagtagcatattgataatgtttgagctcgttgtcttgtgggattgagctactaacagtgtacgaccgtaaatcatttcatagataaagacaccatatgcctaccagtctcgtgggacttatccttagccatcttaggcgaaatgtactcgtgtataccgacaatgaacgaaaacctagtcgtcaccgactcgactacaaagagctggttagcagcattaagtgtctcaactaggcccgaacagaagacacggttgaagaagaaagaaaataaggatgagccaggtgatgattcaggtgattcgacaacgatttggattgtgtccaagcaaagggaaaggttgaactcggtgagcataatgtgttcgcctgacttgttgagcattttttttcagttttaaagctttgtagataattcccaacatgtgaagatatttcaaggatactagaatttcgacggcgtaaaatctacaaataaaaaatatgcataaaaatcaaataaaaaataaaagttatttgagttttctagttaataaattaccttgcagagttgaccgaaaattgtttgcgaggttgtttgtggcgaagagagttaagatcaccaccggagcagtactccatcactatatacgagaaatgcaagtcttcgaactcattggagaaagtcaaaagtaataggtgatcaagcattttcatgatttttcactccgtttctgctttgttaaccttctccttcaacgctaaaattttcttgtttacaactttcgtgtcgtagtaacaagtattactcgagttaagtagtctgcataggtagaccttgttgatgtcgcccatgctaatttctttgaggatcttgaagtggtcatatgccaggctagattacgagtggcagaccggatggcggagtaggcaaaattgaaggatgcgtgtggctttaatgagagctccatgagtttcttaactatttttgtagggagaagaaaaatataaagtgaagaggatataattagtgattaggatataagaggagagagtggaaacatcaattacatatattacatttttttttttgccaacttagtaaaataatgtattttctaacctttttttttttattttaaaaaatagaatttaaaaaaaaatagctaatgcatatttttttgaacatattgtatatgaaaaataagtatgacttaaagatcataaattcaatatcaatatgggaagtgagattagtttcatagaatcttagtacatttacttcattgatttataaaaaaagcaattagatatgcttattttttgttatctataaatactagaatgacattaactatcgataagtttatttagatgatatatatatttattgatttttattgtatgaagtactatatcattaaagatttaattaagtatataatgtcctttaagaagaaaaatagttaaaatgaagtattagtgtcaaatattcttattaggtaaatattcttttacgatatatatttccatctctcagaagtaatggacgacaatgatattataccaaatgaagttgttttgtgcctcctaggatttagggaatcaatatgattctatctccgtttattccgtttgtagaaaggaagaatcctaaagaattgatctttcgtttagttgaatctctctttgattgatcaatatgtgatattctgaatcctcgttactattggaatcaaatgatatctggatctatcagaagatcctttcaattggctataattcgttaattgaacgaaactagatcttgtggaatcatattgaatatttgacaaaatattttgtaccttactaaaa

SEQ ID NO: 34485 - DNA, 1294 bp, Cannabis sativa
  modified_base (1184)..(1188): a, c, t, g, unknown or other
aatctaatatttttgtaaaaactcttctagtttaaggggtctttctattgtttgggctggacttagcctcacctgggggataagttgaaaagtgtcatttatgtattacacaaacaaaatacaactctaaaataattttaattgataaatatcatcttttataattaaagtaccaaatttaatctcacataacttatcaaaattagagtatcaaatacacataatggggatataacttataaaactgaatataaattaaagaataataaaatgaaggtaaaaattaaaataaaaagtaaaatatcagcatagagtgatttggaataagttaaagaatatttttttttactctattaagcctagcacataatttacattaatttatggggtataatagggacaccatctatacaagttgttatattttgaagattataaaaataaaaataaaaattaaaataaacaaagtaaagtagatataaaatgtgatttgtacctgtaatttcctttcatactaccctgatgcatgtatggcctctcattttcttgttcttgggttcagcccagagactcttcgaaacgatttgggctgttgttaaattagtgtttctatccaagtccaaccatggtcatgcagtacatcacttttgtggttaattagttctttttatccacaattgataggacataggactgacgaataaaatatattatattttatataataataaaatataataaatgattcttcacgtgatataagattcattcgtttcattatataaatatatgtaaaaatagctagattagtgtatagtactatatattatataatatacaaaaatagaggatttgaatgcgaggtagacaatacggtcagcgactatggtaaaaaggacgatgtcagcttctctccacagccttccttttagcaaaggcatcatcttgatgtgaaagctgagttactacatcccacgacaccaccattacttctctttttcctaattctttctcctttctgcttttttttttttttttttcaagagaaaggatacgagagaagagatgacaaattcatagaggctgtttgggttctcttataatttggagataagatgaattaggttccatctcaaaattaattgcctatgcgaggagtagctcattcctcttatatattctannnnntttccacacattaacaatatgagactctctgacatcctccttcaagatggtgactattttatatgctcactatcttggacaattcgatcataagcggctctttttt

SEQ ID NO: 34486 - DNA, 2313 bp, Cannabis sativa
  modified_base (27)..(43): a, c, t, g, unknown or other
aagcttgcgacgagctctaccatatgnnnnnnnnnnnnnnnnnaaaatataagttttattttagtgtatttgaactacagggtttggtaggaaacccaaaactgtcttttgcaactgctaagcagtgttttgagataaatacttattaatttattattgttataacatagggctcgagatcatcgatcgtactctaagtaggtcggccaatttacctaaacccaaacttaaggtaagaaaattatattgtactgcatagtacattgtattttaatacaattaatattgttgtataatgaaaagattgattggttaagcaatgataatgtgatgatactatagatataatatatgggctcacctgattaggtgatgtgatatacctggcggcgtactaggcgtaggtacaagcatcagtgacatataatgagtaccgagcgtaggtacgggctcacctaattaggtgatgcaattttcttggtaacgtatcaggcgtaagtatgggcgtcagtgacatatgatgagtaccgagcataggtacgggctcacctgattaggtgatgcgattctcctagcgacgtgtagatacggcgtcagtgatatgaaaattgctaggttatggtatagaatgaaaccgttgtagggtttcctcctggcaacgtgtagatacgacgtcagtgatatgaaaattgccaagttatgctataaaatgaatttgttgtagggtttcctcctagtgacgtgtagatacgggtgttagtgacatatgataagtactggacataggtacgggctcatctgattagatgattcgatatattagtgccaggttgtggcatgggctcacatgattaggtgatataattatgttccgagcgtaggtacgggctcgtttgattaggcgatgcgttatattggtgccaggttgtggcacaggctcacctgattaggtgatgtaattatatgatatatgggtgcatgtttttagcacgggcccaactgattaggtgatgcagttatgagatatatggatgccaggctatggtacgggcttgcctgattaggcaatgcaatacaggattatcaaattaaagcattaccttatgaggcaacatatatataatatatattattaaatgaatatgatttctattattggtataataattttgtattaccaaatatttgtatactgatgcttagatgccagtagtgatttagatttcatcttatgaacaatgcataacggtttgattttgattgtgcgtaaatgataatattcaaataataaactatatgattattatcatttttcttgttgagtccttgtgactcacgggtgctatgtggtgcaggtaaggacaaagaaaagttagagctaccatgaggtgactaccttctccaacaatgtacatattgatcccactgacctgtgtgccgagttgccaaaagttattttggactggttgtatctgctgtgttttgaattgtgttttaaattgttgttgtctatagtcttttgggtaaatctttttataatagggatccccggaatatctttttactactgttataatatccattttcagtcttttattttagtcaagtcttgaatattctcacaatttttttataattgattaatatattagtattaatctagtttataaaatcagacacgtggtatttttatggaatatggcgttatagcaagagttttgggggccaattgggaagttccctatcggtctgccaaagtcatcccgctagggatgtacaagttggccggcatggatgtcacggtgatatcgagggcatggaacgcagtacacttgaagaaatactattgttgaaaaggcaagtctgatgtattttttttagccatttgggttgtggaatcaaggagatagcctgtaaggcgatcccactagatcaagtttctttttatttttccatcttggtgtcctaatgtaatgaaagaaagggtcacccagatggcctctaaattgtactctggaatacaagaatattacattgggattagtcaatcacatcttgttgtagaatggcaaagcaatatccctccactttcattaaataacaacgacaataatgaagtaggaaggtatgcgcataaaaaaatgtgtgtcacgtaagtccaagggtgcgggaccatgggtaacactacgtacttggaaagacgaggaggagaggcaaaaaaatttaagtcggcaaggattagctacccttgcttgacgaaagaaatacacctctcctcgcaaaagtcaccgagcctaaagagctcttgaaaga

SEQ ID NO: 34487 - DNA, 1870 bp, Cannabis sativa
  modified_base (662)..(666): a, c, t, g, unknown or other
ggcataaaacccaacatcaacatgattgagtaatgagttgatctaacacaaatcatcacccacttaacaaactttacaaatcatcagcttctttttttcttctttatttttttatgtttttgagggagagagagaaagtaaaacttggttaataaaaagacaactatatatatatacaagtaaacacaaatcaaggtggccaaatacagtctcactcaaatggcacactttatagttagcaactaatattttcattaatttatcaccattcttatacttcctaggtgtggtatagatcctacaaatgaaaaagtctacccaatcgtcttttctagaagtttgtcgcacacggatgccagtctcggaaggagtcttctaggatgatagtcgagtccagaagggagttcccggatgtctactatgtcctctctgggttcagtcttcaggatagctagccttcccctggaaaggagttccagatggctagttagccctcctggaatgtgagatccagatagtcgactccagcagactatatcctatctggaagcctcatcggcgagtgtccgtggtctgtgagtccgggagctcatatacgttttcggaggctctggtacttaagctaacgagtgtactatgctaaatgaggagttggttaagtnnnnnatttctaactaacttaacaacctcatttcttgcaaccaccaactttaggatcttgatcctaaaactataaataccaccttgactagttattttgtaatagaagaacatggactggaaatacacgattgagatacatgagtttgagaattttgttcagatgagattaagaggtagagataaaggtgaagagaaaagagagatcgggtttgggttttgtaataataatcttctgtagatgaagaagattcttgggtgtaaagtgtcagagttgaaataatttgagagaactcaacagataatctcgtctcgactgtattgtacctattcttgcttaatcaataaaggaagattacggcggtattctagaactggagtagagccatagatcatatcaatctataagacttgaaccagtatatttcttagtgttgatttctttattttatgcagttattgttttttggtttttacatactctgtttgcccttgttttactgtcggttgttgttctcgatttgataatcttgttattgctaattgtttgattgtttaatgttttgatcatcttgtatccgcaccattagtcataatttttccataaattagagcttggtaatcgatcaagatcgcagaatcaagattcttttggctgtaattcttgaagaaactttgaatgtcatcaatggcgagattcgaattggagaagttcgttggaactatggactttgcactatggatagaaagtctaaaaggaatcgtagtgtactagaaagtttcaaagtttcttggagacgaaaagttgtcggcagaaaagaagccagaggaaaggcagaaatagaggagatggcgtactacacgatcatcatgtatctatcaaacattgttcgagggaaaatcatcgcagagaagacaacaaaaggtgtttggaataaactagaagaattatacttgaaaccatcgattgctagcaagatttatttgctacaaaggttattcgattttagaatgatttcttccctttctttagatgagaatattgattgatttaatgagattattgtaggtttggctaacataaatcacaaggttgataaagaaagcaagcccatcatcttgttgagatcacttctaatagcatattacgaagtcaaggcagccatcaagtatggcactgatgttattgctgcactcttgtcaatagatt

SEQ ID NO: 34488 - DNA, 1036 bp, Cannabis sativa
ctaaccctaagtctaacacgatacaacctctacctatctctctttctcgttcttgactccattgacgcacaccacagtagaccaactcacgctttcttggccgagaaaatatcaggcaatggcgtcaagaaggttattcatcttctcttatgtctatttattttttggcattttcttttgttctttgttggagaatgacacttttctaaccttagtctctttcacagtttatatatatattcgtatcattcattttttatatgtttttattatagtttttatatctttaagtataaatctgggtgtattgttattaaagtaaatggttttatttttttatcaaaattttttctttgaaatcataattgtggtttgagctttctgtcctattctttttgttaatattaatatttattatattgatgtttttgcttgattgacattcagtagaatgttttttatgcactctttgatttgatcaatatattatttttattttttgtgtgtgatttatactaacttgtagtttttttgctcaatttattggtctgtgtgactcttttgttgtttttgtttttcctttagttatataactattttaaattattatcaattataataatgttattgttttatgttcataatttatttttaataatttgatcaattttctattttgaattttaggccataaacttgaggacaaagaaataccaaaagagtggaagagtagaagattattgaaattgatgattgatgattatgaaaattatatattttatattgttcaaatttgtaataactatttagttagtaggcctgtaattgaatggctgtaatgattcgtttttgatctgtggagctgaattaatttacctcatataaattttttatttatttttttgttcagcttgagattttcatatctaaattttaactacgattgaaggttgtaacccgacccaacccaacccaacccgtaatttattgggttgggttggtttgggttgtacataaaatgtaaagaccgcttagt

SEQ ID NO: 34489 - DNA, 1611 bp, Cannabis sativa
  modified_base (460)..(467): a, c, t, g, unknown or other
cctattatatattatatataataattattttaaaaaaatattattagttaatatttaaatttcagaaatcaaacattaatattaattaatccataacaatatacactattatcttaaataaaattataaaattgtcttaaaaaaactttaaaacatgtaaatttacttaattaaaaaatctaattatcattgttcagataagtgatttctataaagtcatctgcattcgagctaagtcttgaaccatcaattatcacacgagagattgagaggagagccggcggggtagggtaataaggttgttcagattattgcgtaggtaagatctccacaaattgtcgagtctgcagacgaaccaaagtaggttgttgttgttgttgctgactttgtgcactgaaaatctgaccatacataggttgttgtggagatcttcctatttgaccatacacaggttgttgcnnnnnnnntgacccaaattgaccgtacacaggttgtggttgtggtgacccaaattgtccgtacatatggtattgttgttgttgcgatgagcctccaaaatggccaaccataggttgttgtgtcagagatcctcctgtggcatccagaaaaaatataggaggagactgtgagagatgcccgaacatgtaatgtaattgaggcgactgtgaggagccagcaaacatgttgagagaattgtgttgttgttgttgaaagaactgaggcatttgaggcgattatggttgttgaaaaacttgttgttgtggcattgacattggacgtgggattgaagtggacgcactacctttctattgtgatggtaaaattttttgtaaaaaaatatcaaactgtgggtcatgtagagaagggtcactggaggtgccagactgatcaatcttatcacgcatttttaacataaactcagcaaaggctcccatatcttccgactaatggatggagaagggccttgtgattgagcttaactttgagttcgggaacttgttaccgatttgtatttcaatttataacccactcctctttgatagtctgatcgattcccaagaactttaatcatagcttgaaattgcttgtatttggtggaagatccatctcgggaatcatttctgttcccgtcatgctggaaacctcttcaagcatttgctcctcatcaaataaaatattaccttcattcattcattttaaaaatattataaaactcagcaaaaatttgaaacttacttatagttctctgcacgtctcactaatccaagtgtcctttgttccttttttaaggtggttttttttccaactatgaattacatagtcttcagggacgtcctaatcaaaaatagggttagtttgtgtaatttgtaaaaaaatttgcaaatagaaagttaataattttacttacaaattcattatgagacgctgccatcgactttgtaccttgcatggaaaaatacttcatttcctttctatttttcttgttttgattagattgggcaataaacttggggctaaaaaataattcaataatttgcttccagctctttgtagagcagtgatcaggtacaacattgataacactttccaaatcatttggatccccagaat

SEQ ID NO: 34490 - DNA, 2259 bp, Cannabis sativa
cgttggccaaaatcgaggtcaacattttggtgctttttttgagagaagaatcacaacatcactttttatttcaaatctaatcataggcacaatggtggtatagactcgtagaggcgtggttgattcggaaaatccacaggcagtggatcctgcactgcagaatccagggaatacaagggttccaccaaccacaaatcctgaacagccatcaactgtaggtcacggtgtgacgactcctgtgagtggaattgcgcctggtgtgaaagagactagaaataccagttcagcagccaatcagagcattccaaacactatcattccgcccgtaacaaatgttcgaacaaccattggagatgacaccgaggtctagaacctccatcctgctcttggaatcatgcaaggtcataccaacaccctgcatcatgatcacgaggaactccgtgccgcagtgaatcttgcatttgaagagcaaaggcacatgttcgatgaatggaaggataaagagatggaaacgttgagggctcagcaagcagccattgacgaccgaaccaggcaggccaccgtgctgatacgaaaagcctatcaggctaccagtcaacaacctacaaccgttattctcctgggtgagacagactaagatctaactctgaacacttctcaaactctgaatggtcagccgtccaatccccagtcacgggttctgcctgtgggccaagtggttggcgggcagaccctgtctagcaattcatcaggagaagtcatacctaataattccacccaagttaatggtgtcagccaacagattggccaaaccaaccagtcactgagacaaccggatgtttctatatttaatcgattgggaacagttcatgatctcagagatgatctaaacagaaggagaggatttgacgagcagcatgacgtgcctgtcatttagcacggggctcgtgctcaaaatcccactcaaagagatgttgacgtgactctggtcgaccaagaggctgaacaggttaatccaaccgtgcaggcacagttggaggagctaaaaaatatgttccaaggcttggccgatcagaataataatgacctcgagttagaccgagcacgtggatcccctttctccccagagatgaatgtcatagagttgcctcacaagtttaagatgccgatcttgaagatcccttatcccatctcaagtattttgaaatggaaatggacctggaaggagcacgaggagatgtatgttgcagagtttttcctgccaccctctcagaggccgcccaacaatggtatttcaagtggacaccgggaaggttcaactcatggaaggctttctcctcggaattccatgctcaattctcctcttctcgccaactttcgttgcacttagaagacttggttgaagtgaagcaaagactaggagaacctctccgagcttacatctgcagattcatgacgaaggcaactaaggttgcatggttgacggaagacgggaaattgtccgcgatattgagggcattaaagttcttgaagagctttggaaggacatcaagaaaaatggaccaacagattctatgagtgacttccttgatcgtgcggatggttttattaagcttgaagaagccattcaacgagcagaggttgaggaaaaacctagccagccaaaattccctctgctgggacatccgtccagctccctcagtacccaagcagttcaagttctagtggtaaacggtccaacaacagcaataggcaaggtaatgggaaaaagggaaagttcgccggcaaaattgagcagaatcccagggaaaatcccaaccaagtttactgctttctctgtcttgatagaagatttagaaactatttacatggctacacaatcattagctccgcattagaagcccgcacccatgaaaaaagacgtgagcaagagagacatgactaagttttgttattttcatggggattatggccatgacaccaacgaatgcaacaacctaaagcgagaaattaaatttttgataagaaaaaataatctgcacgtgcaaaaatatgtcaaggtccatcaaaatcaaaggggcgataacaacaaagatttactaccaccaccagtagatggacatctgcaagtcattattggaggtccgcacatagctggagattaaggcaaagcacgggaaaggtatgcccaaatagtacagcatgagcaagaagaagtagttctggccgtcgaagaaaggaaaccaaaaataccacggg

SEQ ID NO: 34491 - DNA, 1932 bp, Cannabis sativa
taaagatatatttttattttaaattacatatgacgttgatgtcacaacagtctaaacaaccacattatttaaagaactaatttaacactgtaaaaaaatagttcaaaaaggccaattttaataggttgaaaaattgggaggaccacaataatacatagatcttgggtgacaaaatcctaaatagtgttttttttttctttacattttagtactaagcccacaaccagctaccaattttcctcgtttgtcattgtatttcttcaagattttgatgtatactggttcatcatagctccatttacaaaggtatcgaaaagagtggcaactcttgcaacattctcaaatgaatattgagacttcaccaagctcactgtggatttatttattcaaatgctcacaaccaatttttttttttttttgaatgaaaataaattttattggacataaatatccgctaaaacaatggattaaagagcaaggggaacatcgctctcagtaaaacgacgacttgaccaataacaagtaccacgtgtcatacaatgtgcggctttgttagcagaccgtttaacatgaccaatagaaacactacttaaagtagataaaatagattgacaatcttgaacaaatacaccaaaaatagaaggcatagatacctaactaggaatagcttgaacatagagttacactaaaaaaaataataaaatatcaaaaaatataaagtagcaataataacaataaacaatcattaatataatatcataatagaataattttagagtaaatatattttttatacatctattataatttaaaataaaattattagttttacgtaaataaatttacaaaatatgtgcatatattttattatgatgtaattattcttatataaaagtatactttgttaatacagaatttacaaaatgtataactaattacaatttaaaagttattcttatttataactgacccaaaatttagatttttctataaaaaattagaaattattcttaaatagagtattcttaaatagaagttctactgtatttatatttatcatttcatcaaatccaaaggatttttttttcctcataaccaattttaaataagtaatgtctaaaatagtacagttcatacttcacaacacaaaaaacattgggagaacgcagtaatgatgtgagtagaaagaaaaatgcagctaaacctgttgtatgtgatgagtaatcatcaatctcttttcactagtataaattacagacttgtgaaattatcaagggccaaaaagagtttggataaaatccaatctattaaacgaggtccaaatacacacatttttcctttgcagcagatggatgaagatcaagtatttcatttttcttgccaccagtaactgcaggctgtaacaagctggagctagaatgtaatacatggttaaaagattaaaaaaacaaaacatatgggggaggaaagaaccacctaataaaagtttatgaattatatttgcatatttttatttgtttaaaagcatcaaactgatccaaaaaactgttctaaggatggggagctgaacacgttagaagcagtccgttcagttctggtaggagagatgtgaagctcgtacttgataaatctctgtcacaagcaaacacaagatttagttcacaagctttggtatcaacagatattttggtgggacttaatgaatgaaatgagtaaaaatggcgaatttatacagctaactgtgaaactatctcaagattcgtgtcgatatgccaatctggctccaactgtcgaacaaacgaggcccttccaatctctgtgctacagaagagaacctgaaaatgcaccaaagttattaagttgtatgttaaataaaaattgacaagccatcaataatcatgtctagaaaaggagcatctcgacaatttgcta

SEQ ID NO: 34492 - DNA, 1263 bp, Cannabis sativa
taaaattagtataagttcaattatcctaaaacaaataatattgatatttatatatatttaaattaatctaaaataaataatattaatgtttatatatatttataaaagtaaccttactaacatcattaaatttaacagaatattcttatatttataaaatattatgttaaataaaaaaaatcgttaaataggcacattttatatataaaatataaaggaatatacaaaataatgtaatgtgacattctaagaatctattaccctatgttttcttttttgttaatttttttatatatattttttaattaactttgttaatttttgactcaatattaaagagttctttagtagaagaaaaaaatcccacatggtttagaaaccattaaggaggttgtagtataggttatataagggtgtttagtaatctttgtaaaagttgtgtaatgggtgattaatagtattaatctagcctacttagtcatattttagtaaaatatattttattttattttctatcttagtaaaaatttaaaattgtaaagataatatatattttttaaaattttatgaaataaaaataaaaatattttattaattttttaaaaattttgagttttttaaattatatttgttttaatgtttccaaattagttaaaacataaacatttaaagataaaatcctttaaaaatattatttgagatttttataaaattgacaaattatgatacaataatttttcttttttacataaaatttgaagttcccacaaaataactaaattgaaaatacaattataagaattatgagaagtcaattcatcacttcaaaattagcaaagtataagaaaccactttgaatatatataaatatatatatataaatacacacatatatatatataaccatgagtggacaatttacaaattttgaagaagaaaaaaatcattcaattggtatttatttaattttataattattttaaagttttctagataactttgctaatatagtttcacagttttattttttaaataatcttacatggtttaagagttatttttggtgatgcttgtgagatataaataaaatattttttattcgtttcgttttgatttgtccaaaaatatatgagtgattgataatttgatcttcttcaattaattataagtttattattattattttgagtcatcaaatcaaatctatatatttatctaatatatatttgaggcaacatccaattattttaggattctattttt

SEQ ID NO: 34493 - DNA, 2307 bp, Cannabis sativa
  modified_base (102)..(104): a, c, t, g, unknown or other
ttgatattttttagttttttaattttctttttctagtttaactctattgagttataacctctcaattagaatataatttatttggtcccaagtgtattcttnnntagaggttctactgtatattgaaagtgtttataataaattgttaacaaattgtttgatgctataaatttatgctgattaagaataagaagaacactcaaataaaaaaaaaatcaaaaagaagatacaacgtaccttgcacgtagttgccgtctagttataaaaaatatatatacacacctgtgttaatttcctatattagaaatattgatattaaaatatagtttatgtatattgtcatgtgtaagtgtagtgtttaacaagtaatagaactgattatattgattaaaagaaaatcaattgaaatatcaaacagaatggttaagaggacaactataaaagtatgtgaaaacttcatatgaaaatatatgttttcctggaatttatgtcattatagtctttattgaatgggtaataacaaataactgatgaaatcatagttgtaattaaacacattgagtctttaaaacagaaattaagagatttggagatgtataaacaagaacaagatactgaagttgctttattagaatatgatttgaagactttattatctgtttgtatagctgctacaaaagaacttcaattcaaggtgaaagacaatttattggagcttagtattcctcctaacgttgaaaaaaattgagatatatttttttaaagtgatttaaaaactggttgggcagtaagtatggtgaagcagcagagatgatgttgcttgctaccagaaaggttcaagttttgtgtaagcattttgagaaacatcaatgaagttgcagcctctattattgtagatttgctaaatgatttgataaaagctataagattttctgagaaaacaatttaggaaaatgatctaacacaaaatactatttccctatcaatggggatagttgtttaagcttttagaacctcatgtattgagctgaggcttctaatagatgattatcaggccaagagggtgacattgaaggaaagagaggccaaagttatatcatttcactaatcattgtcgaaaaaagaacttataatgaagagctcataatgaatttataatatagggctcatagtgaagaattcaattaaaaaatatatgtcttaagaattcttaccaaacataggctttgagaagcatgctacaatatctccatttgaattccttagtatggctccactcccaatggttcttgagctttcatcaatagccgcatccacatttaatttaagctgcccatatggagggttgctccaattacttgttgaattgcacgcagaacaattagtaaaacttctctggttccatgcctttatatgttcctcaaataacctcttaatgttggaaacaatttgggataatggttttgaagtcccaccatgagtgacattgtttcgttccttccaaatagaccaggatgtgaataggaatagctcgaactctgatttagatagtagctcatatgcctttaaaattaccatttggaatgacacattgaatattacattttgtaaaatatcgaaatccaaggattgccacacctttcgtattccctcacaccaaaaaattgcatgtccatttgtgtcatttgagtagccacataaagggcaatttgaacaagaactaacattccttttatacagacctgccaaagtgggtaaagcttcatgaaatcctttccaagcaaaatgtagcactttagcgggtaaatgtaacttccaatatttcttccaccattcagaaaagacagcactagagggcctgggatcagcagtattctcacttatggccaaattgtatccacttttgactgaataaactccatctcttgtgtaatgccaaaaccaactatcattcttatttatcttacttattggtattgaaaaaatacactcctgatcaggcgcattgaagaaagcttcaaccattggtttattacatccctccctattatcaagaataaaatcattcacacacatattagtatgtgtattcgttaatgttgaaggaataaaagttgtagcttggggtaaccatggatcttggaatgcttgaattgtatggccagtccctactcttcgccgtaaaccttttatcaacaaagctctttcacacataatactactgttgactggatttttagccaaccgacgcggagtcgtaataaatgagatttaaaccaaaatcacaataataaatgcaattaataa

SEQ ID NO: 34494 - DNA, 3281 bp, Cannabis sativa
gtggaaggtttcccattccatttcttacttaattattcaaattttattttagtaactattaatagttagatataattggtgcttaagaataatactcttcacaactaaatacggagttttgagccatattatttcagagcaatttgcggctaaattttcgtatgttttaatttttattcacttaattttttattttttttttgtgtaaaacttctttatgttttaatttttatacacttaatctctttatttttttttgcggctaaattttcgtatgttttaatttttattcacttaatctttttatttttttttttgtgtgcaaaacctctttatattttaatttttatacacttaatctctttatttttttttgcggcaaaatttctttatgtttatttttctttacaaatttgacataccagttaaatattaccgttaaatatcaactggatgaccactgtatcgacctgtgtatatgtaacagtaaaatctcaaaatcgatacagtagtaatccaattagtatttaatggtaatatttaactgaaactttaaattaaaaataaacttaaagggattttacaactaaaaaaaagataaagaagttaagtgtataaaaattaaaacataaaatgatttttgccaaaaaaaaataataaaagttaagtgtacaaaaattaaaacataaacagatttcgccgcaaattgttcatctttttatctcccattctttatgaatcatatctatgaatttgtgggtaccctccaataatgcaaatttctatcaccagacaatgtgaaaggctaccactccattctctctctcaagaaggaaaagatcagcttcaggacttgacttggagtcaactttttttcttttaataagaaaagattattgctacttatatctactcttccattaaaataaaaaacaattcagttagtttctcttatttttcaacttggtcctactgaaattttccatatatttctgtccatcaccatcattatcctaagcactttcaccatccaattattaatatatattaatttttattttacaattgttaattgttaatatgcattgttgaaaattaaaatttaaaatgttaattgtgtaataaacgaaaatacagaactttgttttcctataaatatatataaattgtaaggttgagcatcaacttgttgcacatgtttttgaaataaccaataaactatacattgggatattaatgaaatgataacatataataatacaaactttgaaaattaaaatcaagtgtaaaagataatgaatatgttccactaaaacgtaaagtttgtaataaattaaaataaaaggctaatctatataatgtggtcattcgtctccatagctttttacttctttcttggtctgcatgaaaatatatggttttcaattactcatggattacttaggcctataaaataaattaattaattagcacaataaaagctaaaagttaaaatttttactagatttaattattcacaaagcctaatacttaaacaaaataattattttaattatacgcatgaatatgatgaatatatatacataaataaatatataggtcttttcctatacagttcagatatgatctaaaataataccatgccagaatttttataatataatactcattttcatcacgtttgtttaggtggggatcgagccccttaaattatttataaatattatattttatatataatatatataatatagtttttattttttatatataatagtaataatcatatggaggagaagattcctttttcgttgctgaactacgattaaagtttttgaaaatatgtagtgtgtccttttgttttggtacattttttctttttgtatttttgtaaatttttttaaaaaaattgaacaaattataggaagttataaaattcaaatattttgttgtaattgtaattattttttatatgcatcataaataattatagaaaaaaattggactaaactactacaatatatataattataaaagaaattagactaaatatttttctggtgtatggttaaccaaataaagaatgtactaaatctttgtgtaggaagatttatcttaaagtttatttcatttttattaaaagttagaacataactgtaatggaattcttttaagttatatatatatatgtggaacactttattattctacattgatagttactaaataaatttaactacttatttttaaaatattaaattagtagaatttgaatttctctgcttaattaagttatttaatcaaaaaatatttatttttacactacaaatattattaatatacaaaatatttaagttaaattcaacttaatttttttttgtcaaaaaaaaattttccttaatttttttttgtcaaaaaaaaattttccttaatttttttttttactaatagaacaactcaactcatataatataaaaattaaaaattaaaaattaaatatagacattcaaaattttctaatattaaaaatatgtaagttatggttttatatatttatattttttatattaaaaatgtctatgttatacctaccactgtatttattgttaaatgcatgataaattccaaactataatcaattattatttattacgtttgaagcttttgtcgtccatttattaagatatgtctaaacattaaccccacaaaaaagtttgtgctttgaattattattatttttaataaaataatttgtagataataatgtaaattcttaagaagacataaccaatcgtagtgtgcaaattctcatgatttagtttcggtttgtcatcatttataataaatatcttataattagctaatgtagggcatttttatttgggtgccataataattaagtttcttttttttaagttgtcataataatgaagttattaattttttttttccacataaaatctacttatatttctaaattctaatattcaagtgatgattgcactttgttttttgaaaataaaccctcaagtgatgattgaactttgagagtcttatattaatagaaaaatttgactttatatgtatatgttaggttaaaattaataatcaaaacttaaactactaatattttgtagaaaaattatactataagaaataaataattttttatatgatgttatatattgtaatcatactaagattttgttgtgttcaaagataattaatggaacgcatattttgttcataagggcattaatcttcaaacaatgctttttttt

SEQ ID NO: 34495 - DNA, 1588 bp, Cannabis sativa
  modified_base (261)..(268): a, c, t, g, unknown or other
tatttttaatatataaatagtatgtatgctatgagtgttatattaatttatatacattttatttttcaaataattaagatgttcttctaaatactactaaaaaaaataactagtggcagttgtgccatttattttattttaataaatattagtaaatttatattatttttaaatttattataaataaatataagaattagcaatacaattactaaaattatttttttaactaacaaaacttcattattattattattattnnnnnnnntattattattattattatgccactacgaaaatattgtatacctaaataatttattcacacaaaatataatttaaaaaaaattattaaaaaaaaaaaaagaaaaaggaaagtgataggaattcaaactaaaatcaaatactatttatttaacaaaattaacatttaaaatagtgattttgcaataaaaaaaattatacaaaaaaaaatatgtgtaaataaattgtcagtagaagacaataataaaataaatattttaaatttgaaaattaatacaaagttatcatgataattattattaattattgatttttagacagagacagtcatatagtgcaccctattatttataaatttatttacggataaatatcattttggattttcttttgtaaaagttactaattggactatctattttgttaaatgacataatagaccctatatttttcaaaatggtaaaaataagactttgaactcaatttttgacaattttttttaatataaccaacttgaagacaattcttaacatgaacagatacagaaaatgtaattagttttgtcataatatctctagatcagattattattaagttttatttcaataaaaaattaatctagtgtcttatttatactattttagaagatacatgatttattttgttatttaataaaacaacgggttcaattagtaacttttgtaagatacaaggttcaaaataatatttatccattattcattacttaaaaaaacttgaatcctaattttgttttcaaaaaataacaagaaaagaatgaacataaaattaaatattttctatggattattctcgtaaataagcaagtgttacaataattaaaaaaaaaaaaagcaaaagttaaaacacaaaatttaggactctaaatgaaattgagttaaaacatttgaccaattttcctttagcgatttatttgctcttagtaaaatgtaaggaaatataagtttgttattttttttataaaatattatttaattttattattataatataaatcaattatatctatgttatcatattaaaaacctttttttttcttttattttaattcaaaaccatagtcactagtagtatcatgatagctttttgttttttttgagaaaaacatttataaataaaagatagaattagacctcatggtcgttacaaataatgttctccgatattatagatatttcaactatacaagataagttttgagcatgagttcatttagtcacattataagtcgcaaaattataaaatcttaaaataaaagagaaattaacactcaaaaataaattag

SEQ ID NO: 34496 - DNA, 10589 bp, Cannabis sativa
tatcattatataaaattaaaggcaaggatgggcagatttcgttggcacaactgctgagacaacaaaatgccaatgccaaacagtatgaatccaaaacatttcttaaagtcagaacttcatattggctacaatatggtagagtgggttacattgtttatttggttaaaacccatgtttagcaatcgggagctccccaaatcacaaaatcaaactttatcagattccatttaacacaactccatctaatttcgaattttccctctctggctcttaacatcaaaaactatagccccttttataaataatattacaagtgggtttgaaaagaaagagagcacaaaaaccatagcaaattgaaaaggaatcatccaaaagtacaaaaataacccatgactgacttaagtgagcccttaccaagctagcacaatatttagagaggaatttgattcttttaattaacaattaatgaatccgtacagtggcaaatgcaagtttggtttggtcaatgggtgttgaccataagcctgcatttacattattaaaatatgactaatcttctagacatgattaaaggcataattaataatgaaagtagtattcaactaaaaacatccctctcttaattattttatggataggtcttcccttccagtcccaccatcagtcttaagataacaactcttaacaagcatccaagggatgccacccctacctgcacaaacaaacatcaatcatctatcttcaataataaacaacctcccaaaattcaagaactgtatatatgctttgatttgaagttttctacttctaggataaaacttcattccaatcataaaaataaatatttattgcaaattttgttttccttataataaactgatttctttgtaatatcatttttttagagataaataaaatatctatcagttggtcaatagaatacataatctattacaacaaaataatgctcgcaaagcaaaatagattatactcattcaagttcctttgatttattccaatttatgtcattcaattttatttcattcctacgctacattttttttttcactctaaaccaaaaacataatttcacatacataaatttaattgaaaaacacatgaaaaaactagcataactcaagataaatagtgtgcacaatttaaatgtattccaatcattacttccataagtataactcaagataaagaatagtttgtaagaattgaacatgtaacaactagcatttgcatcttaattaatcacatatatcatgagtgaattttcattttttattaccaaaatggatgggtcatttggaagtagtagtagcagtagtagtagtggtggtagtagatgtctttgtagaaggtgagccatcagtggctacaacaactcctggccaagccctgcattgacaatgttttcccttttcaatttgtttgtacacagaaggaaggtgctgaccacacccaccccagctgtattttttgcacctttggcattcaactttgtagcacattttttttacttacaattgacttattatgaattacctctgcttggtttggtttggtttagttataaagcaatttcccacattgatataatcgtctaatctttgtgtttattaacacctagtactgtactgtcctagagtctgtcaaaggaatcgattagcttagtttttcacttcatgaaattgttatcagaaaatgacacttcatgaatttgtgtcttaacccttgtgctatagtttcttgattggatcttctggaacaagaataaaatagagaaaggaaaattctttatttaaaagcaacgtgaaccttttgtcatgtattgtttatttggagataaaagaaagaatgaaaaaagtaactaggaactaggagttgagttcaagttcattgtttataaattgagaatgtaactaatttggtttggatccaatcgagtactaccaataccaactcttataaaatatttcctcttgaataacgcttctttttgcaaaataaataaataaagataaaacgtcatggtcggcttgtagtggaacctaatgaaatgaagaagacaaatgtttaatccaataagagttttcttcattaaatgatactcactttcaattctttgtaagctattccaacgtagaaagaagagatttggttttttactttttggtagagtaatgctaaccatacaatgcaaaagaaaaaaaaaatcttaacgtgtacaattgattgtttgtatgtaaattgtaagtatccttgtcactacatgtttgaatattgacacaagaattccacaccaaatttggtgacataattttattgagctatagtgacaagactccattctgtttgtatttatacacttcgtgagaatcatcacctcatccaatgatctttcgccacatgtcttgatcaaaatatccaattacttctcatatattgtatatatatttcctattgaagttcaccaattctatgtaaaatgcatgaaaatgataaagaacaataattgatttttaaataattatttgaagaagaattagtgctattttccttagcttttatttaaaaggctgtttgtgaagatcgatgattccacaaagccaggcaaattatctaatgttgtaacaacctgttttagaataagtaacactaacacccaactttgctaaacaaggaacgctttactttacagcctattttacaatttatttaaatacccacgctagaataaaaaacaagagtagaaaagaaacgaatatagaacaactctaccagcataattctatattaaaatttcataatattcacaccaaatcttctttctactaagaatcattcccactcatatcaatctattaatctcccctacagttttcttaagagcaagtaaaaataaactgtaaataaacaaataaaatatatatatatataagcatgcatttgtaaatccattacctcaatattagaaatgttaaaagttgtaccaccgcataaaagttagtaaagaaatttaacagaatcagaacctttatactcaggtttcttcattcgcacacaatatagaatcctagaccttgaagagaagctgtcattactttttatcttcttcagaatctaatgctggtttcttggttgggttcgggtctgctgtgatcaccattcgctttactcctcttcctaccactccaagatgtgtgaccccagtagaagacccactagcttgagtagtagaaatagttggtgagtcgaaattcccattgttcttagagaagctcatggtggaagagtctggcagcacagatgaagatgcattcttctcgcctgctttagaattggcagctgcgattcctagaatttcagaaagaatcgatttcgggtttgataccagttgttgcaaatcttcgagctgcaaaaaaaaaaacattaaatgattaatttgaaaactttcaacaataaatatttattttctaattcaatttagagctataccttcttttctagatcaccagcaagaccggttagtgtttcaatctctgcctgtttgtctgtatcagaagtggatgatgaggatgttgattcagatacactatttgcttggtttttcagccgctgtgtccgggcctggcaaacagatatagccttttggcagtattgcatggcttcttgaggctgagaaccaatctccaaacacaaacatatccgaaaatttctaaattaccccagttagggatttaagttgaaaattgaaatcatgtgtacagcatcattaaaagaatatagctaaatagacttagaatggaatgtcagcaatagctgatcaaaggcctataaacaacatagtattttgagtaacagtgtcctatcatggaaaggatacaattcagctatatgtcggctgtcaggttcaaccaagcgttccaacatggatagtgctttctggtagtcactaagagatgtttcaatgtcctctacaaagagaacacaaataattcatgtttaaaataattaaaggctctggaagagatcacccaaaaaattaagtattcagcaagtcaaatatttaagttaaaaagaaaaaaatatgaataagcataaaggcacacctctttcaagtgcaacttctgccaaagttgataatatgtcaactttcagcatcgtgtcaccggactgtttctcagcaattgctctagcaacatctaacatcttccaggccaaatcaaggtctgattcatcttcatctgcttcggcttcagcttcagccaggtcctcggcatcactgcccccatcagcgccctcctcattattttcattggaaactggctcataagataacaacgaaaaaagtaagaaaatgtgaacatttaaagcataattgcaaccttaggcaggtgcaaaaacatctgaaatgggagtttgtaagataaaatatcaacagatgcaaccaacaacaaacgatcaagcatacacccaccttctttagctgcttctccttcttgattatctgctggcgcagaatcttctccattacttgaagcagaagccactgaagattccccatttgagacattcttagcagattcatctttagcagactcttgttgagattcaactcctttcttgggtacagaacccaggggatcagcctcctcttgagctttgtaaagcaaagcacatccatatttatagtaagttttgatacactcaggagaaagctcaccaaagcgtccaaccctgagtttttgcaaaattatcaccaacaagtactcctaagtcctaaaaaatgatgggatatatgacaggaagtaaaatataaagtttcctaaagaaattaagtcatatatatatcaccaaatttaaacacaaaaacccacagaagcattttcatacatgatgagattgagaacagattgggtttaaaacaaacctactatgagatatgaaacaattttttaaatgtttagataaccaaacagtaaaataaatagtttcgtaaggaaattaagtcatatgaaagcagaaattaaagtcatatatatgtcaccaaatttaaacacaaaaacccactgaagcatttttcatacaggataagattgagcacagattgggtttaaaaacaaacccactacagcatatgaaacaagcatcatcagctcagagataaatcaaagctcagcacccattactgctagataaccaaacagtaaaaaaaatagtttcctaaagaaattagttcatatgaaagcagaaataaagtcatatatatgtcaccaaatttaaacacaaaacccacttaagcatttttcatacaggatgagattgagcacaaattgggtttaaaaacaaaaacccactacaacatatgaaacaagcatcagctcataatgtttaaataactaaacagaaaaaatgtgaaaaaacaaatgtaacctgatttttcataatgtatttgctcaatagaaaatgtaatacataaagatcgaaacacagtttctaaacctcatatacataaatcggtgaaaaaaaaaatcagctcaaatacttaataaaataaaatgagcaaagttcatgaaattacgtgaaatgttcctatttttaataactaagaagaaaaaaaaatggaacctgatttctagggcacggctgaagcactcggcagcctcgctgtaatcagaatctttgagggcgttggaacccttctccataaactcatcggccaactggagtgaattctttgatccttcgccggagttaacgccaggagtgtcgtgaactgcggcggcaccgttgttgcaagtagactcggctcctccttgagtgatagattcaatggtggcctcgttagaaggctgagttttaaggacattaatgggtggagtattgtctacctccgttatagaggattcagacactggagcttcttcaacttcaaccatggcttcccacttctttgcttctcttctttcttctgttatttttttgggcaatttttttgtaaggaaaaaccctctcttttggggcacaaaaggtaaataataaagttgtgaaattacataaactacccttgtaatttacatttctttcataaatatcctcgtctcactctactaattatattttactcctttttttagaactgaaaaataaaattttagtccgtcttacactctaattataatttcatatttagaatttttaaaaataagtttgaattttttttaacatagattagaatattagagattttattttcaatattgtaaattatttaaaaatttacagaattaatatttgtaactataacgataactactatgaaaaaaaattaaaaaaagaaattctaacacatattttttagtaaagaagttgggtggcagtagttgtattatttcgagattagtaaatagattaacgaccctaattaaattaattaagaataaatgagtaattatgtcattaaattatataaaattaataattttacgcattgaagactcatatatgagttagtggtattgcccagaaagaaaaaattataattttattatatattgtgctaatagagtatattattatataatatgtttgttttgacttattgtaggtaattttcgacaaatcagcgcgatatagtcacaatcaagtattttaacacaaattgggttcgaagtttaaaatttatgcattatttctactttaataattaaatagtgttagactcttatatctaatttattttaaaaattacatatacatcaccataaaaaattatcaaaaaaataattttataaatatactaatgtatctctttcttctcaaacaacttgaaaggattactaaaatactctccatccttcctcaactccatgaccaaacataatctaaagaaaccaaacaattaaatggccccctctattcatgtgaactaaacattatataagataagttttcttcctttcaattagcatattaaaattttactctttacaattgtattcatttcttaaaaatgtttaatctttattccaattctctttttcttggtgtgttttgtgagttgtttatcaattattcaaacaaattttaactaggaagcaataatttggaggatgatgctggttaatgttggaattgaaggaaagttttgcttggggccgttactattattttatcaagatttgtagactcatgtcatgatagctttaatatattttcacttcatcaatattttcagtatttttactttgaagcatctaattgtatagcattgaattttgttttgtctaagcattaaatatttatgagttttaatacttgatttctaaggtttttttttttttttgaaaagtttgattcttaagtttgctatcaaatttttgtagattaaaaattttgttttgatggattacactttattggaattgataaattcataatttaaaaaaaaaattaattaatatttttattttttgaacattgacatgtattaaattatgttttttttaaaatttttaaatcgttaaatttttttcgaaaactattaatattattagatttaaatttttttgtttaatttcatttaatttactaatatgatgattgctaatagactaaattgtgttcctcaaactttaatatttataaaaacatgtctcttaactttaacatgtatcgaattatgtcatttaaatttttatccacataagattttatttaataaaattaaacaaaaattattaaatttaactattttgaaaaataatttttaaagactaaaaaaatttaagatacataatttattacgtatcaaaattaaaggagtcaaatctaaattagtcataacaaagtatatctatatgtaaacttatttaaagtaaacgacaataatgtccctaatctaacaaaatcgataacagcaaaaagtaagggtataaatgtcattacaggctcccaaaagattgtaacatataaatagcttgccctgtgctcaaccacatctccacaatccacacaccatctccaatggctgccacatcagccaccgtatcacctctgctcaacaccttcacgctccggcgcgtgcgcaatgaccttccgccctcctacaatccaccatctctcaaagcaacgccggcgaaaatgatgtcctccattcccagtcgcagacagcttctgttcttaattccggcaacggtgaccgcagtcaccgtaggggacagagcttcgatggctgcggacattccgctgtttgggataaggaaagggctgaggaaggtggagaaggaggcggaggagatcgttaaggaagggttcgaggcggcggataagggaatcgaagcggctgagaaagggatcgaatcggcggagaaaggtatcgaaagtgcggagaaagagattgagacggcggtgagtttcggcggcttagcgcaggctgcggcggtggccggagccgaggttttgggggttttggtggctacttcagttgtgaatggtattttgggaccagaacctaacaagtcctagcaatatttttttatatataattattgattgtaataataagtttttgtattttcggattatataaaatataaaatgttattatttagtaaatttctttagttttgtttgtaaagttgacatagttttaatgaaaagtactagcgagtattatttaatactgaaatattagtgcactcacaatctaaaatagttacaaatgtgcaatcactcgacggcggataatttttgcattggtctaaacccgctttaaataaaattaaggtaaatgttgatgtcgttatttttactttcgaagattggtttggttttgggggtgttgctcatgaccataatggccgtattatttaagctatttatgttagtaaacctagacaagtggatgcggctatggttgagatttatggcatcaagaagactctaagttggattaaaaagttggattaaaagaaaaggatagaatgatgtgcaacttgaaattgagtgcctagttgtagtccaagctttacaaagtatatttcatataccttctttttttgatttattaattcacgattgcaaactactcttagtctctttaaaatctattgagatttattttgttaaacgttctgtaaataaaattacttattgtattactcgtaactcttatttctatcccgttcgtatttttaccgagagtaatgcttcgactaattttttatctattgtaatggttgaagctttattttaataaagtgtctatttcctttaaaaaaaaatagttacaaatgttaaattatattatatacctaagattaaaaaaaattgtggataaagcacatctattagagctaaaatagctcaaaaatttatttcagatatagtgcttacttaaatataactaaaaaatttattgactttagtgtttagctataattttttattatttttataatatattttggtgtaagtgtaaaagtaaataaataatatataatattttattagataaattttccaaattaaaaataaattaattttttataatatataatattttattattttgtctgctataaatatattatttaaatggtatataaaaaaatataaagtaattaatatataatgtaatgtaaatatatgagataaattagagaagataaaatacaacaaaggaagtgtaggaagtatttacaaactcgctatagcttctatttttgaaaaataaaataaaatatggggacaacatataattttttgggaatcactaaaattgtttttttttttttttagaaaacttgtttagctaggtaattaaatatttggatggagaatatccctcttaattttttgaatcataatctagctgataagaaaagatcaaacatgaggagggttgtccttttggtggagtctttgccgaaatagagtatcatcttctgttttcttgcagctttgcaaaggcatgttaggagcttgtagaccttatgacagaaatgagtgactttagcttgatccgaggttggcttgaggaggttgtgaactattttgatagttgttacgcaaaaatatgaatagttacgcaagtgcacgtaatcaagtagtacttacacatgtgagatcgatcacacagagaattgaactgaataccactaaatcagatttataattctatttggtaatcaaaaatttgtaattgaaataaaaataaagattaacaagaaaataaaattatgcaataaaaatatttaatcaaagatgagaaattagggaaaaaaaatcatgttgatttaattacccaattgttaatatgttaattactattctctttctcaatgtggatgacagattataaaaattaacctaactcttttaagatattttaggccataaatcacatgttatctaatcatttctgaattagactaacatataatcaacattaagcaataatctcaaagtcatttaggctgtgcaaatactttcgtttcacatcaaaatctagtttatccaattttagtattcccaattctcacttttcagattttaaattgggatcataaagcatg

SEQ ID NO: 34497 - DNA, 3156 bp, Cannabis sativa
aaaaataggacttaggtatttatctactactcggcataaaacttcagtatttatggcgcaaattactcttaaattaattttcacaatttttttttggtaatgttttttttagctggtaattttttttttctttctaaaacaacacttaaagctgtacaggagttccacgtgcatggtcagatctaagagcaactgtagattaggacacaggtcgatccaacggctgtaatagcgtctttgattaggctagggttttagttaacgagggcagtatcaaaccatatataaacaaaccttcctcattcgattcgattgcggtgccgccatcattctacgctggtcgctaccgtcgttttcgtctttggatcatttgttgaattttttttctccggcggtgttttccgaagaccctctatcttcttcttcttctacctataaaaaacgaaaaagagaaaaaaatggcgcaggttcaggttgaggttcctgctcaaaatggtgtcacaaacgctgcaaatggtgtcgttcagatggtaaccacgtctctgtacgttggtgatctcgatgcctctatcaacgaaacccagctttttgaaatgtttagtcaaatgggtcaagttgtttctgttcgggtctgcagggatctgagctcaagacgctcccttggttatggttatgtgaattttagtaatccacaagaaggtcagtcactttacttcagtttaattttcatttcttgctgttttaattttcatttcaatagctattgaatttttatggattgtttctatggttctgggtgcttttgtttcttattattgtattgttgttttttttattacagcttctcgagcattgaatatgatgaatttttctgttgttaatggtaagccaattagaataatgtattctaatcgggacccaagtattcgaaaaagtggaactggaaatatttttgttaaggtacatttgttttattaagattattgtaatgtgttttttgttaatgttattgttatgattttcttaactaattgttacggaacatttgttttattaagattattgtaatgtgtttttttgttaatattattctaatgattgtgttaatttattctgttacttattttgtttgtggtagaacttggataaaggaattgacaacaaagctttacatgaaacattttcaacatttgggaacattttgtcttgcaaaatagctactgatgtttcgggtcagtcaaaaggatatggttttgttcaatttgacactgaagaggctgcacaaagtgctattgagaagcttaatggcatgctacttaatgacaaacaagtttttgttgggccctttgttcgaaaggaggaaagggaatttggtgctgagaaggtgaaatttaacaatatttatgtaaaaaacttttctgaaactttgagtgaagatgatttaaagaacatttttggtgaatatggagctattactagtgtagtagttatgagagatggggaaggaaagtcgaaaggttttggattcgttaactttgaagagcctgatgatgcggctcgagctgttgatgctcttaatggaaagaagtttgatgacaaagagtggtatgttggcaaggcccagaaaaaagctgaaagagagatggagttgaaaggtaaatttgagcagactgtcaaggagactgttgacaaaaatgaaggactgaatctgtatgttaaaaatctagatgatagtgtgactgatgaaaagctgaaagaattgttctctgagtttggtacaattacttcatgcaaggtttgtgttctttcctgcatttcattttgtgaaataagtagctttttttttttataattgttgctgattttacatttttattggagatatataggtcatgcgagaacctagtggcgtgagcaggggatccggatttgttgctttatccactgccgaggaagcatcccgagctgtgagtgataagcctacaggcagttttgttttttcactctgctttttatttagtgtttttaatcattttttgattttcttgttagtaattaccttctttttgttgagtttgtagcttgcggagatgaacggtaaaatgatagttagcaaaccactgtatgtagcacttgctcaacgcaaagaggataggagagcaaggttgcaggtatatacaaactgaaatgaaattcttgaaatcttcctacacatgtagtaggaatgtatgttataaaaataaaaaaaaaaaaagaaaaaaaaaggatagatgaggttggatccttggatctaccttttctatatgatgatatgggattactagaagtaagatggatgtgctctttttttatagtgagattcttttgtatcctatgcaggcacagttctctcaaatgcgtccacctgcaatggtggcgccagttaacccccgtatgcctatgtatccaccgggtgctccaggtcttggacagcagctattctatggtcaaggccctcctgctataattcctccccaagtaatctttcttgttcttgtttacctaatttttttataactagttacttatgctgtacgtatagtttattgggcttgcttgtggattgtctaattgataattgcctgttagaggtaaactaacttctgcaactaaacaaaaagctcatcttttgcttgttttgaatagtgttttctaaaattcaagatttttagtaagttttcagcagtagtagttcattttctttaaattgctgacaactgatcactattccatctttttttttccagcccggctttgggtatcaacagcagttacttcctggggtgaggccaaacttttacatgcccattgtccaaccaggacagcagaatcaacgtcctgggggtagacgggctggagcagggcctgtacaacaaaatcggcagcctccacttgtgcagccacaggtaggctttaccgtaaaatatgcagtctacgtagtctagcttttagtcacgatacccttgtaatgattggttctggttatttaatgagaagtaaaaatccattttcaatatataatggtgggttctggttattttatgtgttcttataatattaaaaaacccttttcgatatatatattttaatatactctgattgcaatggtggtaagca

SEQ ID NO: 34498 - DNA, 1320 bp, Cannabis sativa
tccaaataaaaaagattattagtagaattatttcttttcattgtgcacctactcaatttatatttatatataattataaagaaaacataaatgacaattaaagttggattgaatatttaaaagcatatatcattttctataagatacctttacttgttatttgatattcaccactgttgtttaatgtggactgctatttaattcattcctgtaaaattgctactaaaaattaattatagatgttattttctatcttaatgataaaaaaatgtatctatagaaatagtcaaagtaaaacataattcaatcaccttatttgtaaacatgatggatcatgtaataggtatagaatgagagaagaagaagagaatgataatacgtaattatctatgagagaggaagaagagaataataataactaattatctattttgaaggtgttttaatttttttagtttccactttttatttattgttacaaaataaactttaaaaaatgtcttgctaatttcaaaaaaataattgcttttaaaaaaaggaaagaagtgatttattttagagaatacatatatatatatagtaaataatgtacttaacgtgttggtatattctttactatctttttctttaaaaataaaagatatttaaattttgacttaaggaggccaccaccatatatagtgaattacatattaattaaaaaaaaaattatacatgataaaatagaatatataagttcttagggggtcatggcctctatacattgtcaaatacctccgcccctgcttatatccactacttcagagtgtagaccgatctgcaaggggtaagagatgatgtttggtgtagaatctttcctgctacgttgataggcctagatcaacgatggtacctcaaggtttgtcctgggtcaatatattcatggaaagtgcttgtgggtgcttttggaagtcagtttcctcaatccaaataacgctagatcgaacccagttatttggtagatgtgaaatagcaagacagcgaatacctcaagcattacattcaatagttcttagaggaagctgctaagaccaaaatacttagagagggcgccatggtgatgtcactcatagccaaactaaaggagataattcatctaaggttagaccttcatctcaaagaagtctacaccatgaacgattttctggacagagccgatggcttttatcaaacttgaagaagttaattcttgagccaagagcttaaaaaaccagaagaagaaattgccagactcccctgctcctgacactgaaacacagcgggcaatgggaaaagaggaaa

SEQ ID NO: 34499 - DNA, 945 bp, Cannabis sativa
tagaagaattccaacaaaaaaagtagaaaatgtatagggaagtttaagatgaaaaataaaaaatcaatatatcaatataaaggagaagtatatgtcggtgacatggcgcttcaaaatctttctaattagttttatttgctctctccttaattctctcgttgttttaattttttattaactataaataaatattcattaattaaatcatatacaaattaaaaactcaatatttatatacaatatttagttattaagtttacgtaatataaaaagtttaagtttacgtaataaagtttaagtgtacctaatatagctttttttttctctctctcttttttttttttcttctaaatgcatattaattttcatttattagtataaatatctacttaataatttatttaaatttcttaaactacaaaatcttaaacctaattatttttcatgcaatgtttctctcaactctctaacaatacacaagtccattattaatctttttatattattattcctcaaatttttttatagtcacctttctctttctaattttatactttatactaattttgtttagttatccgtagatttatatgttcattgttatttttttttcttttaaaaaattattaatattattaattttgattgataatgatcatgaaaaggtcaatgttaagtgtattagtagtattatgtgattagtccctttctattttaattttgtctattatgatatatgaataaatattgcattatattatttacaaattattattgttgttattgtagtacttactacttagtatcatgctattagtctattggaagggatagtgatgactataagtgaaataggataatgagaacatctttgaatatgatcaagtaacaactataagtgagatacggtgatgatagcggttttgaatcaaataattttctaaa

SEQ ID NO: 34500 - DNA, 981 bp, Cannabis sativa
tcaataaagaagcaagtgagaaaataagttttttgatctctctcaaaagcttacaaatatttctaagtatttctccctttgttcttagtgcacgaggttgaagaagcgatcctccttttagtgaatatggctcactatttataaagaaaaggctctagcccttttccatttaattaaagaatattgaatatattttttcctaaaataaaaggagaaaatcatgagaaagggaattcaagcataaaatctcacgaatctctcagcctggtaatcatatcccacaaaaatagggattctcaacaagctataatcgggggagatatttgaaaaaatatctctaaagatcttcactcggtgtatgctactgtccggaaagtgacacttgtctggcatgcctgatctactacgaggcttggggcctgttcggatggtaaatattgaaggttcaaacttaattgctctgaattgatctggtcagaattataagtaggtatactctgtccaagttgagatgtacttcaagaaagcgtatcgtttcgtccgtctgtctaaatgacccatccaagtaacttgttcccatctggatatttctctgcgtaatatctttcaagctacctgaaaaggcatacatcatgtttcagatgttactcatatgataccaaatgccaaatgggtattgtctgtgcatgtttcgtttgacatcatccgagtggactatttatttatcatttatgcgtccattgctaactttacttgccacatatcgtataacatcatgccatgtcatcaagttgattttcacgaaaacatgattcattttgattaccagaaaaatttataaattcaaacccacaaatttaaagatttgatagcgattctaaagggattttttctataataaattaaaaagggaagcaatttacatttataacctaaaaagaaaaaataaacataaatagaaaacaaaactttctatttaca

SEQ ID NO: 34501 - DNA, 1874 bp, Cannabis sativa
aaaatgtatcccactttacaaattatgtctactattgtattaggtgtccaattttattatttattaagtatacaatttcaaatttcccttatgaaattaataaaaaaaactaaggttagagaaaataccaattataacaataaagaaactattttttccacttaaataatttttatatgaatttttgttgcgttgtgaaaatcggctaagagtgaaagttatgatacatgtgttgtttatttaaatttaggattttattaggattaggaatatttataattttttataattttatgaaattaaattatacctctatataatagtaatattaatgatgtatttatgtaatttaatttttttagctatttatatatacatgtgtatacatatgtgtatagatgtattttttataaataaataaatatatgaagatttttatttaaaaaaatagtaaattaataaataaaagagaaaattatggagattaatgaattaatatttataatttgaataaaaaattaaaaaaaaatgagagaattaaggatataatagatacatgtatttgaagagattttagagcgtcatgtcatcgcttcatacttctcctttatatatatatatatagatatatatagattgtttaatatcaagatcactcttagcgcggctccaataaacatgcaaataaataatgtaaaactaaaatatgactctcttagtaattaacacacaataaatattttttattatgcaaatcaccataaacgtattgtatttaattgtagtattaaatataatccttttacatttttttttattgatttgcataaaatataatgataaaattaatgtaaagttattattattgttgtattttaataaaattattaatttttgtatgatgttttgcaattgtatgttggagcactattaaaaattgctacaaatatttaaaaaaaaattaattattataatattataatttaaagaaagaaaatagagaagagatgagaattttcttagtatttttaatctaatggtgatctcctatttatacacatatgagccaaatattaggaaattgagaaaaagaaaattaagaaaaagagaatatggattacaattaatggtaataaataaaatatttggacatccatatattaattaatatttataacatgtccctttaaatgtccataataactgtctcattaaaaatttcgcaaagaaaatctagtaggagaaaactcggtcaaggaaaaaagagtgcagtatgaaattactctccctcattttggcattcatgaagatcttttaatcgtcgcattccaatcttgtgaaccatcttctcaaaagttgatgttggtaatgactttgtaaataagtctgcaagattatcacttgatcgaatttgttgaacatcgatatcacaattctcttgaagcttgtgtgtaaagaaattttttggtgaaatgtgtttcattttatctcctttaacgtacccttaagttgagcaatgagaattattggtacttctttattggatgttaatccacatgtttctcgaatatgttgtgtcattaatcttaactaaacacattctcgacttgcctcatgaattgtaagtatcttaacatgatttgaggaagtagccactagagtttgctttgttgactgcaaggatatatcagtgtcaccgccagtgaacaaatagccagtttgagatctggctttatgtggatcagataaatagcctgcatttgtgaagccaataagttgtgaccaacaattattagaatagaacattcctttatcaatagtaccctagagatagcaaaatatgtgcttagtccctttctaatatctatatgttg

SEQ ID NO: 34502 - DNA, 1479 bp, Cannabis sativa
tggactcaattatatctgaaaatcgaagtgcctttatcctaggaaggttgatttcggacaacatccttgtttctttcgaggttttacattaccttaaaaggaagagaagggtaaggatggtttcatggctctaaagttggatatgagcaaagcatacgatcgcattgagtgagattttcttgaggcaatgttgaggaaattacgctttgttgaaaattggattcatctcattatgacatgtgtaaaatctgcaaaatactgtgttactcatggtaataatgaagtaggtccaattattccaacaagaggcatacgtcaaggagattcgttatcaccatacctcttcattctatgtgcggaaggtttcactgctttgctccggaaatacgaacaaagaaggtggctacatggatgcaaagtggccaacggtgctcctagagtatctcatatgttatttgccgatgatagttacctttactgtaaggctactgaagatgaagctcgccgaatccaagaagtattatgtcaatttgagcttgcctcgggacagaaggtgaatttctccaaatcttcaagcttttttagtaccaatactctgagttccatgaaagatagaatcaactctatcttgagtatgaccacggctgttgaaggtagtttatatttgggtttgcctagttcaatggggaggaataaatcgggggctttggattttttgagaaacaaagttaagaaaagacttcttggttatggtacaaagtttctttcaagggcgggaaaggagattttaatcaaaacggtggcgcaagcactcccaagctatgcaatgagtgtcttcttgattcctcatgagatcataaaagatattgaaggtttgatgtcaaagttttggtggcaatcgtctaacaactctcccaagggtatccattggatgtcttggaaaaaactttgcaaacacaaatctaaaggaggcatgggatttcgtaacttgagaagttttaatttggccttattgggaaaacaaggttggaggtttcttacacaacccgatactcttgtttcaaaagtttttaaggcaaggtactatccttgaggttcttttttcacggctgagattggtaataaccccagttatgtttggcgtagtgttcttgaagctcgtcaactcgtgattaaaggtgttaggtggactgtgggtgatggttccgctatttcagttatgggttagccgtggttacccgatgtgcaagatcctttcattgcatcccaacaccctgctttggtgggggttaaagtttgcaatctgctagcttctgatggattggggtgggatgaagagcttgtggctgacctgtttgagcatagagatcaaaggcttattcttcaaataccagtacaacacggtcaaggtcatgacaaacttgcttggattggtgaagtctcgggtctctttacagtaaaaagtgttggaaattattt

SEQ ID NO: 34503 - DNA, 1585 bp, Cannabis sativa
ttataaaataatacaaagtagatgcgaagaaagaagaaaaagatgaagagagaaagagaaagtgaatgagaatttctttgttgtttattccaatggggtgaacctctatttttacaaatacgagtgaaatattaaaaaactaaaaaaaatgttaattaccattaatggtaataaataaaagatttaccgtaattattaatatttataacaatatattaactgtgtaatttcctcaattatttgactatgatcgatggatgtgatagaattttcgtgatgatacacatatgtacaaaattgactacattattgattcaaatctgtttcacgtatggtaattgaatccaaagtagaagtaatcatcactcatattattatctagtgatcgaggcatttctttattaaattaatttcacgtccactgttaatcaatgttaaatctgatgtgaaaattattgtgcaataaataaaataattaacctatttttacaataatttaaaataaaatatatagcataaatttattagtttctttaaaataaaataggaaagtttacatttgaaaaaaaaataataaaaattagtgggtctttttaatacccaaaataatcaatttattatatttttgattggatttggtttattcattttctattttgttaggctaagatttattttatgtcattttgtttgtgtttatgatttccacgttatagtttattttggtagtaaggtaacaatttgttaatgcgtttttaatttttgtagtttattatagtggtttgtttgtcaaattattgtggtagtgattttagtagtttatttatcaatttattgtagtattgatgttggtagtttatttgttagtttaatgtggtaggagtgtaaaaattaatttattagtgttaataattatgtttagtttataaatattagtgcaaaaaaattaagtttattcgttttctgaaaacattaaattttttatgttactatattttatgatttatttttaattttttgtacaccatgaattgtatacaacacattaaactcaagtttactatgagtcattttttattttcatgaacgggaggtttggaggtttgggctacttctaataatggaaaataatatttttaagggcggtataaagtgctgatgttgcatgatatagaaagtatattattaaaagaaacaatttttatttaattttaatgtatatattgtatgttattaaaaatttgattcagagggagagcaaggaaaagacggagggcggcttcgaagtgttctttattctatcgcttgagagtggttcagttcggctcaacaacgttttccgtttcagatttttgttttcatttattatttactattattagtttaattccaattaatgtttttatggggttagaattataataaggagttcattctttaattaattttaatgttgtgatcgtatttatgtgttgaaactaatttaatttttatattagtcttgtcttttgatatggttctttagtcttgtcttttgacatggttttttagtcttttccttttagttttttctagttcgagtctt

SEQ ID NO: 34504 - DNA, 3104 bp, Cannabis sativa
agggcatatccctaagatagatcaccttagagtttttggttgcactgcctatgctcacataaaacatgataagttgcaaccaaaagattcgaagtgcatgtttctaggctatctaaatggtgttaaaggctataaactatggtgcttagaacctgatttcaagaaatgtattataagcaaagatgttgtcttcaaagaggatgaaatggcaatgaaaaccaaagctcttaatgacattcaactaataatacctgttcagggcctgcaaattgaggtggattagccaccagatcctcaaattttagaacaaagtcttgaaaccagactagaaactgaaagacatgaagatgaaactgatctaagtacttaccagcttgctagagacagggtgagaagaaaaaccagacctccaagcaaatttggatatgctgattttatagcatatgcattgatcagtgtagaagaattagaatcctcaaaaccaaccagttactatgaagttgttacggcagaaacaaactaaaatagttaagggcaattgatgaagaaatgacatctcttaagaagaataagacctggattgtggtcaagaaaccaaaaggaaagaaattggtaggttgcaaatggattttcaaggaaaagaaaggcgtacctgttgttgaatcaattaagttcaaagtaagattagtagctaaaggattcactcaacaagaaggagtggatatcaacaaaattttttcaccagttgttaaacaaatttctattagagttatgatggccaaggcaacaaatgaagagcttcacatagagcaaatggatgtaaggatagccttcttacatggaaacctagatgaagagatctacatgcagctgccagaaggctttgaaagtaaatatcctaaccaggtttgtctactaaagaaatccctctatggtttaaatcaagcatctaggcaatggaatttaagatttgatgaatatatgaagaaaattggatatgccaaaagtaaataagatccacgcatctatcacaatgatcagatttacctattgatatatgttgatgatattctaatctttaataaggaaaaatcagatataaacaggttaaaattgaaactcaatcaagagtttgaaatgaaagatcttggcactagtaattgggctgaacatttagacctacaaacctaaaaaatctgaacacccgcctcgactcgctgccaaaaaaattgaaaaattaaaaacctgtgtgatcaggtcgggtccaacccgaaaataccccacacgggtttcgggttcgggatttaaaaatatatatttttttagtcgggttctaacccgtaacccgaacaacactaaataaaaaaattaaatttttttttattacattaaaaataataacattaattattaaaatttataacttaaaatttaaaaataataatattcacttttactgtactatacactataactatttactattcattcgaccaaaaaagcttagaagaattcaagaaactcccagtaatggcagctgcttcttctccagcggggtctcatcctagcagtcgactcaatccggtaagcctcatccctaacatctaaagctttctctaccctcttccatttttctgaaatctgacagcctgtgttcgcctgctcattgctcattgactgctgagatatgcttctccgttcttgactcttgctaatgttatatggttttataatttatattttatatacattattgattatttaattaattttatataataattatagtattatactataactctggctattcactactaaaattattcttaaggtaaaagaagtgtagaattattgagtttgagaatgagtaagtcaatatataagaaagagaaaagaaaatcgtaagttacttgagaattgaaattgggtttcaaccaaattcattattcatgcccataaatatgtttattataaaagaaaaaagacccaaaaattgttaaaaataagcaaagatggtatttttaaaaattaaatttcttgagcctaaaaatgaaatattcggactcgacccaataaaacccgaacccgaccaagcgaaacccgccatacccgacctgaaacctgacatacctgaccacccgaaaatcgagttcagttgtgcattttcaacacccaaaatttgaaaacccgaacttgaccacccgaaaactcgacctgtgtgcagccttaactggtaagaagatccttggaattgatattcaaagagcaaaatcaaatgtcattaatctatccaaaaagagttacttgcaaaaagtgttaggcaaatttagaatggacaatcccaaggtggtttcaacacctatagctcagcattttaaattgtctagctcacatgcaccaacaatagatgctgagaaagagaaaatgagtaagattccttatgcaagctgtgtaataagtttgatgtactctatggtttgtacaagacttgatttagcacatgccatgagcatgacaagcagatttgttgcaaattcagggaatgctcactggacagcactgaaatggataatacataaaaggcacatttaacattggtttaacctatgatggtactagcgaattcaaacaattggtaacttgatatgttgattcagattgtgtttacagtttatggtggttgtgttaaatggaagtctaacctacaaaaggttgtagcactatcttctacagaagttgaatacatggctgctacaaaggctatcaaagaagttatatggcttaagagattaacaagtgaactcaaaatcaactcagaagatatcacagttcactgtgataaccaaagtgtacttcatcgtgtgaaaaatctcatgcttcatgagaggactaaacatattgacattaagatgcactttattaaagatgtgattcaatccaaacttgtctctgtgaggaagatcaacactctagaaaaccctgctgatgcatttacaaagagcttgacaagagacaagtttagactttgtctagacttttactcaacatcaactctaactagagtctcaactaagattcacattcattggactttagattca

SEQ ID NO: 34505 - DNA, 1646 bp, Cannabis sativa
ttttaattactatcaatctatgaagtagacaagcagtgattgcttctttctttttttctccattgaaaaagtaaaataaatggactaattattttgatcacattttcttttttagggctagagtgactcaaattatttatttatctatatttgtaaagttataattttttttttttgtgtaattattaattgtgggaaaagaaaaatcttggtaatcaagctttcacgagtcttcttaaggaagttttattatgtcttgctcccaaagttgtcttggtgcctaaattttgtaattttatatttatgtgttttgtgtgtggagaaaaatagtgagttgtgaaaagagaaatgtgtgagtttgttatgtggtgagagtgaggaagaagtgaagagtgtattgatttaagttgagagattgagataaatagaatatgtaattttgaagtaataactaaaatatatttctctttgtgattttggtagttttaccaaactgaataaattattttgtttcatttctttgttatttcactgcgaagtttattatttttcccaaaatttacttatatatataattagtattattttttcctgaaattatattccaattattttataataaattttcaaaaaaactttaaataatttgtaatatcaaaaacaaaatttaaaataattaattgcaacaaaaataatgttatgtcatttattaaataatgtaaaatatagattgaatatataatgtaacaaattaattaagtgtaaatatttgtaacatgtagaattacttaaattttataacttttatattattatcaattaagtgtgtaaagaaagttacacaacttacttttttaaaattcaaagttataataaaaatatagctattgaggatttatttttatcattgtgtataagtactgatataaagtcaagtaagaatgatttagaatgctttagagagttatttacaaaacttaaaaattttaataattagtaactagttattattatttcagctttattgagcatttttttaacaataagttactttcaaataactcatttaaacccatttacacccataattgttacaaaagtaacacatgcatagataataaataataaatcaaatgggtcttacaaataatttgatacaataataaaataaatgaagaaaaaagaccaagacaaagcaaaagactttgaattgtgagcaatataaagttgactatatatatttttcatatttgatcaaactcgatcttaagtgaataaataattagatcaatcttttgaggatatatattatatttacctaattataaacttgaccaaaatatttattacttaggaaaaaattaaaaacttggccatttaatatagtatatcgtataagtaaaatttaatgtgacaatgtttgtcccgaaaatttagcataaactttttctttgatgtcaatttagaataatattggtcaaagttctttaaatgaaacattaaatttcatgtgaatttgtaaagtcattttttcttttttaattagcatattcattgacattttaatatgaggtatcaatagaataaatatgtgaaatttaatatataaaaaataaaaaataaaaaagttttaatagttatattaa

SEQ ID NO: 34506 - DNA, 2346 bp, Cannabis sativa
  modified_base (455)..(456): a, c, t, g, unknown or other
  modified_base (2286)..(2299): a, c, t, g, unknown or other
ggagaatagcgaggcaccgaagaagagtaacacataccttagcttacaataagcaaactaagtgtaaaagtcggatcgactcaaagaacaagaatgtgagattaccatctcgctacaaggaaacttcctatagtttcatccaactaacgaatgcgagactcataatcctgacaagtcagaagatttccatatacccgcaattgacgtaaaacatatcatgtcgacctcagaaagaagaatggttccagctcgccattgggatcactacaatcaagtttttgtggagacatctcgagattcaacaattaaagatgtgtttaatacatgatattgttgacccagtaaaagcgggaaaatcacagctaaatgattttcaaaatcatacaccgcatttacatttcatggaatgtaatcagaccccacgatataagggataatgactgtaattacatttnngtcagccttgtaattaactaccactatgcaattataaatagtggcaaacaatctcaataaagggacgaaaaactcttatgaaagaggccctaaaacaatactcaacaatttgaataagattgactcgtagactatgcagaattttaactgcaaaaccacgtattaaatccgatgttcatattttgtttttctatagcttttattatttatgtgttgaattatcattgtgaggctcaaatttggttaacaagaatctgcgttaacaggtagatacttactcctggaaccctcgaaatccataacacaggctcgtaacatatcttccagtatttgaattttccttttagactgtccattagtctgaggatggaaagctgtactgaattttagtttgatcccatagcccgctgtagactttgccaaaatttagaaataaacttcggatccctatccgaaattatagactttggaacacaatgtaattttactatctcattgacgtacaaatttgcatattgatccactataaaggttgttttaacttgtagaatatgtgcaaacttcatgaacgatctaccacaacccaaattgaatcaaataaacctgtggttctaggtaatccaaccacaaagtccattgtgatatcttcccacttctgtttataggttaggcatcatgatacgaattctaccacattcttctatatctagttccaccagaaatagggtttaagatcttggtacattttggtggtgccaggatgcaaggagtatggagtggtatgagcctcttcaagaattttatttctaagttccgcactacttggaacacaaactctagttttaaacaacaacatcccactatctgacactgtaaaatctctggcttgaccagttgaaacctcttccctaatcttcactaattctggatcagttaactgagtagctttaattcgttctaaaaaatcagattgcaacgtcaagttatgaagtttgcctacaacaaactcaatgctcgatttgaccatgtcctctgctaaccgaggtgaaatctgaatcatactagttacatatctgggacccttcctgctcagggcatcatccactacattgggcttcccaggatggtaaaggatttcacagtagtaatccttaaccaactctaaccaacgcctctacctcatattcaagtctttccgagtaaagaaatattttgaggctcttatggtcagtataaatttcacatctctctccgtagagataatgctgccaaatcctcaaaacaaatactacagcgacaagttttagatcacgagtcaggtatcgctgctcatattccttcaactgacaagaagcataggcaataaaccaaatcgtcttgcatcagtacacaccccataccctatctggatgcatcataataaaccacaaaattctctttatcatcaggtagggctaacactggagctgtgattaatctctgtttcagctcctgaaaacttgcttcacacttttccgtccacacaaaatgctgattctttttagtaagcttagttatgggtgttaaaattttggaaaaaccttctacgaaccgatgataataaccaaccagacccaaaaaacttctaacttctgtaattgttttcggtcttggccaatccctcaagaattctatctttccctgatccactctaattccatctttgctgacaatgtgtccaagaaaggacacgtgagatagccaaaactcgcactccttgaatttggcatacaacttatgttctcgaagccactgtaaaataatctagagatgttgctcatgctcctcttnnnnnnnnnnnnnnacaaggatgtcatcgataaatacaataacaaaaatatcgaggaaatc

SEQ ID NO: 34507 - DNA, 1275 bp, Cannabis sativa
actcagaaatgggacttgggacctaaacaagaactagaccgagacccgtgacagtgatccagatcttgactcggtattcgggtaacagtgcctggaagataccagtagtcggtgtgaagatctgggactcagactaggaacagaacccagacaaagaacctaacccgaacccagacctagacctgggacacaaaattagaacctgaacaagaatcgtcgagccaggaccctagaacaagactaggaccgtgaccaggacccgaacacagacctagaattgaacacagacttagccttagacctaaacaaagactggaactcgcgcccgaacctgtcgtgtacccagaccagaactgagacccgaacctggacctaaatcttggacccgatccaaaacacagacttggaccgagatagggatccggatacaaacttggactcggaccaagacccagactgggatcgaaatgatggacctagatctggatcgagatcctaaccgaaaacaaaacttggatccccactcgggacccgagcttggacctagactcgaacctagacccatatcggggtccagtcctagacacaaacccggacaaagactcgaacccaaaatcaaacacccacacctagaatcagacccaaagccaaatccgaacctagatcaaaacccagatagagacctaaacccgaaccgacgctaggactcaaacccgaacctacaccgggacccaaacccacacaataaccaggacctagtcctagaatcatgatattgacctgggaaacagaactaggaccgggacctagtacccgacccacacccaaacttcaacataggaccgagctcgtcacccggcaccagaaatggacctgaatagggaaccgaggttgggatccagaccttgaccaagggctttgacaaaactcgtagccggtgtctagatttgggacccagcccttaacctgacccctaacaaggacccgaaccctcaccgagacctaaacccagtcccaaacccaaatatggacccgaacccgtacccggtgaccccaaattggaaccaaaattggaagttgacagggactggaactaggacttaaacttggaatcataactgaaattggacatagatccagaaccgtaaccggaccaggaccggaactccaaatcagacctagacccgaattgggagcggaacccgcatcccaaccataacctggactcgagacctaaacatcaacctgaactcagacccaaacatggaaccagac

SEQ ID NO: 34508 - DNA, 3170 bp, Cannabis sativa
  modified_base (330)..(340): a, c, t, g, unknown or other
ttataaaccttcagctgcacgaaccaaaaatctcaccaacagaagcttcaatcgatcaaccccccaagacaacctaaacgaaactaaaccaggtaaaaaactactattaattctggtgacttcacctgagaagaagaccgaaatcaatacaaataaatatagtttcgtattgatgaaagaaagagcagaaaaattggctcaaaattaaaattcaactctgaattcctatttaattcgcaaataactgatcctgctaaaatccatttctcagattcataaagtgtaaatctctaacaaataaatttagagctcccaatcaatccaaatcannnnnnnnnnnaaaaaaaaaaaaaaagaatcaatattatagctaatatttatctcattgcattcacgttgttttcagatttctaatggtgaatttgttcatattaaattacgaataagatagtgaattaacatgtaggtagagttacgtacgtgaaaatactattttattttttatgttttagtaaacttgcatgttgcatcatagcggcataaaggttttgctaaatctctaaaacttgacatcactgattacaaactaataacataatgatggtgtttatcaaatttgtaggtatttaatattatcaagtgtaggacaaatctctttaagcaaacttctataacatgattagttatataaatatatattaaattggtttacagatgtcttaaagttatttctccacatattactattaatgtacaattgattgttggtaaatagaaaaatatgcatgaaaaagtttcttaaacatgcccatttacaaatccttggttgcaattctgttatataatagttgagcaacaaacataaaaatgtataataaatatagggctcagaattgacaataaatgacttgaatagaggaaagacgatagtagtaagttaattttctattacatacgattttttttttttgagttttaatgataattgactcgcaacatatataacaattgcattacaactttattacagttttttacaagttgacttacaataataaaacttttataccctcaggaaaaagaggaaattatattcctcgtcttttgaaacggacagtttgatgatggaataaattatgcaaattacgaagctagtggaaaattcatatcaattgattgtaaatatgatgaactcatacataagctaaaaaaattgttagaatgcaaccaagaaaatactgacctgtaactaaaatactaagtaaaagaatgatactaaccgttgaggataagggaagatcaaagcatatactcctacatatagcttaaattaaaagaacttgacttcatagcgtgtccattgtgtgtgaacgtgtggtaagcaaaacaacaacaacaacccacaatccaacattcttgaaaatgagcaactcattagatacagacaaagcaagaacaacaatggtagacaatgcaccaccaacagaagaatcaacaattcaacaacaaacaatgcaagacacaacgatggaagaaggtaaaacaatattcgacttcatggactatgcaaaactggtagatgagaaaatagttgagcaactaaaaaacaacccatacagaaaggctgaaatcgctgattatgacgaactactaatcacagatcctcaacatcctgaaatagaagaaacacaaatttacaaggacaaaaaaacactacaaagtgtgcttagtatatgtgcaattagaaacaactttcaatacaaggtcaaaaagtcttgcgcaaaaatatacaaaatttattgcttggatccaaaatacaagtaagcactaatggcatcaagaaatggaccaaccaaatctttcataatctgtaaatacgatagaaagttgatacacccttgtgatctcaaaataagatttgcagacaagcgacaaggtacaacaaaattgattggaaactacatcaaaccaaagttcaccaactaaaaataactcaaatgccacaagacatcataggagaattgaataataagtatggcgtaaaaatgtactacatgaaagcatggagaagtaaagagcacgcacaacaagaattacgcagaaaagcaaaagaatcatacaacctgctaccaagttttttgcacatgttgcaaaaagctaatctaagaaccatagtacacattcaaactaaagaagataacaacttcatgtgcttgttttttgcactagatgcttcaataaaaggatggaacaagtgcaaacccataatcgtgattgatggaactttcctaaaatcaacatatggagagacattgctctcagcctgtacacaagatgcaaatggacacattttccccctagcattctctgttgtggatttaaaaaataacaactcatgggaatagttttttacaaaattaagggaagcatatggggtcaaagaataatagtgcttgatctcagacagacatgagagcataattaatgttgcgactcatgtatttccagacaccactcacggctactgtgtataccacttattaagcaaccttcaagaagaatgcaagcaaactcgataaatcattctttgcagcagcaaaagcatacacagagaggaaatttgaatactatatgagcgagcttgatagattggacaagcgtgttggaccctatctacaacaagttagataccacaaatggtcaaggtaccacatcaaacacaatatgtatacaactatgacttttaacattgctgaatctttaaactcagcaaacttagtagctagagaactaccaatcactacactaatggagtcattgagagctttgatacaacaattgacatacacaaataggaaaaaaacacagaaaaaacaacaattttgacgcctactgctgagaagaagttaatcaacaactttatggactcatcgataaaaaacgtaagagttcattaaactacaagttgcataatagtggttgtagtttgtttttagttttgctaacagtcaatccattgattatcgtttccaaatctgcatgtgaaactaataaaggacaacatatttgaggtagtacaacaaacaaggtcatggatggtcaatctaaaagaaaaaatgtgcagttgcaacatattccaacaagacaaactctcatgtgctcatgctctt

SEQ ID NO: 34509 - DNA, 2201 bp, Cannabis sativa
gttgttgttcctgggggctgttcccaaagggtccttcttttagtggaaggcgttagtggagggtcctcccttggaggcagtggttgattgttcaaattaactagaatgttcgtgccttcctagccagctgtagtagccaaatttgtggtgcctggcaagatggcaggattgacctcatctgcagtgttcatgggaattccagtcgtggctagaacatggacttcaggatctgcattctgtgggtaatgacctactccccttttagttgtattgatacctagagataacactattcggatcattgtaggtgggatctaatatagctctctttaaggttacgaagtatgaatcagcaggcagatctctaatgaggcgagatgaagccttggagacgtgtgagagagagagagagagaggtggagagccctttgggcatgtataaaagagatagagagagagagggagagagagagagagagcgagagagagagagagagagaactagggtttcagacttagagctttatggcctacatgagacctagatgagacttagctttctaggattgagttaaggccctctatataggagagcataaaccctaattagaagataaaatcatagatatttatatattaaattaataaatacaaatgactaagtttcccttgaaactagatatttttgtaccatcttaatgggctttctaggcccaactcacatcttggttttttgtccatgggtgaaggctacacatcaatgtcctgcctaggagaagctggttggccatacacatgcaggatgaggtctgactggctttgcaaggtctgtaggttgacgtgtggccggtcatgctccaaccagggtatggctggccatatgcctgtcatgatttggctggccatgtgcttgccagggtgttgctggccatgtgcctgataggatcctacaggtcatgttcttgcgaacttttccaagaggaggctagcctttagagatggtagttaacctttttaaagtggaggtcagctttggacaccttttccttgtagagatcaggttctcttagtcgaacggaagctcccttggtctacaagtcaccttttggccagctagcttatacccaatccaggcttacaaactcatcttggctggcctatagacttcccttgggcagccaaacatgttggtgtagctctttaggggcttgcttaactctttttgcttattacttgacggtttttccacaccttgtatggagaccttgtcttgctattggtaaggttgtgttctacaagtactttgtcttggcttatgtggacatgatacattaggtggaaaaagtttgggatactagtgtacattttttctagtaaaattttaaatttgtaacctaaatttaccatataattaatgattcacattcatgcataaaaaagtttaatttcatttcattcacaatatatcaatatctatatgtataaatatataatcacccaacacagtatttaatctatatcattatgaagattgctctagtaccaattgttgattttcatggtctatatctgagttataaaatcagaagcagaattttgataaaataatttttatctaatatgaaccataagcccaaggatctcaacataatgaatatagattaaatctaatctaccgaaagaaatttaattacctcttgatgcctatcaggatatccttgattttttttgtataacaataaaacatccaatccaagaacttgttgaagaatcaacaccttgatcttttaaatgagtctcaacactttggaatagagtgagctattatatcttaaaggatgaacaaatttaggtattacattgtgtacttaactcatgacacactttaatgagattaggtttaatctcacacactccttgagaggtgtggggcatgtgagaagacaaaaaacacagagagagagagagagagagagagagagagtaggcgtgagaaagagagagagaagagtaagcaaaatcaatcatactttctctctactttgttatgccttttttgtctgttaattgctctcttaaactcttgttatttataatattatatatccctatattgttgggttttgtgccataaataaaactcattttaaaataatcaaatttactaatcaataaaagatcaaaaatcgttttatgttgca

SEQ ID NO: 34510 - DNA, 2218 bp, Cannabis sativa
  modified_base (1223)..(1228): a, c, t, g, unknown or other
  modified_base (1401)..(1405): a, c, t, g, unknown or other
aaagtattgggggttttgccgccatttacccttctatatatgacatataaaatgcattctaaattcaaataaatcatcgtaaattaataattcaaaattaataaaaaacttctgtatttaaatcctaattatatgctaatttccaaattaaaactaagcggtctttacaattatcccccttaaaaggatttcgtcctcaaaatctaacctgaaaaactctggatattgagctctcatatctgattctaactcccaggtggcttcttccaccttgctatttctccagagtactttgaccagagctatggtcttgtttcgaagaaccttatcttttctgtcaaggatctgaactggctgttgctcatatgacatatccagttgcaactcaagattttcatagctaagaacatgagcagggtttgaaacgtacttccttagcatagagacatggaatacgttatgaactgctgaaagagctggaggcaaagctaatcgatatgccatttgtccaaccttctcgagaatcttgaaaggttttgtaaatgtagggcataatttgcctcttttctagaaacgcttgatccccttcattggagacactcgtaggaacacatgatcccctacttgaaactctacatttctgcgtttcggatctgcataactcttttgcctgctctgagaggtaagcattttaggtttaatcttctcaattgcttcattagtccgttgtacggattctggacctaggtatttcttctcccctgtttcatgccaatgaatgggagatctacattttctaccatataatagttcatagggagccatccctatcgtactttgataactattattgtacgagaattctatcaatggtaggtacttactccaggagccctcaaaatccataacacaggctcgtaacatatcttccagtatctgaattatcctttcggactgttcattagtctgaggatggaaagttgtactgaacttcagtttggtacccatagcccgttgcaaactctgccagaatttagaggtaaattttggatctttatccgaaactatggactttggtacaccatgtaatcttactatctctttaacgtacaaatccgcatactgatccactaaaaaggttattttaacaggtagaaaatgtgaagacttcgtgaatcgatctaccacaacccaaattgaatcaaacaaacccgtggttctannnnnnccaaccacaaagtccatcgtgatgtcttcccacttccactcacgtagggttagaggctgtaacaaacctgccgatctctgatattcaaccttgatctgctgacaggttaagaatttcgatacgaattctaccacattcttcttcattttgctccaccagaagtagggtttaannnnntgatacatcttggtggtgtcgggatgcagggaatatggagtgatatgagcctcttcaagaatttcatttctaagttctgcactattaggaacacaaaccctggtcttgaataatagcatcccactatctgacactgtaaaatctctgacttgaccagctgaaacctcttttctgatcttcactaactctggatcagttagctgagcagctttaattcgttctaatagatcagattgcagcgtcaagttatgaagtttgcctacaacaaactcgatgttagatctgaccatgttctctgctaattgaggtgaaatctaaaccatactagttacttgttcgagacccttcctgctcagggcatcaacaactacattggccttccctagatgttaaaggatctcataatcgtaatccttaaccaactccaaccaacgcctctgtctcattttcaaatctttctgagtaaagaaatatttgagacctttatggttagtataaatttcacatccctctccatagagataatgccgccatatcttcaaagcaaacactactgcggcaagttctaggtcatgagtcgggtaccgttgttcataatctttcaactgacaagaggcataggcaataacccgatcggcctgcatcagtacacaccctagaccctgtctggatgcgtcacaatacacctcgaacttctccttatcaaaatgtagggctaatactggagctgtgattaatctctgcttcagctcctgaaaacttgcttcacacttttccgtccatacaaagtgttgattctttttggtaagctcg

SEQ ID NO: 34511 - DNA, 4562 bp, Cannabis sativa
  modified_base (2826)..(2826): a, c, t, g, unknown or other
ttgcctccaccattctcgctgtttgagaattgatagaaatcgtctgcgctggttagtatgataacagtgtttggggcactatgaggccctgtgtttactcatgattatcctaccctctcgtctgggcttgccggacggcttcttcaaactttatgaagccatcagcttgctcaaagaactcctccatgttgttcattgagatctcctgatatctttccagaactcactcaatggtaggatgcctctgagtatggtcgtatatcagccttcttttatcaggcctttggccttcgtagcctcagtcataaaccgttaaatgtagtccttcaatggttcatcttgtttttgctttgtttcgataagatcctccaattgcacaggtatttgtcttgaaatagagaattgaatatagaattctcgggagaattctttccaagagttaagtcttcctgtgaccatcttgaaataccattatagggctatttgagctagagttgccagaaagatttggcattgcacatttctagatacttgttagagatttgtttggatctcaaagtattttaggtgtactaggggatattctctcctcgtgtacatcttccaagtcggcattttgaatttgggtaaggataaggcatatgctgagaatggtgatccctttaacctgtctagctcaagctctaaaggctttgaaccagctaggccttagagcatgtctcttatttgatccaactgtgcttacacagaagaatttgttgatgcaagggcatgcttgattggcccttcttgattgagctgtaacgtcgaattggcaagagcctggctggccatactctggagaggctatactcaaggccagccagccctgagtctggtacttgtacatggctggttggctgcccacacttctctacctggatggttgagtttgtgcggtaacatgggatagatcacaccaattgctagagttttgtggatccaagtatttgtagtgattaatttcactcctcaaattgttttttgagtgtttcctggtccttgtcagttgaaaattgatcattgggtgactaattcccttggggagggagtgctcctctctgtttggccataaggactcctggaggtgtttgggcagccatggggacttcttcatgtggttggtcggccacagggactcctgctagttgctggtcggtcacaagatggatatcaggggcgattgttgagcttgagatccctggctggccttccatgccactggttgtcgagatttggctattcttactgttagacctttgaggtaaggtctgtcctccctctaggaagggaagatctatcctagtctctagttgaactgccttatcagattgcttgcctctctgctgtggtaatctaactccatctagcaagatcgaaggatgtactcttggtcatcccatccccatccatcttaggaatttacatctctactgagcgaatacattgcaattagcagcgcatggttcttcaagaaattcatgtctctgctaagcgaagacattgcaatcaacaccgcgtggttcttcaattaggtcagcttggcagacggcatctctaagtcgggctaactcgagatcttctgctaagtccacgtggggctcgccaattcctggtcttgtctctcttgcatagtatcagggacgaaacccagttgttgttcctatgtggtgccccccaaggattcttacttcgattggaggcgcctatggaggatcctccctgggagaagggctgattattcagatccaccgggatgtttatgccatccttgccaactacagtgccatattaaattgcttctattcttttatgttaaatgtcatgattattgttttaatcttgtttagacggtcgctaaattaggttttactttaatatactgtcatcttaggattactattcacctaatagtctagaattctaagtgtttatgataaattgcaatttttaatattgtcaaacgtatttttaattgtgacgaagaatagaacctaggttaaatgaattaaatgcttcattaatttgttgccgagattaatctatctccacaaatctcaaagctttatctaagttaaataaattgcatgctttgtggatttactgcttaggtaaaagagttaattattgagtgtttcaccttcattacatataatagggagattgagataagtgattgcttctactttatctgcgagattaacagtttgattagaaactgaaattacattcattaatagaaattaagaatgattgtcaaggtgaacaataacctttaactatttatctcatattgtagtctcaatttaaatttgtttttattttctttttataatatttaattacaattcaaaaccacccttttaattaataatttgatagtgaataataaattaatcatagtcctcatgggatcgaccattacttactttgccctgggtttttcccaaaatgcgtggcctcgaacacatatgacacgtggactaaaaggacacctcaccaaagaattagctgagacatattcaaacgaattagtatagttaaggaagtgagcccccggagaagtgcaataagcatgcccttcctctccgagagctaggcatataagaaagcatctctgggaggaggaggatatacctgaacaatcacctcgcatttaatgtagcatggggaaagcgtcttggaatgcccataagaggacatgtcagacaacgtaagcctcgtttatggcaattacacagtaatcaaatgggcttgtgacgactccattatgaagaatcacatcantcaaggaaggataaagattaatctcacctaatctatatgctacctatggcataagttatgcatgccctattttgtgtctcttgggaacttgtgctcatacattactggcacttaaagacaagttatcccttttggaactatccctaccaatctctataaatacccctgaacaaaataggaaaggggatcgataaaaggagagagaaaaaaactcaccaagaacattctctatataagaactctcattaataacaaagactcgtggaccgcggctcattaatgccaaaaccacataaaaattacctgcattaattatcccaaagctctcatcattatctcatttagttggttgtcaaaaatctcgatcaacattttggtgctttcattaagagctgtgggaagcattcttgaggaaacaacagtcaaagaatcacaacaacaatgctggaaactcgaaacaacacacgccaacctcgccccccaaggatcctcaaaacggagaaggtgaagaggctgcttcatgagtaaacatgggctctgaggaacgagatgagacaaacgacgaggaatacaaggaaaacttcgaagggtacgacgtttaagatgaaggtaggtacattgagttgttggtcctaaggtaaaaagcgactaatcatgaggcagaactggccgcccaaaaagaatagaataagaggatgcaatagatattggtcgccatgcaaaacgctatggaaactgctggaatacatgtgcatcccaaagccatgcccgcaggactcgaggaaacacaagaggaatcctcgcaaagcactcagaggcccaagacgagagagccaagccctatacggtatccttctgaagaaaagcctgagaaaaatcctacttcgatccctgggagaaataggaaggcacaggatccgcaaaaggcacgctctgatttcccaaaagtgaaaggtccgcagaggggcaagctccctcgagcgagtcttggcccttaggatcgagaggactaaaaaagcgtatccgtgcactaagaacccggggaaagggggaggaaaagtcggaggtatcctccgactgatctaagacagaaaatcaatgagaagcatgatgacttaagaaaccaccttgaaaagaaaaaacatgcattgccagtctacgaaggcaccttgaacgaaggaatcttggttgaattagcaatacttcgcaaatacatcgctaaggtctcccagaggcagaagggggatgactctaactctgattgcaaggactgagaaccatgcgcccgacacatattggaagcagagctccccaaaaattttaagatgcctgaaatggcaacttccacgggagattcggaccccagtgaccatctgtcccgatttaacagggtgatgactgtcatgagtgtaagtaataaagcataaatgtttatgctttccactaacgttgggcgggtctgctgaataatggttcaaaaagctggagcccggatcagtggactgctggaacaagttacaagttagtttccggagatagtttgtcgcggcaagaaagatccacctcgaggtcagcgccctgactaatataaaacaactgccctcaaaaaccctaaagaacttcataaaaagatttaaagatgaggctttaaagaccaaaaaggtcgatgacaacaacagctggcccttcttcaagctgaaatccttacgagaacccctttctggaacgagctgcag

SEQ ID NO: 34512 - DNA, 3265 bp, Cannabis sativa
caaaaaattgggtatttgtgaagtaaagtccacaataattttgttacaattggctaatcaatcattcacttatccaagggtaataagagaagatgtcctaattaaagtggttaagttagtatttccagttgatttggttgtactagacatggaagaagacaaggatatgtcattgatccttgggcgccctttcttagcaactggtggtgcatttataaatgtttgaagaggtcacttaaccttgagtgctaatgatgaagaaatcaagtttgacatttataagtcttctaatcaatccaatactgagaatatatgcaatattggttgagtcttgtaactccaatgaagtcgattgagagactaattagaaagaaaagaaaaagaagcctcgagataaaaagaaactaaagaaggagttttcaatagaacaacaagtgttggcaattcattcaaaattcaaatcattgacaagtaacattatctcaagatggaaaaatccttttaaagtcagagagttacttccttctgaccttgtaagtattaaaagtgaaaaatgtgagattgtaaaggttcacaagcgtaaactgaaggcatgaatcgatgatagtggagtgttgactaaatagcttcgtaataaagaaacttgaagcaacaataatgtctagctaaagacgataacaaagcgctttatgggaagcaacccatacattttttttattttcttttcttttgtttttttagtttttagttttaatttttgaactgagttttatttcttttttattttttttgttatttttattttatttagtcgaggaatcatgaaatacgtgaaacaaatttgaaaaaaaaattagcgacatgtcagccacaataagtgacatgttgcctggagattgaactgaaaaaagggctaagttttatgccacttttgctcgccattcatcatacactgattattctagtctcttgatgagctcctgcaaccatacaaacaacctgctggtaatgatggcgatccacctgctactgatggatggtggtgagtgatacaactattatggatggaccgacccgtagtcctagctgctctggtttgttttctcttctttaattttatcgcatagtgggaacacattttatcttaagtttggggatgggaagacaagtttcatgtttttaattttttaatttttttattattatttatgtttttatgggtcgatttaaggattaatttattactgttggatgactgtattaaaattgacttgtgacctatgggattcgatgatgaacttatgctaaactctttaatattatttagtatgtgtaacaaacttttggattgtgtgcttaaccttttaggcttgctttcgatattgaggtatgaattatgtgatgttttacttgttctatacatattgtagttttatgtgcttatgtagacttggtttgatttggttaatattgagataactagaacttgtgtgattaatttattgaggcaaaatcctaaatctttgttgtgtagatatgattaaggcaattttctttgaatcgtttgagccaaaaagctaaccttaatacattatcctttgttgtcctattttgagcctaatttttctaatttttattctttgttaaaaacaaaatgaatatttatccttgattatgagtcatgcgctcaaataaattatcattgccctattttgcaccataaacataggttgttgtgtactaatgaaaaatatgatgtaagtgggatgagaattttttttgagaattacgtttagaaatgatgtatgtgtatagagagttatgatccaagtatattatgttgaaaagttctcttgttataaaaaacatcatatcgagaaaaaaaattcaataatagccacaaataaatttgatataattataactttaattgtgtgaacaaggaggcatcaaatgaaaaaaaatattgttgggagaaaagaaaatttacaatgaaggttttcaatttttgattagatttgtaagtgttatacttgaaattaggctaccatctaagtgggggacacatgtcaagataaaaggaataggattgatgcaattactttttatgaaataactcattaattacgtaagtgtcagagtatatttgcaacctgctgactgtaaggtcttatgcgaggaaaaatatacaaattgttgcttagtatattaacgagaaaccatatgtcgttgaatgtgaatagcgaggcatcaagtgcgttacatctaggaagacaaaagcgacacatatcgactgcggaagcacctagtgtataatgtacaaactaaggataacagtcgggttgggtcgaaacctaataagcgaggtgcctatctcgctatgggaaggcttcctctaacttcaaccagttaacttcagacatcttcttaatgagacttacaatcctgatgagtcagaagctaacattcaactgagcctcgagaaactctattaacaagaattatgattgtcccaaatgaagcgataagtttttgaacaaagaagcaagaagacgtgcattgtcgacctcggaaggaaaaatggccccatctcgctattatgatcactggaaccaagcttctgtcgagacatccctaggtacaacgattaaagacgtgtttaaatatacgatcattttgacccagtaaaagcgagaaaatcacagctatataattttcaaataataatttcatttacactacatgatatgtaatcaaaccccatgattttaggggatgatcgttgtaaaaagattacattcaactttgtaattaactgcccactatgtaattataaatagtggcaaataagatcaaaaaagatgacgaaaaaaatcatacaaaagaggccctgagaaaactatcagaaatctaaataagattgactcgtggactatacagaattttaactgcaaaaccacgtaaaaaaatcatgtgtgttcatactttttattttatagcttttattttttctatgtgagatagtcacttttaggctcaaatatggttaacgaaaatctgcgttaacagtttggtgctttcattgagagcctatgtgaaaatctctgaaaaaaaaaaccctcctttgttttgaagaaaagaccctctcattcatggctaaaaatccaaaaaatattaatacaccacatgagaaaactcatcatcattctgggaaagagcccatgggctctagaaggtctaccaacccacagtccagacggaccac

SEQ ID NO: 34513 - DNA, 1695 bp, Cannabis sativa
  modified_base (1634)..(1637): a, c, t, g, unknown or other
atacataaaaattgagggaaaataaaatcatattagaaccataaaataatgtcaaacaatatccatctagaccctaattaaatgtttagctactcatgttcctggtagcaaaatcacacatattaacttaagaaaaaagaagaaaataaagaagaagaaaatgttgaaaaccctctgaagaatgcctccagtattgatttcggtctcttaaattcgtacttctttttttgctgtttatttccttctgaattgcttgacaaaattaactgaagttcactccttatatagccattgagggactaaaaagatataaaaatgcacatgctgaaaatcttattttgcttaggaatagaaaatctattctgcttaggattaaaagtagggctgtacataaatttttgtaaaccgtccaacccgaacaacccgcccaaaccaaaccgagataacccgatgaaaaatgcaaaccgaaaaacccgacgaaaatataaccggcccaatctaaagattgggcgggttgaaaataatattaacccatccaatcaacctgaactaacccgaccaacccgattaagagagtttttatatatatgtttttatgatatataatctatatattatataatttatatacatgtttataaaaaaattgaaagttcaaactaatatatttctttttatggcgaatgatttgaactttaaattcaatctttatatttatctcattaccacaataactaaaatataacaattgaatgtgaaaaaaaataaacattaatgctcagtttagacgggttaacccgactaaaccgaccaatgctcaccaatccaactaagtacagaagtctcattagaaagctactttatcttaccataacttggccaaacatcttgtttgttgttaacaaactctccaagctccactagtccctcacctcacagcagctaaccgcatactccaatacctaaaaggcttaccaggacaacgacttttcttctatgccaatgcacctgaacctcttcatcttcaagcctttgtatatgcggattggggagcttgcttagacataagacgatcaatttcgggctactgcatttttctaggacaatcccttatctcatggaaatcaagaaacagcacacagtatcttgttcttcagcagaagctgaatatcgagcaatggccaacaccacatgcgaatcacatggcttcactctataatttgagacttcaacatcaacatcaaacttccctcaaccttgttttgtgacaatagtgcggccatccacatctcagaaaatccagtatactatgaacacacaaagtatgtcaaaatagattgtcacctcatttggaaaaaaattaataatggcactatcaaaaccaatcatattccttcaaaatcagacataactgacatctaaccaaacttcttttccccaatcatttccatgaacttgtcttcaagaagagggtcacaaatccttacactccatcttaagaaggattattaaattagttatatttgttgggacccaagtatgggaatcatttttttgagggcaatagtttgtttatctctttcatgaaaaagaaaacataatacaattcttaacaatcatcaatataaaatttnnnntctatattaaaaaataccttttttttttctagaaacataaagctacagactaatttca

SEQ ID NO: 34514 - DNA, 3495 bp, Cannabis sativa
  modified_base (2170)..(2174): a, c, t, g, unknown or other
cttaccaacggggtcttaacatgtcattaataaaataaattctcatatattgaattatataataatataatttctcaactattcataattactaattaaggtttgctaatccatttctaaacttaggtatttcatttatgctgctgctcgcgagccgggcaaatgcatctgcagttgtgttttcttctcttggaattttcttaagagcatagcttttgaattgcacgagcaaatcatgtattttacttagattagctatcattctttatccccgagcctcatattccccagatacatgatttaccactaattgtgagtcactgtagatctcaatgtgttcggcatacaattcttgagcaacttttagaccagcaataagggcttcatattccacttccttgttagatgctttcaacccaaatttgattgctccgtgcagatgttgcccccaggtgtgacaagagcaattcttgtgccgaatagttgatctgtagctaacccatccccatgtagtttccaggtgggttcgcctttactgctgctcggttgaggtttctgtactgactttgggttgtcttctgagtgctctattctttacccatacattaaaacagaaaatctgctaaggcttatcctttaatcgttgttcagggctgaaagatgatttcatactgacccaactctaccgcccatttgagtaactatgtagaggcattcagtttttgtagcacttgacgtaatggttggtcagtgtacacctgaacaagatgagattaaaagttaggtcgtagctttcttgttgctaagattaggcaataggtgagctattctatcaatgggcactagccttcagccttaatgagtcttttacaaacgtagtagatcagatgtttgatattgttctcttctcatatcagtacgacacttactgcatgatccccgacacccaagtctattcccagttcttatccgtctagaggttttgagagtacatgaggttttgcaagtagtgttttttgctcttgaaaggctttttgcattcctcaatcaattcaaattgcttatttcgtcacaagatgttaaagaatggaacacacttgtctgctcactttgaaacaaatttacagagtgcagcgatctgaccagttaaactttaaacatccttggtttttgtaggcaatttcatatccaggagggcttgaattttctctttattaggttcaagtcctcgggcattaacgataaagcctagaaacttatccaagctgactccaaagaagcactttaggggattgagtttcatgttgtatttcctgaggactttgaagcattcgtccaagtcgtctatatgccccccaaccttcttggatttgacgagcatgtcatccacgtatactttcgtatttcgtccgatctggtctttgaaaattttatttaccaatatctttggtatgtagcttcggcattcttaagcccaaagggcatgactttatagcaatacaatcctgtatctgttcggaaacttgtatgttcttggtccggtggatggatcatgatttgattgtaccccgaataggcatccataaagcttattatattgtatcctgatattgcatccacaagttgatctactcttggaagtcgaaagcagtccttggggaacgccttattgaggtcagtgaagtcgatacatactcgccattttttattaggcttgggcactagtacggaattagcaaccaaggacgggtagaaagattcaattatgtaatttttgttgcgcagcttttctacctcttctattaaggctagggcttattctttatctaacaatcttcttttttgttgaaccggcaggaaattaggatcaatattcaaggggtatgaaattgtaaaaggatcgattctgaccatgtccttatgtgaccatgcaaaaatgtccaagtttgctcttagaaattttatcaatgctgatttcacttcgagcagcaaaccttttccaattttgagtttcctagtcggaacatttaggtcgatccactagccccacattggtattcgattccctaagtcggggatccacatcttcgtccccgccttaggcagttccctattcgacaatgtcttttcccttgtccaaactctgactagaggatacttcctttttagnnnnngttagggcaaggttgtaacattccagtgcaacttctttatttcctctcaggcacctgacccatttctttgtttgaaacttgaggcacgaatgaaatatcgatgtaacaacttttaggtcatataaggctagtcggcctaacatgacattaaaagtttatgggacatcgaatacctaaaattgtgtcgttacagttatactcttcgaagcttgcccaacagtgagcggtaggaaaattttccctaaaggtgcaacactcttgccaaaaaaattgtctacggactggaggcaaggggttaaatctttaagttggagccccattttctcatatggagtattgaactaaatatctgctgaagctccattgtctaccatggtttgggccactactttgtttgtcatctgtacttccacgaccaacggatcattgtgtggaaagtttactttgacagtatcttcttcactgaacgttatagtgggttcccctacccgtggtttttttggttttctttcctctacagtaggaccacttattttttctcgtgttgtaaggtttgggcatacctttcccgagctttgcctgaatctccagctatgtgtgggcctccgatgaggacatgcaaatgcccgtccactggtagcgacaataaatcttggttatcatctgtctgggtggccctctaattctagtcagtcttaacatatttttgcacgtgtgggttattatttcttagaaaaaattcaatttcccacttcaaattcttgcattcattggtgtcgtggccatagtaccatgaaattggcaaaacttggacatgtctctcttacttatatcctttttcatgggagcgggttccttgtatggagctacggactgagtagccatgtagatggtctctaaatcgtcaaccaggagagagaaagcagtgaatttggaaggattttctctagggccctattcgactttgccagcgaactttcccttttcccattgccctagatgttgttgttgttagaccttttaccaacagagcttaaattgcttgggtactgggggtgttgaacggatgttccagtagagggagcttgtgattggtttggtttgagcttgacttctgctcattgaatggcttcttcgagcttgatcaaaccatttgcgcgatggaggaagccattcatagaatctactggtccatctctattgatgtccttccaaatctctccgagaacttcgatggcccccagtattgggattaatttcccttcttcggtttaccgtgccacttttgtcgcctccatcatgaatctgctgatgtaagctc

SEQ ID NO: 34515 - DNA, 1761 bp, Cannabis sativa
  modified_base (277)..(278): a, c, t, g, unknown or other
  modified_base (405)..(406): a, c, t, g, unknown or other
tgggtttgggtcccgggtctgggtttggatactgggttcaagtctgggtctcgggtctggttcgggtcagagattggtgttgaccccgaatcctttgtatatattataatacatgctaatccagaccatttgttatgtattaaataatacaatgtacattgtattaaaatttttggttgtaataattaatataatacattgctttatctaaacatagtgttatttattattgggtaaatagcgacataagtattcaaagttttatgtttgtaagcgnnataaacccaatgtttatttttagcagcataagtacccaatgtttataaaactgtaatttttccctaattttgttttcttattgtcttaaacatggcacatataaggcctaaattcttgatcattggnnctagatagaaatatgtagtatcagtgactttcaaatgttcttttaataaattaaaacagagtctgtattgacgaaactggaagaaaattatagttttacaaatattgggtacttataccgctaaaaataaacattgggtttttgatacttacaaacataaaactttaggtacttattcgctatttatgttttattatttaatacaatgcgacccttatacaaacaaccctaaattaataaaacaatatattttccctctctcctctttatctctaatcagtccctttttttgtctctctcattcctcctcttatccatgtttataaactacaatgattctgttcagattaaaaaaaaatattacttcatctgtaagtagtttgaaaaagatttcaaaaaaataagaaaatcatcaaatttagccagggtcggccctaggcatagggctatgcttagggcccgctcattttaggggcccaaataaaaaaaaatactttttaaaaatactatttatctttatagtaagggctaattttttttttttttttgttgcttatagcccattttaacttagggccggcgctgaatctaactaatttatataattaaataaaagtaaatacaacaaaatataagtgattagttaacaaattaagtttttttttttatttaaacttatcccggcttcgacgtgcggagtacaaagatctgtcggtaaattgtattatgtgtttactggttggggttggggttgatcggggttcgcgcgagggagagctaggggagaaagatggggatggttgggtcgcaataggttcgcaagatctagccagtggtgtgatttgaggcggcatggtggtggttcaacagtaatagaggcgataggattagagagaggataggaaagttaaatttcttaagagactattacagtctagttatgatgagtattaataaatagtttaataaatatttattttctttaatatttttatatttaaagttttcagctttttactttaaaaaaatttcaactttttatgtttttggtgttagaaatttttaaagattttaattttttaaacatttaatctaatacacgcaagcaagaagatatttgatagtatacacaccaaaaaatcatttacatgaagagttaaaaaaatgtcaccatactataacaacaaaaccaatatcctagcatagaattattttataattatatatataaatagtctaatttgctttaatgtgaatgtaaaaattgacggagataactttaataattagttcaataatttagaaaagactttaattttttttttttgaaataataataacaagactcagtgaat

SEQ ID NO: 34516 - DNA, 1878 bp, Cannabis sativa
cccaatgcaaagtttaactcatttgcactaagatagtcgcgaaaactaaaaccctagttgggaaggtcaacttgagccctaggtgaaaccctaggtgcttaggttggcttatgagttgcaaattcgtgtaatttcagctcccagggcctggattaggttgctccatatcttcatggtacaaaatactgaaagacagtgagtttgattcaagttattgaaattcgaacttccatcccggagttcccaaagtcaacatgggcgcaggtttatggtctcctcccaggtcgactgctatgattcgagtctactcaactccgtgacatcatccttctagccacgtatcaaatattaatgtccacatctaattttttctttttttctttttcaaattaacagtgtgaatagttcaaaaaccataattcataactcaaagacaaaaacccttaatattataaagtgattaatatttgaactagtagcaaagactaatttctgtccataaatacttgatataaaagtaattttaaaataatttacaagtttcctgatttgaagagaagaaaatgtataataactaaatatagctgctattgctgttggtttcttttcctcaattaaaatttcccaccatctcaatcagtgaagacattagtctattacaaaaatgtacacaaaacacacatttgaattttcaaattttcttccttttaatttatttgaactttaaataactattgtgatcagcttcaatttaaatttacttactaacgacgtttctccaagaaaaccttgcaggttacataagactttagaaaggggagccgctattgtcaaaggcacacgatcaaaagctttccaatagaattttaaataagattcttgcagttaagaactttaatgattttaccagtaatccatgcatgaacattgtccattttcaagatgatgatagcagtcacaaacaactatttttcttttgaaaacctttgagacaagcttaattgtagaatgacaatcattgcatatcctaatattctttacaatccgtattaatgatccaggctctgtgtacattaagccaaaagcaagggcttcaatgtcgaaaacaacccctttagtcttggcaatgtagctaaattttcttaacaatttcatcccacacatggtagatatcctctgccttctcatgcgatttatctccagccaagaactcatgaataacaccattaaactacaccctggaacactttatttttcttttttctcatagttctaacttcttcaccgtcttctccttttatgaactctgcttagatattagacagtaagacgttgcgtccatcgtggattttatcagattgtatcaacagatttccaactgtgcgacccatttcagcattagcatgaaccctgcaagcaccatggagtgcatcccatatagcaatgtctggtataatcggcattgaaataattaaatgctctgcctcttcaagccaaccagcacaacctagaaggtcaaccacgcaggcatagtgatccaactctgatctaattccaacattcaacattgaattaaaatagtgaaagcctctatcaactcatccttcatgactacatgcacttaatactgtaatataggaaatactatttggtgaaattcttgcgaccattcattgccaatccatatattgcagcagtgtaggtggaaaattgatgaattgaacactttgcattgcaagatcaatggtgccacatttggcatacatatcaattagggttgtagagttagcatcctggcccattaatagcatatttctaaacagagacaacttcttttcgtcgaccattttaagcataaccagaaaccatgacaacccc

SEQ ID NO: 34517 - DNA, 2885 bp, Cannabis sativa
  modified_base (36)..(41): a, c, t, g, unknown or other
  modified_base (2439)..(2443): a, c, t, g, unknown or other
  modified_base (2836)..(2852): a, c, t, g, unknown or other
taggatgttaatcaaacgtacttgttagtaaatctnnnnnntggtaaaatatttccaacaacaatctggtccaagattgacgaagctagatcaatggatgcccccgagatgatacgaaagagaagagatgccaaatcttgagacaccacggttttattggaattgggaagccaatttctaagtgcaaaccgcatgagggatgcatgagcatatgtgagatgtgtaattcgaagactttgcccatatttccattcaactcgtgtaccagggagtttagtgagcatcaaatggcgatcaatagacatgataacattggacacaccttcgggtaattgcaaagccattgaaatgtccttaacagtaagtgaaaaccaatgccctcgaacatagacttcaccaaaaacattcagagttctcatcaagcaaatcattagtgaaattggcatagaattctttgacaatactttcgatatacccttcaaaactagtgagggtgttttcccattgatggtattgaacaaacttaacaataccatacaccctatgagcatgcaaatcataattcctctcactttcaaacttacgggtagcataaatattccaatcacgctgattatcatggtaataaaatttagaattgacagcttgagagggagagatattaccaggagatgaactctgcataggctgcttgcctttggcagaagtagaagctttagctgcagaagatgcacgaggagatgctggagcagatttggtcaatggtagctcgagatcaatatcagcttcctcactttcagaggagacaccaaaatcgtctagaagctcattttcagagggaatagacaagaatttggtctcaaaatcatcagagggattggttcttcttcttcagaacttaaagaagtcgaaggaggatgcaatttcaacttcttggcaagagggacttgtctgtcatggcttcgtttagtgcgcagttccttctccagagatgcttgctggggatgggtgcgagaggaggggcctgttggagtttatgtagcaatacccttacctgatgtagcaggaggtgatgcggtggcacgaggaggagaccccttcgacgataaggacgatgaagtgcaaaatttgtggggtcgtacaaatttcctagccacttatttgggaattcgtttgtgcttgggcttcatagtctgagattcacgctaaggaagcgatgaatctcctgggtttgatgcagttgcagcagcaggtagcaagattggagcagcaagaggagcattcgaggggcaggtttggattccaccatcttgcttggatgccctaggttcttagtcttagccatgaatttgtgaaagtaagaatgagaaacagagaaacaagaacacaaagaagatgaattgggtaggtggtgaaaataaatgactagaaaaatttgtttaaataaacatgggagagtggagcaaaaaaggaaaccaatttcaaattttgaataaccaccagcccatgaacacaaaaaaaaccgctccactttttcaaaaattattttttaaaaaaaaataaaataaaaggaaactagaacaaccaagatactttcaaaaaataggcaatttaagaaaatccttcaagatcaatgacaaaatacaatgaatatgatataaaaatttaaatggtaacttttcaaaataaatcaatttagattaaatgttgatacttaccaaataaaacacaaaattttcttagcccacaagtcaagtcactaacgcctcccacttttttttttatttttgaaaacccaaaataaataaaaataaataaaatatgtacagtaaatataaggtattctagatcaaatgactaatcaaattatatagcaaatgacaaatatacatgttatgctttcaaaagagaataactaattagtatctcaagaaccaaccattcttaacagatgttgagaaaaaatacacatattacaaataatgtgaatcacgataattttttttagttgagtagaggagacttacacacttgaattcacttgtcagacataagtgtgtgcagtgaaaataggatcattgtccttggcaagatttttattttttgcctttttcaaatggatcccacaactggatgctatcacaccatactcaaggtagcccttttctatggtagtgcatcctcatcataactattaattacaatgttccagcttactcaaaagatgactttcacacctcagtatgggtagctctattctagtaaggggcctgacaagaaactgaaacaagacacgctcaactctgtataagaacattatataatcccaatcacacataaaaagtaacatgaatcttttaactctacctcaaaagtatgataagtacgagatcttaactaattataatccaaaagcataaacaagatttgtcaaataannnnnaaacaagattagatgcaagcaaagaataactaaaaaataatgtacaaaaacaaaaacaagagagattagacaatataaactcccaatgattttctgagggagtcaaagcgacttgagtctagggccttggtgaaaatatcagctaattgtttctcagtaacaataaattctaactgcgaagatttattttcaataagttcttgaataaagctataccttattcaatgtgttttgttctagaatgttgaacatgatttttgaaaatatttattgcactagttttatcacaaaaaatagttaaaacacccaattcaaatccatagtcaatcaacatttatttcaacctaaaaacttagtacaacaactacgagcaacaatgtaaagcccgcttannnnnnnnnnnnnnnnncagttgtttatgtttaatcatgaaattatttat

SEQ ID NO: 34518 - DNA, 1935 bp, Cannabis sativa
tggctgctcaaagtctccaagtcttctagggtttttgcttcacagaattccacatctaaaatgacgaagagaaccaagaaggctggcattgttgggaaacatggtacgcaatatgatgctagtttgaggaagcatattaagaagatggaggtcagtcagcaaagcaaatacttatgtgagttttacgggaagtttgcagtgaaaaggaaggctgttgaaattagggctgcaaagctggaggagccaacaccctcagtactgcgagtgctgtgactgttaggagcaccatcagaaggctcaggcagcagaatctcggctaagtttcagatttctttgtttttgatcaccaactaaagttatatttgtgtaagaaagagtttaatacctaatggaccaaattttattgtctattgactatgtagatggcttccaattttgatgtatgatcgatgtctactttttgaaaaatatatatacatatatatataattatataaatgtgggctacggtaagagtaagagaaggggtaggaaatgtgcgagtgaattgtggtgaggtttgaggtcttcgaaggtttccacatccctcaactagcaatacaatttaaataaaaaaaaaggccaacagtttacatgtttaataactgcctaagaatatagacagaattataccacgacagcttgtaaccattgtcggtagagcaacaacaattttgagaaaagggtaagaatgctgctgctggtagtacattatgctctttttctggaccatctcaatacgacgaatgaacttaggtaccttgctgttcctattagcctccttcatccttccctgaatcatcatataaaacatagtttctagtgtaaatgatcacaaaaggaacacactaaaaatagctttctaatccagttaagtgttaagtccaaatacctccaaaatttgatgaaagttggatatgtcgtcaggtctcattcctgaagggcagctgatgtagaagtatggctcaaagccatgaacattacagcacacactatgtcctatgaataaaaatcacaaatttaaatgatctcatctttgaaagtaattccaattggaagggtttaataaactaaagccacttgtacacacaaactccatgcgcaaacatagaataagatttattgcattcccaagaacttttctttatacactaaattggtaaatttctatgtataaaaatataaatgcatttaaataaatacaaaattatggccaaactgtaatggggggtttggcttctaggggatgggaatgtaaaaccaaacttatgtttggtatggttttagtagagggtttatgtttgtgtggatcccatcccatctttaagattatttatggggtaatcccaaactcaaacacttcactttgagttttttttaatgtcaactcctctcaactaaaacccacttagtaaaactcttaaaccaaacaccccataatagttttcttggcgcactacctcctaaacttgtcaagataatgttagaagaagctccttcccactaacagcctttatgtaagaaaaaaaaaaataagtaaaaataactcttgttccattcatccatttgtacatgtgacaaaaaattcaatcctaagacaacacattaggcctaattcctaattgttagtccctatacccactttactaaaatttctgaagaagagttcctgtatgtaaaaggaaataagaaaaaatatgaaagcaatgactgtggtatttcattttattgctctgatcctgctagtaatgctgtttggctcgtaatgctgtggtattttgaattattgttaaaaacataaattcttaaaaagaaaataaatatataaaaatacatatgacagcaacaatagcacgcaatattatacccattttaaaacgtgaaagaaacactact

SEQ ID NO: 34519 - DNA, 1278 bp, Cannabis sativa
ttaaactaagcggtctttacagcgatggttcccggtcaaaatagatgcacgaaggatcgagtcacagatccttgaagtccttaaggaggataaccccacacacctacatattaaatataatacataccccagacttaaaagtccatgccttatcaatgttggagatgctagtaaattcttgaagtagcttagattgtaaagtgtatttttcctcacttgcttcatccaaccccaacaacagatcctttcctgaatcccctttagaaccctccattgcaaatacttttgacaatcttttactgcagaaaaacaaaatcatcaattcaaaatgtatggggaaatatctcatactaaaacttatccgttgagtggtttttcagatagaaattgaataaaccaactgtaacccaataagagatatcaaatgaatgaaatttaaagagaccaactatggctacggatatccatcatcaaatgactatgataaaaaagcagttaatgttatgaatttgaatatgattatgtgagagagtggagagaggacttacggagagagagaattgagtgtgagtgtgggagtgattggattggagcgagttgaataagaaggaaaggaaaattgtggtcgtggagttggagttggagatgcgaagctaacaagccaagccaagtttagtaggcgttgaaggcgttgaagtgtcccaaatcactaagacttgtgaggtgcccaaatcagacaagagggatggtgagagggagaaaggtgggatcgagtgggaggaaatgggtcgagtttgggggtttctggggtggggatctttgtggcgattgagacctagggtgaccggagcacttctatccaatgagtagagctgctcggaagataggccagagaaagaggatagaagaagaggcgggaggaagaagaacaacaaataaggtttgggggttaggttttcatattttttctttttataccctttaatatatttactaaaatatttaaattaaaatctgattatttatccattcaaaaaaaatatctcattatttatttatttattttttaaaaaaagaaaatctgattatttaatagttataccctatttaattttactcccaatcaattattttagaggtatttatacccttctttttttttcatgaaatatttttttttttgttattttctttaactaaatacaaaattcttttattaagcaaaaatatatataaatttattttgttaaatacaatttttttaactaaattcaaaat

SEQ ID NO: 34520 - DNA, 2658 bp, Cannabis sativa
agagattgatagagggtgtgagagaatcgaagagggtgagagaatggctgagaggttttttgtttgagaaaatggaaaaatgaaaatggagaagaagggggggctacgtgcctctgattcatatatatacttttaccggcgcaattggatgcgccggtaaaagttcttttaaaaatttgacctaagtcaaaacgtgcgtttcatttacaacttttaccggcgcacaattgcaccggtaaaagtatctccacttgccacatcaaaatccactcgttttatttaatacttttgcctgcgcaaatgtgcgcaggtaaaagtatccccacctaccaaggaaatccacgcgagaagttttcctctctttttttgagacttttaccggcgcatttgacgaactgcgccggtaataagcgccagaataaatgaaatgaaaggcggcaaacttttcgcgcctgttggcgcttcatttcctcacttttaccggcgcatagtcattatcgcgccggcaaaacatagtaataccggcgcattattgcgccggcaaaagtaaagcataaatacaattgagagttcagtttttgctttacgtcgacaacttttaccggcgcatttgacgaactgcgccggtaaaaatgccttttcttgtagtgactaatttcaaattttatacacttaaatactttatctttatttttggagacaaaaatatccaatattacaattctcttacacctgttacaaccacttccgttaacttataaatatgaacacgtggagggctcaaatacattacattttttttttattttaaaactaatattcttaatatcagaaattaagtgctacttgtttcaataaaaaaatcaattctcataacaattttcacattgtattggcactttaattcaataaccatgttccatatactgcactggttcacttagctatggtaatctagtattgcatctctctcatttgtttaaacaaatagtatttagtttgtgatattaaaaatattaaattttaaaataaaataaataaatgaaattcatatgggccttccacgtgtccatatttatgagttaacggaagtagtagtaacaagtgtaagagaattgtaacattaagtatttttgcctccaaaattaaaaataaggtatttaagtgtctaaaatctaaaatattaagtatttatgccgcaatttacccttaaatatatatattatgtaaaataaaattatttttgtttttagggtaatttcaataataaatgttaaatttaatgttaaatcaacacaataatgataaaattttgacactaaatttttttatatttcaatcacaacactaaaagttacactaaaatcatattgtttattattatattatttcattaaattataaataaacacaaataataaatatacaaaaagtttaagtataaatatattatttaaatagggatatttacagcgaaaccccttaatatttataattgttacacaaatgaccctgataaaaaaaaaagtgacgataaaagtaccttatcttatgaatttattacagttaaccattttttggtcattaagtgtcaactcaaaaatacgtagcgatatattattggactacatattaaataagctaaagaaatatgtcgccacatgtttctgagctggtatttaacatgcttaattagcacttaacagctaaacagggtacgactgcaataaaatcgtaaaataaggtacttttaccatattttttttattagggtcatatgtataacaggtttgaatattaaggaggttttgctgtaaatatctctatttaaatattaaaaactaatagaaaaaatatttagtgtgtaattacctccaattacacacaaatccaattacattgtgacttttcaaacgcacccttaatgtagtctatagtgtcacactaataatagtgggacattatagacaatattataaatatgataggttttagagtgtgattagaatgaatttagtgtaaaatttcaccaaatttgaaattttagtgttccattagagttgacctaaggatgtaaaataaaatttattgaaataggacccaatttacaaatttttgggttgaaaataaaacttttaaaaacaattcataaacatcacacatgtaaaaatattaagtagtgttaagcaagaaaaaaatattaggctaattaggatttttgtcttttgaattttgacatgtaccaaattatgccatttgaacatttttttccgttgaaaattccccttgaactattgagattgttaaatttaaatatatttgtccaattttattcaattttactaattcagtgattgtctatgtaatatagggctgttcaaaaaaattaacaaatcaccaaacccgaataaactgcccaaactaagctgaataaaccgacaaaaaatacaacacgaataactttacaaaaaattcaaaccgcctaatgaatatattgggtgggttgaatattattctaacccgcccaaataacctaaataaaccgaataaactcatttgcatatttttttactaaaattatttataacataatgttataaaataatatagaataatataaaataagtaagaagaagaagaagatgaagagagaaagag

SEQ ID NO: 34521 - DNA, 1222 bp, Cannabis sativa
ctttacaaagacttagctattaatttaagtgctaaaatcttttgtgtccacgtgtccctgtctggttggtccacgtatattgggcaaaatcggaggcaacaaatttgaaaataaaaatttattttgcatcattagtattaatgctcaagaaatattataaaacttacttaactttagctagtcccaaattaaataaaattaattaaatattagttaggtccagtgtgttgtacccactactattactccccttactctcacacaaggcctaaaagagaggaacttaatcttttcataaaaaaatgtttttaattgaataagcccaatactaactggccttacataaaacaatcataggtgatatgttatttttagcaacgtagtccattcaaatatctagaaataaattggcttcctatacgcatctaagcccaaaagtaaaacatataggctcatacatacaaaatgatttggatgggccttatcatgtttctaggtttatcgcagatgaaagaaattgccaaatttgcttgcgttacaaattatttatttgctctgttgacaattgcactatgattaaaattaaatcattgaatttgtcaacaagttaattatagcattttaaatcaaataaataatatgtttgttaaaagattttgaataaataattaaataaacgaacaaaacatgtaataatatgtgaattagatatttattacataattaaattatcatttaaataatcaattaattttgaaaatttaaggttgttcaaacaatttaaaatatcttttcaaaatttaaaattcaaactaattaaaaaatatctaatttttatttgatttttttttatcaaattcaattaaatatctaataaaataaatgatatgaaataaccaactagatatttttcatatcattttctaatcttattatttaataaaataaaaataattaaataaattaattttaaaataaatatagttaagaaattattattttatgaataaaataataaataaataataattttcaaaattatatgtcaaaatatctcatattaaatcttttccaatttctacaaagatatttaagttatttgaatagttaaaatattatttataatattttgataaataaaatgataagttagaaatatcatttctctaacttaataatttataaataaaaaaatatcaccaaataacaaattttgaatttg

SEQ ID NO: 34522 - DNA, 1277 bp, Cannabis sativa
gtagctttagtgtacaaaaccccttttaactttaatttattattattgttgttcttgtagaacttattattatttggctgttgtgtttctttgcgtacagattttgggtacgatattttttttttatttttattttttggattttgaaaaaaaaacaccatggtttcatattactgagaagaaacctactatttaaaatttagtgtagcagaaaaagtaatagttaatagtagtttattgttaactctagttgtgaatatgagatttcttctctttttttattaattttattttgttcagaaaaatgattagtgttgggagtgttaatactgcccaaaacatgcagatattcccatttgtcactttgtcggttttacttttgattcgaatcatatattgttatatatttacgtgtacacaccataaacacatgttattcatacgcacttatatatgtattcaacgttgcgataaaaagaaaataaaagaaagagccttatgttatgctttgacacatccacgtccccaactttttgtggatcaaaaaccttatatttgctcctttatcatttgcttaactccagtagtactaattatttagagtttttcttttaaaaagagagagaatttattcctaatgctttttgaccttttctcattcaaatttccatatcattttgtgagagtacaactaaaacctagctagctaatgcttataagtgagtaattctatgtttacatatatatatataaatatatatatatataataataataacacatagtaatatagcttcagctagcacaggtacccgtatagaacaaagcctatgtatagaaatcaaacataattactttagtttttaacaatatcattacccaacaagcccatcttttataataacgagtgattggtcttgttacttattgcttccccttttaacaacaatgccagcaacatgtttgcaaaagagcccatctttaagcccaaaatagggaatgatgctattattcctaatttatttatttatacgattatgctttttacatttctctttccttgtctagggtacttaaatctataaataaataattatcaaaaaaaaaatatctataaataaattttatatatagtaaataatcatataacccaacacaaaaatatcactagtatgccgccatatgaatgtatattacgtcacataaattgcacacaacattgatacacatgtagtaagttacttttaacgagtaattattcgtttaagatttgatgc

SEQ ID NO: 34523 - DNA, 1223 bp, Cannabis sativa
caataaagttcttggacgtagtattacagtatcttatctgagtgggagaattttaaaattcgaagcccctctttatttggatgacacttgtgatagctaactatgttatgctcatgatatgaactttagaatacaactgagaatgtaagtctaaccattcatatggataaaaataacttatcagaactttgaggataagataggaaattttgcaaagtctattccaatgacttaggcaaaatctctagtcctcatgaaatgttttatggtatctttaatgattacttaatcttaagcatgtattttacattaatatttatactagaatgctatgttgataacttagtcttgaagaaacttatagtttcagactaagataatgtgtcacaacaagatgtccctgagaaataatagtaagacgttaaatgtacttctatttatgaatttaactagactcctactattgagtgggagccatctaagatgtaatcaaacaaggaacattaggagacaggcaagaaaaatctctgtaagttacctatatgttagattataagggtgtatattagaatccatatatctacacaacctcataacctattcgagatggtggttactctgggggtggaggaatttttctaaaaggatgtaaaaatccatctataataatttaagctccattagtgaagatacataactaagttgcttttgaaaagcattggaaagttattcaaataaagaaagttcttactatgttatctctattctattttggatagaattagagacaagtcttctgtatattctgacgcacttaataaacagtaaagaatttagtatccctagatgagtaatacatgtagaaaatgatgttgcataatgttttatgaacacaaaggaagtaatggtggagaaagcaattgcttaccacagacttatagttccaataatttggttttattcaaatacactacacttgatcaggatatcaagagaatagattgattgaaatgcactacttgttttatgtaagtgcaaatgggagtttgttgagattttatgccctaaataaaacccattacaatacaatctgatttattatcaataaaagattagaaaatatttatgtttacatgtagttttcatgattgtggtttaatgtgtacaaaatatgttaagtcaagaacatatagttattcacaattacaatgatgtcaacatag

SEQ ID NO: 34524 - DNA, 1790 bp, Cannabis sativa
  modified_base (1545)..(1549): a, c, t, g, unknown or other
cagtatatacttagatcgtaattctttttcaagtttgcttttaccggagtaactgccttttgtactcttgcgaccctttccctctcaagataaccaaattgtcccttcttctcgtggaagagggttataatcttcagccgctcgagttattgggcagattgagctaatcataggcatcttcctgcccctttatatatcgatgaaggtatccttgtgatatgagactttctatctcatctttcaattgacgacactcttttgtggtatgaccaatataaccatggtattcacaccgcttacttggatccctcttgtgcctcgcatgtttcataggtcttggctcgccaaaaatggcttcttgtacgtatgcgaggtagattttttcccaagtttcattgagctcggtgtattcggtataaagagggatatacttgttgggtttcttgtcattaggcagccttttggaatcatcttttttcattgatcccgaggctttcgaatcaagttttccaacagtattatgtcacaattgtctcctggatttcgtgatgtgatgtactttggacttattctccaacccactcattcgcaaatggagtaaatccttttgtcttgaatcgagtcgtgacagaggtcaggcttttttaggttcagatacttccgtggatcactctcgtcatgattgtggccggaccctgcccttcctctaaaggtttgactcacttttttcttcctacaagggtttgcacaagtttaattcttattagactgaatagtgggttggcgatttttgtccgatgttccacgtatcctaggctatacccccagtcttccttcaatttcctcaagttgcatcccttgagagatctgagcatacccctgggtcatctcctgcctcttgacttgtgagccacgaggtttgcctctaaatctcttttctcaaggtcaggttgtttttgggtacaatctcccagcgttgcttttacggcagctatttcacgctccaactcggcattacgccggttttcttcctccaatcgacacctaagatggctagtttctaattccacgatcggcatatatctggttgggtcataagcgccatcctcatcaacttgactagggagtgactgattgttgctcttccaaggttcgtcgagccaagggccccaatacagggtcctcctggggcttgcattttgtacctgcaatgactcagcagatccccgaggactcaatgattcttttatgagacgatgattgattccttcttgaggactattaccggtggtgtcatccatcacttttatgtcaagaggcttttttctgagctttttcacagaggctctcaatgaaagcaccaaactgatttgagtctcacgaatataattcaacacagaaaaattatagaaaaagaaggaacactagatttttacatggttttgcagttaaaattctgcatagtccatgagtcaatcttattcagatttctgagtctgtgtttttttttcttgatcttatctgccactatttataattgcatannnnnagttaattacaaagctgaccagaatgcatttacggctattatccctaaaatcatgggatttgattacaaattaagccaaataaataaggtttttacacaactatgaatatcctgcccttattgggccgagataagcgcataattaaagacatatggtaagttgtatctcatagggatgcctcgtcgaggagcgagccaagatcactttgaaagcgagcagctgcttgtcattttagcttct

SEQ ID NO: 34525 - DNA, 3215 bp, Cannabis sativa
tttattttacctcatacttttacattacactatacattaatctctctatattattaaaataaatatttattcattttaaatacataatattaatttataaacacatgatattaatttaacataaaacaagtttagaacatgaatagtaattctctacatccaaaagtttagtttattgttttgaaaaaattatttaaaatacatcactatcacttgatgtatgatataatttaaccattcttttctctattttaaaggagtgaatgtaagtgctatatttggcataacaagtttatactcttcctcttggagaggtggaagagttgaatttctatggtgataaaatcgtgtttcgaaaagaaaagaaaaacaaatcaaaccaaaataataataaaacaaatatagttaaggagaagaaaaaaaacgaaagcattttctacacggaaccaattaaatttggtaaaaagagaaattcagttctttatgcctttacattaaaatatgtcaaagactcaaaactttggcctcaaaatcaaatgcatgccatcaattaatcaactatttgttttttcttttttatcaaaaaaaaaaaaaaaaaaaactatttgttttttcttcttctccatttaatatgtcgtgatctcatattatataatttattaaatatttaaatagtccaccatattatactataaaaaaatgtgacacctaattcagaaacaattcaagtaaaaataagattatcttaaaaaataatacaagtaaattgttgtgagaaaaatttaaacaataccaaaaactagagtattcgagctaagcaagacccacgtataaatttgcaagtattcgatgatgaataatcaaaataacacagagataactagaatggaaagaataaacaaataaagaacactaaagaattatggtggttcagctagagttcggtccacttaatccactttggaagagagattgtagttagtcttatttagattggatcactcatttatatagaaagtaagtgatctttcaatttacataatcagtcaaacaagagcgttacattattaattacacttattgagataagaaacttttacaaaataaatgaagggacaattttgaccgttcttatttaatatccgaacgggtgcgattattaaaattgaacatcagtcgttcatatcctgagtaacacatgcaacactactataaaataatttttctcgacgtttttaaacagtcgtataaagtattcctgtcgcttatacgaccgtcgtaaaacgggcaaaataggcgatagttaaaaactatcgctaatgtggacttctcgacggtttaaaaatgtcgcctataccagggtctaggcgacggtattaaaccgtgccctatactatattattattttattcaattaatttatgtttactcaattatatttatcttatattaaagttctcaaaattaatttaaactataatattttttaacttgaaatataaataatgtattttattttttttaaatctaattatttaaatactagaaattaataataataattataaaaaaaaataaagaacgatttggacgggttaatccgaccaaaccgataaaattattaggcaggttgaactttttctaatttttaattaggcgggttacaattaaatatttacaactcgatatttatattgggttagtaaaaatatgttataactcgaccaaaccgaccgacgtacacccctaatgaagattaactaaaaaattgtaatagaagattgacaataacattttttttatatatatttatattgatttttttgagagactagtttaaattggttttatcactcttaaagggatagaaactctcaaagtatataaatttaatgtactaatatcaattatcctttttttctgaattttctcttaatcatgttcgctgcattacaaatttaaccgtatatggtttagttaaatatgcttctcgagtgatactaattcggtttggtacccctattgttgtacatcatcttttccattaattaataatatcttaatttctcaccaaaaaaaaataatttttttttttatcatattctaatattctttgctagtaatgtaagtgttcccatgatgtaagtcacatactaaactttaaagcatttaaagatatatgattatctcttacacctaactaaacgttaatagttgacaagaaggaccgttgaataattgaaacagatcaccaccgttcatccatggcggctataatctcagccatcggatctcaaacgcgttcttcaattacctctcgtgcgttttttcttaaaagcttcctctcccttttactcccactcccaacccaaaaaggaaataaaataaaggaatatcattttcaactcaatattttataaaaattatttgttggacattttatttaattaaattataagtttgattttatatttttttaaatgatacaaaataatattgtgaattaatttttgtcaaaataaaactttatattaacttaatttaaagttattatgacaaaattataaacacattctgtatcagttcgtactaaaattgaagttgattatattaaaaaaatattaaaaattaagctctacctattattttatactattttataaaatacagtatctagtttattattttacaaactagataatttaatctgtaatttttacaaaaacacaagtttaaaattactctcattagcttctctactatatttttcaaaatatctcaccaatattttttttattttacctcatatttttatatttataccataaattagaatctttatttatttttctctctgtatcatcatttataatatattttacttatataaacataaagaaatgaaaataaaaatagaaaaagaagagagagaaaaattattaaaatattgtttgaagaattaatagtaagcatagaaattttgagtgttcacttgatggagcgcaattttaacaaaaattcttcattttttacattttgagctattttggagatattattgcatgatattaaccatttattattctacctttcaaaaaagaaaaaccctttattattccaccaaaaaaatccctttattaaataaataagaagtttttttatttttatactttaaaacagttttttttttttacatttttacagaattctacata

SEQ ID NO: 34526 - DNA, 1778 bp, Cannabis sativa
agaaaacaaagctaaaactttaagcctgaattagaatattttctaatcatattttagaaaaattgataataaatagttgcagtgttagtttcttctttaactttctagcgcatcatgaatcaactcatttggagtttgtatgtgaatgttatgcacattttactaagagaggttgaaaaagaaaaatgtgttattgccatgacgaggctaatggtggccgcgtcgaggaagtacataaacgatgttttttttgtatttgtataggcgctgcagtgaagctatttatggtcgtggcattgtctttgtacatgatatgggaaacttcatcttttttcgattttgggctgcaaaactctattttaatgaaaatagattgcgaattttagaggaatatacaaaatggaaccctagaaacacaatcttaacgcatattttcgttaactaataaataatttttttgtaattaatataccaaggaattaaatagacagtaattaataattatgatagtaataaatgacaagaagatttttaacatgattttaaagttaactcttcatagtccatgagtccattttatttttggatttataaattttatacaggatacaataaattattttacagaatgaatgatagatataattatctttctttctcaaattagttgtcctttgttccagggttctgtccctatttataagagtcggatatgatagttttattcccttgggatcttatcacttgtaaccctttgtgaaacgtgaacattgcccatattttatatttacacacatgagataattacaaaaaacttctcatgactactcttttaactttatgtacatgcagttatgctgactatgcttcatcttgcttgcaatacaatggtactcttctagacagtttatcataaataaccatctaagtatatgtcgtagtattccttgcgttcttctattaatttcaagtgaggcatatgcgagacgcttatcatagtatgacaatgtcaaggtgaatcatgctaatgctattgtctttagtctttcaacatactcacgagtatgtgggtcaatgtgatacaatctctctgaataattcattatctaccctgtctaaacaattatgctgtctattctatgtatcccaagatggactttctttgttcatctcgctggtctcataaattgctagatattattcgttgctcgtcattgtcggcaaaaaaggtgagtttgaatatttttacaaattgcacttctcgagccgagttgtctgaatgcatttattattgcataatttgggctgattcatatgccagctatattacacgtgtcagcaccatattagttcttgaaatatgagtataacaattgtcccctaagaagccctttttcaaaataaaaaggactttttaattgccttgagggtacgatagtgtttttcccattataaaactgcatgccttatttttgcgagtcaagacgttgagatatatcattttagcatttattacattgacctttcttttcctatagtttccatccgttcgatgagccattaatgcaatcaaaaagttttcatcatttgggtataaaacctgaaatcccatctatttttctattataatccacaaagctcttagaattcgaaataaccccaaactaattttctccctgaaattgcataccctcactatcccttacatttttcctttgagctttgtgcaatttcatctctcacacccccaattgcctaagttcaggtcctttgcatca

SEQ ID NO: 34527 - DNA, 2452 bp, Cannabis sativa
tgtttatctaagggccaaagataaaaaaccatgaaaatatgaaaatatgtccaactaaaacataaaaatgaaagagaacttatgccccatagagcttgataattgaggactgctgcttggacatctcttgctgaacctcctccatggcaacaagacgattgttcgcctattgaacctcatgcttgacctcctggacatctataggagcagaactcgaacttgcagcagcagcaccagcattagctttaggacgcttgggaaaagcgccatcaaaatactccgagggttggaagatggtgccagtaaagggaggctcaagagtttcatgtgagtaggccacatctttctgagaggacagaattttatagattaagttaggaaacacaagcttatgagtacgctttttacctctccaaaaagaaacaatctggtcaaggattgaagaagccagatcaatggatgcccctgaggtgatacgaaagagaaaggatgccaaatcttgagataccacagttttgttggaattacgaagccaattgctaagtgtaaacctcatgagtgatgcatgagcataagtgagatgtgtaatgcgaagactctgcccagatttccattcaactcgtgcactagtgagttcagtgagcattagatgacgatccatggacatgacagcattggacacaccttcgggtaattgcaaagccctagaaatttccttgacagtgaatgaaaaccaatgcccccgatcatatactttaccaaaaaattctgagctctcatcaagcaaatcattactcaaattggcatagaattctttgacaatactttcgatatacccttcaaaacaagtgagagtattttcccattgatggtattgaataaacttaacaataccatacaccctatgagcatgcaaatcataattcctctcactttcaaacttttgggtagcataaatattccaatcacgctgattatcatgataggaaaatctggaattgacagcttgagatggagaaatattaccaagagaagaactcataggcgcttggctttggcaacaacagaagctttggctgcagaagatgcacgaggaggtgcgggagcagatttggtcaatggtggctcgggatcgagatcagtttcctcactgtcagaggagactccaaaatcttctagaagttcttttttagaagggataaaggcggattttttctcggagttatcagaggagacctccataggttcttcttcttcagaacttgaagaagccgaggggggattcaggttcagcttcttggcagtaggattaggtttgtcatggcttcgtttagtgcgaagttctttcttgagtgaagcttgctaggcacgggtgcgagaggagggacctataggtgttgatgcagtaacacccttccatgatgcaggaggcgttgcagtagcacgaggaggagaccccttcgatgatgaagacgatgaagtgcaaggtctgtggggtcgcacaaatttccaagccacttgtttgggaattcgtttcggcttgggcttcactgtctaagattcacgctgaggaagcgatgaatctcttgggtgtgaagcagttgcaacagcagagagcaagattggagcagcaggaggagcatttgagagggtaggatcgaattcttccaccctttttggttgccctaggttctttgtcttatccatgggaatctgaaagagagaaagacaaacaaagaagcagaaaacaaaagaataggaatcaggtaggttgtaagaataaatgacaaaagaagttggtttatataatcatgtgagagagaagcaaaagaggaaaccaacttaaaatttaaaaagaaactaccagcccacgaacacaaagaaatcgccccactcttttttaaaattatatttttaaaaataaataaataaaaggaaactagaataacccagatactttctaaaaataggcaatttaagaaaattcttcaagatcaaagacaaaatacaatgaatatgatatcaaactttaaaaggtaacttatcaaaataaatcaatttagattaaatgttgatacttacaaataaagcacaaaattttcttagcccacaagccaagtcacaaccgcctccctttttttattttattaatttttttattattttatttttgaaaacctgaaataattaaaactaagtaaaatgtgtacaataaatataaggtattctagagcaagtaactaatataatttcatagcaaatgataattatacaagttatgccttcaaaagagaataactaattagtatctcaagaacaaaccatacttagcacatgttgagaaaaaaaatgcatgttacaaatagtgtgaatcgggataatttttagttgagtagaggagacttacacacttgaattcacttgtcaaacataagtttgtgcagtgaaaata

SEQ ID NO: 34528 - DNA, 1701 bp, Cannabis sativa
aactggttctgtaaagcaactaagataaaaactcacacacaaaaatcagttaaataaaatagctcaaacaaaaacatccattcaacatgctccaacacaccaaataattacacccatacatatctacctcaaaaatactcattcattatgttatataatcgattctattttagttataaccagtttgagttatttcgtattatttatttttattcattataacattgttatagaaccggtttcaatttaattataattaatttgagttattttgttttattaatttttatttattatattacagaaccggttatatttcaattaaaaccggtttgagttattttgtgttatttattttaattcattatattatagaaccggttctatttttatttatatttgagagatctacttcttgtgactttttccggtgacgatgactttctcggtgacttttcagtgagattaactttttcggtgacttttccagcaccggtaacttttccggtgttggtgacttttctgacaactttttcagcaaatagaatttctatctttctctacaaaaatatatggcataaaaaagccatataaatataaaaatatatatataaaaaaaaggaaaaaaaaacctcataatctcttaacattatttatttatgtcataaaaaaactaaactcgttctaatttctactttttataatatatatgttagccgtgtggcgacccaataaagaatgatccaaaccatttaaggcaaattcaacattattattatgtctaacccattttgcggctatacttaaaattagagagtattaatttcatattcaatgatatatagctaggccgacaaagcaaataattattatatacacagttgccactcctaataaagagtataagatttgttattatatattattattttaacttaacaaagaaagtactatttaaatattttaggaccacgttcatcattctatcatcattacattcttaataattaaactacgtacatgtgtcaatatgtacaactcttaaatcacatgtgaatcagtaactaataaaatagacaaagatttgagtacaaaacacatagtaaatactaatttaagtcatattcatacataacataactgaatacattattataggtaccacttttatctcccaaaaattgtactatattacataaaaagcaattttatgttatatttacatcaatatttactattgtatactctaatttattataattacaaaatttgatataaaattgaatatttaattaatatttttattaaaaatataaaaaataatacctttattattaatatagcattgttattatacaccttaaagtatctctaatagtaaatatttagaggatgtttgtttaagtagacatattaagtggtaaaatattaaaatgctataccattacaaagagatggacgtcaatctagaaatttacatggaagttatacagtagcattgatgctatttatttattttttttaataaaaaaatattgttgctaaaatcttgtgaaaaagaaaaagaaaaagaatgacaatcatgcaatatcgtaagatatttttatctaacgattgcatcctatatcgtaagatgtttgtggatgcaatatcgtgtcccacttgtggtgagtctaggtggcaaaagaaaaagaattttga

SEQ ID NO: 34529 - DNA, 2590 bp, Cannabis sativa
tgacaatgtgtccaataagacacttgagatagccaaaactcacacttcttgaatttggcatacaacttatgttctcgaagccgctataggaccatccgaagatgttgtttgagctcctcttttgattgagaatacacaaggatgtcatcgataaaaacaattacacaaatatcaaggaaatccttgaataccctattcattaggtccataaaagcttcgggagcattggttagtccaaaagacataatagaaattcataatgcccaaacctagtacggaaagccgtctttggaatgtcctcctctcgaattcttaactaatgatagcccaaccagagattaatcttttagaagaccatcttcccatgaagttgtttaaaaagatcatcgatcttaggtaaaggatacttgttattgattgtcagtttattcaattctctgtagtcaatgcacatacacaaagatccatctctcttcttgacaaatagtacgagagctccccaggggtacacacgaggtcgtgaaaaccccaggtcaagcaacccctgaagctaaattttcaattctttaagttctgctggagccattctataaggggccttagaaatcaattctgctccaggtgctcaataataaaatcaatttctcttgtgttggtaaactaagaagttcatcagaaaagacatctaccaattccagaaccaccctgatgtcttctggtcgaactgtcttaggctatgtggtaaataataccacggccagaaaccctagacatctgtgtcgtaataattctctagctattaatactgaaatcactgggattcaagatccctaaaccgatccaacaaaaagaaacggttcctcaccctcaggttgaaagattaccatctttcgtttacaataattactagctgagtacttggataagaaatacattccaagtatagtattgaaatctgctaagcccatttccattaagctagcactcaactccctattctcgattcttatcagcatagacctaatccaccttttggagatgacgaattctccgccaggaagtatggttccaaacccggtatcataactatcatgcggtctatccaatttactaaaaattctagatgtcacataagaatgaaaaaacacagagaagcaagagtgcttgaccgaaagctgacctgttacagcacaggggctagcttctgcatcaacctgagttagagcaaacacccaagttggagcgagttgtgtcgcagtcttttgatcttctttcttaagttgtggaaaatctcttttatagtgccctagcaaaccacactagaagcaccccgtccctcttcactctcctagatgatgtttttaaaacaacttgggcattctaggtaagtgtatcgagttttagagctaccttgacgattgcctcgtccttggttccctcagaacctcttatttgacttgagccactagatgtagtaggtgcctttcttttctagtcagtggtcgagccactacctcccttactaaagcctcaggtaggaggattaggagccccaccaacaacctgagtacctcgaaactcttgagtgcactccactgcgccctgaactcgcagtgcttttctcaccatataagcataggtggtgttgtcatcagttgtgatcatgaggtcatgtcttatctttgaattcaacctgtccatgtatttttctttcttactaaaatttgtttgcattattcctgagaccagtcttgccaatcgatcaaactgtgttttgtaatcagtaacactcatattttctttctgagtcagctgagtaaattcttttcttttctcacttctgactgcttcattatagtactttgctttgaacaattcctggaccttttctcaggtcatcgtagcaaaatcacaggtcagggaaaccatgtcctacaatactagagcatcttcttgaaactggaatgtggcaccggccactctgtcattaccggtgacgaccatgaaattcaaaattcttgtaataacagtcagccactgctcagcttttatcaagtcgggacctcccaaaaagactggaggtgcctgcttgcggaacctttcatatagtggttccattcagttcactgcaacaaccgatcctacctgcacagtaggggcaggagctaactgcactctagggcagggatcgcaggagcaccctgctatctcaaacgtttgatttcttcatcatgctaattaattctggcttgcatttctacaaacctattttcccattcttgggcagcctgcggcgagttaacattaccccgaccacatcccctgcctctaaggcctctgccctggccacaaacatttaagggagtgtgaactccgtaaccaccactggatctgacagagttaccctgactcctggtgtttcacctggtgtccatactagtagaatagcctgcgtaacaaactaagagctagtttgctcagatcgtgatcaagaataacttactaattaccgcttaatttggaaatttgaaacatgcgcttatttagctatcaggttactaacatgcttcctatcaatctttccttaaat

SEQ ID NO: 34530 - DNA, 2808 bp, Cannabis sativa
agtatggtgttggttttgtgacccgtgatgcaagtgacttactaattaaaggttgcaccaaatgctttcaaggctcggtttccctagaagttgctgaagctatggcaatttgagaagcgttaagttagataaaagagcatcattggccacaagtagtttttaaaacggattgtctttccgtggtacaagccttgcgtagctctattgttgtgatttttatgtttgatcaagtaattaatgattgtaaaactttacttaatattttgaaaaatatttttatttattttgttaaacaatcagtaaatatgttggctcataattttgctagaatctctatattttatctttgattattgtttcagtttagagtcttttctaactgactttttactttgtttggtaaatgagattgaaagctgttgattttccattaaaaaaagtaaatcatttatttcatcttaatatcaacatactactcaataagtagagacatgtgcacacaaattatatagtagaaaattaaacatatatcataacaaataacaataagctctcttaattccaaagctattttttattttctctctcttattctttgcttatatcattagcatcatcatcatcatgtttagagcaaaagcaaaaacctaagtaggtggcaagcattgatatctgcaatgtgatccttcacaaaattcagatgtgctaccacaatattgatatatgctacaacacattccttcaccacatgggctttcaccaaaatctggcccacatctatggtctggtctttctgggcttggtgggcttgggccacactgactctgacaaccaacaccacaatatttatttgtgctaccacaaaagccataagagctacaacaaaggttgtttggacacaaagcaccacacttgcacttgttccacatctaggaataactgcagagactattccaaaccaaacagaaacatagaatagtgagaagaaaataagaacaagaggaatgtttaacttcattattatgattttactttgttttaatgaagagaactagtgataggtccttatttatagtgtaattttttgtgttattaaattttaagtgtatgtgtttaaatattattatattattaatattatgataaattagcggtttcttgtgtcaaataataacaaaccattatatgaaatttcattgtgtatgtgttttgcttttgactatttgttataaatattactacaatgatgagaactaggatgagaaaagcaatttcctttttatttttgtaagtatctctatggactcatatatagctatgcatttatttatgtagtaagaaagaacattattgaagcacattttttttttcaggtgagctatatttctttttatcggtttacttattgttctaaaactgttaagcacagctaacattttattcttaagtttactttgtctattgctactagcaaagtatggtatggctttccaaattgtattcagaacattattttataggtcttattaatctatatatgaactttctcaatttctttctcttttagggaggtgattggggttttcctgaaaaaaaataaataatcataattgttataaatcaaacttaaaacttgataaagtaattactaaaattaatttgattccataatatatcatttctagtcttccaaacatagtatgttataattgttatagtagccaatatacttgttttttaaaacctgaaactttaccaaaatttttaactttatatgctaattaaaaatttaaatgttgctaaggtggtattgttggctataatcactcttaattaatagaaaaatgctcagtctaaaaaacatcgtcctttgtctattccaatgggaatgaatgtaggaagcgagcattggtctaaactggcttttaacaaggttaaggtgaatgtggatggcgctatctttgcctcggaagggtggtttagttttgggagtgttgcccgtgaacataatggtcgtgtgatcgaagccatttctcaaagcaaacccgaacaagtggatgcggctatggctgcgatttatggcatcaaagaggctctaagctggatttaaagaaaaggttgggttgatgtgcaacttgaaaccgattgcctagttgctatccaagctttacaaagcacaattcatatgccttctctctttggcttattagttcatgagtgcaagatcctcttgacctctttaaaatttgttgagattcattttgtcaaacgtgaggtaaataaagatgctcattgtcttgctcgtagctcttatttttatcccgatcatattttcaccaagactaatgcttccgctgaattcttatcaattgtaatggttgatgtttcatgttaataaggttaactaaatgttagattattaaataccacatgaaacaaatgtataatttgcttataagtaggtgctatatataaatattttttttaaaaaaaagttttgtagtcaaaatttgagaagtaattgtttaatccatattttagtcctgatatgatgtcattgtaaaataattaaactaaatgacatatatatatattatgatattaaagtattaaaaatgaaatatattaatctctataatatacataattttaaatttgtaatttgtaattgattactttgatacataaagtgccatgatgttgttacaagctccactaacaaaacttttgttaaataccacatagaacaaatgtgtaattttaaaataattataggtgaatacatattaaaaaactttttggtatgct

SEQ ID NO: 34531 - DNA, 1515 bp, Cannabis sativa
  modified_base (1465)..(1489): a, c, t, g, unknown or other
taaataaggagataaaggataaccctgccgtaacccccttgtcggaaccacttaggacgaccattgattaaaaaagtatacttaggggtcgtcacaaaatccatgataaccctaatttaaccctcaacaaagccaaactaccgcatcatactagctaagaacctccattccacccgatcatatgctttactcatgtcaagcttgagttccataaatcctattctcccgttatttcttttgaatagtaaatgaagtagctcaaaaataatgttgtcatgtattgagcgtcctaggacaaatgctctttggaaaaatgagatgagggggctaagaacactttttatcctttagtgataaagctcttgcaataattttatacattacattacacaaagcaatatgtcgataatttttaatcaatctaggtttttttacttttggtatcaacaccacgtttgacttattaaattgtcgcaccaaagcactgccatttaagattgtaagacatacttggctcactctttcacccataatatcccaaaatctctaaaaaaaatgaagcatgatattcatctggtcccagagctttagtagctccaatggccataatagcctgatgaatatcttcctgcgtaaacggttgcattgaacggccattatcagccaccaaaatatgtaaattaacaacttctataccacgctcacaatgaagcagaatatgaagctttgttggcaggattgagaatagtcgaagcattaaaagtcaagaatcttatatgctatagtgactcgcaattgattgtgattcaagttcaaggtgaataccaggcaaaaggattaaatatggtgaaatatttagagaaagtttggaagaacttggaaaagtttgattattttaagattgaacaaattccaagagaacataactcaaatgccgatacactagcaaaaatggcctcacaaaatgaactcaataacttaaatctggtaccagtcaaagttttgaagttgagatgatagttgcctcgccaaaatggatgacacccatagtcaaatatctacttaacggggaacttcctacaaacaaaactgaggcacgcaaactcttgtattcaatacctcgctatactatagtcgaaataaaattatataggagatgttattctatgcctcacaggagctagtgaaataatcagagagattcaggaggacttttgtggagatcatgcaggttggcaaagtttatcaaagaaaattatccgtcacgagtactattggccaacaattaacaaagacacacatgaatttgttaagagacacgataaatgccaaaggttttcacatatagctcgcataccgtcaacagaattaagaatgatgacctcaccatacccatttgtaatacggggaatgttgggttttatgctctaaataaaactcttttcaatctgattagttatcaatnnnnnnnnnnnnnnnnnnnnnnnnnttgcatgaattttacatgctagtggt

SEQ ID NO: 34532 - DNA, 6280 bp, Cannabis sativa
  modified_base (45)..(51): a, c, t, g, unknown or other
  modified_base (413)..(415): a, c, t, g, unknown or other
tataccatacaagaaaacgtatatgcctacaataaaaaataaaannnnnnnatataatattattaaaaaaattatatatataatattaacaaaattatacatcacgtttatatataataaaataaaaactaaacatgcattatctaaaataaaatgatatactttacaataaaacttatatactatataacagaaaatatatatataccttacaataaaaatatatatactaataacaacaaataaaaataaaaatatataggatgctgttaacgtagattttcgttaaccaaatttgagcctcacgattatgattcaacacagaattaataaaactatagaaaaataaaacaggttcaccagatttttacgtggttttgcagttaaaattttgcatagtccacgagtcaatnnnattcagatttctgagtatttttcttagggcctcttgtataagagttttttcgtctcttttttgagatcccaatggtgagctggaaccatttttttatccgagatcgacaacatatgacgatcgcggatataagaaaatctactgacttgccagggttgtgagtctcgcttcgactagttggtcaatttggatcggtttatgtaataattgataaatttatatattattattaataataaattataagaatttttaatatttagtatcgaattttttgggcttgttgcgtatcatgttttttaggttagtctatttgtacttacatatcgtgcttttcgtacttcttttgttgtattgtgcttaaggatatattttttaggctatgccatgctaatttgtagcatcatgttgtgttataggtgtgtaagtcagtcggtttgatcggtttatgctatattttattcaactaaatataaaatctgtgttacaaaaatttaagtacaacccgtccaattaagaaaaaagaaattaataacccgcctaataaaattggtcggtttggtcaagttaacccgcccaaatcgacaactattttttttttacattcaattttttttttatttacttatgataataagataaatatatatagattgaatgcaaagttcaaatcaactatcataaaagaaacatagtagtttgaactttatatatatttttttaaatatgtatgtcttaattagattggtcgggatagtcaagggcggaggtattctatgaccttaggtggccatgcccccctcaacttttcatgaaattgtagtattaataatatatgtaagtaaaactagagaaactataaattattagtttttattactttctttataaggttactcttataagatatatgttatattatatatttataaagataaatactatggctataataatgatcacgtcattattataatgtatagatgaaaaaaatataattatgaataatgacactttgttgtaattttctaaattaaaaatgggtcatttaagtaacatatttttttaatagtaaatatcattttagactttgtgttttgcaaaaattattaattgataaattagatattatattttctaaatagtacaaaatagtatcatgaactgattttttgttaatataaaagttaataataatctaatctagagttattatgacaaaactggatacattttctacatttattcatgctagaattttttttcaagtttattatgtatatataaaaaattatcgaaaattgagctcagtgtacttttttagaaaataaagagttgaatttgtcattttacaaaacagatggttcagtcgataacttttgcaaaatacagagtctaaaatggtattaactatttttaatagaaattataagtcttatcttgtaggttccatacaaaatgatctaaaacttttacacatatgattcttttctttttttaataatagtagaagatattgactaattaattaataatatatattgcaaaaaaattattgtaattatttgtgttgttactaaattcttttatgttaaatgttaattactaaataatattaattttatatgtaaatgctaattattttgctaaataaaattataaaatttcatatataattgccacacacggtgtattttttaaatataatagtgtaattattagactgtgtaatataattaataattaaacacttatattcaaccacgttttataaataatatttgtgatgtgcaatattatcataaaaaatattttgtttgaattataaaattttaataattgaccccaagaatttaatcctaactccactcctggcctggggatagttcagattgattgggttagttagtattatttttaagtcgcttaatataaaggtgacgaaatatattttcgtcagattattgagtttgtattatttgttaaattatgtcagtttagtttgagcagattattcagttgggacgacttacaattttattttgtcgtatctaaacccatatttttcttaccgagtggtattcgtgcctttaatgctcgtacccatattccttgtagcatttctcaatccataaagacctacccaaaactaaaagccctcttttctcataaaatcagaaataaataaagctccaaacaaaaacaaaaactctaatgacagactaaactcaaaccccttctttctctttatttcgtcttctctctctatctcactgactcggaagaagaaatctctctctctctctctctctctcacagtaagaatcatccacaatggcagagaaggaagaaccagaggaggaagaagaagaagtaaaagtgcaagtacaaacagaagaaatggagaatgtgaggaagcttttgagctcctacattggcgtgagcttcagcgtcttcttggcattggctcccaagaattggatgcagttacaggagcaagcgagggagcttaaggggagattggcgcaagcagaggaccagttgaggttgatgagttcgaggaggaaggaggattctaaggccaacgcccgagtggtcgagatattcgctagtcacaggaatgcctggcaagccgaggagaagtggttcctccaccagatcgatgccgcaaaacaggaaatcgctcatctcaacgcgagaatcgctgagtttgagaagtccgaagatagttccagggaccgaatggatcaattggagaaagagctagccgagagggacgagatgatcggtttcatgtcgaggcatggtggggctgagttcgggcccaaggagggggaagaggacgggaatttcggagatggagatgctagtggtctgtacgaacagtttcaacatcgttctagtgagtttgattcggagtttcttgcttcggcttccaagctttcgacggaaagagccattctctggcaggtttgaacaagttcctatctccattttttgtttcttaataatttctcgaattagagtttcaaagatattatattttaattgcttttgacccagcaattagaatgctcattttactattttgtttctcatttgattttactaagtttagaataattggagtttttgtatgatttcacaatagaagtctaaattgaaattatgataaaaagtttttaccttttcaaaataataaaaaattcttgtattattttatacaaaatggagcttaaagttcttaaagggaaaagcagctaaaggtagagcttgctgtttcttttccaatatataatgttcgtgtaatcattaaattaaaataaagtagtagatcaaagtcttttcatgatgcaaacatgatttcgacttttatatgaattaataaaatatcttatttgttccatatggtatggaagaatagttatttgactaaatcttccttttcacgtacacgtgactttgatctcaatgatgtttttttctcccactttctattactcccttttgctggcagatgaaaagagtttctttcttttattttatttcatttattattattatttttatatgtatattgaaatgttaacaaatgttgctaaacgatattctttataggagatggatacaagttttatttttcgatagaaatagtttttctgatgtctggtttggaagtaatgtagaatatattttctttttcatcttgatgttgcaatgtagcatgaaaaatatttagatacatcataaaaccaaggctactcatcttttgtcaactaatcttactcagttgaacaatggcccataaaatattagaaaagttgcaatctactctttagacttggtcacttgaaagtagataggtggttattggatgttttaagttgaacgctttgttgtaacttgtatgtggcactttcctgggccactatatcaacctgttatctctttctttccaaacattagagaaagcaaacatcagtacttatgctgtgatagtgggagaaattctattctgttgtgccattgtatattttgtaaatgaatttagtaccaaatcattttcatgtaaagttttcattttcttctttgacttttatatttttgtgcaattttatttctattctttttgatatctatggatcctgctataggaagtttagaagaaacttttttatattaggaaatttattcttttaaaaaaaccttatgttcttttctttgtactacaatcatcatcgcgctaatgtttgtttgcagagttaataaattcatgacagcccatttggctcctttacattaattttacgcagattttttttttgttcttttcgaaatacaatgcttttgagaaagttttataatcatgtcgggtctttatgaacaataattacttttctggagccggtcccacaaaattaatgcaaaagttaactgtttgcatattaacttactttttttttatacatttttaactacttaaacaagtacaaatcaatacattttatatttggaaaggatcaatcaatttccaaaattgcctgcatctgcatgatttcaataagacagaaatcaccatttcattgatcaattaaacttgagttagctaaagaggttatggtagccagctcctgtaatgagggtttcaattattccaaatttatgcttgttttaaatcttttaacttttgcaggatgtacagtatgaatctgccgagtcaatgtatcctatgaagcattttgttgcaaggtaagtgctaaagttacgtttaataatgtagtaagcatgcattttatgcacggttgctgaagaaagggatccatttctttcctcttagacgggaatccccttggaaggtcgatggagattcaagtgggatctcctcaaagctaaagttacttgaacaagaattactgaatttggaaaaagtgggaaagagtgatgtattaaaggctccatcattgatgaggaaacaagcaaaaagatatcaagctcttgctgggcagatagatgagctatgcagaacaatggtaactttttaacacctttgcttttctattattgtttttatttttgtctattttgtctgttcgattagagttttccatcttacatgaagttgtgttgtgctagagaatgtttgaatactttcccaatcagtaatacaagtagttttgttcaagaaaaatagacattgctaaatttcataaggttcactcgtctctgaaatccttcaaatagaatgcaaagaccagaaattttgatggggtttaatacaggggaatacatgttctgtaaactcattgattacttctgatagtgaatggtgcatcttttgtgctagaggctaaatcattttctcttataaaaactgatcaagaatattttacatattaattatctaaaaacaactgagactgaccacaggaaaactattttttcctgtgaacagaatgacaattgtcttataatcttttctttgccatttataattcaagagaaaaaaaaaaattattctgtactggttttatgacataggcaactacaaatttgcttgggttgtaaatttcttaacatgaagttattctgtgctgggcaatatttgaatatttgtagtttagtttaaggccttatggcgcgaggagcattcttcatgctgatgaatttgtacaagggtcggtgttagggttagtgtcatcaattcctatcacgaggtctatatctcccccctgcaatgcactattggaaatgtgatgcctgcctctattagtttgattcctctaattgtcattagtattatagatagttgaagtatcataaaataagtctgttagggttatagatccattctagtaattacatttt

SEQ ID NO: 34533 - DNA, 1461 bp, Cannabis sativa
  modified_base (31)..(38): a, c, t, g, unknown or other
atacaaagaataataaaatatttttgtcaannnnnnnngccaaaaatggaattaacaatggactaaggctaattaacacatgaaccgcataaagatttctccttctatttataatcaattttcataaaataagattaagtagttcccgaaaatcttgatcaatattttagtactttcattgaaaattgtacgaaacattcactaacacaaaccttttgtcgcaatggtgatgacgagaaacaaccagcaacctccccactacgtgatctttaagaaagtccaaaagaagagataacatcccgagtgaaaggagaagacggtgatactaatgatccagattactcgagagacgatccccaaagactgtgaggaagactaatgtaaatatgcaaaattgaaaacatgagatatttatgccgcaaatatctttttttaatcttacatattttcatttttgtccctataattttttttaggtgattagcagcgaaactctttatgttttaatttttaaacacttaacctcttgatcttattttttggtagcaggactccattaacttcactgttgtttgtcaatttgagatgtcagttcaattttattgttaaatcccaactgaaactgtgcacacatgtatacacacgacactataatctcgaagccaatgatatcttccattgaagtggagtctacaaaaaaaaaaaaaaatctcaaagccaataaaaacatgtcatgaatatacaggtgtacacatggataatttatttggcatttaagagtaaaatttaattgacacattaaatttgcaaataaaagtaatgttaaagaggtattggcacaaaaaaaaaaaatattaagagttaagtttataaaattaaaacataatcgagtttcctcattaatactcttttagcaaaaaaaaaaaaaatcccctaaaatatgtggttgacactaccactaattgggagtaatatataaatctatagcctaaatgcaaatttgactgaaatctgtagaaaaaatagtaaaaatattattttaagaataatagtttttcttctctgaattacaatttttgtagaattttgctttgtgtacaccattgaactatacaaattattaaaaatgtgttccttcaactgcattacatttatttttaaaacaatttgttatgtgactataaatcacaaatatacaaataaatatataaatattaaacattgttgacatttattagttttttttttttttaaattagcgtgatgtcattaaatcaaaaagaaactagacctcatggtcattacataacaggttcactgagaccgggatagatccaaacatatgatgttattaaatcaaaggcccatctagccacattgtgagcggcaaaattacaagtttgactaataaaagaaaaattacagctaataaacgagtgagaagacttagtacaaaatgag

SEQ ID NO: 34534 - DNA, 1176 bp, Cannabis sativa
gaagcaaatgaagggacttaatatcattttgcaagattttagtttattaaaataattttcaaggaataatgattagtcggttcagttaattggattattgttttgaatgttttttggaagtttatttatcagttttgttgacaatggaaataagtatcttcttaagtttaagaagagtgtttctagttttcatgttaagaagttctttgctcaagtaatgtcttaaataaaagtttgtttttgcatgataattattattcagtggtgccttttttacataaaatatatctttaatttattataatcgaatattacacttaaagtttattgagactatgcatgaaaattggttataaaaaagtggtataattgggtttttcgtgtggtatgactagagtaagaattagttgattgattgtctataaatagaatcttaaataaataaatactaagtaaataaaatattaggaaaacgtgaggatgaaagcaacatattttaaatatttataggccataaatattattgaaacttatttctacacttatatttatggttaatgtgattggtggaacaaacgtcattactttagtcagccaaaataaattagaatggaagaattatataattattagtattaaaaaatcttatataattaaaatgaggttaatattcttaatttttaaaagagttctttaagttaaaatattggttgttaagtgtgaaggagaataattgaggatatgaaaattaggcactttgatattataaaattattcatttaatataaaaattttaaatggtaacaaatgatgcaagtatgaaaggataagagtattttgatctttattgtaggctaggtttaagtataatttaatgatattttggaatttcgttatacattgatatatgggtaataaagttatggaatgttattagtataaagataatcatattatagtattaaaggaagataaaggagtatcataacaagataattaagtttgatggatttagaaggaaagtccaaagtgaagagacttttttctatataattttacattgtgagtgctagtaagtctatatgaggaatgactatcgttagttggaatgttagaggtttgaatagtaaggatgcaatacgacatgttaagctacttcttcgagagttcaagcca

SEQ ID NO: 34535 - DNA, 1364 bp, Cannabis sativa
  modified_base (708)..(711): a, c, t, g, unknown or other
cactacaacaaaatttagaattagtgacatttcattttgtaacatttgtagaaaaatgttattataatagtaatttagcaacatttcatcaaaaatgccaccttagaaatgataaatgacatttttagctggtaacatttattttgaagtgtcagcaattatatgttttattaacatttgatttaaatgtcattaatttataaataattaatattaatagcatttagaaaatgttagtaaaatatataaataataacatttgtaaaaatgttaccaaacattaaaattaatgacattttcaaatgttagtttttttttttttttttaatttaacttttttaacaatataaaataaaaatattgcttttaattaatattactaaataaactaaattttttaagcaattcaattaaccaattttagggttacagtaattgagaaccaagcgaccccaggcgaacgacaacaacctggctctgcgtgtgatcacctctctgtcagtctccgacggtaagttttcttttctctctctcgatttccatttgaaatttgaaaatttctttattttttgggtaaaagtttgcagagagagaaaatagaccatatcgtctctcttttcttctctaagtcctcctagggtttcatttcatttacgcaatctcactcactaagaagttcgatccaaggtctctctctctctctctctnnnnctctctctctctctctccatggagttttttagttatgtagatatagatatatacatgttgatgttgatgttgagattcggatatatagtttgattttgatagcagagaagttgtttaatttcagattgaatttgatttccaatttttcgatagttttaatatttagttgaaaaagccagttagcacagaggaagaagctcacgacatgctaagttacacatttgagtgtgggatcaatgccctagacactgccaaagctgtaagttagaataaattgtgaaattgggtgaattttgtgtatgaaattagtgataaaggtttgaactttatgttgctggacagtacccaattccaatgaaaaaggagacacaaggaagaactgatgtctttattagtagctggctcaagtctcaaccccgtaataaggttcaattcaattacttgttcataataactataatttgatatgaaagtaatttatttgttatgtaacagaattcttacttgaatgtgataataattaatggaatgaatgaatgaattcataggttgttagttgcaacaaaagtatgttgttattcagagaagtcagcttatataagagagaatgccaaggttgttcaatatatttacacttgttcagtgggtaagcc

SEQ ID NO: 34536 - DNA, 1961 bp, Cannabis sativa
aatttctgcattgcacttaaatacttattttcataaatacaaatttaaatgcgccacttatatcaaattatcaattatattaggatatcaaattatcaattatattagggtaaatataggtataagtatttaaagttttatgttttaagtggtataaatctaatgtttatttttagtaacataagtattcaatgtttgtaaaactgtaatttttctaattttgttagtacagactatgttattgtcttaaatagggcacatataaggcctaaattcttgatcattggtatagatagaaatatgtaatatcagttactttcatgttttttcaataaattaaaaacagagtttgtactgacaaaactggaagaaaattacagttttacaaatattggatacttatgccgctaaaaataaacattaaatttatgccacttacaaacataaaactttaggtacttatgctgctatttatccattatattatatagtgtgttcttgcctcgttctcatttgttccccggcttagaacctttataagaactttttgtctttattttaatcccaaattcaatacaacacacttacacaatcacaatcttattgaacaaaagaaattaatgaacacacacacatacacacataattattccatttgatacccagcattttgagaccccattatccccgcaagagtagtagttgttacttgttatcgagtctcaaacgttgtactccaaaagaactactactagaatactccttacatttatcaagatcactctcaactttctcgatctgtttttggagcagtgactttttctggcgcaattcattaggaatttcactttcaagtctacttggaattcgagagacaaaatcacgcttaattttctcaagttgttcgtacacaaacataattctaagacccatacgcctcacaaacttaagataaccataccattctctaataacctcttcactaatatctctcttccttgttctttgcatgtcataaatgacacgacatagaaaatgtaaggcaagactcttcatatccacacttagtttcgattcttcatcgataacatcttcatgcttttcaagcaaattctttaaaacattacgtagataccaagcaaccttgtaattcttaaccgtaacaactttcacatccaaaccattagtgtctagtttcaaccttctaaagttacagtatgtgtcaaacttgtaaacttgcttatctaaatcctcaggtgactgtgggacaatgtatttttctggtagtctgattccatggctttctccatcagtgttatgatcgaaaatcacattgttggtagtgttccaataaaagtgttcttcgaaggtttctttgtcttggtcggttaagtttttaatgaggtcgtttaaggtcatgttatcatttttgtcaacctcatcatctgtgtcgttgattccattacttgttgtactcacgattataaggtctctatcttcaacacttgcttttagtgcacttgtaatctgacagagaaacaccccataaaaacagaggacaaaaagaaaaaaaaagaaaaagaaaaaaagaagcatatacagaggggaaaaaaaaaattaaatggataggacctacctacacaaacttttcagaattatgtagtaatttttaaataatttcatattaaatattattcagtaataagtaataactatattgaattgataaaagattttaataaaaaaaggactaatttttttagaagtttaaatatcattttgtactctgtattttataaaaattactaattggaccttttcttttgttaaataataaaataaactctgtatttctaaaatgatatacagcaccctgaactgattttttgtcaaaataaaatttaataataatcaaatctaaacgtattatgacaaaactgtttacattttctgtatttgtt

SEQ ID NO: 34537 - DNA, 1648 bp, Cannabis sativa
  modified_base (1108)..(1110): a, c, t, g, unknown or other
tacatccatctgctccagctctaaatcaaaatgagcaactaatgccaagatgactctaagggaatctatctttgatacaggagagaaaaggtctttatatcgtcaattccttcttcttgggcgaatcctttagcaacaagtctcactttgtatctcgaaatgttacctaatgagtcttttttagttttatagacatatttacatccaatggctctcgcctcattaagcaaccttgaatgttccaaacattgttgtacctcatagaattcatttaatcattcattgtattgtaccatagttttgattctttgttgttcatagcttgtaaaaatgtttatagatcatttccaactccaatattagattttaataagtacacaacatagcctttgtaaatctttggcttcgcaggactagtagatcttctaaagacttcactaacaggctcttggggagcagcatctggttcagtcgattaaataggttgtttaatagacaactcttgaacatcttaatctactagattataattaccaacatgtggatcttcaatgactggtaatggttattcaacatccgtttgaactactggcgtgttgaccattatcaatcttgctcttgaagtaaaaggttttgaaggttttgcactccttgattccacacttcttgtgctataagatagacaaaaaacttgtaacctttagactctttagcgtaccctataaagaatccacttatggtccttaggtccaatttcatctcttgtggattatatattctgacttcaaatggacttctctaaatgcctacatggtttaaacttggtttcgaacctttccataatttaaaaggagtttttgattctacctttgttggaactcagcttattaatatgtacacggatgtctttaaggcttcagtccacacaaattttcgaaggttagagtttttgctaagcgtactctgcaacatgtccattaatgttcgatttctcctttctctaacaccattttgctcagatgtattggccaagatgtaatgggaaacaataccattttcttcaagaaactttgcaaatggaccaggtgcttgtccatcttctgtgtannnaccataatactcacttcctctatctgatctcactattaatttgttttttgcattatttctctacttcaacattttatatcttaaagacatctaatgcttcacttttgttatgaagtaagtatatatacatgtagcgtgagtaatcatgtatgaagatgatgaaatatttttgaccatgtgagtccatgtctggactacatatatcagtctgtatgatttttaacatttccgaactcctatggacatctattttgacagacttggaggtttgctttcccttaatgcaatccacacaagtatcaaagtcagtaaaatctaaggcattgagtaccctatcttttacaaaccttttaattttatcaatggagatatgtcccaatctcctgtgcaataatgtaaaggaatcctcattcattaaacatctttcagtgtcagtgtgaacatgcataacattattagtggtattattttgtaaattaaggcagtaaagaccatcagacaaaataccatttccaacacattcagatttataatataa

SEQ ID NO: 34538 - DNA, 2805 bp, Cannabis sativa
gtcttttacaaaaaataccactagggacaccattaagccattttcctaaacaaaaaatacaaggttgttcatggggggctggtgaactcaagaaagaccgtctacacgaataagaactcgacctttgcatagacctcattctctgcagcagaagatcccatttcctacagcaggacctcattccctacgggcaagacctcattcccaatctcgggaaatttataaacgccagtggttggctggttcgaagatttccttgtgcaagcttgggtcttgtgccatttgggttcattagtagaatctatgacctcgccaactaggattaccttcttcctggattccttgtctacctgaggggaacctctgaactcactctcataatctacgtgcattttggtagagacaaagataaaagatcagtgaagcaacagtaaaaaaataaaaaaaataatccaggtcaatccaccattcgcgaaggatgatgcttaccctcggaaatctcttatgaagatcgcccgtaatgatcaactgtatctacttagtttggattaatcagaagatctttggtcttggaatcctttgtttttaatttaaactaaggtttaaagtttctgggaacatacagagaggaaaagcagttggtgtattctggtgttacgagttttgagggataagtttctgggcttggatgggacatcttagcaagagaatgacaatccaacttttggatgcaactcatcaaaaaaccaggagcgtatggaacattgctaaactaagccaccattttatactcaaaacccggtaacagaaaggccaaaggttgggaatgaggtagaaggtgaaaaggcagttcatggatactaatgatgaccctcgaaaccgtggagccgttataattgagggcatgcgtagtcttgaaaaaaggggttatgatgaatataccctctgtaagcatttaaaaagtactttttattaaaaagaactttttaaggggcaattaatatacccaaaattcagctaccatgtcaatggaggacacgtgtcaagttaaggagaatatggatcgatgcgtgtaacagtaattatatttaatgaaataactcattaaatgcgggagtgacagagtatatttgtaacttgttgactataaggtcctatacgagataaagatatacaaacttttgcctcacgtattaatgagaaaccatacgacattgaatgcacaaggcgagacataaacttcattgcgcctgggaatatgtaagcgatgcataatgactgtgaaaacacttagcatataatatagaaactaagtataacagtcgggagaacccaaacaacaactaatagtgaggcacttcttatcatctcactataggaaggcatactcctgatactttcgtcaatcagcttcagatatcttttagtgaggttattagtcttggaaaatcagttctctcgagcagaagctgacattcgaatgataactgctaaagtactctttgttattaagaactacgattgtcaaaatgaagcattatgccttcaagcgaagaggcaacgaggcatacatcatcaacctcagaaagatatcgaaaaagctctagctcgctatcaaggtcattggtactgagtttctgttgagacatcccagagtgttatgacttaaaacgtgtttaatacacgatcattttgacccagtaaaagtggattaatcacaactgtgttttattcaaataataaccgcatttataatacgtgatatgtaatcaaaccccacgattttaggggaaaacgttgtaaagatcacagttaactctgtaattaactgcctgactatgtaatgataaataaagtcatgttatactaaagggggacaaaaattgataagaaaaaaatgtcttgaaaataccattagaaatctaatgagattgactcgtggactatgcagaattttaactacaaaactacgtaaaaactcttttgtgttcacactttttcctttactgtttttattttctgtgcaagtttatcatttaggcttaaattttggttaacaaaaatctgcgttaacaatcacgactctgtcctttaaaccactacttgtattagccaaggaaaacctccagccaatgaactgggtgctccaagcatgaaaaccaagccaatcgaacagctcatacacaacctgccttgaaagcaagcagtcaaaaaccaagtgctaatgatttttagcttcctaaccatacaccgggcattctggtgatagaacaatgatgtgaaagttagcaaactaatctctagtgagaagttggatatgcaccgtttgcaaagaatgaacctgtgattaggaatactgaatctataccagacagttgtgtaatacttatcttcctcacaagtcgtcaaactattatagagtcttgaagcctaaatttgttattcctcctagcagccaaaagttgctactgattgaaatctttccttaaatgacatagcttcctccaataccaactagaatcttgagcaagcttatagttccaaatgtcttctcctttcagataaaaaacattaacccatttgacccataacacttcatgcttcttcataatagcccacaagtacctagccaaaattgccttgttccactttgccccttccctcaacccgaggccaccaaagtacttaggcctacacaccttctcccaagaaccaatatgaactttactacgattctcgttatgaccccaaagaaataatctatagtgcttctcaatgtccttgacaacactttggggaagaata

SEQ ID NO: 34539 - DNA, 2021 bp, Cannabis sativa
atgtcctaatatgagtaggagtaatggccctgatcaccctatgtatttaatctacaatgagttgacagaaacctaaaagaagaccatctatgtggcgaatgagcatcgagtagttccattctgagtttttaaacgaatgatgaagcatgatgatcgagcagccaagagagatgcctcaagatattgtcaatactataaggacatcgaccacacaatcaatgaatgccaaacctcaaagatgaaattgagactctagtccttaatgggacacttacccattattcaaaacacaatttttaaggaagacatgtcaactaactgaaactccaccaatggagtgagaaggcatttaacatttcttcagtttttttaccttgttatttcgcaaagacactctctaatcaatttttagttattaaacgattacctttattttctggaatgtaagtagctaaactcacatttataaaagtgatacaataatcagatcttttcctatatgccaaacccaccaaagagtaaaataggataatgcttaagctataaacactcggggcaaaagagcgtagatataaacatgctcgtaacaaaaaaaatgttaaagtcgttattgccatgaatattttttccaaatttcatctcagacagggggcaaagtcggtatacagatgagataagagacaagtgaggtgctctaaggatccataactcaaaaaattccacataaaaaaagacatatcaaatggcctacattgagacttggacaagtggatcatgtgctaatattgtgtacccaaagagttaaggcccatgttgacaacttactccgactagcaaaatgcaagccaccattgacaataatgttatcttttaaaccacatgttacaaagataataagcatcggcataaaataagcgtgccttgaagacactaaagtcaaccctacgactttgaccaagacttacagagtcaaaatgagttaagccatcctacgtgagggtcccatggcacctctatgagactcgaaaacattgacaaaccaattggttctaggattcacacacccaagtctgcccaaactagggttcatgggtctgcacaagcattttcatcctagagacctcaatacaccatggaaaccaacaaggactcgactaatttgggcttaaaaagtcttatatttgtgcaaagagtcaaaatgccataaaatcccatggaatagagcctatgcacccactcccatatggagatggcagtgttctctagtttttagagggtttcaccacaaggagatggcagtggtcaccacttacaaagcaccaaagggaaatttttcaaatatgttccctcaacaccaaggaatgcaacacaagtgaaagaaaccatttgtcaacaagaagcaagcatagctgaccattgccatctttgtggtacaatgagtgactgtggttggccatgaagaaaggggatgagatttcttgccaaaaatacattttcaccaaaaatatgtcaaaaccaagtgaaagaagcaaccaagtggtgtagaaaccactcggtagaccactaccagaattttggcacaattagtggcagtggtcgtccaccacataggaggagaagtttcattggccaaattgtatttccaacatgcatgtgtaaaatcaaagtgagaaaagtcacccaaggctacataaacgccttatgtgatcattgccacttttttggcaaaaatggtggtagtgctctcctaagcaattggctaagaactaatgtgaccaaagtagttttctaacatccatatgactgaaataagcaagaaataccatccatggcttccaatatattatggccgagaactgccattttgccatgtcagtgctcacaactaggacaaaatcacaggaactgccctttagtaaaataggcataactctcataatttttatccaaatgatttggttgaacttgaatatgaaagataatttcaagatagatggatgagagcctcatagtcatatccc

SEQ ID NO: 34540 - DNA, 2247 bp, Cannabis sativa
tgtagcaagctctaaatcatttgttgggtagctactcataatctttccattgacaagagccataggctacaactttatcagcttgcatcagaacacttcccagaccctgtctagatgcgtcacagtaaacaacaaacttttcttatctaattgtagagctaacactggtgctgctatcaatcgctgtttcaactcctaggaacttgcttcacatttatctgaccatataaatcgttgatttttcttagttaacttgcttagtggcatagaaatcttagagaatccttcgataataccctactaaaccgagaaaactttgaacttctgtcacaaattttggcctcggccaattcttcactgattcaaccttactcgggtcaaccataattccatcttttccgacaatatgcctaagaaaggatacctctgacaaccagaattcacactttttaaactttgcatacaacttataatccctgagtctctttattaccattcgaagatgatgctcatgctcctcttctaacagagagtacacaaggatgtcatcgataaacaatatgacacagttatcgaggaaatcctagaatactatattcatgacatccataaaaaccattggagtatttgtcaatccgaatgacattaccagaaactcatactgcccatatctggttcgaaatgcagtctctggtatatcttgttcctgaattctgagctgatgataactggatcgcaggtcaatctttgaaaacacagtatttccgtgaagttgatcaaacaaatcatcaattttgggcaatagtacttgttcttaatcgtcaatttgtttagttcccgataatcaacacattatgagggaaccatccttcttcttcacaaaaagaattggagctccccaaggtgatacactgggtcgggtaaaccctaaatcaagcatcccttcaagttgtatttttagctccttgagttttgctggagccatgttatacggtgcttttgaaacaggttcaactttaggtgccaagtcaatcacaaaatcgatctctcgttgtagcggtaatcttagcaactcctcaggaaatacgtcgagaaattatttaaaaactttgactacttcaagcccaaatgtttcaggtctacatgagtcaatcacaaccgctaaaaatcctacacatcaactgtgtagtagatctctagcccttaaaactgaaataatcgggatttgagacccctaaaccgatccaacataaacaaaaggatcctcaccctccgactaaacagttaccatttttcgcttgcaatcaatgatggctgaatacttggacagaaaatccatcccatgtatgatgtcaaattctgttatttccagctctacaaggtcagacttaactccctatcttcgatcctaactggcatagacctaatttgcctattggatataaccaactacccactaggaaataggattccaaaccctctttcgataaaatcatgtccctatcttcgatcctaactgccatagacctaattttcctattggagataaccaactccccgctaggcaacagggttccaaaccctctttcgataaaatcacttggcctacccaaaagatcaattactcctgttgccacatatgagtgtgtagctaccgagtcaaataacacagtataaaaggagttgttgacaagaagctaacctctcaccatagaaggactgggtgtagcatcagcttgagtgatggcaaacacccgaccaggtacgggttttgcctttggcttctgctcttctttctttgcttgaggacaatctttcttgaaatgccccaccatgccgcactgaaagcatgtcttccggttgccctcacccggatgatgtttcttacaacgtgggcactcagggtaagagtaaccctagcatccacctctaccttggttcccacagaaccgcttgctccgtcccgaaccaccaaatgctagattagactttcgtttttgattattggtgggatcaccaccatccctaccataactaggagtaggaagagtgggggtccaaccaacactcggagtcactcagggctcctaaaggaactttaccgcaccttcggctcgtagtgccctttcaaccatctccgcataagttatcgcctcattattagtaatcaccaggtcgtgtctaatttttaaatacaaacctgccaggtatttctctttcttcctgaagtctgtaggcacaataccc

SEQ ID NO: 34541 - DNA, 1396 bp, Cannabis sativa
aaaaaaatcaaataatacctctctttcccttctctctcttcgaaccagcaatcactactacaaacattgacattagtgaccctcgttcagagactctaaaacgttttagtgacacttcactgcgtgtcactaatgtgggtaactggaaagataatatttagtgacactcagtgtgtgtcagtaaacctttttagaaaccctcagtgtgcgtcattataggcttttagagtcacactttattcaaatgtaaaagtaacacctacccacgtggcgcgtcactatatctatttactttttttaaagaaaaaaaatctgagaacagccacattcaaagtgtgtcactatatcttatttttttttaaaaaaaaattatatattaatttttttgatttagattatattgttaaatttatttaattaattatatttgaataataataataaaattaactatatatcaattatgagttaatgtatattttaattaactaataaatttattaaaaaatgaacacaacaaaaataccatacaataagaaaaatatcaaccacatttacaacaaaaatatcatacataacaaaaataccatacaaatttacaacaatttgtgtaaaagttaatcaaaaatctatacagccaaaaaataaatctatacaaccgaaaaataaatctccaacagtaaaataaaaagagtgcaaacatatatttcaatcaaaactaaaatctttaagtctttgaacaaaataaatacaaaaattttgaacagctattctatgctaaactcaaatctacgtcgtttgaagctcacactgtcatccgagatgttgtggtgtgaagctcacgtaacagcgataagagaggcagcgggagaggtggagttgtagcccttttttcgtcgaagagagagattaatgttcgagatgagatggcgcggagcttgcgtaacagagatgagagaggtcgagggagtggcggaccaacaaaactatcttgtggctcttttctgtcgaggagagagagagacgaaaaaatatatacaggagatcaaggagagagaataggctcgagagggagagagagagggagaggagatcgggcattttctgttggagtctgggttccttgacagccggaggtaaacaagcatggatttttctagttttctccagagctgggcatggctgctgcacaaagaagagagagagagatatgggattcaataagtgtgttgaagaagactaggatttataaccttctttatgtatcccaaatattttattaattttacacatttaattataattataaagaataaaataaaaggaaagtcagctatactacatgcgcgtgaatggagaatttaatgctgtgttttctttcttttttttttcattt

SEQ ID NO: 34542 - DNA, 1050 bp, Cannabis sativa
ttgaatattgctgaagctgatgaagacagcttttacctaggactgccatgtttggtaggtcgaaataaaaatgccattttgggtttcttgaaggacaaaatgcaaaaacgtgttcaacaatgggagagtcgattcttatcaaagggaggcaaggaagtcctcttaaagacagttgcacaagctctcccaagctacgcaatgtctgtcttcttgctacctattgagacttgtaagtccatggagagtatcatgagcaaattctggtggaagtcttcatcacagagtcaaggagtaacttgggcaagctggaataggctcaataaacacaaaaatgaaggagggttgggctttagagacttaagagactataatttagctatgcttggtaagcaagcttggagattgataaccaatgatgcttctatagtttcaaaagtctataaagcaagatattacccccatgcttcttttttctctgcctctcttggaaataacccctggttttatttggaaaagcctctttgaaaccaagtctcttattgaagcaggtgctgtcatccatattggaaatgggctaaaaacaagtatcacttcagatccttggcttccggatttacataaccacagagtcatttcaacacatcctgctattatcaatcagaaagtagcaagtctaatgtgtattgatgagcctaaatgggatcctgaaatcctggacgacttatttgaagaaagggataaagctctcattcttggaatccctctaagtcatgttgaaagggatgattgttggagttggatgcttgagagaactggtatctattcagtaaaaagtgcttacaggtttcttcaacagtccaaaaacaatacccaaagtgactctgacttctggaaagtgtattggaaaattcagattcctcctaaagtccttcatttcggctggaaggctataactggatgtctccctaccaaaatccagcttcaaacaaagcatgtaccagtcgatagtacctgccctttctgcaacaatgctgctgaaaccatcataca

SEQ ID NO: 34543 - DNA, 2695 bp, Cannabis sativa
gtttagtaaccaaaaacagataaattagttgtgtggccaatcataccttactgtgccaattggaattttgtgtaggttccaattgctgtatcagttacactttttgaggccatatgtttatacagagggactagagtgattgcatccaaaggaaaagaaatcacaacttggaaattacatcaaatatttatgtactgctcttgtggaattatagctggtatggttggtggattgcttggccttggtggtggtttcatattaggacctcttttccttgaactgggaatccctcctcaggtttgttttgtagtgaaatctttttcaaactttgaaccaaacatacagctaaattatgaaaagactcaattttgactagctgggctgatcaattagcaacaaaactaaattgggttttgcatagaaagacaaactagattaaatgactgtgtatgtactgtttgtttacttaggtggcaagtgctacatcaacatttgctatggtattctcatcttccatgtcagttgtacagtattatcttctcaatcgtttcccagtcccatatggtaagctttggtagccttttttttaaaaaaaaaatattattactttcattaaaaaaaaatataagtaatatttgcaaaagttattaaaaaaatgtgtatttctaaaaaaaaaaaattgaattcctagactaagtggatcctaagtagaaacatattctactttaatctaagtgtgatctcaatagtaagtatcaattaaaacaaataccaaaaggacaattttttacggttgttaagatttacggtttttaagattttatttatatataatacgataattttatgtatttttacgttgtactcttattattgtgctcttaattttttgttagttatataatattttttatattgttttaatgttgttttgttattatttttctattacattcatatgatttttttgtggtttaccaaaaattacatatgaaattttctgaaaaaaaaaaatcataaacttgtcaaattctataaaagattagctctaatagataacttaatttcttaatagttttgagttcactaatttttatatcttttgcagcttcttactttgttcttgttgctacaattgctgcatttactggtcagcatgtagttcgaaaactaatcgcgattcttggtcgaacatcaataatcgtcttcatactagctttaaccatattcatcagcgcaatcagtttaggtaaaatttcaaattaataaaaataaaatcatcaaacattttgattaaattattaaaatgatttattggattattataggtggagttggcatagcaaatatgattgagaaaatggagaaccaagaatacatgggatttgaaaatttctgccaccaatcttgaatatgctctgtaatataaagcattgaaatttcaatttcttttttcttcttttgaatggttatatatttgagcactggaattttcttatcattctcataaaatgttctccttgtgaaacaatgtcatttgtcattattcaacaaattattgtaacaaaactcttctttaataatacaataagatggtaatgtttcatacattcttttttatttagtttttaatattatgctaattatcaatgttataataaacagaatgttagactataaaactacacttattaataatttgaaaatgatgtgaaagtctataaatatgtaattgtatagttattatatttataggatatggaatttgaaaatagaatatcggttaagttagagattagcactatctcaaagagtgcatttagagtttagtactgactcgaaaattgcattccgatacaattaatattgtatcaattggtaaaaataatagttacatgacaatctctaattgaactaaaattttattttttcattccatattacataaacattcttttcaaattactaataaatccttatagtattttcataatttaacgaagaacactcaacaaattttagtgtgggatggttaaatggtttgttggactgtatagtatgattttattttcaaagttgtcattacacattttatatagaatgtattatattgcattgattactttcttgaacaaaataatttgattttatatatttattaactaatttgtttagttacatgtaccagtagaagaaagaaacatatctctagtggatcgtataaaatatcagtagttttttttttatatactaaatatttatatatattttatgatgggttatattgttttatatattattctctttgttaatctaagatgggttgggtgttaatgttttgataggaggaagttttgtattttgttttgtttgataatacactgtaatgtaatatcataaattattatagtgttatattcttcttcatttatttttttttttcttttccagtctgtgtcccacacacatgattatattaaacaattcatatgttttggctagaaacattaaacaaatcttgaaagtttgataataagcaattttttaatcattatgctgttttagttatttttttctttaatcagactgagatgggtgttgagaggaaatgtgttttcagttttattttgtttgataataaacaattattaaatgtggggtaaataccattttggatcctgtgttttgttaaatg

SEQ ID NO: 34544 - DNA, 1971 bp, Cannabis sativa
tggaataaacaactgagaaattgtcattcactttctctttctctctgtatcttcttctttcttctcatctattttatattattctatattattttataacacgttaacaacacgatgcccaagcttcaagcatgagtctcttcccaagccccaatataagtattttattaaagttcttgaattgtttgagagtcgcaatacactatatatatttatatttatactcatctgactgaaacaattttaagaattatttgttttcttttctctttttatctatatattattctatataaaatgtggctacataacagaatttcttggtttatgagaaattagtgggtgatttttttttaaaactttattttttttttaagttttctattcaaaaataacaatattttttgctgaggttaacagggttaaattcccaatttatttttatttataatttcctttttccaatcaataacaatgagtcgacaacaggtaacccaaagtcccaaatgacaagaaaatacgcattagaaaactcgagttacatcattcattacatcgtgtaggggaatccgagtatatcatcatatgcagcagaaatgtacaataagctatacgagttgtttaaaaaaatttagaatcattatttttagttgcagaagagaaacaattacagagaaacaaagtgaatgaaattcatctttcattattgcaaaacagaggaatgaacagagttatatatacaagctgtagctgacttcaactctaattgcctaaccaaaatcctaaccaactaaatcaacaaaataacagaaagatgtaactaactcaacaccttataacaaatcattctaatactcccccttaaggtggagagtatatgttaaaaattcccattttactcttgagagcttcaaattggctaggaagcaaagccttggtgcaaatatcaacaatctgatttttgctagaaatatgggcagtctttatcattccttcttgcactttgtctcttacaatgtgacaatcaatctctatgtgctttgtcctctcatggaagacgggattagcagctatttgttgggctgccttgttgtcagtgtaaaatggcaggtcctacatgttcgatgttcaactcctttaaaatggacaagagccaaacaaggtcacatgtagtattagccattgctcgatactccgcttcagctgaagatatcgaaactatagattgctttttactcttccaagaaaccagagacttgcccaagaaaatacaaaaaccggttgttgatctccttgtgtcaacacaagctgcccaatcagcatctgtgtaaccttggagctgaatttcagactttgttggataaaacaacccctgtccaggtgttcccttcacatattgcaaggctctttgggcagcattcatgtgtgtggctctcggggcaacaagaaattggcttaacttgttgacagtataagccaaatctggtctagtaatagtgagatactgcagcttccctattatttgtctatacaacttgggatcagcaagagcatcctcactatcttggctgagttttagatttacctccataggtgtgttggctgcttacatccgagttgtccaagatcctctaagagttgtagagcatagtgtttttgagacaagaaaataccctcatcatttctagcaatttcgagtcccaaaaaatacttgagctcaccaaaatctttcaacctaaacttatcattcaatttggttttcaaactctgaacaacagtcatgttgttgctagcaatgaccacatcatcaacataaacaagaaggattatgacacttgatcctttttgttgtatgaataatgaatgatctgtagctgagtgttgaaaaccttcagcaagtaaagctgtagagaatttttcaaaccattgcctagaggcttgctttaggccatagattgatttttgttgctt

SEQ ID NO: 34545 - DNA, 2830 bp, Cannabis sativa
  modified_base (28)..(45): a, c, t, g, unknown or other
  modified_base (104)..(107): a, c, t, g, unknown or other
aaaatttaattatttttttatcaatttnnnnnnnnnnnnnnnnnnttattccattccattcctattcatattcccttttccattcatatttctatattttcatnnnncccaaccaaacgcctcctaagtattttgataatattcgcattcttgagatgcttgatattgttggtgaactcttttttgcataattatttttcgctcgttttaaaaatgattgcatataatatgatcaactataaaacttcaataagattttttttttaaaaaaacaaaaaaaatatatagtgtttaattgatttaatagatattttattttacacaattattttaagattttaaattcttactctagtagttatgatataatttttactaattattttataaattagttattttaggctgttaatgtaaataatataaaatacaaatatttttaagtaaaatatatttatttaatagaatattttgtgtgatatttattttaaattattagagttcctaacaaaaagtaaaagaatagtgtaaattttaaactaaatttgtataaacattggagatggtcttaaagcatcgatatcccttatttattttcattgacttaaatcactcttttttctaaaaaaatatttatttttgtgagataagataatctaataagagtgttataaaaatattaaagttggcatatgaaatgaataattgaaatgacagcatattattttgagagtaaattagatgatgaggagaggtggtggagggagaaccgacacgcctcatttgagctatttatggtatggtttgtttgtttagaatatgctatttcttattgtagattcacatgtatgcaagtgctgccaaacttaaattattattattattatttataactcatttaaaagtcaatttttaaagttaaaaaggttacaaattattatttattttttattgaaatatattgaacttaaaaggacctaagaaggtcattacacaagatagtagggggaatggagttcatactcaagttcccaaaaatgttgtaggcacttgcccatttaactagattgtgagatataaaattataatatatagaaataaaaaaaagaacaacaaatcacattattcttaagatcctcgatgaagttgctcaattcccacaacttgatctcgccattgaaagctctaatgacaacttgagcatctccttctactatcacaaattggatctctattctcaatggttgtggtaagcgctaaagtagcagcttttgcctcaactacaagagcattaggggcattaacagaggaagtggtagcccaaagaatttctcccaaatcaatcctggcaaccacctgcaacccaagaatgcttacattgagctacatcaagatttaccttcacctagccccgaggggggtaccacttagataaaacagttgaggaatgaccttgaatgagcacaaaatgaaaactgcaataagaggagagaactttctgggccacattaccagtattagggtagatgttatcatgaaccattttgtttttgcactcccagatattatcagtgacaacaggagcaaaaataaggaactcgttagcatctgtcatagataaaatacacttgaactaagccaaacagtctggatgatccctgttgttatgagtgaagttccatgggccagcaaatcaaagacattgagcaaagtcacaaaacagaaaaagatggtccatagtctccaaatcctgattgcatagggggcatcagtcactgtcaattctgaacaatttactcaggcaagatttgagaggcaaggctttggacaggatgcaccaccataggatcttatgtcgctcatgaagtttagccctccacccttacctttttgctggtgccaccttcaaaagagtctgactatttcttattgatcacgactgacccatcgtaattagatttgtctcctctagagttctccaaaggaacctacctcagaggttccacgatcagaatgggctcggtcagatcgatgacagaagtaaccaagtcttccatgctcagagccttagaagtagcctctggattcaaagtcggaggtgctagttgctgagatttgctcccaaaagcctgactcttcttgcccttgtctccaccttccctggcgatttcccgaaccttgtcggacctagattggatgttgcccaagaacctgttcagtagccatgtttgtaaggtagctggttaatctgcaccaaaaaaaaacaaacaaaatatccatcaaacaaggccataatcaaggatatgatctttacaacaaattatcatgcaaggcatcgggaatatccaaaccattgattttagtataattgactttcccctagcaaaaagagcaatgtcttctcgacctaagaagcctgagaagaaaattttactaaacgcatccactctaaaatgatagtgcacaggtgccacgaagtggttgggaatccttacgatgtaatctactttatctatgtattaaatgcaatgatatctatgatgatctaaatttaagaaatatggattgaatccacattaatcaacaatatttaagttagttagagtgggagccctaattataagaaatggtgtctcaccactactagaggtgctcgcccccagagcaccttcattctgcactacctccttgaatcttgtagtgagttcttcagccatgcttaggctttttgggaattttcttctccaatctgccagtcattgctcatcgacttttactaccttcaaggctcctcaacagtgatgactacaatagcctccttaacctcatc

SEQ ID NO: 34546 - DNA, 1385 bp, Cannabis sativa
  modified_base (1339)..(1343): a, c, t, g, unknown or other
ctggtcaatccttggtagtgggaagcaatcctttgggcacaccttattcagatcagagaaatcaatacaagttctcgaagttccattgggttttgggaaaagaataggattggctatccacgagggataaaacaccacacgtataaagtcgttgaccaacaacttatccaattccttgcctctcagaatttaagggcctcctcttttgtctctttgctgggtagtttggatcgacatttaagtgatggcagataatattagggtcaatccctatcatatctccatgactccaggcgaattgatcccggtttgcccttaaaaaacttattagctgctatttcaattgttcatccaggttcttcccaatgtaaacacccattgtgggatttcctgggtccaaaacaacctcttccagctctttaattgatttcaataagtttctttcatcttgaatcttaggatcaagatcttcatccttcttctcgctttcttcagtcaagactgccattagctggtgaccagcttttctgtgattcagctttatgcgatagcattcgcaagccagcgtttgatcaccttgcactaatcccacacctactggtgtctaaaactttagggattagttcttaatcgaactaactgcccgtagtacaattaatacaggatgacccaacaatatattgtaggctgatggcaggttaacaaccaaaatgtcttgcattattgtggtggataaaggtgtttcacccaaagttaatgggagctcgattatgccttgactggtgaacactgtccagtaaatccacaaagatttaccatgcaagatcttaacttagctttttcaagccccatcttctttagtgtttccctgtaaaggatgttgactgaaattctgttgtccactagaactctttttatcctcttgttaatgagatagatggtgattaccaatgggtcgacgtgagggtatctcacgttcttttcatcttcctttgaaaatataatcggaggctcttcagtctttactttcttggatggttctggagcaaaggcagactgctcattcttcacttccttcacatacctcttttgggcattattgctttctccttcaatatgtggccctcccgagataactaggatatcctctcccacaacaggaggagtgtgtaatccctggttgcttgggttgttgggcggattggcgtggttatgtccattgccctattttttcacatatttcttgaagtggcctcgtgctatgagactctctatctcatccttcaactgacggcactcatctgtcgtgtgattagtagatatgcagttcaaagatcannnnnttgatttttgaattatatcaaacttactaccccagaaatttc

SEQ ID NO: 34547 - DNA, 2261 bp, Cannabis sativa
  modified_base (1934)..(1949): a, c, t, g, unknown or other
atccatgaattggagatctacattttctgccattcaacatcttatagggagtcatccttattgaactctgataactattgttgtatgaaaattatatcaatggcagatacttactctaggagccttcaaaatccatcacacaggctcgtaacatgtcttctaatatcttgtcctttcggactgaccatctgtctaaggatggaaagttgtactaaactttatagctttgtacacatggctcgctgaaaactttccaaaaacttagaggtaaactttggatccctatccgaaacaatggactttggagcccactgtaatcgtactatttcttttacataaagttctgtgtattgatctattgaatatgttatttttgtaggtataaagtgtgttgacttggtaaatcgatccacaactacccatatagaatcaaacatacatgtggttttgggtaatccaactacgaaatccatggtgacatcttcctatttccactaaggaagtgtcaaaggctgcaataatcctgcatgcctttgatgttcagccttaatttgctgacaaatcaagcatctagtcacataatccaccacatcattttccatagcgcaccacctgtagtagggtttcaaatcatggtacatcttggtggtacctgaatgtaatgaatcgggagtggtatgagcttcatccagaatctcctttctaaattccacattatttaggacacaaactcaggttttgtaaagtaacaccccgttagctgatactgagaagtctatagcttggctagctaagacttcttcttaaacccttaccaattttggatccaccaactaagcagctttaattttttctaacaagtctgattgtaatgtcaaattactaagttttccaaccacaaattcaatacctgatttgaccatgtcatctgccaactggggtgagatgataatcgtgctaaatatctgctcgagatctttcctgcttagggcatctgccaccatattggccttcccgagatgataaagaatctcacagccataatctttagctagttccaaccaccgcctctatctcatattcaaatctttttgagtaaaggaatatttgaggctcttgtgatcggcataaattttacacttttctccgtctaaagatagtgtcgccaaatcttcaacgcaaaaatcactgcaacaagctctaaatcatgagttgggtatcactgctgatactccttcaactagtgagaagcataagcaataaccctatcagattacatcagaatgcatcccagaccttgtttggatgcatcacaataaactataaacttttcctaatctgacagtaatgctaatactggagttgtgatcaatcgctgcttcaactcttggaaactagattcacacttgtccatccatacaaaccgctgattctctttagttaattatgtcaagtgcattgatatcttggagaacctttctaagaatcatcggtagtacccagctaaatctagaaagcttctgacctcggtaactgtttttggccccaatctctgatgaattcaatctttcctggatcaaccatgatcccatccttactaataatgtgccttaaaaaggacactcgggatagccaaaattcacacttcttaaatttggcgtaaagtttatgttcccataatcactgtaaaaccattcatagatgttgctcatgttctacttctaactgagagtacacaagaatatcatcgataaatactataatatagatatcgaggaaatccgtaaataccctattcatcaaattcataaaagctactggcgcatcggttagtcatcggttagtccaaggttagtccaaaattagtccaaaagacataacagaaaatctaacaatctcaatagttcaggaaaaatttttaacggccaaaaaannnnnnnnnnnnnnnnttggtacatgtcaaagttcggaggaaaaaaatcttaattagccaatatttaaaattccgtaaaactatatttttgtaattttttttggttgtttttgtatatttgtgaaatagtccctttaaattttgcaatattatgtggtgcccctaaatttatgttgttgcacaagtatttaaaaggtaaagtgtaattcatcaagattaacgtggatgctgctctttttcatcatgagaactcatatgggttcggtatagttgcaagagattatatgggcaaccttttagaagaaaagacaagctacaaggcaggttc

SEQ ID NO: 34548 - DNA, 2015 bp, Cannabis sativa
  modified_base (1644)..(1647): a, c, t, g, unknown or other
ctcgtctgtgagtcgatatgttcacttcaataggtagcattgcctctgagctaaatgctagcgagaagggagtgtgtcccattgttatctttttagtagttctgtgagcccaaagtacttgtgatagctcgtcgacccacctgcctttggcaacatctcacttcttcttgatagtatccttcaaggttttattaacaacttccacttgtccatttgcctgaggcctggatactaacgagaagcttttaattattttattcctctcgtaaaactcagtgaacaagtgaacaagtcgccatcaaactgccatcaaactgagtcccgttagtcccgttatctgatagttatctgatactatcttcatgggaattccaaacctacagaaaatatttttgaagacaaagtcgaggactctcttgcaggttatagaaacaagaggctcggcctcagtccatttagtgaagaagtcatacctacaccacactgcgtacttggctcctccttgggcggtgggtaatgccccaattagatccatcacccatatagcaattgggtaaggcgaggtcatcattcttagttttgttggcggtacgcgaggtatatgtgaaaacctcttacacttatcacactttttgacaaactcatgcgtgtccttactgattgttggccagtaatatccttgcctaatgattttttttataggctctgccaacctgcatgatccctaccaaagcgttcattaatttctctgatgatcttgttttcttctatagggagaacacaccgaagtagaggcatcgaataacctttttttttttgtatagtttgccttcaattattgttgttatacccaaaatttgattagcacattagagagacacgtgtcgagctgggaaggatgaagaacttaaacacgcaaacgaaagtacatttaacatggaacaacttgttggaaacataattcgctgagtatgtttataacttggctggctgaatagccttttgcgagatataaacgtacgaactgctaacttatgtattgacgagaaaccatgtgggtgcacgtgtgcatgacgaggcctcaacctcgctgcgtggaagagaaacgataacactaaaaacacttaacatatattacacgatatacaaactaagtgtagatagtttggtaagtcaagataacagacagcgatgcatttatctcgctagaagatggtgtgcatgcgagggtgatcatcttgacaccagagaacatagttatcagagttaagataatattagactcgggaaaacaaatgacaagcaattgctcgccatcaaagttaacttggatccattgtcagcgagatatccctatgggataaggtttaccgtatatctttaattacgcgttcatcttggcccaataaaagtgggatactcacagctgtgtgaattataaaatcctcatttacctagcttgatttgtaattaaatcccatgatttgagggaataattactgtaacgattattgtcaacttttgtaaataactgctcactatgtaattataaatagtggcaaacaagatcaagagaggggatgacaaaatcttatacaaaagagtccctgaatttttttttcagaaatctgaataagattgacnnnnggactatgcagaattttaactacaaaaccacgtaaaaaccctgtgctcatattctttattttgatagctttaattttttctgtgtaaaatcaatatggtgaggctcgaatttggttaacgaaaatctgcattaacagtttggtgctttcattgagagcctctgttagaaagctcagaaaaagcctcctgacataaaagtgattgctgacaccaaagataataatcctcaagaaggaatcaatcattgttcgagaaaagaaccattgagtcctcaaggatctattgagtcatcgcatgaacagacttcaagccccaggaagacccagtattggggcccttggcttgagggaccttggataaacaacaat

SEQ ID NO: 34549 - DNA, 2111 bp, Cannabis sativa
gttttttttcttttttttttctaagggaatgacccataatttttaaaagataattacagaaaatactattttttgtaaattttttgcattcatacatttaattttttttttttatacttttatcgtgtttctataaaaatatataacacaaaaacaacaagtaaaatacgtaaaaataataaaaaaataatatcaaaactacgttaataaaatatacaaataacaaaaaaaattaaaaacaaattaacaagagtacagtacattaaaatatcatattttctataaataaagtcataaaaattataaaaatacttaaaattctgtaaaaaactgtattttataattttttttattatttttgtgtgcttgtcaaatagaatcccttttataaaccgttcttatatcgtaaggtttctagaatttatatttaaaaattggaaacatagcgtagattttaaaaacaacatttatttttgttatttgattaatggtgtgaatacctaatatttgtaggttttgtcaaagaagtgaatatttttcaaaatggaagcaaactataactataacactgtaattttcaacactaaattcagtgatatgagtgtggcattttaccaaacattccttcaatctctacgaagagaattgtctagcggaactacgagctatgacataccgttattgcgtacaaaatcaacggcggtcaatgacaaagaatttgtatatgtgagactttacaatcaaagtttcacaatcacatttgcaatatcaactctgaactcgtatgtgattggttatcaagtagatgcagaaaggcgttgctacttctttaaagaagcttctctcaacgcaaaaaaattacttttcaaagaaagtactgatcaaagacatgtcgatctcaaaacaaattatgatatcttaggaaatagagaaaatgtcaatttgggatttaagtcgttagacaattcccttgaagcatttactaggtttgatagtgagaaacctacgaacgagcttcgtcagaatcttttagttgttatccaaatggttgcggaggctgcaagggagtcaaatcttctgtcccaatttttccctgtctctctatcccaatccaattaaaatactccacttcaattaaatgtatatttcctaacagagtgaatatatttttctttccaaaataaagataattaatatatttaaagactattttattttattgttaataataatttattgtcatttcactatttttttaaaaaaaataataaaaacacttgaataaattagattttaccctaatatattattaatattaaggtaaattgtaatactaatatatttaaaaaataatatattattaatattaatatttaaaaaagattaaagataacaccagtttaatttttttaaagatcaaaaaagaagattcttaataaaaaaaatctgaaataaaagaaataggtctatttttttatatataaaattatattatttttttaactaaaatattattttattcttcttcttcttttttctaacggaattcattttattttattcaaggttctttattatatattttttttcaataaaaaaaatgaaaagaacatttaaccaaaaaaaaagttccatgagaaaaaattaatggtaaaataaaatagtctttaaatgtattaactctatcacaaaaagggatatacattttaaattaattgaggtggaacattttgattggattgggatagagagacggggaaaaattgggacagaagatttggctccggctgcaagatccaaatatattcagcaaaaattagaatttaaaggctttgaagctggatttttccctaaaggtgatattattggtatgagaataaatgggaagatctttctaaagcaatacagaattctaaagatggaaattttccaaaagtaaagttgcaaaatgaagattatagtgatcgttatgtgtccacagttgcagaagtgaaaaatgacatggcactcttgttgaatattgcagcataaacaaattacataaacctttgtccaatattttacttaatattattgtcaccaaaaaataaatgacatcaatctttgatgtc

SEQ ID NO: 34550 - DNA, 1474 bp, Cannabis sativa
gtccaccaccaagaatcaaaaccttcttgctttgggtgggagatgattcacactcaaaagcatatgaagaatacatgtaaggagtatcaacctcaaattcaacagcacaagtatccacacacttatatgctggagcaacacccaaagatagcctagtttatcgtacttctatctcagtcgacttggtggtaaaagcaatctatttatcactaaaacctcttgttttcacttcataaaaatcatctgacaagcttaattcgagccaaaaggaactgctctacatctaccaactccttaagttgggtgaggaaccatatgtcaatgtaacttagttcatgaatgccatctatcttcattcccttagaacatacatcatgaattcgatctgggttaggaacatgtaagctatacttcaccagagtgaccacattccaaagacctcactgctttctagaaggattcttggaatgtttggcctagtgccattgattcaccaacaagcttcatttgtgtcgtcagtattggttgtgaaccaggaaacttttcaaatgcaaatcgagggatctgcatgatgaacattggagaaaaataagcaaaaaaaaaaatatataacaatatgtatattgacaattttagtcccgccatgtagaaaagaccaattagaatcttttgtgatcctcaagctctcgtgcataaacttgtatctgtatcattcatcttcaagtgcacccaaggatatgaggtttcgtctaagctctgggaagtgccttacattcgtcagcaccttgattctgccatcatactatttgacaaaaacctttccgattccaatgaccatacatgaatgatcattacccattagaattttacctccatcagctgatttataataaaaaaataattctcgactctgacacatgtgacaagtgcatctggactcaagaatccactctctgttcatagaagactttaagatggagaacagctctccatccatagagcaatcatcactatcttctgcgactgtaactgaatccttcctgtggtgacgcaacttatcttttctatctccattgtgagatttgttgaagtcttgttctctttatacttcttgcaaaatatttacaagtctccagactgactacagaagtaacacttccttgtttctttctgtctgaacttcaatcttgattgagactgatggtgtttactattcgaacttactttcttgggcgatctacctcttgccaagtacacttcttctttcttggatttcttttccagttgtagttcaaaatctttcgacttaagtgtggcaagaacatcttccaaatcaatcacatctctgccatacttcatggctgccttgacttcttgatatgcgataagaagtgatctcaacagaatgatggtctgagtttcttcatcaacctcatgatttatgttagtcaaacctaaaataatctcattaaat

SEQ ID NO: 34551 - DNA, 1842 bp, Cannabis sativa
ctgtaaacctgttttcccaattctaggcatcctgagcaccttgggcagcttgggcaacctgtggcgggttaatatcaccctggcaatgtgccctgcacctaggacctctacctcggccacggacatttgggggaatctgagctccctgaccttaatttgatccaactgaattaccctggctcctggtgtttcgcctggcgtccatactaatctgcactgcctccataaccaagagctagtctggtcagattgtaatcaagaaaacttacaaatgccgcttatttggaaattaaaacatgcacctattctactatcaggctactatcaggctaccaagagctagtctggtcagattgtaagcaatgaaagcttactgaaccgtgaaacgagctgactgttgatgatgattgtacatgtcgtgacgatcttcagaagacaacttggcagctctgataccaaattgtaacaccctaactattataggtgtgttagcgtgatttttaacgtactgtgcagctcgttgagattattggaagttgtgattaattaaaattttgcttaattatttaaaacttaatatattgcatttataaaattctaggatcctgtttacaaaatacagttacaaaagtttactatttctttacaaaatatttgtcgcccagcgactaaacaacaaaaggccttgatgtcccgaggatcgtacgctccaggcctaaccccctcgacatgtacaatcttcatctgctcgctctcacggctcctcaaccgtagccttgcccttacctacacatagcaataacactgtgagtcgacagactcagtaagaaaagcataacataaaaacatactaatatcctgggttataatcaggcgcccatacacctaatcataaccctaattgaatcagtatcgatcttgacaaagtatgattaatcgcgtagccagcctacagtcaatactctaatcgcactgatgtggtagcagttaattcatactatctgatagcctagcatatatctgttggcatctcggtcaatctctatgtacacctcaccgatgccctaatattagtgatatgctaatatgagggctatagattgcctattgtaacggaaactaacatgtacactaaacatgtataaacatatgcataatattatactaatcttaccttgattccgaattcagatgtgccggccaacctaagtggaacaactgcttgacgaattacaggatcctaaatcacatcaatcataacatagataagtgacacgctcaatcactttcctgggacttaaacttgaaactaaaagttttcctatcgatgaatagcatggcaataccctaaacatcgcaaaaatgggaaaaactaaggttcccaaaattgccccaaccggtagaccggttcccaactggcattctggttctgcggggtttcatggggaccaaccagaattccggttcctacaggtccccctgaaccgaaattctggttcagtgcaggaaagattcaaaattcatatctcacttaaaacaaccccaaatcataccaaacttttcagacctgttccatatatcacaatgaacatattcaaggcaataaaacacaactacatgcactgaaacaaaacttgccattaaagagccaagcttgagttctaaaactcaaagctttctcaaacctaataagagcccacaattcaagcttaattcaacataatctagcataatcaaatctctgaaaaacaatactaaataactacagcaaccacagcagcaaaaacactaattcatgcaaaatttcaatcttaaaactcaaagaactaaagaggaagttgc

SEQ ID NO: 34552 - DNA, 2974 bp, Cannabis sativa
  modified_base (2638)..(2640): a, c, t, g, unknown or other
aatatttattctcacacaaattgtataacaaataaaatttaaaatatatgtatatttttaccgggtattacatttactcctgtttttgccacaaggtggcagttttattttttatttttgtgttttatgtgggttggcagttacattttattggttatatatatttggtgttagtttttaatatgcaattattaacttgttttgtttctctatatactttgttttgttttaggttttatagaatggataagacccctgatacaattgtctgtgtaagaaaaaaggaaaaggtctaaagtaagtaaggtatgtttataaattttcttactttcttttgtttgttgttttctatattttactgtgttttcatgttattgtgttgtttatttctagatcaatgttttcaggatattattcctaatgttgatcctggagttcaacagcaggattatcctcaatctgattcagtgtcaaaaaatttaaatgaccaggtatataactggtttctttgtttattggtgttaattcatgctctttttcttttctgttttgtattcttttgttttattcttgtcgtttttataacagttttaatattgtattttttttttgttaacaggttgagtctggtaatgttgcttttgttgatgctgattctggaactggttctgaagttccagtttatgcatctaagaaacgagaggtaaagaaatcccgtgctaagaaaaaggtgagtatcttaactggttctgttattgtttttgtattttaattgattttttttcttttagaaatgtgtttttaaatgtttattgtatgtaatttagtttttatactatttataactggttttttttcttaaaaatgtgtttataaatgtttattgtatgtaatttaatttttatactatttataaccggttttttttctttaagaaatgggttttcaaatatttatattatgtaatttagtttttatactcttttttaaccgatttcttttgttagtgtttttaacatgttttgtgtttcatttattgttttagtattataattggtttctcaatttctatttgagcttttaaagttttgtttttgtactttttttaaccggattcttttttgtgtttcaaggttaaggttgatccatcggatgatgattttgttgaacatattgaatctggaaccagttctaaagtttcagttgagaaaaagatacaacccactgttagggaaactcgcggccggaagaaaaaggagtttagatgtttataattttgttttttgttactgtttgtgaatgttgtttttcttatgtatattttttttttgttccctgtttttttcaggctagggtggttcattctgatgttccaaatctgccagtacgtcgtacaatacgtgctggcgttaaatgtcttgctttgaagggccctagtccttcgatacctgaagcgtctattaaaaaattcacaagtttttcgaatgtagtaagtactttaagttttttattttacatatattttttgtttttttttttaatgtgattttatttttgtttatggaaccagttattttctttatcatgttcttgttgtttttgtcactggctaaaccttattttatatctggttatttttacaagatgtttacttgaagatgaaaccagagcaccgttttgcaagtaagctttagatttggaataaaccgtgggttatcgaggattttaatggaaatcttactccttctcaaaaggcgttatttttgacgacgccttttttgcaatttctgaagatgggcaatattaagtggaacattgccctgcctcaccttgctttagtgagggaggttcatcaagggagggaggacttagagaagtggttcttgatccgggacagagttgtccgttttggtttggaggagtttgtcttgatcacggggttaagtctgaaagggtcatctgacttgaacgagtttaaacaaaagatgtcgttcaagaagaaaatatttcctgacttgactattaaagtcattcaagagcaagttagggcaaggtttttgtctggagaattcgatgatgacgttgacgctgtgaagatggcaattgtttttctcttgagtcattatttgtatgggtatgagaatggtaagagagtcgacaatgagttgtttggttttgtcgatggtgatttgtcagagctgaggaatatcgcatttggtaaactgctgtgggataggactttccactacatgaatttggcctttaaggacggcgacaatactattataaaattgagaaggccaaagaagaaaaggataagctctattcttttaaatttcaagggtttccatttgctttcctcatttggttgttcgagatactcccaagcctgtctcctaactactgcaagaggattgcaaatacatatcctcgaatgctaaattgggagagtacttacaagaaaaaaccaggggttattcagaacttgtttctgaggtttttaacaatgctgaggtaccttttactttttataattggtttcctttttttttttttaatagtgtatctataactggtttttaatatttttgatttctttctgatttttcaggccactgttgtaacgccctaaataatnnngcacgctacccaagatacttatgaaaccctaatcccctaaacaggattactaatgaaatcagcgcgaaatttaaactttaatcataaacgtaataaaaataaaacttgtaataatttaaactttacgatctaaaagttacagaaattaggattccaaaaatatttacaaaatattattacaagtcctttttctttcagccggcctaagcggtaaaacaaagtctcaaaaacataacactggtagaccccaatctgcttggtctgatatggcccggacatgtacattcttcatccagctcctgcactcatggctgatcaacaacagtcttaccct

SEQ ID NO: 34553 - DNA, 4038 bp, Cannabis sativa
  modified_base (4003)..(4005): a, c, t, g, unknown or other
attatatttccaacgagttgttccatgctaagcgtacttgtcgtttgtgtgtttgagttcttcccagctcgacacgtgtcctcctctgatgtgattaccgaatttcgagtataacatgtatattaattttcagtattacgatatatcaaatattgttgtatatatttaatgatctaatatatttatttgtttttgttacaatataataatatgcaatactaaaaaaaattaaataactttttttaattattatattttttaaaaaaaataatatataataaatatatttttataatttttatttactaatttattatatttagttattttcttaattttattaaaaaaatatttactaactcaatttttaaaattatggtcattttgtatcgtattcctttccataataagttttatttgggctgtataaaattttaataggccagcccaatatatttttgtaaatttattggactattcgggtataaatgaaaatttcccttattaggcattttagaaacgtttaagaaaagaaaaaaggccgtggcagtcacgctcccccttatccaaagaatgaaagcccaacaccgagcagtgggcccttacatttgaatgggtcccacaccattacttatcccatttctcattattaaaacgacaatcactccacaacttaccacaaaaccccatcctcacccgcccaaatggtgtagggtcttggggggaccacaccggtcggtgcagagtctttcatggataataacgtcgtggaatgaggattgagagagtattggtcttgtaaccgcgcttacgtaacgaggacacgtggctgaattctagctgaaaagactgttaagttgacgagcttataatcattttttaattgacttaaatgaaacggacgacccagatttataaaggagtttactcacccgttgtttattaatgtagattgttttttgtttttatttatatataaaggagtgttggaccctctcataatgagttaagttcaaccattcaatcatattatatatctctctctaaattacaaagctcttgacatattccttctttttttgttggtgtatattttattagctcaattaatctagtgataatgggggttttagatcatatctctcatgtctttgattgttctcatggaagttccaagtacaagaaacggaagcagttacaggtattttatacagctcaacacacacacacatatatatatatatatatgtgtgtgcgcgcgtttatgcatcattagtttcatcatatatttctttgagaatttatatatgatgttttctattttataatatctacacttctgaattgtttcagatcagctaattgtgttataagctagctagggtttttgtgttacgtctcaatatatatgctgacctaattaaatattgctgaaattgattattatgaactggatttaagtgatctgcaaaatagtaaaatatttgtctctgtgtaactatgtacttaatagttatgattagtatatttctttcccaaatttattatgagcaaaacaaagtgtttcttatatgggatatacatcccatctgtgtccgtagtacttggttctgtctgttcatgacagaggtttctgaatttagagcccttattcctctagtactcaaacaaaaacccaggttgtttttccagatcatttaactaatgattaaaaagaaaaaaattcgtagtgtacctccaaaaacagctatattcaaatgtaaattagtattaaaatctacgaaggaaaccatttttttttgtttttttattgtaatttattattaggtcatttaaaaaaaaatacaaacaatcataaacccgggttgggtggaacccagcaaaatttcgtgctatgttttcacatgattatttgtcggactcctattgcccaatgaaatataaggagggacctaatcacgttcacattgtcttgtttgcactgccacgtgtaataaatctgctttttttattgtggtcagacggtggaggtgaaagtaagaatcgactgcgaaggatgcgagagaaaagtgaaacgagcagtggagggaatgaagggtgtgaaatccgtggacgtagagcgcaaggctaacaagctcacagtcgttggatatgtggagccctccaaggttgtggcccgcgtggctcatcggacgggtaagaaggctgagatctggccttacgtaccatacgacgtcgttgagcacccctacgcgcctggggtttacgacaagaaagccccctccgggtacgtgcgaaatacctatgacccacaggtggcacagctggcacgtgcgagctccactgaggtgcgatacaccactgctttcagtgatgaaaacccagccgcttgtgctatcatgtgaaacggctcatattacctcctatgtacccgcggagaagaaaaaaaatattatagatagcttcccttacaaagaatttttttggtgtttttgttggtttcatttttttaatttatttttgaaaaagttttgtgattagacctgtaagaattaaagtattgttgttgtattgtatattattattattgttacggttgaatgttatggacataataatatattttgaattttttcaactccatactatgctttctattaaaataatgtcatttgtgtgacttttgaaccaattgttttttatttcttaaatttccaactttattcaatgaagtgtcacagccactttactcccaaaaagatagaaataaaagtacgtagagccacttattttataagagcatatcataaatggatattctgatgtagtttcgtattcgtaaccattttctttttgagtgacaatgaaatctatcgatcgaacaactattcaaatggtctaaggagataagcaaaatgatctttggttctttttatacatatgcttttttgcttattgaatgggtaaccctaccggtttgctttactttatatatatgcctttgaaaaatgttcagtaatggagaaatgtctcatacttggaccattctccacagatatgtatatcataaagggacttgctttggggaatagatgtggatctaggagtttcttttcaccaatttttttttttggttagaatatattataattctgtttttaattattgtaatttcaaattaatttaatgggagcatataatatgttaataatatagtttgtaattattttatttttagcttgttggaatattggaaagatagaagaagtctagaattacttagaaaaaaaaaaaaaatcatttcctacctaacatgatgaaaagattcaattgcatgttctcattgctatttttattttgataaatgcctaattgtgctgtccatttctctttccatccaattataaactactcccaccaattaataaattgacaccatctttttttagtgtaagcataatggtattacaaccaactaatatgattcttgagttcaaacccatgtccttttctttttttttttttccattcttctctcaccattaagctatccttagtggcgtgacactatctaaatataccgttaatccttctcgttgttttattcaacatatttacttattattattattttttttaataatgaacataccattaaaataaataaatagagtgtacaaaaaaaatagaccaaactatccaaataataaatttttaatctaccctaaattaagtacaacttatccatgagatgatatgggataaaaatacttcatcaaaacttgatagcaaacttaagtatcaaaataattgtatacataaaatagtataattcttggagaaaacacgttcaatgtcaaacaaagaccacaaaaaaaaaaaaaaaaaaaatggagaccaaacaatgcattcataaattctactcaaagactgtttgcacccaacatattatatttcctccaatgctagcatttactactataaatgtaaagcccgcttagtnnntttggaaattagcagttgtttatgattaattat

SEQ ID NO: 34554 - DNA, 1519 bp, Cannabis sativa
gcaacacccacagccgttgatttcgccagctcatcacttgggagaggcgccgtataccgttcacagtagtaattaccagcagcagtactcttacggccaaacgtcatccttgtgtggcgtcgggttggtggagcatcagttcgggtcgggtcaacatattaatatgagtgggtcaaacggcgtcgcattgtatcatgatttggagagtagtagcggaattggtggattatggatgagtagtagtaatactaataataatatggggaactatgataacaatatgatgaacacaacaagatggcccagacaagagacgcttactcttctcgagattcgatctcgtcttaatccaaggtttaaggatactaatcagaaaggtcctctttgggatcaaatttctaggtatatattataaacataattaatcttatatcaaaaccctaatttctatatttccaattttcttaatacctcatacatcgactgatcaatcaagcctagactttatgattattattataaatggattataccttgatatatacttagttatagtgttcattttttaacacaagtttcgtctcctcttctgattttctttcttcacctatatatatatatattatcttgcttttctgtaattgggtaaaataaattaaaaacctattttgagtaaacaaaactaataatacatcgtttcattggctttctttccattttgggattgatttttcttttctgtttctggttttgtcatgcaaaaatataacagtcataagacacatatataaattgattaaatttatatccctattacttttcttagtatccactgatcacataatttagtattaagaagcatatatatatatgtacttttaataaaatcggacacacacacataactatgattaattttcaattatggtttagataatgtggaaaatctggccttgtgctcaatgtatataactaaaatcttcttacttctctgtactgatctccttcaatatatatagacaaactaaaatttccctaataatctaataaagatgatcttttggtatattaatcaccaaattaaatcgtactaaactttgactgcatatataatgttttctagcttgcaatttaaattaatatattccatatcagcaatatatataaatattctacgtacacacagcgctagctccccgtacgtgctaatagtctaattaataatatataataatatagctagacacacaaaataacaatatcatttaacacagaataattaagcatgtacgaaaaattgtttatgatttctttattcttctccctttaattgatgaaaccaataataaatgatgagttttactaaaaatgaccggcaatttatgatttataattattactcaataacatatgtatagtctagtagatgtgtgtagctagtatagtactcttcatcatttctttttgagctaattaattatataatgttttaaattgtttgttgatatatatatatata

SEQ ID NO: 34555 - DNA, 2708 bp, Cannabis sativa
tgttaagtccattaactaataatacagggtaacgcagcaaagaactatccaatcaactcaagttttaataaaccaataaaagttaatgtaagctcaaataaaagtctagcattctctcacttggcctacattaattttaatacatatatattatatatcaaaatagttttgtttggaaacgactcaagggttaaacaataggaaaatatttgtggccacttaaaaaataatagttgtttgatagcatatcaacataccggtctaatttaacctttgatattgaactatgataattatattatttttaaatcaacaaaatacatccataatcacaaatgcaaaagtattaaatcgaaatggtcaataagtctaatagtgtagtaaggaatgtgatctatttaaaaaatataatatccttattagtcctcaacttcattgatattgtgatgctcaataaataagctagtgaaattaaccatacacagcttaataaataagtcagtgtcactaaacatgcttaaaaaaataagcagacaaaataccattgtcattaagcgattaagcttaaaagacaataatcacaacaagatatgaactacatgctttcaattcaatcattctcgagaatattacaaaacataattaaaagcataaacattcaataataaaaaattattggcccacaaaacaaaccaagtaattcataacattaataagaaaattacatatgaatgtaatctcaaataataaaacaagaaactctcactaacccaatgaaacaaaagattataaaatgctcatatcaacatgttaaaaaaaataacatgatcgacacttaatcctttggttagaagatatgctaatatcgacttggtcttgcaatattctatcacaatgtctcatttcttgactaagtttctaacaacgagatactttattaatttccatatgtttggaagcactactaatctcattattctttgaaaataaagcaacactattattatcacaatagaagtataggagagaaaataaaatcaactagtcgtatctctaaaatcaaaattctttgaccacaaagcttgcaaacatgccccataacatggaacaaactcaacatacatagtagatgatgtgattaaagttgatttaatacttttctatagctacaccagccaaagtgaaaatatagctaaaaattaactttaaatcatctacacaactatcaaaatctgaatatgaataactaataactcagagtttctcgacatgcataaaaataagcataatactattcattctttgtaaatatcttatgactttcttggaagcaacctaatgatcatggccaggatcagataaatatctcctaagaacattgactacaaaaataatgtcaggtactctagtgcaaacctgagcatacagaaaaatccctattacacttgaatatgagatgttcttcattgtttctcttttcaagtcgttcttaggatattgttgcttagtaaacttgtaccctttcagaataggaaaagcaccagccttatataaaatcatattgaactttttgcgcacacgattaatgtaagcttcttgagataagacaagaaaattttgattcttgtcacaatgaatctcaatctcgagaataaaagatgcctctccaagatccttcatattaaagttggtagacaaaaaaaatttgtatagtagtgaaaaatcactgctagcaagtaaaatgacgtgcacataaaggacaaaaaaaatataacgactcatactgatcttcatataaatacactagtcaaacttgttctcgatgaaaccaaacaatgtcaaaaccttataaaactttaagtaccattggcgagatgcctgtttaaaaccataaatggatcgtttcaatttgcaaactaaatttttattttcattttccttgaagccttcaaattgagacatatagtcatcctctctcaattctccattcagaaaagtagttttaaaatttatttgatgcaactctaaatcaaagtacgcaactaaaccataataattctgaatgaatctttatgaaagtaagcgagaaagttttagtgtaatcaatatcctttctttgagtaaagtcttttgccattaaacatgttttatacctttcaatctgtcactctttgtctcttttagtttttaaaatccacttacaatctagtggtttaaaaccatcaagtaatagaactagctcctatacatcatttttcttcatggactcaatctaatcatccatagcttctatccattttgaagaatgtggattattaagtgcttcactataagtgagaggatccacaaaatgaccaatatcatattctcattttccaaggtaaacaaaattatcatcacaccttgttgacttcttctgtccctgagatctccttagaggaggtacttctgaaatagcctctatttgttaatcatcatttagatgacatctttcacagctataatttttccaataacaagatattcatcatcaataggatcttcttcagtaataggcccctcatcaataatactcccttcatcaataataaacccttgtcatcttggatatcaggagcaatatattcatcaacaattagagcattatacactagagtaagaataagattgttattattatcatctcttgaaaaggacacaagaataaa

SEQ ID NO: 34556 - DNA, 2067 bp, Cannabis sativa
  modified_base (1949)..(1986): a, c, t, g, unknown or other
tagaatttataatcatgaaataaaccatgtgaaccatgcaacaaaaaatgttttctgatctttattaattagtaaatctgattattttgaaatgggttttatttagggcacaaaatccaacagaggcaacctatgagttagaatctgatatgagatagagatatcctgagttgatcaagtaaattttgggataaaatttttataacgagggaataattataatatcttgggtttagtaaatggattaacaaccctaactaaaatgaattcactatatttgtagatctttcaagctatggatggatatgggaatcttttccacaaatcttcaacagattttgactaagttaatgtaaaatagagacactttgcaccatcacttgccttcgacacttgcatcaatcgaatatatttggacagatgaaccctaaggtgtattctggcttcatataattccatgtggggcattttaaagtgttccaacaaaggcgtctccattattcttcttacacgtggttctgaatcttcttctttcaaatcaaatacgactccactttttttctaggcttgatgttccgtgaccttagttaacttatctatttgatctttcaaacgcttagtattgttgtctgggaattcacggccacgaactttgtcattaatgtgatttctgagatcgtttccacgaggcattgccttctgacctctatctcgatctttctttggatttaaattttcttgaaagtctattgttgacatcatatataaatttttaattacataagattggagttaatgtaaatgttacatatgattatggttaattaaattataacattatgatataatatttggctggttaaagtaaaagtattttatttaatataacttttaaaataaaatatatataaatagtaaaaattatttaagatataattatttgacttgtaatctcttttgtcttgttattgtatttttatgaatttttgttagttattgtatttttaagcagacttacatttaaataagatgctagatggttttagtttcaagaagccaacctacgtcatactatatttttgtttaaacataattaataaatgtaagacatataattaaaaaaatttactatgcacccctttaaaagggatctacctatgcattccttatctgttttggcaccagaaaaaaaaattagtttaatttttttcgtggtcgtcttcattatagttattttagacatcctacaaaatttaaaaaaattgagagaaacttaacacgccaaaaataatgttcaaacagtctatttcactcacgtataaaataaaagagtctcatgtgtaacataccatttgaatcatatttactgtgtgttaagttcttctaatttttttaaaattttgcaaggtgcagtaaataactacaacgtagatgactatgaaataaattagaataaaaaattcgtccaatagccgaaacaaataaggaatacaccaatggatttcttttaggggtgcatggaccttttttagggggtgcattgtagaattatataaggtgcttctacaatgtactacactaaaatgggtgcaaccctaactctttccacatccacaaaaattttttaatttaatttttttataattgtatatgttataaatatttagaatatcttgtaaaaattttaaaaatttaaaataatttataatatcaaattcagttttcaaaccgttaatttcttaaacttataaataaaaaagtcacgctgactaattaactagtaaatatatttatactagtgatgagagcacgtgcgttgcacgtgttctatgagtgagactttttaaaccatttacttttatttttgttgaataagtttcataaaattttgataggaataatagtagtagtggacaaatttcctatatatgtgtaaagaccgcttagtnnnnnnnnnnnnnnnnnnnnnnnnnnnnnnnnnnnnnnaaattatttatagctatttatataattatttatactgttattattgaattctgagatgcattttatgtcatttagtagttt

SEQ ID NO: 34557 - DNA, 1186 bp, Cannabis sativa
atagaacacataacataaaactaaatatacgtgtcttgcacgtaattttcttgtagtatatatatatatatgtatctatctcatagtggagaagaaatagtaaatgattaataaaaatattctcgatatttgataaagaaaaaataaaaattccaaaattcatagaaaaaataatgttaaaaattaagtactcataaaaattgcaaactattgatgcaccgaaaaaaaaaaaaagaataaataaaacatttacctagagatgttgattaatatggtatggcataagaataaaaaactgagaggagaaaaaaacctacactatcaaattaaaatgatgtttatgtatatatttataagttagttattagataaatatcttaattttaaaaaattgaaaaaaaagaaaaaaaaataataatactaaaaatcaaaagctaaatatgtgatattttaaaaaaccaaaaaaaaaaaaaaaagtaagtacgtgtgaaactttttttttttttttaataataaaaaatatcaaaagctaaaaatgtgatattaaataaagctaaaaaaaattaaatacacaataatgctaattaataattatttttatataaattttagaattattatttatgatgctaataaaaaaataaaaaaaatgaatcttagggtgccacataccgcttcatactctctttatataaatatagaatattatttatgaagctaataaaaaaataaaaaaaaaaataaaaaaattaacgagagaataaataatgataattaaaaaaaaatcttagagtgacatgtcatatatagatatatagatttttcttaattaattaataattagtatttattaattgaataaaaaattaagaaaaagagagaattaatgagagaagagatagtgagatttaaagtgattttaaggtgctacatcaccgcttcatacttctcctttatatagatatatagatatatagataccataaaaatagattatgagatatttgtttacgtggagaatttttaaatatagtttagtttattaataaaaaatgaattaatattttaaaattaataaaaaattaaaaaaatgagagaattaaggagagagcaaatatgactattagagaaattctagagcgccatgtcaccgcttcatacttctcctttagatatatatatatat

SEQ ID NO: 34558 - DNA, 1424 bp, Cannabis sativa
gaaaaaaaaaattaatttttaagagtatttgtaatgtgttatgtttggcaagaagaagagaatgagagagaggagagatggaggaatacattctcccatcaaactttaaaatttttaattttcaaattttggtaggattgtagaaaaagacaatcaaatttgttaatacaataatgagaaattatcctatataccactttttaattttttcttttattttttcgatttttttttttgtttttttaatttttattttaatgatttgggatgctctgttaattgtgatctgaattattgcgtgggttgcgatgtggattgcagtttgaattggattgcgatttaaattgcaccatatattatgtaaaaatgcccaaaaaaatactttaaaatataaatgaaaaaactcctacaataattaccctttaaaaggtaataaatatttatattcaaaaggaaaattttgtaattttactaattaatttctctttatcattctaacaccacacctaataccaaataacacgaaggagatcaattatcctctctgttgacgttgaaaagtggctaacaccagcttgctagattgacaaaatgaataatgagtttaagtaaaaaaattagagagacacacaatatatagtaattcacttcccatatcgcgatgctaatggagctacgcctacttcgaatttttatttctcacgagagatgataattgcaaaaaaaggctaagtgtttaagctctgatttttagagagagaaaatagagagacatgctctgaccttgtgagtagttttctggatataaaaaaatgagcttaagaatctctccatttataggtgaaggagatccttgcaaataagaaaaaaataattcaaaatatgaatatatatatataaattggctaattttgaaagtacggtcaaaactaacttctgaggttgatagtcaattttttgagctcgggtcgcatcagtaagacctgctccgggtaagccagagcttattttcgtaattctcttggaggttaaattttagatcgataacttcaaaattgtaattgaagtgtgagacatgacttgatagagcattgaaatagtttcgaaacgcaagttgaatcgtgtcaatcagataaatattgaatgagttatggtcgtttataacccaacgcctaagttgacatccagcgtccaggttgacatcccagctcctaggttgacatatgatatgtcaacctgtgcgctgggtaagtaagaaaacgtcctagggatgtactttttgatgctaaatgatattttgacatcacttagtttgtttttgtgttttggcgaaactggtcaccgattctcagggatgttgttctaaagaaatgagagactcaaactcttcattttcgagcgattttcccatgttggaaatgaga

SEQ ID NO: 34559 - DNA, 1359 bp, Cannabis sativa
aacggtagcacaagcactcccaagctatgctatgtctgtgttccttattccacttgaaacttgtagtgcgcttgagaaacttatggctaagtattggtggggtaattcaaagaaagctagaggcataagctggatgagttgggatcgtttaagcaaacataagagttcgggagggattggttttaggaatttacatgactacaacttatctcttctgggcaaacaagcttggcgattactaactaatgatcagtcccttgttggccgaatctataagagcagatattttcctcatggttcttttcttattgctgagattggcaacaatcctagctttatttggaggagtatctttgagactcaatcgattattgcagcaggggcacgtattcgcattggagctggttcaaatgtgcctattctgaacactccttggttacccgatcagtccaacctgtgtgtgtcgagtactcatcctgctcttgtgggggcttcggttaatcaactgatgacagcaaccaatgatcaatgggatgtggaaatacttgaggacctgttcgagcaacgtgatcgggatcttatcatgcatatccccttgaattctggtgaagtgaatgacatttggttttagcaacatgagaattcgggcttctattcagtcaagagctgctatcaatggttacaagcttcgaaagggagatggtctgctgatatggaatcgaacctttggcgttctttatggaaaaccaaagttcctcctaaggttattcattttgcttggaaagcaatcactgggtgtattcccactcgtactcaactttataccaaacatgtgcctgtgcaacttgattgtgtttgttgctcaagagaggaagaattgattttccatgtcttggttggttgtaattttgctcaatcttgctggaacttgtcaagtgtgcctactagtgctattatggggactgaatttggtgaatggatagagcagattttaaataactgccagcctgtggtgtttgaagaagctcttatggtggcatgggctatttggaaagcaaggaacggactgctatggaataaaaatgctactcgagcggctgaggtaattaccactgcaacaacagtgttgaatcaatggaaaactgttgcttctaacaggttttccctctgcctggtgtcgtaaacaacaccagcaacaactacattaactggacagcacctgctgctggttttttgaaggtaaatgtggatggtgctgtgttttctgcatccgactcttttggtgtgggagggcttgcccgtgactctaatggccagtttattgaagcattttgtatgcacaaagcagggtgttttcaa

SEQ ID NO: 34560 - DNA, 1469 bp, Cannabis sativa
  modified_base (897)..(897): a, c, t, g, unknown or other
  modified_base (1441)..(1443): a, c, t, g, unknown or other
taaatataaaccctaattattaactatttggcttatcgagatattacagtttcatcctaggaagctagccagttcatgactgggtttagtaaccctgacaagttcttggttgagtcatgggaccctggccaaccttctcaaggcttgggaaccttggtcggcctaggccttggttccaagcgggtggcaagttttttgtcctcttttgacctcagcaagaattctgtcatggccttgtaggcatatacaaccatagtcttatacattgtttccttagaaactctgtatgaaacttaatggtgagtctattaaagtcgaatgctcaactaaagaatcaacatttgtttaagttgttacacttggaaccgtacttcgctgatacccagccttgtacaatgacattatctagtaagtacttttgggtacgggtgcccagagttttgtctatggcttagaacctgccagaactctaccttgccttagagatttaacccggtaagaggttcctataggaactctatccagttcttctctggctgtacgattcttgcggggccttggccttatgcatttgaactgattttttattcatattaagccttgaggctttcatgttcttgcttttggcctataggcactctatttttgaacactactattgtttagccttaaagccttttactatggacatatgactgtcctgactatcttcttattgccttgacatgtaagtatccgaatttacttttctttatgccaagctaaagtatgcatgcacttgacttagaggcaggtttattagcttacactaagggttaaaatttctctgcataagttctccatgctagttctatgcatttgtacagtgtgggtgcccccaaggtgagcacatagacntacggtctcttggtcacttgcaattcaccaagtttcatagaccttgcctgggaattttcttggggatgctacgggtctacgcatgtggaactgaaaaagaataactttaagaagttaatcttgttagcaagtggtttaaacacagttggtcttacgtgtaacaaaagcttacaatttaatgttcgtttttgaagtcacattttggctacccctacctgagatgtcaggcataggccatcgctgaagagcgatgggaggccatgctgaaaagcgatggatactagctcttttatatttggctacctctgtagggcttatcgttcaaaggctatcactgaagagtgatgggaggccatcgttgaagagcaatgaccctaatttaaaatataaaataactaatttttaaatttaaacttcaaaatatcaagaaattaataataatctattaaataattaaatattattaaattggtaatttgatatttaggtttcaatattaaaaataatattttatgtagatatttagtgttgggttttatgcccnnnataaaactctttacaatctgattagt

SEQ ID NO: 34561 - DNA, 1680 bp, Cannabis sativa
tgttgtttcaaataatcacaaagagaaatccatacgacccagttgtagaatcaacgacaatcatggagatgcgagaaactcagtgtagatctcaagggctcagctagaaaaataacatgaagacaaaggaaaatagaaacatttcaattatcttcctctatggaggtctcaatacgaaggtcattatgcagcggtggcaaatcttacacaaaaatacaatggtagcaggcgatgaaagtattgacatagtggtgaaaattgcattaaaacgaatgcagaaacgagaatactcaatgaaaaagaaaataaaatgctgccacccacctgcttgtcgctctattcgtccgaggaaaagatgatcagaggattcaaagagctacctctgtgtttgaattaaaacaacaacaatgaaagtgttgttgtcccattaaaagagaatcaactttgtattgaagtaaaacgcagtatcagagaatgcgtaaattagaaaagagcattattattgagcactagtagtgcccagtgtggcgtgctgccccatggcacacccacaatggggccattttgtaacatgagcttgccttggtgcttgatcattagtcaagtcttgcaccaagcacctcattaaggtggggagtcttttgttgtttagctttctttcttttgtatttctactcaaatatgtatagagggctaaaatcatgtatattcctagaaatcccttaaaaccccaataagctctttaggaggggtgacctggtgacttatgaagcaccttgtcaccagcaagataggggcctagctatgtagtcccttgccctatcaaggcgatataataataaaacgatgtttatccatgcttcttgtgtatgcttccatatggtcattgtgatgcctgtttgttacctttgttgggccattgcgtgccatttgtctatatgtttgcttgtgggttgtgtgagattggtccatggggacgctttgtatttgcttgcgcatgcttcttacttgcactcaacatgtgcgagacatgtatcgtgcctaaactttgaacttgtttgcctccaggcacgtttaggctgacttgctagctcattgtgttagtgagtgctgcacgttctgtctacttgggggtgtctaaatagtcagcccgtgacagttggtatcagagccaacagaaagggaaggttggtaacatgacataatggtgagcaatacccaaagaattaaggagcttgagaagcgcataggggaactagatgtcctggatgagagggtcagggatctaacctccatcaattagaactcagggccaacagcgacacaacaacaagttgccacgttggctcaagactatgctaacttgttggccaaggtagctgcaatcgagaggagagacgccgctaccgaaacatcaggtgcacctcagatggaggatcacatcagggcattagaacaagcaacaatagacatgtaggctgctatcactgtgctacaaaatgagcatgctacattacaagactccctcaatgatacgatagaggattgccatgtgtgtgtcatagccattcggtaagagttagaaggaatgtcaactaagcgaaatcttaccatgatagcagcagagcgtgcaaatatcggggggcacggaggtatggagcatggccgaccgagagcacc

SEQ ID NO: 34562 - DNA, 1692 bp, Cannabis sativa
gtaaaataatttccaacagctactagtactagcttcgccacttgtttcatcactggcccccctgcattcctcgtgggtaagtcgctctagtggatagtagctaaattcagcaggtgcgacggatctaacatggcacctcacttttgattgatgccacaagtccttaaaacaccaccaacatagtcccctatggcccttattctcgactcaatgagcacggcctcgaaagtgacgttgggatcttggggagtctttgacttacggggcttggacgacataatttcaaagtcaaggtcacctggtgaaaaagcaattgtgactctgggtaaaaacaagggtttagccaaagatatagaagataaatattggggctcaggccaggttgcatctcgcaagtagcgacgtttaccctctgttatttcttgtaggaaattcctatagcgattagaaacttcttcctgatggtttttattaaatggtctctaatttttgcatcgtttatctccagttttggctgaggtttagaaattctgggtttgtatggaaggctaatttcttaggatattctatttctaaggactctggagaataaacttcagaaccaaattgtgacatttctacaaaaagcacaatcccaattcctggatgaaatttattaaaccaaagacttacaaatatgataaacctaaatttttactcggcctaaaccctaaaaattacatagaaaatttaaatcaaaatcactaaaaccaaatggagtgacaaagatgtagttaacaacataagaatcataacccaggaaatgagaaacatcaaaggaaagaagatggataacttatccttcgaagtcgagttgtcacacgatgaaaagctctacaaccgaggacaggatgaatgacgtgttgacttctgtggattcctgaggatgaacagtatatcccagtagacgcgcaagaaatatatcaatgacaatgagggcatgcaaggcttcgagaaatcagaatggttttttcgcagaaaaagcttgagatttttttttaaaaaaaaaaggtagaaatggcaaaaaaaatggttcctttttcaattttataccttgggtttgatctccgtatgattaaaggagaaaagatccaacggataggaataagggagaattagaaaagattgttcattaatgctaatgatgtgccttgaaaccatgaactcccaaatttaaaagtcggcaattttttaaattgggttaagaccaaaataccatttgtaatcatttaaaaagtactttttaaggggcaattgttatacccaaaattttgttgtacttcagagagtgacatgtttcaatctcgtggaatatgaaccaacagatataatgataagtatatcattaaatgcaaaataactcattaaatatagaattaatagagtataatcataactcgctgactgtataatcttaggcgagacaaggatacacaaactatcaattcgtgtattgaggaggaactatcttgcctcggaaggcataatcctaagggagctacgaacagtgcgtagcgagacatcgacctcgctacatgtaagaaggtattgacaaggcaaatccactgttgaaacacttagcgtataatttatgttataataactaagtgtaacaactggaaaacatggaggacatgattgtccagtctgtaa

SEQ ID NO: 34563 - DNA, 1513 bp, Cannabis sativa
cttctctatttatttatatgggacaatgtccacaacaaaatcaaataaagatatgatataggtattataaatgcaacaaaggaaagaatcgtttctttcacatttgacaaaaaattaagcataatatttatcacatttgagtggaaaaaaaagaatatttacacaaagtattattaatggtaaaattgttatattttttatgtttaattttttttttatatatttttatagcatcctataaaaacgatacaaaaataacaggaaatagcatctaaacacgttcaaaataatatacgaataacataaaactaaaaataaaataacaaaagtatatcataaaataatatgaaaacatcaaaagactatattttttatcaatataatcttaaaaaccgtaaaaaaatatttaaaattttgtacaactatatttttataaattttttattatttttttcctatttcttaaataatcccaaaaaataattaacataaaataaaatagagataattacaccacgtactgaaatttctaactttttcacttttatattgcggtgcaaattttttttcaaaaatactgtgtaagttttataccgtgtactgtggtaagtttttactgttattctacagttgttttgtaattgttccactattgtttttagttgttttgtattgtgtttcactgttgttttataaaaacattgttttatttttataaaaattaacccaaattccagcatttttttaagtttccataaaatataacctttccttatcctcttgggctgagtaaagccgaaaagtccaaaacactataatgacttgggccacatctgattctttcatcatagtgtaacactgaactatgggttattttaatatcacatacattataatttcactaggcttttcttttcttattaaacaaaatataatttaataaacaaatattgaagattgaataaatataggtatccaatatattacaagacccatgtagtgctgaatgtttaaggaaatattgatataatttagcagaaaactcaaaacaaatccctccatgtttagtatctgaaactttgaaactatctactattttttttttgtaacaacactatgtactaaatttagcccaaagaatatatgaaatagttaaaaccatcattttgctaaattgtgtactgcgtttaagtttttactgttgttctacggttgttttttacttgttctactgttgtttttagttgtcctattttgtgttccgctgttgttttataaaaataatatttttgaaaaaatttctgtgcaagtatttttgtaaaagaacttaaatttcagtatttttgtaagtttccctaaaataactaatatgggatgatttcatattggaccacatccctagcccaatatttaggccttttgagcatgcattctagaacgaaattgaagaaatttttataggaaattacaatatttttacaatgtgttcaaaaatatatcttttttttttttt

SEQ ID NO: 34564 - DNA, 2036 bp, Cannabis sativa
aagttctaataccaacattaatttgccaacccccttttgccaacacatcacaagtaaattctattttactagcgcaataccaatttttaccagcacatttgccatcacaaaaatgtgctggcaaaagtgacatttcttgtagtgtagaaaaacttaaactctctattctctctttacgatggacggagagcactaggcgaagccctcaccaccgtcaaccgaagcccgaccgaggctccaaccttttgtcaacctgcaagaaaagaaggacaaatctcaacaaaggaaaagatgtgtctaaaaggtaaaacccataacctccgttgacctccgtcgccctttctgttggtgagaaagagagagacgaaaaaagaaatggcggattagggacacgagagggaaagtgtcattgggggtttggatttctcaaggttagagataataatggtgtggcacatttggactaacgattgtcggcggtagctcctccaaagttggggaaggctccccccacaaagatgagggatatggttttggtgggtgtaatatgtggaaggtgaatgggttgcaggagaaaagagaaaaagaaaagagaagaaaaaaaaaataaaataaatatttttttataatttatttatttttataatatttcaataatatatattatgtagactattaaaaatttgccacgtgtacatttgtgtacacgtaggcagtctactatagcacttaattgagatttttaaacggaagtgtgaagagcaaaacagaaaagggattcaataagttttaatatcaaagaatcaatttgtgtaattaagtattaaaaaatttaaaatacggtagttttaccgctaatattcttattcttaataggttatagtattcacttcacaaatgtatatagacattcactccacccattaaatagttaaatgatatttgtcaggaaaattttctcggtgtagtgtatgttttttaaaaaaaaagaaaagaaaaaaaacagtttatggaaaacaaactccaaaacaaggagaatggagtatcctcaacattattttgagaaagaatattttaagaatggactatttttgagaaagaatattttttgtggttgaataaatgaaactaaaacatgatttttaaataaataaataaaaactataaacaatgaataaaatcaagtccgaaataatggtctattattaaaggtatctcagaattattaattaagaaatatgtatatatatataaaccttctatataataaaatgttgatgaggatgatttgttagcctttgcaaaaaagaaaaaaaaaacaactagctaagattgcttgtgtttcaaatataagattgaatatgttgagtgtactccattctccttgttttggagtttgttttccataaactgttttttttttttttaaataaaaagtatctagattttttttagaataaataaataatgatccagattgagaaataaaataaagacttttttttggataaattttcaaatcaaaattcaatgatatgaatggtgatgtgtacaggtagatttgtgtaggactggtttgaaaaagacagccaagcctcacaaaatatcaacctctctacaacccaaaagtaaaactctttgctagaagattacatatagatgcagtccatacacagcaaactaaactggacccaatgacccagaaacttcaaggccccatctaaatgacccaatgaaaaaatgtactgttttttagatttaaattttcaataattgcaatttaaaggtttcaaaaatatataatttaagttattttcctggcaaatattttcaaactgaataatttgaattgttattctaaagttataattttgaatctactactgatcaaatcctaccctattttcacgaaaattgtttgtattaaagcaatacaaagttgtgtaattttcttaatttctcaatgcaacaacacactgttacaataatgaaatttataattaaaggtgtgcgcatattataggctgttgatattt

SEQ ID NO: 34565 - DNA, 1518 bp, Cannabis sativa
tattacaagggctactctttttcgaaatcaacacgagattggtatcatttaaaccgaatggaagcacccccgtttccatgaaatcccgaacaagccgaatcacatctctccccacaatatcccaatatttctgataaaaccccggactcatcccatccggaccaagagatttgtcaggatgcatttgaaaaagtgtcgcacgaacctcctcttcctcaaccatactgagaagcattgcattttggtcttctataatagagggttgaacttcttgtagaacattgctaatatcaacattggaagcctcaaacaatctattaaaatagtcaaccatcaccccgcctagccctgcctcccagtccacccacaccccatcttctcgttagagtcgctgaatgtgattttgcctcttcctcgagctagcaaggctatgaaaatatttgctatttgtatccccagagcgaagccaaaactgcttcgatctttgcttccaatagatttctctttgcgttaaaatttcaaacaactcctcttgcttctccttatgaagcttgaccgaatcctcatcccttctcttcttcaatcttcgaataaccattttgcattggcttattcggtctttaaagttcccggtaaactccttcccccaagcttccaaagcctcaccacaactttgaattttatcaactaaaccactcccactcattacttcccagctactccgaacaacctctttacacataggctcacgtaaccaagtgttctcaaaacggaacgatcgattatgcaacccagaagaatacgcttcaggtgttagaagaatcggacaatggtccgatgttgaaatctctacattatacaacttttccaaaggaaataactgaagccaagaatgagaaactaaagctttatctaacctttcctctacccaatgactagagcctttgcctttctcccaagtaaacggataaccttccaagcttaaatcaaccaacccgcactgatcaaaggcattgcgaaatccttccactagccaattaggatagcttcggcctcctctcttttcatcttgaccccctaaattgttcatgtctcatatcaaacactaaggaagttgggactccagattcaaagagtgaaaaagatcccaagtatttcttcttaacgcacggtttggctctccatatactcccgtcaacctccaatgtctcagctcatcttcatgtataattacatcaatatggtttttttgaaaagcctctcaacatggccattctttgttctctccagagtaaagcaagcccaccactatgacattgggcttccacaacaaaacaaccctcaaagcccaaatgagctctaaccctttccaccacatcttttctacataaagtttcacaaagaaagattatatcgggcctcttctaaacaaccaagtcctttaggaattgaacggcccgtgggttctcaagcccacgacaattccaacttaaagaaatcatgatgaatggcgggcct

SEQ ID NO: 34566 - DNA, 1959 bp, Cannabis sativa
  modified_base (1297)..(1300): a, c, t, g, unknown or other
  modified_base (1514)..(1514): a, c, t, g, unknown or other
tcttggtaaaataatcccaacaactggccttagagccatagtaatgatttactttcatgaaatatagatttaaaacaatgattgtgatgctctggatgtgttcatgttggttgatgtgcttatttgatgaatgtatgtaaattatgatttttttttaaaaaaatatttttagtttagttctaaaagtatttttttggaaattagataaaaaaaaattaataaatttagacttttacagtgcttaatttggatttttgaattagttatgatattttgaaatttgaatgaaaataattcaacctgacacatgccctacgtgcgcggatgcttgggggcacctcggtcatgaccgagcttcagacagcacatgaccgaggttactcagacatggttttatctgaagcatacaggtgctgagttccctcggtcaagtaccatgtcagcagcttattttcacgccattttctccctgtgccaatttttgtttttgtgatattttgagtttcaaaaatcatttttcaatgaaaaaaaaaatcaaattttggtaaaattttgtgtagaatctaaattttcaaataaaaatctaattatcagaataaagataatttttaattaattaaaagtagttttagatattagtagcctttgaatttaaaaatttgattttttcacaaacttgcctttatggttgttttttgaaatttgattatttttttatttgttttattaattttaattataaaatcatatattacttattttatttataaaatttgaaatgatcttattatgacatttaaatattaataaaacttaaagataatctaattagaatttcaaattgctaaccatatcagatttttaaaaatttgttttttttttaatatattttattaatttaaatggtaagattagaaaaatatttgttttgatattttatcttattagatatttattttaattaaaaaatttatatattttgtcaaaataaattaaaatcttgaaaagttgttaattttggtttgaatagatattttaaggttttctaaccataaaattttaaaacttaggatattttatttattaattttaattaaaactgataatatcctaatcataaaaatatcctattttcaaattgtctattttgttaaatttaattcattaaattataagatggataaatactattttggaccatgtgttttacaaaagttaccgattggaccctctgttttgttaaataataaaataaaccctgtattttcaaaaatgataaaaataagaccctgagctnnnnttttgacaacttttttttaatataacaaactttaagacaattcctaacacgaacaaatatagaaaatataaaaaattttgtcataacacctttaaatcagattattattaaatttcattttgacaaaaaattagttcagggtcttatttgtatcattttagaaaatacagtgtctattttatcatttaacaaaacagagggtccaattggtaanttttacaaaacacagggtccaaaacggtatttagccttataagatttgaaatataatatcacaaatatctcaatttttaaattaagatattatatcatattatcttattagatatttaattgatttaaattatttaaataaagagcatatttgaaaattatttagatatttgaatttaagatattttagggtttgttagattttaaatatttttcaaatattttctaacaacctaaatttaaattctaattaagatatttttataaatagaaataatttatttagaaaaaatatcttaacctactttctaaatatttgttacatattttgtttgtttattaaaattatgtattcaaaaacttttttaactaatctattatttatttgatctaaatagttatgattaacttgttgacagattcaatgaactgattttaatcatagt

SEQ ID NO: 34567 - DNA, 1656 bp, Cannabis sativa
tacgacaatgagttaattattaagggattaagaaatataattaaaatagagcaaaaatgaataagtaataaagaacaccagattttaaagaggttcagccccgttggtatgataatagcctactccccttagattgtattaactcgagaacaaagaacaaagtttttttctctctcaaagctcttacaatgaaatctctgagtcattctcttagatctctttctgaagcaattcttttgatcccttttacagtgaagctaaatcactatttatagggccttaatgcatgagggaaggtttttcttttgattacaatatataaaataggaaggaatattcattacataattatgatgcactaaataggaaattggaacaagtttccatattcttctgactcaatcccacgattatagggattgtcttcgtgcttggacttcacgagatcattctaaagggaaagtcaaacttgctcctgctcggataatccaccttccaccttgctcgggtaacaagcaaatgtatattatgaagtctatttgggacatccatctccgtccagatgcgaagaatgtaggacatgtgtaacttgtatattgtgccacgttatagtgtaaaagcaggataacaatatgcttctaataataatttgtttgtacactttattataactacactacaccgttctaactacaaattaagaatattgtatctatcactatcattatttttttgaaatatatgtttggacataatatattaaatatatacaaaatatattttctataatataatccttatatagagagatcaatataaaatacatataacaatgaaattcattttttatcgtacatataaaatatgtatatttatacaatcatatctaaagagcacatcaatgtaactgtaatagctaaaaaaaaatttcaaagatcaaaatctcaaaccttatttcaaaaattaaaaaataaaatacattacctaattaaaaaaattgaacatacatgtattatacgtgcattgcgtagtatctatatattgttaatgttacgtgcaatgcacgtataattagtttttttttaattaggtttaaatagatgatgttaagtgcaatatatgtatgtttaatatttttaattaaataatgtatttttttaatttttgaaatgagatttaagatgataattttttagattttttttaactattgtggcaatattagtgtatatatgcaccctatcaataattagtactttatataatcatgatatatcaagtttgacttaccttacaaatatagtatgatttaaaatacttttgagtttgatattagaaaataatatttatataaattatattgaatcatgtgcctttaaaaatcatgtgaaatatatcgattgattaaatcataaaaattattaaataatataagcacattaaataaccaaagacagtttcaaaaaaaaaatatatataattttttttttgaaagaaatataaccaaaagactaatataaaatatttatgattaaaaatttcatatataaaatatctacaatatttgaagtattttaaatttaaatttaaattttcttatataaaatatctatataatttttaggtgctttttatttatgaaattctacataaaaa

SEQ ID NO: 34568 - DNA, 3979 bp, Cannabis sativa
ttgaaatgagttttattttgggcacaaaacccaacaatatttgcctttgataagaattttcttacaataacaactatcaaagtacaatagagatgactccctacaggattctatatggtaggaaacatcgttccgtgattcattgggacaaaactagagaaaggagatatttgggtcatgaattagttcaatgaactagcaaggaaatataaattattaaggctcgaaagcttgcttcgcaaagcagacagaaaagttatgttcatcctaagcacagagacatagagtttcaggtgtgagaacatgttttcctacaagtctcactaattaaagatgtaaggcactttggaaagaggggcaagttaagccctaggctcatagggttattcgagatactcgagaaagctgaccgggtagcatatcggctagccttaccaccagcattaccgactgtgcataatgtattctatattttgatgcttagaaaatatgtgtcagacccaactcatgccttcagttatgaagctttagaactacattcatatttttcctacgaggaacaaccagtttaaatcctcgataggaaggaaaaggttcttcagaacaaaaccatatcattggccaaggtaccatggaggaatagcaaggtggaggaagccacttgggaattgaagtctgtcatgaggactcaatatccgaagttattcatgttagatttcgaggacaaaattcttttattagaggaataattgtaatgatcgtatacttaaaatatggattagataggcaattagcattaattatttggattttgtgattacatatattgtgggtttcattttcaagaaataggcaatagagttataatttctcaattttggagattttattaaactctaagtatattatatatgccatatgtgaaatttatctttttatgatttttccttggtaacgattggaaatgcgacggtttggccattagagacacagggggttggtttagaaccttttatcaagtggggaaatcgcaagtgatatttggaatatagagattaggcaggattatggtacaagaccattttacccataagccttaatgttgcttatgggtaaagaaaaggacaaaatgatatttttcctaaagggattttattatattttagtggatgtttgtagaataatctattttattctgaattctttagtggaataaaactaattagctctatctttatttcattaagtttaatatagacttataaacaaaacacatacacccataaccctctctcaccatacccttcggccctaagtaaaacaagaggaatcaaagagattttagagcatcatcttcagatctgctaggaggttcaaattgaaaattaagggcctccgttcaccatgtaattttccatttaggtcgatcgacacacttgaatttgaaaacgaggtaagactagcatagattgtatatgtatgtgtatgtgtattatatgcatgctgtttatatgcaacactagtacggtagcggtattcagtgcatgtggtacaacatatgatgtttaagggtacagtcttgtgttaccaatactagtacagttaggtacgtagtgcatgtagtacaacacttagtggtactcggggtacggttcaaaccctaccaacactagtacaatagcagtatgtagtgcatgtggtacagaggtcttaccgttgttaagaacgttcttaatcatctgttaagtcttgtagataggtgtatgggcgcctaaatacaagttggtaatacattgtatgttatatgcttttcttactgagttcgtggactcaaagttattgcttgcatgtgtaggtaaaggaaaggctaaggctaagcaacaatgagtctataacatgaggataattgtacatgtgaggatagtgcgacctggagagttcattctcgggataactagggcttttattttgtagtcgttgtacgacaaagctgtaaaaagtgagatcctgataattttgtataattatatacttatagttttaaaagtttaaacttaatcaaaagtttaaattcatcacaatttttgtgaaaatcctatgattagcaaaggtgtgcgcgataattaaaaagtcgttgttgcgcgcccaatcattatggcgttacaaatgagcgttaaatataaagacattcgatctccattgtttgtcttacatggtcaattgtttcaatgggaccttgagatagtagactttgtcccccttatggatgattatccattgaagtattgacactgtaagatctcgaatgacaagtattctataagttttcttttctattagactcttccctacggtgactacctagaaataaatttacaaataaatatatgaaatggtacaagctcataaaataagaataaccttgactctcgcctaccaggacaacgttggattcttatttttatcgaagaaaaggttgctaaaatagtgtctattttagatgagctgactactctattcaacttatgttatctttgactctcacctatcgagacactgtatatcattttgttggaaaccttagaaaataatttaatatattttattttggtattttttggaaacatattttgtttacttgttattttctgaatatgtgtatgaatttatttgaaccaagtaatatacttctatttattgatgtttgtagtgtcaaaaagatgtttaacaatcctcatcccaatcctcaactagtatatgcctttgaaaatgaactccgaattgcaaagatgactcctagttagagtatcacttcacacttgctcgtgatgaccttgaaattctagaaagcaactgtgttgggtactttcatatcatgggagcaaagagttcaatttgttctcaacagcttaacacctgagtttaaccaattggttgtatcttttatgattaacaattggaacacgttcgaaatagacaagttggacgctgaattacttgcttaaaggacattgtcacttgcaaggaaatctctctccagtattgcagacaagggaaaaagaaaagctgagaatattaataaagattcctttgacaatccaactacttcaggctcagttgagaagaatagagaaagtgcttccatttcctctgattatctttcccaacagattgaaccagcaataagaacaatccaagaacagtaaagaaaacatattattcaatgttctcattgtgaacagaagggacattttgaatcataatgtcccagacttctcaacactaagaacaaaggtaatgctttagtttttgaatcatgtgctttagagaatgacaattccatctggattgttgattctagatctactaaccatgtttgttgttcattgcagctgcttgaaaattggaagtatttaaaatccagagagttgaaacttaaagttggtaatggcaaaatggtatcgattagagctagaagaaaagaaaaacttatgtttcagaacaaattttttaatttagacaatgttattttattccaaattttagaagaaacttgatttctatttcatgtttacaattgcaacaatatcaattgaattttttgagttttgattctattatttctcgaaatgatattcaaagatgtgttgctactatagaacaagggctttatgttcttagattagatgatctatttgcgcttaataatgaactgtttaagatagctaaacatagaaaccataaaaagaaaaagatcaatagtgaagacgaaacatatttatggcattgacgccttggtcatataggctatgatagatttcgcaggttaaccaaaggtagtccattgaaaaatttcaccttaggtgaattactagtttttgagtcttacctagaaggtaaaattactaagtgttctttctctgcaaacgtagagtgtgccaaagaacctatagtgttagtacattcaaatgtctacgga

SEQ ID NO: 34569 - DNA, 1113 bp, Cannabis sativa
ttttttttgttatctaattcttgatgttctatgttcatattatttggcaataattattcatttttaagtttttattatatttcttctaattttttatattaaatttacagatggtaatggcaattgataagttcttctccaataaggaaacttttgaagaggatgatgtagcatcacacattgagttttcttccatgttttcatttttttcattttctttattctttatataaaaaaaaaattgtaacaaaaaattattcatattcttttataactttcatcattatttatgtttatattaaaataaaaaactatttatattctttatgtaactcttttttatttatgtttatattaaattctaatattaattatcaaaattgtttgtattcttccactaaaaaattaactatttgtagtttttgtatagcttattatatttatatatatagtgtccccaaagttaagttgaaattttgtgtccacttataggttttaagtttatgttatgctcttttttttcttttttgttatctaattcttgatgttctatgttcatattatttgacaataattattcatttttaagtttttattatatttcttctaattcttgatatttttttttgttatctaattcttgatgttctatgttcatattatttggcaataattattcatttttaagtttttattaatgtatttcttctaattcttgatattgaatttatagatggcaatgacaattgataagttcttctccaataaaaatattttgcaacaaaattattgggtaatgtttcttttgctttgaaagattatcactaaaaatatcatcataatacatatgtatttagatttaatttcatttcattatacttttcttcacaaccttcaatctgccatatataagagtgaaaattatcattttgccaatctctatataattattttccagttaagcttttattttcttagaatatttttggacatcatattatgtttatgttctgttttttcttgttgatctctatatattgtatcgtatgtacttttgatcatgatatgtgttctaattgatctttaactataataaaatgaatcgtgtgtttt

SEQ ID NO: 34570 - DNA, 1899 bp, Cannabis sativa
gattaaaggctgcctggtcagccagttgttaaaaaaatgaaaaatattccaagtttaaagagcgcttggtcgtccaccttgtctcaaaagaaggcctactgaccaaacagacataaaagaaaagatagtaaaaagaaggcaattaaatagcgggagtcccaggctctttctacgggtcgactagatctaaaggagccaaaggatcagctaggtctgaagaggcaagaggatcatcagtctgggtagaaggagcctcgacattctgttcggtcgaagaggtggaagtggtcgcctcaggattttcattggttgcctgagccgtgcagtagtcgagaaacatgtctttgtaagtgccgaggtatttaaagttcgaaagttcgcctgttcgccttgggattggccttccaaaagtcataaaacatctttagaccagctgtctctaaggcatccactttcttccccagcttctccacctcggatttcttgctcttaacctcagcctcaaattcctcctccctagtcttcatctccttagcctcatcccccaacttgcgaaggagagttcagagaccctctctcttgtctttaagacttgcaatttcctgagacaaagaaacattgtctgcctcaagttgctcaatcgacggcatctcctgtagttcccaagtcagctcgacaactctggtctcagtagcaagaagtttcttgttgacctctccaagttccgtctgcactgtctcaagctaggcccgtgcatctttgcaatcctttttggcaaagtccacttcccttcgcatcgtgttggaagtggcaaggttcttgacagcagccgatttagctcgggaataagcttacgccatcttcaccacagtctgcgcgaaaaaagcattaaaatctgaactagtcaaagagaaattaaagaaagttgttagaaaggacttactcgtgaaagctccttcagaactactcctaggaacagttctaaggacaaataaatgtctaccccagccaactactcgcacacctctagaatcgaccggttcacatagtggttaagcatgtctttgcctctcttggtctccgtgcacaatagcaaaggtttggcaggggccctaacttgttcagatctacccctgacaagctcggatccagtctgaacctgctcaggtccatctgaactccctcccaaggaacctttggacttggaaaccatcaaggtagggaggtccacagtaggttgttcctcagaaatatgaatgacctcttcaactggtgcgttctccttggacggagtctcatcacctttagacttcttggccgaaggggacaagcccgagctccccctactctcttcttcaaggcctcgatcatcttctgagacatttctgcacgggaaaaacaatacagtcaaaagaagacataaaatacatgaaggcataaaaatcaagaaaaataagtgcaagttgaagtactctgcacgctagcaggagcgtttgcccgaacgaccacggatggagcatcatcgtctgaagaatcttcctgctcctacaggatggcttttccttttccctctacaggggtaggtggccgagcagatcggccaagctccatgatccaaatagcatgttctatcggactctgctcggtcggaagggttttcttcttcttgggcagcctctcctgctcagaatattcttaagcctccttctcctactcagaatattccacagcatactgcatggctccagcatgacccttcaacttagcctcacgcttaagttgaataagctccttttcctgctcggcttcctcagcccggccaggcatggactttttcttcctccccttctcaggttggggtataaagtctaccggataaagcttatacttcacaaagtt

SEQ ID NO: 34571 - DNA, 1466 bp, Cannabis sativa
attttagtaattatgacctaagaactgtaaaatgatgaaattaatttaattacctacttaataaaactatattattatatagtacgcctgtgttgtctttttcaggtttgttctgataggttggcgcggtattgtcacaaccaggtatttcgggctgaactgggttcgggtctgaaatgcaaattcgattgaatgatttggcattttatttgataatgagaaatctgaattctatttgaaaataattgagcatgaaatgactaaattacccttgtatgaatgaatatgtgagaattggcccttggggcaaaatggtcttttgacctatattgatttacttgaattgaaaattgaattttatgaaatgaaatttaaatttctagattctctctctctaacccaaccctctctccctctctaaccctctcttgaaatttcaagcttaatttgtgtgaattgcttggagttggcttaatttggagcttaagacttggattttattgtgcttagccttgcaaggatttgaggtagtttctttaaagctttaattctagttttttgctgaattttgttgttggttgagcatggaaaagggattgtgatactttgatttgcatgtgtttgaattttaaattgttctatgtgagtttatgcatgatttggttgtgagttatgtcattgagctttaggtggagttttaggggtgttctttagctctaatccatgtgtttttttatggtgttttgttgctggaaaccgattgagataattgggtttgaagctcttgttcaagagcttgaagttgctaagttaagcttaattttatgcatttatgtgcaatctgaaatatagggttattgttggattttaatgcatgaaagttggtatcttaattccctgtcctttcttagcaaccttaccttgataatttgaaagtttgattgtgatttgtggtgaaattgttgaatttttgttgctgaaatttgtgttgatcatggccgatttttgggttttcaacccaggtgttgcggcatggtctgagcatgccgcgacccgcccctgttggtggaacctgggaattggtcccagatttcgcggcatggcttgggcatgccgcgacgcgctttcaaatttttgggcagtttggggttcaaattttgaaagtgcatatctttttatttcgaactctgaattgagagttttatatatcattggaaagcccgttccgagctctatctgattatctgaattttaaatgccatgtgaatatttgataaatgtgtaattaggggttaaccctagttgtgaaaatcccagattgtgtgactaggattaccggcacctggtcaggaggacctggggaatcagaatctctgcatttgcgggacaacaggtaagacagtggctagcacgtagagtatgcgcggtggcgcttatattgaaaatgatatgtatgaatatatagt

SEQ ID NO: 34572 - DNA, 1297 bp, Cannabis sativa
  modified_base (467)..(469): a, c, t, g, unknown or other
agtgtgaagggtatggtcatattcaatctgaatgtgccaataccttaaagaaaattaaaaagggtttgaatgttacttagagtgatgattctgaaagttgtgaagatgaaaaagaaaaggttgctctaacaagtgttttgtcaagaaacttgcaggaaaaaggaaaatttatttgcttgaataacactttgactggtgacaacaaggaagaagctggatctgaatcagatgagtcagaaattgatgagaactctatggctgaatcttacaaggtaatgtttggtaagtggttggaaatttgtgttgaaaatcgttctttggttaaagataataaatatttgtgtaacaacatcaatgatctgaaagagaaaaaattaaatgttgtgaatctgaattgatcttgaaagagtctgaaattatttatttaactaaggaacttgaaaacattaaaaagaatgtcaaaatgnnnaatccaggttccaacatttttgaaaaaattcaaaagtaaggccaaactagttatgctggtttaggttatgtttctactcaatctgattctaataccaaatttgtttaatctgatatttttggttctgcaagaactatctctacctttcagggttctgtcacttcagcaaaatgctctgctgttacataaaagaaacagcacagtaagtttgacaattccaaagggaatagaagacgattcattcctatgtgccatttttgtgggataaaaggtcacatgcgacctaaatgtgtcactttgcaaaacatgtttaaatctaattatcttggaaataaacatgtttttcaaaaacaaaaataggttgtcaaaaataaatgcttggtaggttcttcttgttttaaaattattgctattaacatgtggtactttcacagtggttgttctagacacatgacaggtgaaaaagattatcttgacaacattagaccaaggcagtgtatagaagttacttttggtaacggtcttgttggaaaagtcataggcatatgaactcttaattttgaagggcttccagactaaagaatgtcatgttggtcgatggactaaaagctaatcttcttagcattagtcaattttgtgatcaggattaaactgtgagctttgatagtaattattgttatgtgtataatattcttgatgaaattgtcttgcgacggctcagatctagtgacaattgttatactctcactacgtatgctacttgtcattctatcatttagagtactactgatttatggcatgaaaaacttggtcatattcattttaaaa

SEQ ID NO: 34573 - DNA, 1753 bp, Cannabis sativa
  modified_base (1358)..(1374): a, c, t, g, unknown or other
ttttttttgaaaaagaatttattagaaccgaaacaactacaccacaataggatggtcagctttacaaaatttagctaaccaatccgggaaagaagtgtcaaaaaattgtgtagttttatcagctagacatttcctagctaataaatttgcacactcattattggctctttttacatgattaatatgtacacaattaaaattttccagcacccttttgagcttgtggatcatgttcctttctgcagtgagagtattgtcgtgaaccttcagatcagccaccagcacttgacaatcggtctggatttcaatctgagaagtatcagctgcaggaggattcttcaaagcttccagcaacgcccacccttcagccatcttaacagaacacttgcttggcaaataaaccatcccagcagataccaaatggccactggctgttctccaaacgaaaccaagtcccacaccagcagtattttcatttattgctgcatcactattaacacaaatacaaccgtttgcaggagggatccagtgcttcagattggaggttgtttcccccatttggtgccctgttatgagatcagtcttataagccttcgggtaggcattaaaaacccaattgagaagctgttggccattcatgcttggaagttgattccatttccggttcctattttcccatatagcccaaaggactgtgattgtgtcttcaaattcatcccgagttacctgcctctctacttcctgtaacacatcaaacatagatccctctcccaatttggaaatttttttataccaaggcagcagctttaaaatttttttaatcttatcacaattccataaagcatgtgtaagagtttcatcataccttccacaagattcacattgagtatttatgtccattcctctatgtttcagattggtcttagcaggcagccaattgtggcacattctccacccaaaaagtttcattctagggggaagatgaaggctccagatcagtttccaccaattctgcattgctgtcaaattagaacatctaggagggttaagattcagctcccttcctaccctataaccactcttcacaatgtattgcccattggaagtgaaaggccaaattaatgtgtcctccgtataaatgtctatggggattccttggatccaaggaatgtcatctttgtgaaaatatttggtgatctcccccatatcccaattcccatcccaagttatgaacttatgaagtttagtttggggtggaagaccgggaaattgagacaacgtagctccatgaggccggggaagccatttatcttcccaaacattgatttctctaccatttccaaccctccatctagccnnnnnnnnnnnnnnnnncctaccccaacaaattcctttccacacacaagaagctctcgtaggacaccctgctttcataaaagaagtattaggatagtagctatttttcaagaccagggtaagaagagtttgagggttatgaataagcctccacccttgtttggccaaaagggcttggttgaactcagttaagcttcggaatccaagacctccctcctccttgggtctacataatttatcccaagtactccaatggagtttcttatgatcttttgtatctccccaccagaaattagtagccaaggagtggagatttgtaatgagcttttttggaagacggaaacaacttatggtataactcggaatagcttgaatcacgactttgattaatatttcc

SEQ ID NO: 34574 - DNA, 2180 bp, Cannabis sativa
  modified_base (932)..(934): a, c, t, g, unknown or other
attgtccttaggctttgtcggggatggcttgtcaattaattcctttatttttttaggattttcctcaatacccctctcgttaactatgaatcccaaaaactttcccaaggagactccaaaggaacatttttttgggtttagcttaatgttatacttttttaatattttaaagcatttggcgaggtctgaggtatgatccttactctttatcgacttcaccaacataccgtcgacgtaaacctccatgttttgccctatctaatttgcaaacattttgtctactagtcgctgatatgttgccccagcattcttcagtccaaacaacatgactttataactatagagtcccatgtttgttatgaagcttgtatgttcttcatctgagccatacatttttatctggttatatccagaatatgcgcccataaaagacataagctcgtacccagcagctgcatccactagctggtcaatcctgggaagtggaaagcaatcctttgggcatgtcttattcagattagagaaatcaatataagttctccaatttccgttaggtttagggacgagaacaggattggctatccacgagggataaaatacctctgtataaaattgttgactaacaacttatcaacttcctgttttagtgccccttacctctcggaatctaagcgcctccctttttgtctctctactgggtagtttgaatcaacatttaagtgatgacagataatcttagggtcgatccctatcttatcctcatgactccaggcgaattgatcctggtttgcctttaaaaagctcactaattgctatttgaggtgctggtcaaggctcttcccaatgtataaacatttggtggggtttcctgggttgagaataacctcctccaattcttcaattggttttagcaggtttctttcatcttgaannnggggatcatgatcttcatctttcttctcgttttctcctgccaagatcgtcattagctgatgaccgacctttctctactgcaactctatgcgataacaattacaagccaacatctggtcgccacgcaccactccaacaccatctggtgtttggaacattaaagacaggtgcttaattgaacttagtgcccttagtccgatcagtgctggacgacccaattgtatgttgtaagccgaaggcaggtcgacaaccaagaagtcttgcatagcagtagcagttaaaggtgcctctcctacagttaatgcaagctcgattatgccaaggctagcaatgctatccccggtgagtctgcaaagattcaccatacaagtccttaacttggccttttcgagccccattttctttagagtctccttataaatgatatttattgagctcccattgtctattaacactctcttgatcctcttaatggcaagttgaatggttatgacaagcggatcgacatgagggtatctcacgttcttctcgtcttcctccgtgaacgtaatgggaggttcctcagttttcaccttcttggaaggttctggggaaaagaccgactgctcgttctttatctccttcaagtatctcttctgagcgttatttctttcccttaaaaaatgtgaccctctcgaaataaccaggatttcctctccttccacaggaataggttgtaacccttggttattttggttatcaggctgacggggcttgttgtatccgtggccctgtcttctcacatactgcttaaaatggccttgaacgataagactctctatctcatctttcaattggtgacattcgtcggttttatgcccaatatctttatgaaatttacaatatttgttaggatctcttttgctcatcgaattcctcataggtaaatattttcccgagtttcattaagctcggcataaatagtatacactggcacgtatttgtcatgcttcttttgtttctttctatccttcaacggttccctgattctgtcctttcttttcggactagaagtgcccgagttatcaattctcgtggaagtagtcccggttgacacactgctaggtttacctcccaagcctatttttaaaaagttcattttcttcggcacttcttccttctggacaaacacctgagctctctcgttgaactctatgatgtttctgttggaatattttttaccaggatctatatttactaccatgtat

SEQ ID NO: 34575 - DNA, 1569 bp, Cannabis sativa
gaaggcttaaatggtgtactgatgaggactctattggtcagtataagcggtctgttgctgctcttggggaagtgtatactcagcgtgaagtcttttggtgtcagtgttccaagaaattttggctttgtgagggtgatcaaaatagcaagttcttccatgcaaaggcaacgactcgtaagaaaaacaactccattaactctcttttgaatagttcaggtgtgtgggttgattgggaagggggtctttctgatgttattgctgattatttcactgatatatttacctccactagctctaattttgataatgtggtaaatggtattctaccaactattactagtgttcagaatgaatctctgttacaacaagttacacctgaggagatctgaaaagctttgttccaaatgcaccccgataaatcgccgggacccgatggggtgacacctgggttttatcaaaaatattgggatgtggttggtgtggatgttatatctcaagttgttgatttctttgagacttgctcttttcctgctgatttgaatcaaaccaacattgttctcattcctaagaaaaaacatgttaccactatgagtgatctaaggcctatttctttgtgcaatgtggtatacaaagttgtttctaaagtgcttgcgaatcggctcaagatagttttgccttgtgttatttctgagaatcaatctgcttttattccggggcgtcttatttccgataatgttatgattgcttttgaggttatgcattatctcaaacgtaagcgtaaaggaaaaacgagatttatggcacttaagctggacttaagcaaagcttatgatcgcattgaatggggtttcttgaaagctatgatgctccgtatgggtttccaccctcggtgggttgatcttatgatggcaacagtgatgcatgtggagtataaggtagtccatggtggtaggagtatgggccctattattccaggtcgcggtattagacaaggtgatccattgtgaccttacttattcctactttgtgctgaaggattttcttctttgatcaagcaattcgaaagaaatggtgaattgaagggctgtaaagtagcaaatggaactccaactatttcacatatgctatttgctgacgatagctacatttactgtcgtgctactgaggaggaggctcaaaatgtccttagattgcttaacttgtttgaagctgcttttggtcaaagggtaaacttcgcaaaatcttctatcttttttaatgctaatactccgatggattcgcgagacagattgtgtaaccggttggggatggtagttgctgatgaaaatagtttctatctcggtcttccttgcattatgggtcgaaaaaagacagctatccttggctttctaaaggagaagatggaaaagagaattctgagctgggaaggcaagttcctctctaaagcaggtcgtgaagtattactaaagacggtagcacaagcactcccgagttatgctatgtccgtgttcttattccacttgaaacttgtagcgcacttgagaaacttatggctaagtattggtgggg

SEQ ID NO: 34576 - DNA, 1063 bp, Cannabis sativa
atattgtataatcttaattatcttatacgaccttagaaatttttagatatttatcaattatatttctataattaatatattcatttatcttataattacattttatatattctataatatattatccattaattactttcttttagggcataaatctcaataatcttccactttcattaaaagtaagtgttttacattctgttgacctcgcttttagccaacgataatgaatcttaattaaagcaatgagaataattaaataacaaaaagcgaagagcataaagtaaagaaaataccagagaataatcaaatgtagggatttatttttgtgacttgtaaacttggaaataacgatatatgtctctaaatttactaactcgcaccccctggccagtgcatgcaagttactcatgtgatcaagagttggatgtccactaataattttattcagacatcctaccattcatgtatgattttaagcttcatatcaatttacatagcctgcaaggagtagaattacccgctcatattatgaaatatgtacgcatgtcacctagtcagatgccatatcatggtgtaaaaattagaataatatttgccctctaagtatgtgcacagggccggcccaaggcataggcgggctagacccgcgcctagggctcacttattttagaggcccaaataaaaaaatatcttttaaaaatatatatatattttttaataatttttaaaaataacatttatctttgtattagcccattttttttttttttacttatatcccattttaactcaaaatcaaccctatttgtgcgggacatttttggtcacatgcagactttattcgacttaaaaattgtccgtatgatgatacgtgtctaatattactacaaaatgtgatatgttatgtacagctaacttagtggtaaattaaaaataattagttttgcttataagctactcaaatacaaataaataaatgaatataaatataataacaactttgagaagaagaatagtgggtgggctgtgaaatctgtatcaaagttgtcaggttaggtaa

SEQ ID NO: 34577 - DNA, 3333 bp, Cannabis sativa
tgcgggtggtgcggtttttgaccaatttttgaaacaatctgcacatgcagtttttttcaatttcccaaaccgcacctgcactgtaaaactaaaaaaccatataaactgcatcgtaaaaaatagtgtggtgcggtgcggtttagactataaccaataattaaactatcacaaatacaacaaaacttgggcaacacttatcaaaaatacataaaacttgaaaataaatatgaaaaaaatatttaagtttcaataatacaataattagtaggctttaggttgaacattcacatatttgtcctaaataaatataaaaattagtatttttataatgtgcggtgcggtgcgatttgaactgcatatgaacaatttaaaacagcaaaccgcaccgcacttcacggtttagaaaaaattgaaaccgcaactgcaccgcaaataatttcaaaccgtattttttttttctgtgtggtgctgcgcgagcagtttgagtggtttgatgaacacccctattgaaaatggcatatcaagaagttaaagcagcaatcaagtatggaaggaatgtaatctctttggagggtgttcatgcggcattaaaatcaaaggactttgaattgtaattctagaaggagactaggaaagaagaagcctatcttgcaagaggaagaagtccaaagatcaaagtagtcaccatcaagatcaaagtaaaagatcaaagacaatcgacaatgttatcaatgtggaaagattgaacacactaaaagattttgcattcaattgaagatgcaatctggtttcagatcaaactacgatgacaaaagatgcaagagaaccccgaactagtactcaaaatctaatgatcatggaaatcaaagaaaagactctgcagctgtggctgagagcagtggagatggaagtttagatggggaattattctctattttcgaaaataataactagtaaagagtggatccttgattcaagatgcaattatcacatgtgtcccaacttagaatctttctttgattatgaagaaactagtaatggtggtagagtactgataacactatgaaaatagagttatttaattttgttatgcattaatttaagttttttctcaagtatttttagtttattttagtgacttttatttgattttattgaattttgcataaatattagttttagtattcatagattagttttagttaatttttgtaatattttatcaattttatttagtttccaatcctaaaaatattattctcaatattgtttatttttgtaggagcttaattgtacattttggcctagttatcaaaatgaaaagaaattatatgaaagatgtttcataaaagtcaatatactcattaaaggccactattttgtgcattatcatttttattggacaaatgccttttcaattgataaagaccaaaaaaaaaaatgagagagaagagaattgggctgatgtgcttggcaatcgcaaaataagaacggttacaactcaattcgatgtgatgcttgtgataccaactatcgaacctatgggaaataagatctacacaattctctatatatagaaattatatcggctatccttaaatttaactagtgttgtttgctcagctctaagaacagttggggaccatccacaaataccaaaattattacttcgggaggcatcatcttcagcttcttgaggggtcaaattcttcatataatggttacgagccacataatccctatcttcctcgtcggcaggtactggaacttgtcgcccgtctaaaaactttgggaccttgaagtcattagtggattgatcttttcctagaagggcacaaaccttcaggttgttctcataaagcaaaaattcagctgttcataactcaaagggaaggccaagaagaatcttgtgccttttctcgatctcaggagttggaacaggtctcctagtaatcgctgttaacataacaaaaacaaaattagtaaagtatggccaatatgcattgaattaaaactcaaaacaaagtttttgagaaaagttatacttacgtataatttgaaattttgtggtgttggcggggaaaagacccgtggtccaaaagaagtcatccttgaactcctttttattggaaagcctcacaacaatcttgtggtcattggtatgagtcccaaggtagtagaaatcacctgtacctcgcttccttccagggcaggctttgacaggaatctcaagtggaattgggcactcccactgcagaatatgatataaggactttaaacaggccagtatcctgtatgagtttggtcaactagaatggagcaataccaaggtagttgcagaagtccttgaaatagtccctcagagggagaactgccttagctcttatatgttataggctccaagcacctattcgagagggctcgctggtgttgtagccttcatcttggactatacgttcaggagggtgacagttgaactctccctcagcaacagacctaatgcgtcatccttgttcattcttgatgccgcatgaccttaagacttccccaacataagatcctatggatctaattttggactcaattaactcagcctcaaatgtgatagtaggatcctgaggggtcttcgatttacgagctttctgagctattatttcaaaatctatgtcaactggagaaagagtaacagtgactaggggtaaaaaaatggacttgctaagggaatatcaattaagttggaaggttcaggccaagaagcttcttgcaaatagcgacgcctaccctcgataatctcttgcaagaatcgcctactatagagactagaagtttcatcttgactaaacttaacgaggtgatccttaattttctcatcatttaattcaagaatagtttgaggtctttgatttttgggcttaaaatttatggcagaaagttgaagacaaacagattctaaggattttgggattgtaatttctgagataaattgggacatggttatatataataatgtcccaatttctggaaaaacaagatacaaataaaacctaaaattctttgaattgtataaccttaaaatttcctaaccctaaatttattaaaacattcaaaatcaaaatatccaaacaacaaagcaatgcagataaggaaaacacttaccaagaaatagacattgtaagaacagaaggaaaaatcaatgaaaaagagtgtgtcactgttgggctttgttgcctaaataaaactctatttcaatgtaattttttctattcaattatcaataaagaaacatatttattttcattacttatttaatatattatttggttcatgtgatca

SEQ ID NO: 34578 - DNA, 2029 bp, Cannabis sativa
ttattttatgggaaaattttagaataaagttaaaaaaaaaaatgagagagatagaataaggtacctggttacctccttatggcaatttgttatccttacttgatttttatatattttttaggggagttctatttacactcgataagatgataaatacactaaattattaaaaaaaaatataaacttaaataattttttaaaattattcttaatattttttttttaaacttttttcctcgtagtattttatattaatttcaataattattttgattttatttttataattttttctatctcatgtatatacattttttatttttttaagaaaattttatataatttttttattttattttttttttgtcataatattaaacatttatataatttatttttattttataagtatattttttaagaatatgaattgaaagaagagttaaaaaaatttagtacaattaaagacataaattttatatgaaataaaaattattaaaatggggtgcctttagaaattgtgggggtgtaattaaaattttcctattttttttttaactttttcttcaattttcccataaataacctttttgaaaaaaaaaaaccatatttttgcacaaaaagtataaaaacttataatatttatactttcctctaaaaataacaaaacatcaactaaattacatcaaataaaaaagggaaaatataattttagatcatttattttgtaaaagttataaattcaaccatttgttttgttaaataataatttaaactttgtattttttaaaattgtacaatataatacgctgagttaatttttttattaaaataaaacttgataataccttacctaaagcctaaaggtgttatgaccaaaatgtttatattttttgatttgtttgtgttaagacttggctttaagttggttatatcaaaagagaaaaattgatgaaaaattgaattcataatattattttgaaaaatataaaatttaatttattttttaacaaaatagaatgttcaattaataattttggcaatacacaagaccaaaattgtatctacccataaaaaacaacatatacccaaattgtattcgtaaggaataaactacgaaacaacaaaataataacataaagcaaaataaaaacaataagacatcaaatttgtgttattccaattcaaaaaataacaaatcaaaaaggcaacgagacatttaactctaattgtattaataagaaacaaaaatataataacgcaaaagcaacaagtcattcacttcaaattgtattaatccaaaataaactaaaaaaaaaaccaataaagagtacttgacattcacctatgaaacttcaaaaaaaatacaaaaacaatctcaaaagaacaaataagtttaaaaacaactaaaaattacttataaatcaactcattacattaaaaaatatactcaattagaaattaatgtattgcaatatgatatttaaaaaataccactaattcaaaataaattagacatctatctattacattcctaaaataaactaaaacaatataccaacatatactgatatacataaaatcaacttgtactactagatttttcccttattacttattacttaatttatctttgatttttccctttttatgaagttgaatagactttcattttgtaggtggtagcatttcctattttggagcaattaagtttcagctcacttgattgtgtagagatgatttggcaagatcaagttcaagaagtttcatacatgcagaatttaaaatatataaatgttgagaagtgtcacgagttaaagtatcttttttcttctgttgtagcaagaagtttggctcaatttaaagctctaagggtagagaagtgtgagaatatgcaagagattatagtcataaaagaagcaggaaatgaagaaggaagttcgatggagactatttgtttccctaaactagaggaggttaatctttcttttctttcaaacgtcaaaactttcagtggtggaaagcattt

SEQ ID NO: 34579 - DNA, 1521 bp, Cannabis sativa
tgttatactcaaaattcggtaagcacatcaaaggaagacacatgtcgagccaagaagaactaagcactcaaagacgcaatcgtaagtacacttggcatgggataactcgttaaaaacacaatttgcagagtatgttcataactcggctggctgaacaatcttgtgcgagacaaaaatgtactaactgttaactgttaacttgtgtagcgacacaatttgcaaacgcaagtatgtatgatgaggcattaacctcgtcgcgtggaggagatataataacaataaaaatacttggcgtatatggtgcagtgtacaaaataagtataaacagtttggtaggtcaagatgacagacatcgagacgtttatctcgctgcaagatggcatgcacgtgagaaagatcatctcgacaccagaaactatagttcagaattaaagcagtatcaatctcgggaagtcatatgacgagcacaagctcaccatcaaagttaactcagcttcatttctaacgaggcatccccatgagataaggcttaccgtatatctttaatatgtgttcatctcggcccaataaaagcgggatactcacagttgtgtgaattctaaataaaaaccacatttatttatcgtgatttgtaatcaaatcccatgattcgaggaaataattactgtaaagatcttagtcaacttttgtagtaattataaataggggcagacaagatcaaaaaaagggaaagggacgaaaaaactaatacaagagtggccttgaaaaacagtcaaaaatttgaataagatggactcgtggactatgcagaatattaactgcaaaaccacgtaaaaaacccctgtgttcatgcttttattttttacagcttttattttttttttgtgaaatcattactgtgaggctcaaattttgttaacgaaaatctgcgttaacagtctgctgctttcattgacagcctctgttaaatagctgagaaaaagccccctgatataaaagtaatggatgacgctgaagaattaatcctcatgagaaaaccaatcatcgccctgcaaaagagtcgttgagccctcaaggatcaattgagtcatcacatgaacagactgtaagccccaagaaaacacagtattggggtccctggcttgacagaccttgggtgaacaatgctcggtcacttcctaaccaggttgatgaggatggtgcctgcgatccaaccaggtacataccaatcgtggagttagagaatctccatcttaggtgtcgattagaggaagcaaaccggcgtaatgccaaattagagcgtgaaatagctgcagtaagggcagcgcaagggagtagttcctgaaatcaacctgaccttagaagaagagattcacgaggcaaacctcgcaactcgcaaaccaaggggcaagagacaacccatacccagaactctcaggagatgcaacttgaggaaattgaggaaaatctggggacacagcctgggacatgtggaatatcagatggaaatcgccaaccctc

SEQ ID NO: 34580 - DNA, 1445 bp, Cannabis sativa
gtggaagctttgggtgttaaggaaacactgagttgggttaaacagaaagattggaggaaggttgtcattgaaactaatagtcttagtgtagtgcaagcgttacatagctctattcctatggtttcatactttgggagtactatttctgattgtaagatgtcgttaaatgacttgagagatgtttacgtcaattttattagacgttctgcaaatagtgcgagcatcctatttagttactgatcgtgttatcaggagtagtgatgttactctaaattttaatatatattcactatgaattgcaattaataaaaatgatgaattttttcaaaaaaaaaaataataaattatttggagtcttaatttctaaaaagttaaaattaagttattagatccaactataattaaaacatttgttaactttgccaaagaaatcaaaatattttttttttaaggaaaatcaaaatattttttaaaataaatagatctgaaaatctgttttctgagaaaaagtcaagtaactcaaatcccattttatttatttattcttttgcttaactaaatccgaaaaatatgtgattatgtaattgagaaaaatcagatccaaatgtctatttttatttttttaaaaacacagtgtccgaaaattgtataaaaacctttcagcaaaaaaaattatatatataaaccttagaaaaaaaaaatacatgtttaactttatattttccattttaaatttgtgtattagttaatttagttactaccttaaaatgtttactgttatcttaagcacaaatttgttacgtgttaattttaattggtatgtcaattagttcaaattttactaataagttcaaattttattgattccaattcatatcatttcccatctaaaaaaaatctatataatcacattaggagacacggttcataaataacttaacaatggtaaaattattataatcgagagcatatttataaaatcaaagtatattattttttactattacaaattaagatagaaatgctactaacatattttttatgtaaataattaaaaatatttataaaccgcgcttcggtttgtaacctaattttactaatataattactaataagctcaaattttattgattccaatttagatcatttcccatgtaaaaaaaataaaaatcacatcattgattcatttcagtggttataaaattataatatatggttataaattcttaaggtttaatttataaatttataattataattacagttacaaaaaaaactttattattacaaatttataatgttttttaaatgacagatctttagtttttttttatatatataattttaatcttttttcaaaatctccctataatttatgcacatatattttttttttccaaatatacattgtattaaaatgtttaaatttaaaatatcctgtccaa

SEQ ID NO: 34581 - DNA, 1026 bp, Cannabis sativa
  modified_base (308)..(310): a, c, t, g, unknown or other
ccttagtaccccttatatgttattattctgtggaggggcaaaagggtcatttagccccatttgtattttgtcctttagttgacttagttgtgttcttattcagcttttattagtggcatttggctgaagtaattaagtaaaaaccattttattattcattttacaaaaattggaaaaagaaagaaaaaattccattttctctcaaagtcttcctctctctttcgaacccagctagaggcagctaggttttggttgatttctctgcaattgcatgctggttttagcaaggaattgtgatctcaagttcnnngtaagattcttgtagctttctcttaagtttcttgagttttaagaaaaataaattttgcatgcttggagtttatgcttgttgtggtttctgtggttaattgttgttgcgttcataggttaaagcatgtttgattgtgttgatttcatctggttatagtggttattggttggatttaattaagttttggtgtttgaattcaaatcttgaatttcactggtgaaatgatgttttagctactgtggatgttgtttgtgtttagggatgcttgttgtagttatattatagttatttgaagtgatttaagcaggtttttatggccaattagttggatgagcaagctttgagtttttcaactcaagcttgactcatcaatggtgattttcatatttgagcatgaagctttgttttgttgctttataattgatctttggggtctaattagcaggtttggaaagtttgaattggtttggagttcaattggtcgagttttgaaattttgaaaaaatcctgcactaaataggaaatccggttcagggaggcctgtaggaacaagtctaccggttggtatccaggaatttctcccagaataggaattccggttggggaaccggtctatcggttgaggcaaatttgggagccctagtttttcccatttttgtgttatttagggtatttccatgttatttacagatagggaaacttttagtttcaagtgt

SEQ ID NO: 34582 - DNA, 1095 bp, Cannabis sativa
  modified_base (1049)..(1061): a, c, t, g, unknown or other
tttttttcttgttttcttgagtttaacttttaatttttatccaaaaaattctatgtggccatgcaagccacgattttccgttacctgtggactcggtggatgccatgactctatgaacacatgggcacctacagaacatgcagaagatttttttcaccaagtttgtctttgttttgttttgttttcttgttttcttgagtttaacttttggttttcatccatataaatcctatgtgaccattcaagccacagttttccgttgcctgtgaacttggtgaatgccacgaccctatgcacacatgggtgcctgcgaacaacgcaaaagatttttcatttgacaaagtttggctttgttttgttttgttttgttttcttattttcttgagtttaacttttggttttcattcaaataaatcctatgtagccatgcaagctatggttttttgttgcttgtggactcggtggatgtcacgaccctatgcacgtacatggttgcctgtagaccatgcatgagatttttttgactaagtttagctttgttttgttattattttcttgtgtttaacttttgattttcatccaaacaaatcctatgtgtccattattcaacaataataatcacaaatagataccttataattaatcataattataccactattgtctttcttcacaatctcatatgataattttccaaaaaaagcttcaaactctaagatatatatgcaataggctcttttcacgtctaattcatatctctaacattgggtagtagtaagatatatatacacagagtgagaatatttaggggttttgatgaaggtgaattcataaatagaattattcatagaatacaaatagattttttattatcattatttttaatagagcaatacaaatagttttaactaataatataataattaaataagcaaataatgatttttttgtctcacaaaataagaaaaatagaaagaaaataatgtaagatgtcacgatcctatacacacatggacgcctgtagttatataatttttatttttaaatannnnnnnnnnnnntataaaattaataaaaaatattatgttaagtaat

SEQ ID NO: 34583 - DNA, 1654 bp, Cannabis sativa
  modified_base (1152)..(1173): a, c, t, g, unknown or other
aatgtacatagataagaccttttagaattggaattgtatatagataatttttctaattaatgaatcgattaatatttataaacctgtattagtgtaattaattagctaatttttttaatatatattattataaaactaactaatttcaaattagctagtaagatatattttttaaacttcaaataacaaaaaattcatacctaattaaagatattttttaaaatttaaataaattcaaaaccgattgttttatataatatttttagattagtttgagatatttatgcaaatatatatttttaaaacaaatacttaaaattcattatgacacatagatctccttgaattatttctttaccgttatcagtattaattcaaatagatgagaaaaaataataaataaaacaaaataattcatatagtatatatacatataaatatatttataaattgtaactaaatttttaaacacttactcaagtgcgtgcaagataccgttccgttaaacttctgcacaagccctgtaacctatatgtgtgagaaaaattgagagagcaagatagagaatgcaaaataaatatctaataaaatatacttaattaatctgttaaaaagaaaatcctctaatttcatttgtatcatcaattcatctttttttaaaagaaatactaacaattaatttactcaaatatgaaatattaggagagaagaaaagaagtgaaaaagcaaaaaaatagtaaaaagtgaaatacacttacacaaattaattttccataaaatcatgtatcttaacaaatgtgcttttctcaaattcattatttaaaagtaaaatggaagttttgtatatgcattctatttagtattgcattgaaaaattataataacaataataataaaaaaaaaactaacctgagcaatagaattataaacaacaaatgaaaaaaagaaaattgaaaaatttatttgcaaaacccttgtggcttctatcaaccttgctactaagtattgttgtaatctatggtttggtacatatttggtatatataattagaatatatcgtatatatgagagagatagggagagatatatatagttagattattatcatttataaatatatatagattattatcatttattattattattatnnnnnnnnnnnnnnnnnnnnnnattattattattattatctgaataattctactgtaagtatagtttatatatagtattttttttaaataattaatttatgctagatatttttatagaaaatttattaaaaaatagtaaaatatcaatttataaatttatattctaataaaatattcaataaaatgagagaataaatgagagaaaagattaatttacttggagtgattttagggcgccatgtcaccgcctcatacttctcctttatatatatagatagatagataaatatatagatatataggtgactattgaatgattatatttttttttaaccatgatggttacatttttgttgacctgtaatagtaggatatcaacattataatttctttttttagaattaaattaactataaatcactatttcttaaaataattaatttttaatttgaatatttaatagaccctttttagcaattaatattaataattttatttttata

SEQ ID NO: 34584 - DNA, 1730 bp, Cannabis sativa
  modified_base (1326)..(1326): a, c, t, g, unknown or other
agaatcgcaaatggaactataacagaactaggactaggagcaggacaaggacctaaacctggacccaggaccctgacctagattgaggacccaaagtcaaaattagaagtagaattgagacctaatactggtactagacccacgacccgacccagtctctgtcccagacccgaacccggaaggaacacggactatggcccaagatccgaattgaaatgagatcgagaccccagattggcatctagatcttgacccacgacccgggccttggacccaaccagtagtcggtgtctagatcttggaattttaccaagacttgaacttggaacaatttctagatcaggaccaaaacccaaacttggacccgagacccaaaataagaacaagaaccggaatcaagaccctggaacaggaattggacctgtcccaaaacaagatctaaacgcgaaaccaaacaaggactcattacccaggacctggaccagaaccgagacccgtacccagactcagaattttaccaggacctacgaccaagaaccaggaacccaggactcattacccaggacctggaccagaaccgagacccgtacaagaacccaaacccaaacccaaaccctgaccaagacctcgaaccggacacagactaaaacccgggcccagacccagacctagacctggactcgtactagaactcggactcaaacacaggactcgaaccggaccgagattaggattgggacctagacccggactgggaccgagacctgaacctggattgggacgagaactcggactgggacagagaccaagacccgggactgggagtgagacctaggaccgagacctaagaaacgaaccgagacacagacccaaacaaggccaatactcgagacaagcatcactaccgaacacagaccgaaacctacactcagactgggaccctaacctagaccgggacctagggccctgacctgaattaagacctcggacccaagacccaaacttagaccaaaacctggaccttagactgaaccaagacccaagacaagagctaaaaatggaccaggatcttgatttggatctgggacccaagacccaaggcttggacccgacccatagtcagtgtctaaatcattgaattggacctagacccagacctagacctgaaccagaaaccgaacttgtaccagaactcgaacaagactcgacatgtggttggtgtttggatttgtgaacatgactcggacctgaacacaaacacggacctagacacagaccaggactcggacccagacccacacccgaaccttaaatcgtaccctgtgncccgaaccctaaaccttaaaccctaaattctaactctttatacttacccctaaaccttaagcactgaaccccaaaccgaaacttgaaccagaatgtgaccaggacaatagaaaaggatcgagaccgggagcatgacctggacctagaccaggaaccgaaactagaccagaacccaaccccggaactaaggctcaaacccattcctggacccggttccagaccgagagtaggacagaaactcgatcgtgaaccaaaacctgaactcgggacttgatcccgcacccagaccaatcccatgacctaaacttggatttagaccttgacatggacatgaacctagacccggacccgaagaccgacccagacccagactgggatcaaaacacgggacctggacccagacc

SEQ ID NO: 34585 - DNA, 3642 bp, Cannabis sativa
cccccgtacttccatgctaagaaatctttctgggaaactttaatggcatctggggatagatttggaggcccgtggcttatcttaggtgacacaaactttgtgctaagtgactctgaacgtgaagggtctagaagtagagatcaatttgtcccggttatctccagtttggttaatgccaggggccttattaacatgcctatccagggggagaggttgacttgggacaatcatcgttctgggtccaaccatgttaaatctgcccttgacaagggtctaattaatggtgattggatgcggctttttccaaaggccgttctctgctctttccaaacttctaactcagatcatcgtccgttgtgtctgttctctgatggtctgggggagaagacccgaagaagctttaagtttgaagaagcctggactagggatgatcgcagcaaactggtggttgaatctgcgtggaattcggttatcttcccttgggcccctgccaggattttcaagaaaattggggcgactcgagtggcccttatgcattggaatagatcccagtttggtaaactggataccctcattcgggacctggaacgtaagcttgaccttattcagtgtacccccgtgggttctaggcagtgggaaactgaaagaaatttgcgcgcttccctaaacgaagcccgtatgaggaaggaggtgtattggaagcagcgagccagggtcacttggctaaaggaaggggataagtgttcaaaatttttcttccttaccgcttccataaaagggcgaaggaatgccattgatagtatcctgaacaaagacaatgtgtggatctcgaaaagggagcttgttggggctgaatttctggagttcttccaaggcatcttctctggatcggacagtggtatggcgcccaattgcaacgatttagtccgagaaggtttgtctttggaagaccaggctgatcttattagaagaccctcccttgaggaagttagaactaccttgtttgctatgaggagtaacaaagccccgggcccggatgggatgtctgtccttttctttaaacactactgggattctgttggggctgacttctgcgaagcggtggtggactttttccaaacaggtcgtatgcataaaggtgttaatactacaaatattgtcctgattcctaaggtccaaaatccgaagagacctaaccactttcgccccatatctctctgtaatgtagtgtataaggttatctccaagatcattgccaatcggatcaaaccacttttacctaagtttatctgccccacccaagctgctttcgttcctggaaggaatattcaggataataacgtgatagcccaagaaattgtccattccttcaataggaagaaaggcaaagagggtttttttgccataaagattgaccttatgaaggcgtatgatagattgagctggggattcatagatcatgtcttgtcctgcttcaacgtcccgcttgagtttcggaattgggtctcccagtgcattactactacctctctcaacatttgccttaacgggggccctgttggcaagattaccccctcatgcggcctccggcaaggtgaccccttatctccctatctctttatctgggcggccgatattctctctcggattctggaaaatgcccaatctttggggatcattaaggggatcaggctgagtaggggaggccctcttctttctcacatcttttttgctgatgatctcattcttgttggaaaagctaatgtggaggaggccaaggggttctgggactgtctggagaaattctgctcttggtctggtcaaaaagtgaataaattgaagtcctctattttctttagtaagaatactccaattcatatgaaacagaggataaaggagctgttgggattaagttcgccagagggtaatgttaattatctagggcttcctctcttcagagctaaacaaaaggatgcagatttcaactttattctagataacctgaccaccaaactgcatggttggaaagccaaaactctgtcaaaagcggggcgtgcaacccttatcaaatcggtgggtttagctcttcctttgtatgctatgcaaactaccaaactatctaatcgtctggccaggaagattgacggaatggtgcgtgacttctggtggggttctgaaaagggtaatagaggaattcaccttaaagcttgggacaaactctgtctccccaagtccctggggggtctgggcttccgtaaaaccaaagaaatgaaccaagctttcctcgctaagtgggggtggcagcttctcattgggaaccagtctttatgttgtcgtatccttgaggctaaatatcttaaaggaaggtcctttcttgattgtgctccgaaagcctcggactcctggttctggaagaatgttactaagtctcgagacgtcattcgtaagggggcttgtaaacgtgtgggggatggccaggatacaaacatttggttggatccttggattgcgcatctaaagggtttcaccccccaaccaagtgggcgggtcatgattagagagactaaggttgctgagctcctgcttcaaaatggtggatggaacgtccagctgctccaccagttgtttaaccgagaaacgatctctgctatcctcagtgaaggtgtccctactggccggggtaaggatagctgggtttggaccttggaaaataatggtagattcacctgtaaatctgcctatttggcacaaactattgataattccgtccttccagaggttgctccctctttgtggaacaagctttggaattgtaaaatcccagaaagactcaaagtcctttggtggtgcatcctgtctaaggctctccctgttcgttcagtgttaggtagaagattccctgttgaggacgagagctgccccctttgtggagcagaaagcgaaactttggagcacttatttctctcttgtaatgttgcctaccacctatggcgatcttctccttggggtattttccccatctgtgatacgggtataagaatgtgggattgggttaagttcttatgggagctcaaaaacaaaggcattaatgaacaggaaatctttttatatgcttcgctcaccattgacaccatctggcggacaagaaatgaaaaggttcataacaataatccggtagatatatttaaatgtattgacactgttcgtttttcttttgcagatcatcatgcttacttgctcccttgtccaacccgatgcatgacggaatcttggagtccacccccacaggattggttgaagcttaactgtgacgttagagtggggatggatagtatgtgcgctgcagtggtggcaagggatcacgtcggcaaggtgatctgggtatctacaaaaaggcttgacttttcaagtgctctctgtggtgaagcggcggcctgctgtttggccttagaggaggcaaatgctcgcggtattcagtaccttatagtggagagtgattcgagggtggtgatcgacgtccttaatgggaaggagtcccgttgggaaatcgataactatgcctcattttgtaaaaccatctccacctcttttattggttgtaattttcatttcgttcgaagacaatgtaattttatggcccat

SEQ ID NO: 34586 - DNA, 2393 bp, Cannabis sativa
gacagaccgagtcacataataagtaagcatttctcagccacttttagtctctgggtgcagtaccagaggtggagcagaggccttaatctgtttggaccgacttttgaccagctcggatccacccttcgcctgctctgacctgtctgcgctaccccctcgagaatctttggacttattcatttttgagacgggagggtccacaacattttgttcctcaaaaagatcaatgaccatttcgattagtgccttctctctagacagggtcttctcaccacccttggactttttggccagaggagataagcccgagcttcctcccactctcttctttagggcctcaagtatcttatgagacatgtctacacgaaataaaaataacatggtcagaaaaaagcataagaaatatgaaggcatgataattaagaaagttaaaaacaagatggagtaccctccactttagtaggggaatttgcccaaacaagtactgatggggcatcatcatccgacaagtcttcttgctcctctaggatggctttcccctttccttctacaagggtggatggctgagcacgtagaccaggctccctgatctggattgtatgttcgatgggccgttgcctggtcgagagagtcttcttccttttaagtggcctttcctccacttcctcagcttcatcttcatgctcagaagattcttgagcatgttgttcggccccagctcctcccatcaacttagcctcatgcttgagttgaatgagctctttctcctactcagaatattcctaagcatactacttagctcctacacctcccttcagcttagcctcatgcttaagttgaatatgctcattttcctactcagctccctcagcccgaccaacactggatttattcttcttccccttcacaggctaaggtataaagtctactcgatacagcctgtgctccacaaagttggcctccaaggtcagcaaggtgatgtttagagtagcattcggcagttgaacaatcctatgagctctatccctaagagccagtataagaggtggacggtaatatatcatgatctgctgaaaccgagtataagtggtgctcatgccttccacaaaataatgctcgtcaacaaaactctcgattttgctcacaaccttgtccacggtgctcgtcaaccacttaaaatctggttgggaaaagtagaattatcctaacctgctctacttgggggtagacttcaagtcgaaaaccaactgacctcatgcaaagaaggcacaccctactttttgatggcgtagaggatgaacagggcggatagatacttaatgcccttaggagtgaactgggtcaggcaaaggcggaaataatctagcaccttccagaagtacgcgttcaaaggtagtattgccccttgtttggtgtggccacccgaccaggcacacatccccttttacgggtttgtggctcagtgatttgaggcagggacgtaacattcaagttcgcccaaacagccagactggtccaagtccttcatggatgcctcagtgatcttggacggaggactcacccatctggcacctaaggcaccttgcctcctgtgaggaactgcttcagtaagctcctcggtgacgtagtctactccttaaactaagactttgcccttcgcaaatactggctccttagcgtcattgtatcctccaaagtttggtggttcaacttcctcattctcctcgacctcggaagggctgccaggacggacgtcgccctgttccttaatttcttggaccttaaggtccccctcatgaactccctcctcttggacgggcagatcctgttcggagcttggtaatgtggcaacttgggccacgtgagggtcagatgcattgacattccacattgcttgttttgttcaagccatcatcctactgctggtcggatactggcgtgaatgtcgggcaaccgtaacagcaggagtagcaatggggatgccaaagttccctgaacttggacgaccaactggaagagtgtcagcaacacttggccagacaatgtatgtccagttggacgataatagataatgcctcccacctttcttcaactcccaaatgaagcgattgtacccctctccagcaatctgctcgaagtaatagtggtgttgcacttcaggttctggagtagaagagcattcactactcacctcccagtcctcagagcttgaattggaaagttgggtcacttgaagaggatggactagcacgaagacaagggtgatcctcatacaaaagtttaagtaagtcctggtcaattcggtgttcgctttcccaaaactcaccaaggttcatctacaaaagacaacacacgagatgagtgtttgatcgggatattgaacaataaacagg

SEQ ID NO: 34587 - DNA, 1453 bp, Cannabis sativa
tctcatgcttgtatattccaatggagagttgaatcctactgaatatactgattttgatttttaattagacaaagatagtcgaaagtcgacatctggttcagtatttactcttgggtgaggagctgtagtctggagaagcattaagcaaaccatattgcagattcaattatggaagccgaatatatatcagcttgtgaagcagctaaggaagcagtttggtttaagaaattttacaccactctggaagtagttcaagaagtagaaaaactcctggtgctatgctgtgacaatagtggagcggtgtccaactccaagaaaccaaggagccacaaaagaggcaagcacattgagagaaagtacaatatactaagagatatagtagagagaggtgatgtgacggccctggagattgcatcagaacataacctgataaatccattcataaagacgctaccagcaaaatcttttatgggtcatatcactacggaagatgtccaatttgcttttagggcaagtgggagattaatagggtttatgtctcaaaaagcttataatatatttttgattatgaataaagagttgaatgttttgatatatgcttgaatgttaaattattaatataatatttattattgaataatttatataaaaatataaaaaaattccttattcatctatgaagttgtgacttgtagctgcacagagaactaagatcacttaggtatgaataaaattaattagcgaacataattaaattttatggaatctttaatcaatggttcctagtacgattcactaatgcccattctttggtgtaattaatctcagttcggattgctgatgtagtatgacctctaagtgaaggtgttgtatataatagagattatatatgacatggattgttatgaataaagttgtctttagctaacatgttgtttaatataaagacctaattcatatcataacgatgatcaatagtgaatcgactgaaatcttgagtaatcatgaactcatattcatgaaagtttctttgattcacttgttaaagtttctcaaaaaagaagattcttacaatttttattttgtgaatctaataatgtagatggttgggaatctgatctataattatagaatcttaactttcctaatggaaagaatgttggttccctttttgtgttagttctagtactggaaagttgcacacaaatttagatgtgatctgaattatatttccactaataagttaatggtactaaacgataaataagcaattagaaggataaaatagtaattttatcaaaactaatcacgaaccgacacatggagggctagtcattagaattggttatatcaatagacactacagtaaaactcaataaatataattttataattactactacttcaattcaatatttatagtggagttatcatggaattaataaacaaagat

SEQ ID NO: 34588 - DNA, 2390 bp, Cannabis sativa
  modified_base (327)..(330): a, c, t, g, unknown or other
  modified_base (442)..(445): a, c, t, g, unknown or other
  modified_base (507)..(525): a, c, t, g, unknown or other
gtatttttgaaaaaaattccgtcccacagtaaaaaagaaaaatattttaaaatatcagtatgtagtgtaaaaactcctactgatattagatctcaacatggattcttgtgatgtagttgagatgaaagaattacacttaaaaaaagttacatactaataagaatggttctcatataatgacaaaaactattgtgtttgcccttttgttgggccttggaccaaataataggcatgagcctaatcaaattaaacaaatggataattacataagacactattttctgcaaaaaaaaaatttataaatttatgtttaaagaattttttttnnnntttttacatttttacagttttccataaaacaatacgaaaacaacaagaaaactacattaaaataacatgaaaataatatttaaataacaaaaaaaaataacatacaaataannnnaaatcaacaacaaattaacaaaaatacaacataaaaaaaaaccgtattttttgtaaataaannnnnnnnnnnnnnnnnnntatttaaaatttcgtaaaactgtatatttgtaaattttttgttgttttatgtatttgtaaaataatcccttaaacaaaatgtgagaagtaagaacaatgagagacaacaagaaaaagagagtgaagaaggagagtttaatgagagaaagagggttttggcacataaccttgaagatcaagttttgattctcattcattttatcttaaattttaagcggtaaatctaagtgattgttctctttgaagtgtctttctactatattcatattcatttggtaagatcaaaacttactctttcatatcaatctttatcgataataattattgttttgttaattcgatattattgaatcttgaagttgtaatgagtctttggttgtattaaacaaaattttgtaatcctattatgaaatattgatgatagtatagatgattttagcaaactcctattctcataagttttgtttacattattgtgtttccacttagaaattaatttttaatatcttaattttatatttgatttgtgtgttatttattgctaatagtgcttcgattgatatttaatattactaattgtagtatttaataaatattttaattttatcctacaaataagaaaaatattacaattagtctcaataaattttcaatatatttatatatattttgaaaagagcttgaaataaatatatgatacttataatattaagcataaatatagacttttggaaggtcttgaaaattgaaactaataatatattttgtttaaaacctaaagacaaataaaattaaaccttgaaaagattgatgcataaatatatagataaatatgcccatacatgttttatttttatatttagaagatatggtatgagttatcaagtttagtttatttgctttgaattgatagtacaaattatggttattaatagatccacttggaatatcctattatataaatgtatgtatatggtcaagaaacattaattgaaatgtcatgattttccgacacttgcacgagaatttcaagtgattatattgtcatatacctaagatgacgaattcatgaattattcacaatgtatacacttattagatatttacggcaattttttttaatatttataattattacacctataattttaataaaaaatatgataaaaatattttattttacgattttgttatagtcatactattttttaactattaagtgctaattaaactagtttagtaccagttcaagaaacacatgatgacatattttattagcttatttaatatgtggtctaatattatatcgccacgtattcttgaattaacacttaattaatagttaaaaaaatgtacgattacaacaaaatcgtaaaataaactattttttttaattaagatcatatatacaataattataaatattaaaatagcttcgccataaatattttaacagtttttatcaatatatatatatataactaataaattaaattaaattgactcgagatttaaagttttgaggtacataattttttttaagataaggacaaaaaacatttaataagaaaaaaaatgtttgagatttaaatctttttgatctctataatattatgtttataaatattataatttataataaatatatttcgtaaatagctatatatatatatatacattctttttctcgattattctttcgtttatatgtggatctgttccaaattatatctattattagtattatatattacgtacgtacatactagtcaaaaaattaaggcacttatcatttttattgttgtaaaaaaatatgagattttcatctcatccatctaattaataattgttttgttgaaacattt

SEQ ID NO: 34589 - DNA, 2020 bp, Cannabis sativa
cgacagccaataacaacaatggccctaataacaaccaaccagcacttgctgcagctgatgcacaaccacaggttgttcgtgattattgcttacctacagtgaatgaaaatctgactggtattcctaatccaatcatcgctgctaataattttgagttgaagcctacttaatcaatatggtgcaacagaatcagtttggtggcttggctactgaagatcccaatatccatctagccatatttttggaggtatgtgctactgtgaagatgaatggtgttactgatgatgccataagactacgactctttcttatctctttaagggatagagcacgaagttggttgcaatctctgctgccatgttctattactacatgggatgaaattgccaaagagttcatagtgaaattctttcctccatcaaagtctgcacagttgaagagtgagattgggcaatttagacagcttgattcggagcaactttatgaagcatgggagtgattcaaagacttattacgtcgctgcccacaacatggctatgaaagctggatgcaagtttcaattttctgaaaatgggttgaatggtccaactaggactattattgatgctgctgctggagaggcattattgtcttaacctgcaactgaagccattaatttattggacgagttggccataatagatataattggccaaatgaaagaaatactcacaaaaatatggctaagttacatgaagtagatcctatgacaaatatagcagctcaaatttctgctttatctaatcaagtggctgccttagttgctcagaaaaatacatcaactgtagaaaatgttgctgttgcatctacatcacaagagcctgaaaaagagtatggaacaagcacagtatatggccaacaaaccttataataaccaactactggggaaatccaatgcctaactactaccattcggggttgagaaaccatgagaatcttttttttttttatttcgaattcaaccatatatattttttcctttaattctttctctctttttcagatttttttcttcagataaccgacgagaaagtcatttttttctttctagtgatgtcaaaaacaattcatcacatagcacttttctcaatttttcacgtttcactaagtttccataacaacagattcccccaaactagccaagtacctatggtataatttaaggtttatcggtggtacatgcacttatgaaaataaggtaaactcaaaagtggttaaaaattttcaaacatgttaaggctcaaacttgggtaaccagggatacaacataagggtcggctcgaaaggctcaatcgatccaaaaactaccttaatcatattccaactatgaagtgtcaagaatttcgcctcgagataatttattatgcaagttctattccatttatacaacaatccacaacccaaagtataatacaaatgatgtattttttttcaaattatagaacgtacactcacacattgttccacaaaagcaacctaattaatccatagagtttaccaattaagcacacagtttctatctcaattcatatcacaaataacattggtaactcaattattcaactatcatcggttcaattattgttattataaaaacattaaatttaactaataatactaaactaaaaatagaaaaaaaaaaaaatagtaaaaagttaaagtcccctcctccaaacttagaatacacattgtccccaatgtgtcatgcaaaacaagggaagagagacttacctgcacccccattagaaggggtttggtagtggtggtggtggttggtcataggaatagaatcggggtgggttcgtcaagtaattaggatcctcaatcttgatattcatcttggtgatgaacaaattcagctgctgcacttggttttcatcaaattagagaaatatcatttctcctttctctctcttagtgttcggccctctcaaaccagaaggaaaacccagccatttctttatttttttctgtgttttca

SEQ ID NO: 34590 - DNA, 2004 bp, Cannabis sativa
  modified_base (67)..(70): a, c, t, g, unknown or other
  modified_base (623)..(637): a, c, t, g, unknown or other
ttgtttaaagaatttgtaccgtcaaaatgtatgcaacctataaattctaaataaaactgagtgcctnnnnaacaaagttttcatgccactcaggggggtactaaggcataccacacggactgatgtgaaacaggccaaaagtaaaaacaaagtcaaagagaatatacatcaaagagatcatatatatatgtaaaacatcctggcccaaacggcaggtcaaaaaataaatataataatacaaagggcccggggataggccataataatcgtctccccttagaaaataaagcagctatataataaaaattgtcttgaagaaaagaaaaatagttgtaaagaaaaaaaaaatagaaatataatcatgatgaaatgggctggactcaacggcctaatcaagacgaggaggaaggcgagggtcccgacgtgcttcaagcatagcatcaagcttcttcttcttctcctaaaatttggcaagagcctcctcaggcttgggatagaattcaagcttaatactttggccatttgactggccggccatatagacgccgtcgtcgaagcgcttgaagcagtgcttgtaggagacgggggtcaagagctcatctcttttagccttcttcaaagcnnnnnnnnnnnnnnncttcaactccttcaactccacggccaggttggccttggactgtaagtccgcttggtgaaactcctctagggacttcaccttggcagccattttgtccatggcctccttagcctcccgaagctcacacctagccttggcaacgacctcaccctccgccttcagcgcctcccgatgcctcgcctccagctcagcctcccttcgttgggtctcctctcggtacttcgcctccgcctgggcttccctctgtttagcctcctcctcgagcttcgccttagcaagggcctcccttcgatcagcctcctcctagatcgcccgcctttcagcagacaggtcccgcaggatcctcacagcctcgtctatgccccaaaattcggacatgacgaagccatgattaactatggtcttggaacggcggttggtctccgcagtaacctgaaaaaggagacaagagtaagatcaaatgccttggaaaaaatgtcaagggaagagataaactgcaagtacataccgcagccatggtgttgctgatgtcttgaacctagtaaacggagttcaaggaggcgcaggcggcatatcgcttaggggggaactgagtcggatgggagacatactcgctggtcatctccgaggcaaagggagccaaggtgggcccaagaaacgattgaaccagtccgtcagcgggtccatgttcaggtcccacgcatttcggaaggcctcctcgtcgagagtgttttgctgctcctccagtaagattctcttcaaggcctccacctcagcatgcccccggctgtactcgtcaagggcgtaattttatttggctatccagagattctgcctctcctcctcaaccgggaccggagtcaacactatgccgtgaggcacagtgtattcctccgcctcgaaaggaatcctggagtcatggctcggggtcggagtgtccaccctacggggccgcttagatggctcctcctccaccatctttccctttcgcttacgctcgagggcggccgggtcctcttcttcaccttcttcaacttcctcaagaacctcctcctcatccaccaagacaatagtgcccgaaggggcattggaggaggacctcccgggagtgaccaactgagaagcagcaggaggtggggaagccccaggactgtgagctccagcaagagtggccaagagttcatccataggcctggctgctacaacaagaaaataagtcaagtgtgagaacattcatgaggacagtatacacttagcaaaaatgcaataaagctagtcctaccctgactctctaatttggccctagaaaagtcccgaatcatagcactggcttcatcatccttgagaaagctgtccgagggaaggaa

SEQ ID NO: 34591 - DNA, 1349 bp, Cannabis sativa
tgaaaatagtaaaagataataatatatgaaataagaaaataaaaatatacctttaacaaaacagtgtgttcatcattattcatttttggattagaagaattatgatttacttcaatctctttttcgcaaatttgtccttatatcattcattcttggactagaagagtcatgatttaatctaatttgctctgcggttgtacttctattatcatccacaggagcccaaggaacacaactaatctatgataaaagatagaagaatagtatcatatgaaaaaaataacatgaaattaaaattaaaacaattaataattgcaagaagaacatagacaatataggaatacacactttattttttccaaaaacttctttccaaattgttttcaagcgtgaactacgctgcacattgatcatctctcagttttaaaattttaggaatgttatttccaaccttaatcacaaaagatgaacctaaacttggaaggatttcaaaaccccaaacttgaaaagctaacgggaatccacatatctcataccctattttttggcgattcaaaatagtagaaagactgttaactgtgtcattgaaagaacgacggccccaaggatagttttcaaacatttgttcatcatcaaccaacttcataacaaaattgtctacatgacattggccacgcttattttgtaaaatattatgcataatgaaaacttttgtcaattttacaacatcatcatcatcatcaattcgagttttcataagacattctgccaactcttttctgctaatagatttattgtcagtatagtacttattgagtaatcaatttgggtgcttaatgatatcagaatcaggtggaaattcattgtaatttaacgctgtaatgatgccaaactcagcaatactgaacttcactttattgctattaaaacttaattgaagctcatttccattagaattgcactcctaatgaagtaagagatagtgcataatcatttgtgctggtttgatagattcatcaaaatctaaaagatatccaaaacatgactctctcaacttttgtagctgtgaattgcttagaaacttttttatacaaataaaattgtgccatagacatgcaacatagatgcgagaatcatcagaagtaaatttttcagcacctaaatcctacatacaaagcaaacattgaataacaactaaggtcaaaaaagaaaaaaaaattaaaagaactatcagcatcaattagaacatacaatagaaactacacctaccaattaccataataatttcaaaggtttatgtatcagcttactaaatataagtgcaaaaaataaaactcaaaatgtgtcgg

SEQ ID NO: 34592 - DNA, 2540 bp, Cannabis sativa
tttaataattttgtcaagataattttttttttataacaatttttgtcaagataattaaataaagtaataattggcttttcttaagtcttaaaataataataattagacactaacaactagttgtgtttagaaaaatttgtttagataacttcaaagaaagaaagaaataacataactgatttttttaattaaataaaattattatattccttttcttttcaatattgaatagtaatataagaaaattaatatttttttaaaaaaaataattttaattattagataaaatatgtaattataatatcattattttggtaatattgatattctttttttctaatcaaactaggtatgttttatactaattttgtttgctacggatgtttttatactgctttgtcaaatagagatgagtaagtaaacaataactataggatactaatattggcatatatgtatattagacatatatcattgatatgcaaattattggacttcacaccatgaacttctctaagtaaaagtagctagaaaacattgcaacctatttacatagaagttatgcaaacatgtcagacatagatatttcccttgaaagtatgtgcaggagtgtgttagtatgagaaaattctcatgaaaataaaagtataaaatctaaaaatgtaccttcttcaggcaaagttctagactcagccctgataacctcaaagacctcgatggcattaataatagcatgactacctgtcttgggttgcaaagttattgtcaaagtcctcccattcacagcaacagtagtattaagtacaagtgcagtatagcgatctccactcatctgaataacatctactttttcaaatgcagtgtgaccatttatcaggatgtcaaataccctttcccctgccttagaaactgcagagtcaatctctgcaaagtgtaaccatatggagtggtttttgttgggttccacatccattgtatattctaagttaggctgactatccgtactaacaattgcggaccgataaagagcttctggataatggttgggtatctttgacgcctgcttaatactattttcaacagatctggttctatcagaacctctattgaaggttgtaatagaaccccaaaatctatctccaccccaattactcccgttataatctacatcaaacttcgatttcccatcaccgcaagtaagtcttgctgctgttctaaggattactccttcgccccattgtggaccataataatatgcttgattatcaatctgaagaatttcaagggaaaggattgctggatctccatgaccagtgctgtggaagcagatagaagctgtgccatcggtaagaaatgcaagggcttcaacaaatacttgatcatcatggttgctccaatcagatttcaaagaaaaaatctgagttccttcaatagaaacatcaaacagaggctcattgtcaaaatttacttgcttaaccaatccaaagaaaattctgattgaataatgtgcctttggaactcttcgaatgttgtagcaattttccggccctgaagacaacgggaaataccgcagtgtctgcaatggaggacttatgtaacttggacgagttgcatttgttggaatacctcctgtgtatgcaaaatccttattccacaaagtattggtaggtcgggtatggacattattcctggctccacagctaatgcgcattacatatggatctacatccagtaacagataagagttttagttcactagatagaaattagattcatttgtttcgcaatagactatcatatatcttgctttatgaacctcaaaatcaatgagactaaatataataaaaactaaaaatactactttcaaaaaaaaaaaattaaaaatactactcatacctaggtacataaactaacgctggtaatttaagtgaaactaatcaattgaacactattatgaggagtagcattttagtatgacctgaccagtatgtagctgcttttgattattttcttacctcttccaaattgtgaatagccgattttcaagacaacaattacccagagaccaagagatgcaaactttccagaaaaagcatgagttagtgacacactgctccatttttcaatttcgtacgcaatacccaaagatgccgtaaaatctatcgttatcagtaactaaatttgaattgaaaccaacccaactatttcaaagcacagattcacaaactaaatttaaactcatttagcttcaaagcaaaactcttccaatgttataatcacaaaattcagttccattaccctaatctataacctcaagcttcaatcagttttccaaaacggaaaaatcaaaaaaagcaaaaaaccaacttgaaactcaccaatattattagctgaagccaaatggaagatgaatacccaaagccatggcagaacaaacctcagcatttcagctctacgcgcttctgcttttttctctgcttttttttttttttgttcttttctctgcaactacagcgccatcctcaactctctctctctct

SEQ ID NO: 34593 - DNA, 1934 bp, Cannabis sativa
  modified_base (500)..(502): a, c, t, g, unknown or other
cagcataatttgccacacgaaccacaggaacttacagatacgaaactcaattagaaagagaactactattaattttggtaacttcacatcagaagatcggaatcaatcaaaataagagctgttttgaatttatgaaaaaaagtgcagaaaaattactacaaaactaaaatttaactagaagtttagtttaattcgcataaaactaatgtctaaacctcatttttcaaatccgtgaaatatagatctcaaaaagttgaactagagctctcaaacaatccaactcaagtataataaaaaaaaaattacatcaatactataatgtttatcccgatgtattttcgctgttttttttttagatttatttccaatgaatgaatgatgtgaattatttattcatattaaatcacgaatagacatgtagatagagttacgtacgtgaaaaaactgttctaatttttaatgtttcataacagttgcataaatattttgctaactctctnnnacttgacatatcaattattacaaattgataacgatacgatggattttatcatatttacaagtgtttcatatcgtcaatacaatacaaagctctttaaagaaacttttatagcatatttagtttttttaatatactaaattagttgatataaagttggtttactgagatctaactgttgtttcttcacatattactatcaaggtacaattaattttcgatcaatgacaaaaaaaaattgaaaaatagtttcttatagatacgcattcacatttaacattctagttgcaattaagttgcacgttagttgaataatgattttgctactataatatcatagtattataaataagattcgaaattgttaaatacgcgacctgaacagataagacacgattgttgtaatattcgtttgtattaaatgtggaattattagttgttttgtaattttatgttagttggctcgtaacagatataactgttgcactacaatttcatcacagttatcttgaagttgacttcttctttctcttctagccgtcggagttagaatttttttagggccaagaaactttcgacttcttcttcactggacgacgaccaccttaagccactgggggagcaacattagagtcatcatcgttgatgactggacatttctctttagccttgttaccaactgatttatgacatatttttaaagttttttttggcaatagagatggagaagcagagccacaggaaatagttattatatatatgaaatgaaagatatataaaaaaaaactcataaagaagacagttgtaagaagaagatgacgaatgttaaaggtgggaggtggttttcgtgggtttcgaaatggtaattgctggaaggtggttttaaaatgaaaaactgagaaagaaaaggaaaaagaaattgaatgctaaatttaaaaataaaaaatgaatgaaaaaagagagaaaacaaggaaaaagggatatttgggctgaaatgaatggatgtgtaagtgatatttcggtaaataaaaactcattaaagataaaattgttactcacaccttatgaaagtatttttgtaaatagagtgtcaatttgtatttttcatgtaaaaatttgttaaaatattcctattatattaataatataatagaataataaaagtataaaatttggtgtaatttttagcattgtggttggaattgaaaaaaaaaaattagtgctaaaataatagtattttggtgttgatttaataccaaattttaattttaccattgaagatggccttactaatgaaaaataaacacaagatacctttttatgttattgttatgattatggttgagtgtatggacgcctgattataatccgagttatagttatgttattgttatgcttttcttactgagtcgtcgactcacaaatattgtttgca

SEQ ID NO: 34594 - DNA, 1292 bp, Cannabis sativa
  modified_base (982)..(996): a, c, t, g, unknown or other
tttgttttaggggtaaaattgtaaggtataaatgttttaagtatagttttcataatataaagaatgctagcatagttttagtgtactctttatttttaagcatatattgtcaaatttccctaatactataggtttatggtttttttatttttttatatttatatggttttttcatgccatatttttataaaaaaaaatacaaattttatatttgtaaaacaaacaataagttttgccgaaaaagtcgttggcacggaaaaatcgctggaaaagttagtgtcgccggaaaatcactgtcgacggaaaagtcatcgtcattaggaaagtaactagaaaagtcaccagaaataaatgtctttgatataactaaaaatataactgattctatgaataaaaattaataactcgaaccagttataattgaaatataatcggttctgtaacataataaataaaaataaataatataaaataacttaaaccagttataattaaaatagaatcggttctataacagtgttataatgaataaaaactaataacacgaaataactcaaaactggctatataatataatgaatacaaacaagtaacacgcaataattcaaaccaattacaattaaaaaataaaggggaaatcagttactaaaatactgaaacataaattaaaaataaatatatatatataaagaagagatatgaggcggtaacatgtcaccctaaaatctctctaaaactatttttcccttctatcattaattctcttatttttaatattttattaaagcataaatttataaattgatattttactattattttaataaattatttttatcttttcttcttaattcttttatttttaatatttcattataacacaaatttacaaattaataattttatattattttaatattttttttaaaaaaaaacacacacactacatatactatcacacgttattattattattattatnnnnnnnnnnnnnnntattattattattattatctatatctatatatactaggttgatgttacgtgcaatgcacgtatatttaattttttttaattgggtttaattaagtgatgttaagtgcaatacatatatgttaaatttttttaattaggtaatgtatttttattttttaattttttaaatagggtttgagattttgatctttcaaaagttttttagctattgcgactacattggtgtgctctttaaatgtgattatatatacatattttatatataataaaaaaataaatttcattgttatacgtat

SEQ ID NO: 34595 - DNA, 2739 bp, Cannabis sativa
  modified_base (558)..(562): a, c, t, g, unknown or other
ataaaacacctcgcgtataaagtcgttgactaacaacttgtcaacttcctgctttagtgccccttgcctcttggaatccaagggcctccttttctatctcttcgttgggtagttggatcaacattttaattatggaagataatattagggtcgatccctatcatatctccatgactccaggcgaactgatcctagttcgccttcagaaaacttattaattgctatttaagatgctcgtccaggttcttcccaatgtatacacactttgtgggacttcttgggtcgagaataacctcttccaattcctcaattggtttcaataggtttctctcatcttgaactcgagggtcaagatcttcatttttcttttcattttcttcttccaagatcgccatcaactgatgaccgactttcctatgttgcagctctatgcgatagctcgttatttatctctttcacatatctttattgggtgttattgctttcccctgcgatatgtggccctcccaaaataaccaggatgtcctctccttcaacaggaataggttgtaacccctnnnnntttgggttattgggcagactgggctggttgtatccatggccctgtcttttcacatactgttataaaatgacctcgagcaatgagactttctatctcatctttcaattggcgacattcgtcggtcgtatgcccaatatccttatcgaatttacaatactttttaggatctctcttactcctcgaattcctcatcggttcgggcttgccgaaggcaaccttttgctcatgtgcgaggtaaatattctcccgagtttcattaagctcggtataaatagtatacactggcacgcacttgtcatgcttcttttgtttctttctatcctttgacggttcattaataccgtcctttctcttcgaactagaagccccagtgtgatcaattctcgtggaaacaatacttgttgaaaacgttgctgggtttgcctcctgagcttgttttcaacaagttcatttcctttcggacttcttccttctgaacaaatacctgagccctctcattgaactcggtgatgtttttgactggacgaccttgtaaatcgtcccatagctcgccccctgtggttgatggattagtagagattctcacttgaagggctgtaagttgtgtgttgtcatccaaattcctaaccattgtcgtagtcgtgctaaaacgacttaagtgtctcaccgggttgctgctttatattggttaatgaggccgctttgggtcgtctatccctagtaacctagaattgtttcttgaaatccctggacagctgctcccaggaagttattgaatggtgagtaaacttgttcaaccagctgctcgcccctccaacaagcgaggtggggaaatacaacatagattgttcgtcacattactcactcacattattgtattaaagttattcaaatgcgagactagataagtggttccgtcatatgataagacatgagggttttttaatcttgaagggaaagaggtactcatgatatttcgatgatacgactcaagctcttcgtcggagtcgtatccagattgtctccctagttccctcacttgatatctcctgaatttgtcctccagctcgtttattcgcaattggatgggatcctcttgctttaggctttgttgttgacgaaggtcaagtttcttctgattcaagtgctctcatagatccagttgggagtatttgctgatagacctcatcttactcatagatcgcgtcctactcatagactttgtctttgagtggctcacagatttactggttcccatgctttctcgatcattatctcattgagttctttctcctcttcgagttgatcgactatgggtccttgaccgcctcgaggtcacacttgcctcttcacgctctattctttccccctgagtgtggtttgtcgtatttcccccattggggtctgtatgagtcctcgctctacgagtttgggaagaacgatggtgattcctcgaaggtgacctttgttctccaagctgattcccaagattttcctcattatcatgaggaacttctcgttcatcagtttctggttgcctcacattctcattttcattagagggttctggcttgtcattttggttgtcaaggggtatctcattttccctaggttgttcttccctggcattttcctatctcctggtttgtgagccacgaggtctgcctcgtggtattctaactctaggttcaggttgattatgagcattcattccctgtgccaccctggccgagggtgcatcacgctctaacttagcgttttgacgctacgtctcttccaaacgacgtctcaggtggcagttttccgtttcataagtaccttatcccataggttgggcacctccacgattgagctcttcatcccttgtcccgggattctgaccacttccacgttgagttctcctcgagcgtgttgtccacgtactaggaccaacgtcaggttgggttcttcaggaacgtgtggtccgtgcactggggccatcctcaggttgagccctcctggaacgggtggtccttctggaccgcgggttggcagaccttctgaagcccatgggcactttcccaaaacgatgattagtttcttcatgtggggtgttaacattttctggattttcagccatgaaggaggtggtttttcttcaaaagaagggagggtttttttctaagctttttcacaga

SEQ ID NO: 34596 - DNA, 1541 bp, Cannabis sativa
tcttggtgatgctctgcgacagactagatacaagggttagagatctgagtggaaaaagatatattaggatgttaataaaacatacttgttagtaaatctagatccgtgtaaaacatattccaacaccttagtgagggataccatctcccaccagactaaggcatcttcctggaattgaaacgtggcacatgccaccctgtcatttccggtaactcccatgaaatttaatattctttcaatcacagtcaaccactgttctgccttaagtacatcaggacctcccaaaaatactagaggtgcttgcttcctgaacctctcatataagggctccatacggttgccagcaacaggttgttctactggcaccgtaggaaccacaacaacagacggttgcagaggaggctcaacaggagcatcctgttgtctaagcctttgaatctcttcttcttgctgagtaattatggcttgcatctcagcaaacctctactaccaatcaaatgaagcttggggtggattctcttggccacctctgggagcacaatcgcggcctctaccgcgttcacgggggttttgggggtttctaccaccccgaccacctccggtctcaaccatttcaccctgtcctctgacatttcgctgggcgtcaattatataagacttagcctgcgaacccacaaggcatgtaggttagacagtggtcaaagtattctcaagaccggattcagggttaaaacatcgatctacacatatatgcaatatatctttaaatagtttgcaaaaaaaaaaagtaaagcttatgcaatatatctattcacttagttatttaagatcaatataaattaaatattaccaattataacctaaaatcagctctttattcccacaaaagacaaaagtccaagaaaaagactaatatgccctttgactaaaaacaaatgcaagcatgccaacaaaaggcaaattagtcaattcccaaaccccgttaaataccagtattttcaatacctagcaacaatgctccgctattaataaaattctataatatacaaaatacgactctctaaaggcccaacatcgctttccaccgcttccgaacacagtcaccggtaaacgagaaattcacatatatagcataattaacatatgttgaaattaaataaatcttcaccaatatgtaatattataattaataattcaacttcataattaaactttaattatttgataattcaacatgtctttacaattcggtacggagtgcattgacaaagtgtacgatgtctgaagagttcatcacggtgttaccagcactagtatgggaaggtacgtggtgtatgtagtacaacacttaacagtactcgaggcacggttcataccctacctacactagtacgatggtggtactaagtgcatgtagtacactggtagatggtcgtatcttagttaagaatgttcttactcatctgttaagccttgtaaataggtgtatgggcgcctagatacaagtcgttattatgtgatatgttttatgcttttcttac

SEQ ID NO: 34597 - DNA, 3652 bp, Cannabis sativa
gacacctgctgaagcggtcattgaactttccgaggaacaaactgttgtggaccctcctgtgtcaaaaatgactaagtccaaggattctcgaggaggttgctcagataggctagagcaatcgaagggcgtatttgggctgatcaaggaacctaccccacctccagtaatacacccgaagaccaaaagaggcaaagaaatgctcattcactatgtgacttggtcggtccctgaggcgaacaagtagctggctggggcagacaatgacctttccctggagttggtgatgggaggagctctgaaggagtttgcaagggtaagtctttcctgacagtttccttttatccttcttcacttagttcagattttcacattctttctctgtacagactaatctgaagatagcttacgcttattcccgggctaaaccagctgcctctaagaatgccgccatttccaacactatgcaggcggaagtggacctagccaggaaggatgttgataaagccagggttcagcttggggctatccagatggaactaggagaggtcaacaagaaacttcttgtcgccgagaagaaggggccgagctgactaaagatctagaggcttccgaccaacttgaaactgctattgcctccttgtcaaaggaagtaaccagccttcaggaagaaagagaggttcttcgagctatctttcgcaggttggaagaagaaaagatgagtaaggaggaggagcttaacactcaggttgagaagtacaagtcagagttcgagccatagagaactaaagtggcgaggctcggagggaaggtaaatgccttagagacaactagtcttgagattttttatgacttctggaaggctaatcctcaggcaaattttgattacctgagcgataccaaagacatgtttctcgagtactatgtgaaagaactacttatccaattttcaagattcaagttaccgaatggttcatggttagattgtttaatttcaacttatgcattcaagaatcggcttgaagataaagcagtaaagcacacaatgatttacaagcttcatctgcattgagaacaaatctcagtcgactagtgcttgggttccccaaaccaaggtaataacatctactaaatccaaaagattcgtattacaatctccaattcacacttggaatttaatacaatctttacagagattagtaatgaattaccaacaacaatcaagattcttgattgtatgcacaaaatcccttgtgcagcagctaagtttgtcttcgacacttttcttcaatttgaaatcccttcagactgatgacgaagacgacactgaactcctttcagtttgaactcaacaacaccaggctctgatctttctgctatcgatctccatctccaagatatgcaatcagacctgaaagacaataatgaacaatccaagataccacacaaactcacacgatatattagaacgaaccaaaaatatcaattagctagcgaactcatttgtagaatgaaactagctatttatagataatagttcaactgacctaagaacaattaatagcaacagttaaaacataacagacccacacgaactttaatagaaagctggtatgcagttatagcagatttaaaccacagatacgactggactcactattaatataatctgtcaaaataatgacccttacaatctaacgattaatgacttcaaaagatatccaataacatagagctatggcacaatataatgtctttggatcataaacatagcaaaccctaaacccatatcaaaagaaaaactttagactatagacatctcccccttcattgaacatgagctgattgctccatttctttgtcaaactccccctgggaaagtggcccagacgacactaagttaggtgtagtggttactagagacgggtcaactataggaggcagatcctgtggtactagacttgagactgggacagatacagatggctccccctgcacatgtgcgttactaccagacccatctgaggatgcaccaaacgaatctctatgaaactcacgcagagaaatatcaattgatggagttaaaggatccccataatgattttgcagtacaatagacttgatgatgcaaaccattttatacatggaagcatcaaaggaaagttggcgcttttgatccttcttatatcttttgacaaaggatttaaactcagaaaacatttgcacctgccagctagagtctgataaccctttgaacagaggagacttgcctttactcatctttgaagtagaaggagtgttcgacgagggctacctgttaacaaatgatagaaaaatcttactgagaacgattttgaacttgatagtcatgtgtttgtaagaggtgggtgagcagccacgagcactcgttgaattaggcttggaaaggggagttttttacgagtgccagtttttttgaggcttcgagaatcctttcaaagataagagatggcagatcaatagagacatgagttcccacagcatacaagaactttccaatttcaagtgtgactaaggacaaatgggaattaggaaactaattgtacaaagcaacctgatgaagaaccctatggaaaggagttagattagaagctaaaattttctgcttgtcccaaagatagtcatccctgccagttagcactctacccatcatagtttgatatggattgaactgtttcccatatgttggatttctgacaaactcaactttcaaaatgcatgcaatagtagatggaccaaaaggaatacgattacccctaacaaatgcaatcacacatcctggatgaccctcagcaataacagtcctatctagattggcatagaattcacgaactaaaatgggatgaggggcagacaatttagagatagtgtgaacccatttcctaatttttaaaaaatcatacaggtctggaaaatcatctaacatcaccacttttttgaaccatagctcacaactaccaaaccatcgttggtacacaaatgctttggaggcatctacaaagcattgaacagaagatgggttgacagttgatataggggcttttggaagttttatctttttagagcctttaggtagctgtttgggagacgagtctgtagatgggacaggaataggctttgtcttggattttttgacaggtcgttgatacgtggtatcacgcaatgattttctttttggttgaaccctttctctgcttttggaaggaatagaaaccttagatggaggacgaggaggtcctatggggttcgatttaggcacaagcgaaggctggacaggggacgaaggagactttaaactcgaagaggaatgagtcactctttttgacacggtctgagtgtgtgacgacgaagaagaagccttttttgaaatggtaggggccttaccttgaaatgtgcgaggcttttgaatgactggaggcgatggcagcgacatggtcgactcaggacttggaaggcaagaagaagcaccaaactccgattggtaagggacaatggcatgacatggattggccagactagtcccgactgtaggatcaacatgagatattgattgtggaatgagaatgctttcaggggtcaccaccctgggagtagtattctgttgggttttatgccc

SEQ ID NO: 34598 - DNA, 997 bp, Cannabis sativa
  modified_base (27)..(33): a, c, t, g, unknown or other
  modified_base (74)..(89): a, c, t, g, unknown or other
aaaatagattacattgaaatggagttnnnnnnngggcataaaacccaacagttaatcaacatacttgtgagtannnnnnnnnnnnnnnnaaaataatttccaacaacttattgttgaatgtcaagtttaggaccatgaacaaggaaaagcaggatctaatctgctagatgcagagcttcttttccccataaaatttctaaaatggctaaggaagtgttcaacaaccaactggtaatcatctacaacttcatcattcttgtaaaatgtgaagatacaattctcaattcttctctttttcaaaaaagtttgaaaatagctcgtattctcatcatcaaaattcaaccaagttatcttagaattttgatgcatatagctaacataattcttttttttttttttgcaataagataggcctggtaaagatttacttcaacaaactaaagaataagattcttcaggtcaacagccaaaaaccccttagcagaattaagagctttttttgcttccttaaaaatattgattatatcacccttattttctttctgaaacaccttcaacacatgtttaattctcaataacttttggagaatacctttgagcccttttggcatgggtctatttagtccagttgttgataacatattccttatacccttacttattcatccaataattgtaatatttgaaaggcttgactcctaaatcatcaatctcatattgtttgataagacaataactatgatccgagtttatatcccatttgaagctagctgcagttttagggaacttattttttaacacccaaatgtgacttccactggcggcagttatagtatatattgggtggtcgattccataaggaggtgattatggacaaaagcattagtagaaaaataaatacaaaaggttaataaaaagcaacaaatcagtagccaaatatgtttgaggatttttgttttggtaattaatattaaaagaaagcaaataaaggtgtaat

SEQ ID NO: 34599 - DNA, 5591 bp, Cannabis sativa
tacactccatcttgaggggggctcttaggattagtttggattaagttagttaagctttggattaagttagttaagggttgttttggagctgtacaattctgttacaactcttcttgattatactgagctatataagctccttccccttttgtaaaatcagtttaagcataataaaatcaaatgctctgatatttttttctgctttttctctctattctttctcataacttataatattaatttattaattgtcttttttttttttggttttttgttgaataataagaatactcagtaatcttgaaacataactaattatttcacctttgataaatgatgatgttgttctattgaactttatgccttttgtttcactaaaacttctaatggctattacattaataaactaggataacaaaaattagaaaacaaaaggcatagcgtgcatagatgaaaatagttttgatactcaaatcataattagaaggtttaattataaatggtggagaagaagtaccgtgaagaagaagaagataagagggtggagagaaagagtaaagttcgagaagaaatttgtgtgtggagagagaatatataatatttaattatttttaaaatccctattcacttttttaatattatttaaatagattttagaaattaactaatgcagtgcagatgtctagtattattatacaccgagccaatatatgacccttagatcaataattaacggatacgaaaacatctctatggtagtgacaaaatgatggttcttactatagccttatcttataattatatattattttttcaagggtacaaaatatattttgtataatttttttgtctttttcttgaattctcccatgttaagagggattaaaaataatgtgtttggagggttatcttctccttccatctctcctctcccttcttctctccctcttgccaaacaaaagaattctccaatccctctatccctctccctccctccttctgttaagaaatagaattgtggaagagataaaacatagtactttcctaaggcatgtagtggacaaggataaccatcctaatggacaaaacaagagaagaattttaaaagaattctactaattctctttgtcctactaaaaattctatcacaagtcactctatttgaagaaattgatgttcaacaaagatattcaaatgtgtaataaaggactttccaagcttcttggctaaaaaagcataaataaatgttgtattcaggttaaggctcaaaaagggtaactaagataaaattacaggacaatcaatgccaaaagaaatggattttccatttagttctttctcctaatatttcaagaggctcttccaatgtttcaacaagcccttcaattatttttgtttggcagtactacttccctaactgatttttttagatcaacttacttaaaaagatgaagctttggaactgtctcactatggctcctttctgtagagtcttgtccaagtagacaaaggatttcattcctagctacgactattttctactactgctattgaatctcttgtttgttctttggtttgctgttccatgatggaaagggatatccacattgaagcggttgatgatgaaatgaataaaactctacagcgtgatagtgaactcgagttggaaatgttggagctttttgaggatataacgttggaagaagtagtttcaaacaaggcctgcgtgggaaaggtgataggatgcaaggatatgccgacatcggtggtcaaaaaaatcctctctggagtctggcgtagattgggaccttggagaatgaagaaatgcgaagatggcgtgatgggtttcttttttgaggaagaggaagattgcaactttgtcatggaaaatagaccctggattgtgaacggagttattttgaatctaaagccctggccgctggaaggggaggtgcgaattgctgagtttgaggttgttagattctgtgtccaatttcacggtcttccaacccgttgactgtcaaacaacaatgcccttattgtggctgaaaaggttggctcctttgttaaggatgattctaaaagcaaggaggaagtagttcgccgaggcttttcacagagcttggataaatgtatggttagctcaccccatccctgctggtttcttcttgacggcagatggcaaaccggaatcgtggatacaattcaaatatgagaagctccctcatctctgtttcaactgtggcaagttagcacactgggacaaagtctgcaatgcgcctacggctatggttttcccgtctgtaggaactgccgtccctatgtatgggatttggataaaaagtgacaccggtaagacaaattgcttcaaccatgttggaaaaggcagcacaaagctcattatcgacaatgatggaattccagaatgggagcagaggagaaacaattgaaaaggaacctggaagagaaagacggtggaaccagcccctgagataaatactacaatcggaaaaggaaaagggaaaactactcaggcggacaaaccggtggctccgggaaagagaagtgcctacgtggcaaaaaaggtacaaggtgctacgcccactactatgtaccagatcgatcgtggcagtacgagcggtacgaaggaatttgaaaaaggagggaatgttggtgatgaaggcataacagacaatacaaacgtgctaaatgaggtgtttaatgaggttcgtttgaactttgggcctgaggtcttggctcttcctaggcctgattttgctgcagttgatgataataatgaaatgattccagatatagggcccactattggccaaagtttaaaagttcctcacaactgggtttgcctttcctaaaaacctcgttgttttcctgagcccactcctatagcttggcccaacctagacccagaagcccaacaaactttcctaaagctttatgaacctgaatttatcaatttatataaagcccaacaatctttactatccaaccctcctaatctatctgagttgattatgcactatctgggcaataataggaaacgaaaagctcacacttggtttcaaccgtacccatccttgcctatccctgattttaatccaaaaccagttgtggagcttgaggttaccccgttaaatgaagaagatcttgatggaaagaaattcgttattggctccggggaagatgctgctcatgcgactggggggatcgtggaaaacgctcctaccgtaagaatcgaagaggagtgcccaggaactcttcaggagttaaaactcgtagcggaaggaaaaaaggaattgaagcaaatcatgaagcaggggaaaatacgggaaatatcaatgaattgctggagaatcgtattgaagtcagattggaattcaaccaaaattttggcagtggcgaggaggtggccgtatccatgcccccaccgtcaccatgaggtgtcttgcctggaactgccgtgggttacacagacccactgcagaaaggacccttcggggcctcatccgtaattgtaatgcggatttcttattcctctcggaaactaaagtgaatgaggagacaatgacttcaattactaatcgtctgggttttatcaattgtagctgtattcttgcttctggtcttgcgggaggattttgtatagcgtggagaagggggatcatctgctctgtcaaggaaatttatgaggctggttttcatgtctcggttagtgctagtttgggagtgtctcagtggagtttattttgtgtgtatggcactccttaccataattaaaaaagagcttattagaactggattactgagaaagtcgcggactgcaacgacccttggactctaatgggcgatcttaatgttatcctagatgaatcggagaaggaaggaggaagaaactttaatagacaagaaagtgagttcctaagagattttatgttgaactcaggaggcattgatctcggttacgatggagggtctaaaacttggcagaattcgagaattgtgaataaaagaatccggaaaaggctagatagggtggttgttgattcaatttggtgtactatctttcctcgtgcctgcgttaaaaatatgcctatcttcggatcggatcatgcccctattttccttaacccgtggggtcaggaaccaaaacttcactaccctttcaaatttcttgaagtttggacgtccagtcctgagtgcggggaagttgttgatggagcttggaggaaaactcatcccagttcaaatgaaccttgtctgcagaggaaactaaaagtgactaaatcggatctcaagaaatggaaccaagaaaagtttggcttctgtgataggcaacttgagtctttgcgaaggcaattggaacagattcaacaaaaaccaatctctggttcctctgttcaacaagaagatcgtatccaactggaaatcatgactcttgaaggacagatggacaagatttggaggcaaaagtctcgggcaaactggattcgatttggagacgccaattcaaaattcttccatgtgtctactatcgttcgaagaaggcgtaacttcattggaagtatcatgaccccgtagggagtgtggctgagacagagagatgctattggagatcattttaaagatcaattcagaggtctattcaccagctctggggtgactattgacgcggagatggaaactctgtatcatgacagggttacaaatgcagaaaacgatcttatcagccgtgtccccgacgacaatgagatcaaagatgtggcgtttaaactccatcctctgaaatctccgggcccagacggtttctcaggtatattctacagaaaatattggcatattgtggaaaaggaagtttgtcatctagttaaagattttttcttgaatggggtgataaacaaacatcttaaccatacttacatatatcttattccaaaaatcttcaatgctgactgtgttgaactcttcagacctattagtctatgcaatttctcttataaattatctctcgacttttgactgatcgtttgaagagtattttggatagactagcgtccccttcccaatctgcttttattccaggaagatggattgctgaatgctctctaattgcccaagaaactctccatgctatgaaaaagaagaaggggaaaatggggttatggcgatcaagacggacatgagtaaggcttatgatcgccttgaatggaatttcctcctccgagtcttaaaagaaaatggtttcaatgacaaggtctgtacattgattatgcaatgtgttactacggtcagctactcaattctcctcaatggagctcctttggctcccttcaatcctaattgtggcctaagacagggtgacccgctgtccccattcttattcatcctctgcagcgaagtgttatcaaagctaatccttaagccggaaaaagaaaaggctatctcgggaattaggattgctcataatgcttgtcctatatctcaccttttttatgccgatgatgcaatctttttctgtcaagctacagttgggaatgcgagtaatcttatggaatgtattcaaaaatatgagaatt

SEQ ID NO: 34600 - DNA, 4816 bp, Cannabis sativa
cgatttccataaacctcgttgacttacgagctctgcaaaaaatcacgtaatacgcctatactagttagggtgttacaataaccttggggaagattcatgtaaacttcctcattgaaatccccatgtaaaaacgcgttgtttatgtccaagtgatgtaagttccaatcacgaatggctgctaaagcaaatatgagtcttaaagtgttgaatttggccacggggggcatatgtgtcgaaataatcgataccaggtaattgagtgtaacctttagctactaaacgtgatttgcaacgttgaagagagccatcaggatttagtttccttttctatacccatttattgccaattacatgttggttaggtgtaagtgggacaacaacccatgtatgattttttttgagagcatctatttctacatcattgcagtgttccaaattttgaatttggaagctggtttgtaggatgtaggttctggtatgagacttagagataggatagctgcttaaaatttaagagaaaatttgtggtatgagatgtaattgaggagagggtgatctgtgctggtgttagcagacacaaaatcacattgataatcctttaagtaactaggaggatgttgtacacgaccagatttggtccatggtctgttagccctggaaggaggaactgtaattgatggttcaggattttgtgttgtatcctcggagatgtctggtgaggatgttggaatattgttgttctgttgctgagatggactgatctcagtagtattgagagggtttaagtgagactgagaagggtgaatctcagaagtttgggagaaaaaatggtctatgtgttgtgtttgagacacacggccaaatgggtaaatatgctcatagaagaggacatcccgtgactgaaatctcttcttggtttgaagatctaatggagtgtaagccttcatattgggaggataacccaggaaggcacaagctctagctcgagaagagagtttggctgctggtgtgacatgcgatgcatatgcaagacaactaaaattcctcaaatgtgaatattgaggttgtttgttatgtagtatctgaaaagatgtttggtcttttaatagaagagaaggggttctatttaaaagatacacagcagtagcaataataaaggactagtattgcagtggtacgtttgattggaaggctagagctcgagcaacatttactatatgctgatgttttctttctaccacaacattttgttgtggtcttcctacacatgaagtgtagtgtattgtgcctttggtagcatagaaattagtaagtgtaaggtctttggcattatcagtacgaactactttgatattggtcttgaattgtgtatgtatgagttgaaaaatatttgggattgccaaagtggcatccgattttgaatgtaaaaaatataaccaagtgtgtcgtgagtgatcagccactatggttaaaaaatattttttgccttcaatggaaggaagggaatatggtcccaaatgtccatatggacaagatcaaagtttgccaaagtaatgttattattggattggaaaggtaatttcttttgcttggcaatgtgacaagtaggacaattaaaagaacttggaatatgaggaatctgtaactgtttattgattttattagagaccattacagatggatgtccaaggcatgtaagccattggatatcattcaactgagtattacaagtttgtactaaatgtttgtcctcaatgtctgattgttgtaggtagtataggttgccaactctcttagctatcccaatcctcgatgtcattgtaggttcctggatatagcagctgttagattggaaaatagcagcaatgtttgtgttgtgtgtgagtgcactaacagaaatcaaattgtacttaaaattgggtacaaacaagacatttttaagagtcatatgagggttaaggaccacagtaccaattttgtgaatttttgcttttgaactagtaggtaagtggacagaaagatcactaggaatagattcaatagaaaaaaaacactcaacgtggcaacacacatgatgtgttgcaccactatccataatccaataatacctgaaaaattgtttatcacgactttgtcagatgtagaggcattgttggctgtagttgttgtgctaacattgatattagttgtaggcattgtgctggtgtaaactgtgtgttaagattaggtgttgaagatgtaaattgagaagcttgtgggttattgttaggagtggtgctcatatcagattttcttgtattgttggaatcatatttcttattgccatagcaaggaggaaatccgattaagaagtagcatttatctttgtagtggcctggcttttggcaattggtacaatgtgggtgtggccttttattcttcgatgttgcattggctgcaagagctgtttcttggggagtagaggagctggaagcagccatggggggaagcaatcgatggcctaaagacctttgtctttcttggttgattaccatagaaaagaccttaatcaaggcagggcagggatcaagaaggagtatctgatctcgcacagcctgatatgaatcatttagacccttaaggaattgtaatagttggtcctgattttgatgagccaagtgttgtgtagcagcagcacaagtacatgggatgcaggatctgagttgatgtatttcatcccatatagctgtgagttttgtaaaatatgcactaaccgaatcatctccttgattgagataggttagtgtttcattcaattcgaaaattctgggaccatttccttggttaaagcgattatttaacactgtccacatctcatgagtagtatcaaagtacatgatgctactcttaatttcaggagaaaccgaatgtaaaattcaagacatgacaagttgattacaacgagtccaatgatcaaaaagaaagtcattttcaggaggttgaagaagagtaccttctaagaatggagtcttgttttttgctccaatagagagcttgaaatctcatttccaaggttggaagttcttatccgagagaaccggagtgacaagagagagaccaggatgatcagccgtagtgatgtagtagggagatcgaatatcttcataagctggtctgtcgattagagttgatcgaggcagaataggaaaagattgatgagttgtttgtggagggttgtcagcggaagtgttcgatggtggaggagccattggtgcttcaactctggaaggatcatcagatgttgttgcacaactgctggcccgagtacgcaccatgatctgaggagaaagatcttgattcttgaagctcaaagtggactgcttgaagctttagtttatttcatctaataccatgttagaacagaggatttaagagagaggaaaagattgttttattgatttgtatcttatgaatattacaacagaaagaatacaattatttataggcaaggaagtcggcttagaagccaactgaaccttgtaacagaaaaacagaaaaaacagaataaacggtaaaaaccagaaaaataattgacttattctaaactaactcttaacaaattgggatcaataatatctttttttattcggcgctgatttcattcactgaaactaataagactaatgaatctacaacataaactccaatcaccttcatattattacactattttggtccaataatcttagccatatgatatgatgagacacctcacctcaggcctctaaagatttactctttcttttcacaaactcaaatcgatttttctagttctatatatctatttcttcctacctaatatctaaataggttgtcctcctcataatagtactttcaatgctcaagatgtaagtagaatctgacacgtacttctttaatatgggaatgtgaaattaggacaggaattaaaccataaacatactccattattgtcctatcttatctacctttctttctaaatctctaaattttcttaggagaataacaaagtccacacttggaacctattatccctatgtttcaactcaatgcaacttctctgtttactcttggagacgagcatatgggctcaaatcttttcaatagcctcattagttctctgaaccttcttgatttaatgcacactttctcactggcttcattctagtgaattagtctattttcgctataaaacataaacccagttagagaaaataaatttattctaaaacactcttttatatgtcatacataccgtagacatatcttcaattatttgagtattcctctcgaattgtccattcatttgtggacaaagagaactatattaacctttaatttgatacctatttgtttctcaaaacatacagataaatttaaaatcatgacttaagtcattcgactttggaagtccatgaattccaaccatctccttaaaccctatttcaatattttgactcactacacatgtcatccgcactgacagcaagtgcattgacctagtgtatcttatccactattatccttgtggagtcataaaactctatagtcttcagtaatcctactacataatccataattatatcttccatttcatttggggtcttctaagactgatgtaatcctgctagtcatccattctctacttttatttactgacaactatacatgttgacatttttccaatcatatcattcttcattctcaaccactaatatattctcgttccaatatacattcttattctgatacctcgtgccaaacactactctcagttgattcctagaacgttactagt

SEQ ID NO: 34601 - DNA, 2710 bp, Cannabis sativa
  modified_base (27)..(47): a, c, t, g, unknown or other
  modified_base (109)..(111): a, c, t, g, unknown or other
gcacttagtgcggattggatgttgttnnnnnnnnnnnnnnnnnnnnngatcggatgaacacccctaatttactctataattttttaaaaaaataattttatatttttannnaatttttaattatttttctttatttgttaagatatgagtttatcaatataaataagtttgattttttctttaaaaaaatcttaatatatttaaattatttattagatttctaataattttggtttgattttttaagatacctgattataaataaaaaaaagtttgaaaataattttttaaggaataatttaagtttttttagaataaaattaatattttttaattaattttatcagtttttttattaatttttattccttttttcccaaaattaatagaaaattataatttcttttaaaaaaaataattattgtaatttttaaagttaatttttttaaaaaaaaaaacaaggacaaatttttgtattggtcaaagttcaagaggtaaaaatgctaatttttaatggtaaaataaaagaaacctaacaaaagggacataattatgtaattgttatattttaaggagaatttttaacaagtcgtatattttagaagacaaaatcaggtattaccgaaagttcaaaggacaaaaatgctaattattcttttatatttgccacattactatcggctttaagaaataaatcaagtggggccaagcagagcagtccagactcgccacatttacatatggtctaaaatggggtatgccttcatttagacttcacgattagtaccataggtcacaaaattattattggatgtgtaaaaataatattctgtccttggggtttatatatatctttgattaagaatcttttatgagaatttcgtaatgcaaagttttggcatattcaaggagaaggcaatgatgttgctcaatgctcagggacaaaatcaaatttcccttagaatatgtgaagctaaagatgttgcagcaacaagagggagtagagacaaagaaagaaacacagaggagaggcaaacgaagcaattgcgatatatcactagtgttgggatttttttaacaccaggcttgttatttatgggagcaagccaacccagcactgatgacattgtaattgtatcagggcaaagatacaactataagtgaaaccttcaaattacagcccatgtcagcacttgtgcctaatctcatgatatattttcaaatggatcatttttttcctaatcagaaattaggaagcatatatacaaaggaaaacactaccaaatatgctgtcacctatgcatatgttcactagtatactttaaattttagaagtccaatgaaattgaaaatgggggctaagtgataaaaagttgacacattactagatgataatttagcttagtaatacagatgaaaaatcctccattcactgtttctaaccattttcaacccttccagcaatgagcaaagaaaatagaaacattttcaacactgatattccacattttttggagacaaaaacttcaaatggaaagggaatcaattactctttctaacaaataaacatcagaatttcaaccaggtggccatttcaactgtctccctccaaggacatgcaagtgcaaatgataaactgattggcctagagagagtaaacagttcattaacatattggcctaggaaaatttagcatggttggatagttgggtaaccatgaaattttaagaaatcctggcacaacatttaagtggaaagaaaaataataatggaaaaacagataaagatggttgagcgaggataacttacaggcatttggaccattattgatgactacacgaaacccatcaacaataccttctttctccgcaactatttttgcagcatagagaagttgacccagtatttccacctgccttggttcagcctgacaagaaacatatagggtgtcagcattttatacgccacgtgcatatcataaacttgttttccctcagcaataagaaacctgcaaacatgtcaatgtaattatcaaaaatagcacaagaatcacaataattatcattgcaacactggaaaattggagttgtgaccaatacaaatcatgaaatacatactatgtgcaatgccaataaaagttgccagaattgattttgcacctggacaaaaagaaactgcaacctggatgtcctacagcacaacaataactactatggatgctttggtttcaatggatgagaactttgtattgagacccataaagttccatcccaaaactaattattaatgggtgcagtaacctataatgtttccaaatctatttgatgtgggacttttaaatacccctcaagatgatggtagttattttctagcaccaatcttgaattagtacatctttctttttcttgtgacattggaggagagagatttgaactcaagaatcagtaagtctttttaactcaacattcttgttcttgtcgatagtgtgctcgtttaagctgataactacatggcactgcatctcgaaacttattgataatgagtgaaataactcataatcctaaaactgtattagtaattagtgttcccacttttagttgatgtggaaatttttactatgtagctagtagctactcacacaagcaataggaagtttttattatatataagaaaaaaagtattttataatctaactaccaaaagtaagagc

SEQ ID NO: 34602 - DNA, 1111 bp, Cannabis sativa
  modified_base (989)..(1005): a, c, t, g, unknown or other
ggagattatcttttggctagctttgccaattctgatgaataaatttccaaaatttccctgcacacatttatgtatgtgtgttacaataatagcaataaaataggaattaacaacaacaacaatataataataataataataataatagattgtatatctagcccaataaaaccattttaaggtacagatttgtattaaaataataaaatatcattaataataatcaataaattaaatattttaaaaactattaattaaaaaattatatattaaatatatatgataaaattgaaattattttatatagtatttattgttatcaaatttgaatttatatgctatctccttaaatataagctctagtgcacttatactagatagacaaaagcaactataaaatttcttatttatttattattattattattattgcaatcttttatgatagttatattcatctcctaaaaaaattctcattaaaacatttatcattaagtgataataaaagtaatatatatatatatatatggttaataatggttgaaaatagattattttcaatattattttgcagtatttatgtgtttaaagtgttatgcaaacattataagaaggatacaattctaaaagataacttattataaataaattttttttttttttgcagaaattaattaatcacatctcataactaatatttaaagatgtaatacctcaaagaagaagggagattgggaaataaattagggttcctcaatgcatgtggcaaggtaaagagaaacaagtcatctttccaattaactttttgttcgtcgttaaaaacaaaagtgtgaccaaaaccttctacttctcccggcctttgccataacttttccctctcctctattggcaattcgaacaattttttcacttcttccttcattttctctaccacagaattacttacaccatgatttaccagctgcaaaaattattattattattattannnnnnnnnnnnnnnnnattattattattattaagaatatttacgacaaaaaagctaaaattagtacataatttttttagcagcaaaaatatttaacttgttatgtttttttactcaagttat

SEQ ID NO: 34603 - DNA, 2822 bp, Cannabis sativa
  modified_base (2758)..(2789): a, c, t, g, unknown or other
atatatatatatatatgatgacatcatttctgttaattagctatatggtaatgtaagtagaaaatatgaaacaaagatcattggcttatagacgaatattagtacctctcttattctttttcaaaaaataataataataataataaaatagatgaattatatttcttcaaacattcttgtactactaaaaattacacttttggtatcgatttcaaactaacacttatacctatactatcggtttataattccaccaaaataaaaaatcaagagctgaagctccaacaactaacagcgacaacaccacagtagtttttggggaagttgagctattgttttaaagctcatggcaagtggagaaaggatatggaagtcattttcttgaaagggtgcgaagttgctcgatttaagtcgagatatctcggctctaacaagttattccatcacggtaaagagtaaggaagctcgaggaccgcatgccttaggggtttcgaggctcgtggaggtcagccatgacctccgtttaagcccttaccgagcaagggtggctcatcgtggccacgtcgagaaggagacaaggacggagagagagagagagaaggaaaagcaagaaagagagaggggctatggggattctcgggctcggggttttctggggttagagtggctcttcgacggctaagaatgatgcttagatcgattctgggttttctggcgccgcgcaaggagggagcaagagagagagagggtatcgggagagagggtatcaagagaaagtgagatttagattttaggagtttagtccttaagtctcgattcataaataacacttatactcaatctgtatatatatatatatttaattttttagtctcggttattattttagtgttggtttactaaccaacacttaaagagtattataggtatcagttatgaatcgaaaccttagacttagggtagtctttattagtatcattttttttaaaaaaattgcccctcaaactaacattaaaagtctattttgttgccgtgttgacaaactattatgcaccacaaataatggcttcaatgtaacctaattacatcttacatggtgttagtagtagtgagttggttagttatttgagtcagttagcaagaagtaaaagtttattgcttagctagtctaagagattcaggtttgaatcttggccctatgtatgaaataatcttaatttcgagaaaaagagttgagctcatttttactctcaaatttcatttttcatttttctctctatttcactttttctattttctttcaatttggtatcagagccaatagcgtcatctttctcaacttcagtgagagaaaatgatccaccgtctcgagctctaacagatccaagcaatcaaatgtcagttgctccagcaaatctaaacaatctagctctacaagatgttcatgtcattgttgtgaatccatatccattcaacaacaacctcttaccagtcaacttgtgatttggaatctcatacattaatataattcaagattatatagtgcaagatcagactgaatcctatggcgagatcaatggggatgtagctctaattcttagggcgaatcttgggaaaaacttagtatatgatctctttaactttttactttgttgtttatgtttatctattatgattgtattatttatccatgtttaaatagctaatcctaactttttgtatgcaaattaaatttttaaaattgttcaattcagtttgtgtttaaagattagaatttgaatgtgtatgtgtgcaattgagtgtgtcatgattgtgaattgtttgattgaatgctaaggtctattaggactttgatgatctagtatttatgttgagttggggtatgaattgagttgttaaatcctaatatattataagttgattaaattatttttcaaacataaaatcattatctaacatcgatggaaaaattattgagctacaacaataatcataaattatgcataatcatataatatattttattttgagaaaaaaaatcttggtaatgaaaattaaaatttaagagacaacttcattgaatccatgtaacaactactatactgcatgtaataaatatatatctttttaattttttggtctcgattattattttagtgtcagtttactaaccgacacttaaagatcattataggtgtcagttttaaccaacaccatagatttggggtggtctttaattagtattgatttaaaaaaaatgtacatcaagccaacaccaaaagtctatttagtagtagtgttgacaaattattgtgcacctaatcaatggcttcagtgtatcctaattacatcttacatggtgttagtagtagtgagttggttagttatttgagttagttagcaaggggtcaaagtttgttgcttagctggtctaagagattctgcttaaatcttggtcttgtaatcatgtataaaaaggatcttaattcaataaaaaagagttgagctcatttttactcttaaattttatttttcatttttctctctattttttaaccttggtatcagagtcaatggcgtcatctttctcaggttaggtaatagaaaacgatccaccatctcaagctttaacaaatctaatcaatcaaccactagttcctttagcgaatccaaacaatctatctctacaagttgttcctcctgctgttgtgaatccatatcaattcaacaagagcctcctgttggaatttattttacnnnnnnnnnnnnnnnnnnnnnnnnnnnnnnnnttaacaccctaaatatgaaatttctaaaacaat

SEQ ID NO: 34604 - DNA, 2782 bp, Cannabis sativa
gacaagtaagtgcactaacccctgcctaaatttttggcatttcacgtttagggcaagaaggttcttgcttaggttagggctagaactgttcttgtgccgtatagcaagatattgtgtgtgaaagaaagcccgtcttcatacccgttctttgtttcaaagaattttccttttcctttgtaaacatggatttgaacgaagaccccctcgcaagcacatccatgtttgtcgagggtaaacctattccaattgctgaaaggtttttcgcgagacaggaccaaaccgaggcctccatggcaacttcttaacctgtaggggccttagaaaccattccagaaaatgaacccatcactgagagagatctctctgcggataacaggagaggtgaaggggttgaaattccttcaccggtgcagtttcgtcctaagtccgtatgggaaatggacgagaaggccaactactttcgatcttatgggatgttgcaagcgtattctgaggttgttggcctctgtaatgtccccggactaatgtggcacatgctttccatctttggagaatctgcatccattagtgttgatgggttcagtgcatggaattggtcccatatttccagtggcgctcaccttcccttgagaacttattttgaaaaaatgattgcgaaaattgggattgaacccttccagttgattccctcatcatataggctcttggttgagtggtacgtgttttgaaaaatcaacaaactggaggttctctccctggaggagatcctttacttttatagtgtcaaggccaatcctatgaggaccaataggtcaaagctggggttcttccaactggataagcgcccaaattcttactgccctattttccaaatggatcgcactcatgaactctaagaatattggttcttttctttcaggtttcctaccagcaaagtgccatctcttcagttaagcttccaactcccaagtattctaactattcaccaagagttctgtttacttataaactttaccaatttttgtactcgggctgacattttttgatttatggcagagctttcttctcagtgtgctaggacggaggagataaccaagtaagaagcctgatacagggccttttcggaagaccaattgaaggttggggacctaatgacaactaaactcctctgcaggtttgacttgatcacaaagtttcagagtattgacatagttagcctccgagggcagcgccaacctcccaagaaagtgaaggaggcgattgccactgatttggctgttataatcacaaatgcagccaaaaacaacaatgccctaaactcatatcgtatgtcacgccatcctgatcctatgcctgaggaagaagagatctcagagagatttttcactacctaccatgatgtggggacactaggtgccagtacttcgggaagaggtaatggacccttctgcatcctctgtacccccagcctgagtcccatgtgccggaggactcatggaggatttgataaatatttcctaagcataaaccgccatagatacaccatgtaggattacatagacagagtagaccaattagttaggagccctagaaactcggggactccttcagaaattgtcagagtagaccctttgatggttatgtctctgcctgaatgtaaggaatatggcagtttcattggtcataggagcattttatcttttgcttgtcgacaaccatatagtacttcactgaacgatcgcatccacgcacaagttttttcactagattctccttcttgttgttgctatttttcattatgattgcatgacttgcaattgctcctcttatttactcgtattgtcgtcttatgtgcagatactccataatttgcaatgttgaagtcttggaataaccagatctcagttgccatggatgtggccaggaaatcccaagagaaagtcaagaggaagactaactgggaaaccaccttctccctcgacttcctcatcgttagacgtctgggatatttctcctcccatcaagactagacttgctgcactaggccatcctactttcgctagtggggataagggacctggcacctcctcgaaagcatctgaggttctcgctgctctgggagagcagccctctcaaataattcccctgacatgagagataatcctggacaccacaccaaacgtggagggtatagcttggatggccttgtctttcccccaaaggggactccaactaagtctaagcgcaagggatcaaatacttcccctgatcttagtgcaaagagggtcatgtcttcagtcccagacccaagggaaactgatgtactgtcgaccaactcgacattgccactgcaacaacaataatagcaccaacaataataacaaacaccaccaacaacaacagcaccaacaaacacaacaacagcaccaacaaacacaacaacaacaacaacaaccataacaacagctgtcgcaatcacaatctggacgagtgcctctaccttagcagtagcagtctctatctccttgtcaattggagattgtgacatctcagtctcttacactgcaaccccttcccaggcacacaactcctaggccagcctctgctggcccacctttacccgccataaaagggtacggttccttcattaggattctccttccccatgaggctatctattcttggccacaaatacctcacaaaggccgccattttgagaaagtgccatgatcaggaacatgtaaatctttagaaacgggctactcgaatgtcttccatcaag

SEQ ID NO: 34605 - DNA, 1851 bp, Cannabis sativa
  modified_base (694)..(696): a, c, t, g, unknown or other
  modified_base (955)..(958): a, c, t, g, unknown or other
tacactatattgtagagctcattgtaagtttcgaaacggtatatacaacgtctaaaacagacacccgagtcaaaagttatgacaaaaatacgatttcttatatcctaggaatttctaaaaactatgaaactcgaaaatctcaatttttgcactaccaaacttatccaaatcacttcaaacataacagggcgcatatataccataaatattaccatccttacgtaatagaaataaaaatcgaccccttaaatgaaaaatgccattgacgttcggactaagcttttaaaagttccaaactcgatttctaactcaaaatcacctcaaattcaacaagtaaacatcgatactagtcccatagctatgaaagaacaattctacaaagtcagaatcactataactattctaattcacaaaatccctatacaaaaccaattgtttttaaacataaaataaaattaaaccataccttaagctttccctcttcaggaattttctatcctgctactaccgaagcttagatcgcaaagttttgggttgaaaatcaaagaaaatagatataaagggagaaggtattatcgaaagagggagaacgagggtttcgtttgtcgtcgttcttttctactgttataacttcaaacttaataaatatatttaaaactaaacgataagtttcgttatatatataataataatnnnataatattaataaaaactttatgattaataattatcttattatttcttagccactaaaaaatctctatttctagagtatttggtcaatttcaagtaccctaaaatactccgatattttaaaaatcaacttatcctaataatcccatcaatatttctaactaaaattgttgtgatatttttggcctccactcgggtctctaaggtcgccgaacatgaaaatatttttatttcacatataactcatattatatccacgtannnnaaataaatctctgtaattaacaaattacacttatatatccacttatcgagtctttaaggtcccagaacctgaaaatatttttattccacatatagcccatattacattcacacatgctatataaatcttcgtaattaacaaattacgcttatttactcacttatagcaaaatttaaattttatgctaaaataaatttgtaggatcaaattccacttattatctgattaacccataatataaatataaaccctattatttaccattaggcttatcgggatattacaaccatcccctccttatagaaatttcgtcctcgaaatttatttaaactagtcgggaaattacccccgtgtttatgattctaactctcaaattgttgtttcgattccgctatatttttttttcttcaacactttcttaactagtgtaattgtctcatttcatagtacctcctctttctagtccaaaacttggacaagatatttttcccatataataaatttgtctgaagtttaacatcatcacaactcaaaatacgggttgagtctaatacatattttcttagcttggagacatgaaactggacaacgcaggagttaaggctaactaataggctatctggcctacttactccagtgaacaggtatctagtatttctctcgtaccacacttattaaggtacttaatcagtggtacatttaattatcagttttaaataaacacctcgtcaggaaagagattattctaagataatctaacctttatcaaatatgctcacaacatgtttctaatattcctttaatcttctaagattacccacctttcagaataaaacattatactatttttgctttaacctacatggttctcaataaccttctttaattcttaa

SEQ ID NO: 34606 - DNA, 1631 bp, Cannabis sativa
  modified_base (1408)..(1416): a, c, t, g, unknown or other
caacatcagtacaaattttagagataaaacagagagaaaagagatgagaaaaacactgtaattatttcagattaccaactcgtacctttgtgagttggaatccaagttttgtaactcttgaacattgaagattcatagtggaacgaggcgagctcgaagaggacatacccagcacaattttggggaacctctataaaaatttggtgtgttctctccatttttcttttctgcatttatgattacatttatctgttttatatatatgtttttggggggtttgattcgaatttgggaaggggttgatctgggttgatttgattctgggttggtggtgttgtatttgtgttctttagagaagaaccacaaagaaggcagctaggttttcttaggttttctctggtttttcatttgtagccgtggatgtgtgtttggggaaataagataatatatatgtgtgatgttatgtgttttagggtttctgaatatataaaaacgacctgtagcaattaataaagaggggctgtcgttttgcataaaagcaggggaatcaaaataagggctttgactggtaaaagggtcaggtttgactgtaagaatttaatttactctctactgtgcgtaggatatatattcttacattcccctcctaccaatgtaaggtttcttaactttatatgtgtttacattcatatttagggtgttaattaacatacatgttagaaaatttagatcctggtaaaataatccccaacaataatgaccttgcatattccatattaactcagtcttggtattctcgtgccatgtgtcatcatccttgccatgtcatcctcatcaaaatttgggtaaataaaatgtataactaattataatttagaggttattcttatttataattggcccaaattaagacttattattattttttttataataatttagaagaaatttttgaataaagtattcttaaatatatgttctaatgtagtttgatattgatatttggctatttaggattttgcctccaaactatagcatatgttttattgcgcccttgaattttttagctcgttaaaaatagttcctggactatttctagtgttgtaaattggtcatcctgtcaagttttgtcaaaagtggtaaatagaatgatgatatggttatttagacaattgccacattagcgttacatatgtaattattttgaaaagaataattgttttcttttcttttttaatttaatttatgtaattttttaatcattaattgatttttaatttaaatacaatcttttgaaaaatatacaattttagtttaaatgtaatcttgaatatagtatttttaagggattatttcgcaaattcacaaaaattacaaaaaatacggttgtacggaattttaaatattnnnnnnnnntttttgattttatttacaaaaaatttggtatttttatattgtactcttgttaatttgttgttgatgttttgttatctatattttattttttgttgttgttttgatgttattttcctgttatctttttgtagtattcttattattttcgtgttgttttataaaaaatcgtaaaaatgtaaaaaaaaaaaaagtcttaaaacgtaaaaatgtaattt

SEQ ID NO: 34607 - DNA, 1728 bp, Cannabis sativa
  modified_base (41)..(51): a, c, t, g, unknown or other
  modified_base (443)..(448): a, c, t, g, unknown or other
aaaaaatacctagcataaaatttactatacgtgcctcgcannnnnnnnnnnactagtatatatatatatataactatttagccgtgtagcaaatcaaattacattagcttttttcaaaaaataaaaataaaactaattaatatcacatgccttattattcaatatatatatatctctttagataattagtattttattccttatttaaccgtagttgtgttgcaaaattatttttgtagcttctcaatttttttttttttttttaaaaaaatctatcttctattctattcaatagagcaaaaaattttaatatagcatctccttcaataataatcttaaattgtattgagataatagatgtggtttgaataataataagaatacatggagttatttcaaggagatggtatccccaaaactgtaatttttttaaaaaaaattannnnnntagtatatggagtaatttccctaaaatatatatctctatttatttttttccttattttttcattttttttattttattttcttacaaaaataataactccagatctatcacctctttttaaatttttttgtaagttaaaatgatagcgagttagtgagatacggtaataacaacaggtgatatacaatgatgagaacaattttgaatgatcgagatatacagaagagtgttatatgaaccatatggggcttccattataaaaaagagattttgtaattacatgtcaagctgtcctatttgtacacctaacttctcatattattcaaaaaaaaaaaaaattatatgaaaattagtaattttaatttttttttaaatatccgtcgcgaagcgcgggttgttagctagttttgttatatagacacactttatatagaatagatatataaattcacacttagctttagatatttaagtgacgagaattaatttattcaaaatattcaagtgagggatgaataattttattcaatggtggtattctttttcatttgatcattagcaaaatgatgagataactctcaatcaccatatccaagtaaattttgataagtttgtttatatgtacgtcgaaacgcttttcatcacatgagtatagacatatataagaaaagataagagagggtattataatgagatacaccttgatattaattgatcttatcaataaagcatattcttttctttttgtacgtagatgctttagtttaattatgctttatgtgataactagacatgtggaaataccatttatgtaacatatatggatttcattatcgatgcttggcaaagtacttcatacaataataatttcaatacaggaaagatcgattacccaacaaagaatatcaatatagtacttcataatttgagtgtataataactatgattgagtcactgggtattctcatgactaaacagtgtacatttctaggtatctgtatatatatttagggagattcgttggtatttgtttttaacgtggaaatttatttaattttctcatggacgatctagacaaattataccttaatttttgtttatatatatataatattatacattatagttataaaacagcacctcttacttatttttgaaaaattataaataatttagggtatgtagaaaataaaatttaaaattatctgttgcacgattgtaaaaagaaatatgtaactaaatatttaagtttatttcatcactttaaatattcaaaatat

SEQ ID NO: 34608 - DNA, 3621 bp, Cannabis sativa
ttctgcaacagctctgaatccacaacccgaaaatagcatagctctgctgaacatgaaaatttcaaaagcaggaccaccagttaatccataacctacataatcaataaccgtgctccagccctgacttggcgaaacattatcctcaatcacaagcctcatgaaagcattaagatgtctacttaagcaatccggactgaatacaagaatttcttcagcatcagaaagggtcataatttccttcatttcatcagttagtcgcatccaaaagtttaagaggatcagaaggcagtcctgccaagttgaatcatctggaggagtgccatatgaatgatatagaggtataattacagtcatatactgctttataatgtccaaagcatcagacagggccaaaagtttgatatactttctgcaaaattcaaagctctgctcaagctgacatataaacccctgtaggttttcaggcctcttatcagaaaaatctgtcctagactttgtctccaaattcttcaacaaaccgaggacataatgtttgtacacatcctttgacgacacgaggccatctggcactgagtcagcataaatgctatggaggttttctgccatctttgctaagacttccaagctgctctcagcaatgtgttcatagatttcaaggttgaagcactcaaagttcaaacctcccagtccagcgatatttttaaagttgatgtttgaaataaatgaaactctactgcattcttgctcaagcatcgagtaataacgagcaaatccaaaaccagataaattagcttggtctgggtgtatcataggtaacgaatttttggtttcttccagctgcaaatagcaatcagaaagcaggccaaatatgtaagcaagtcgcaacttgtcacgtccatcaattgcaggatatacagcagaggaaattgtttggatggtctcgatagcactgccaattatttcttctttacactcagaaatttcacgcataatatcctcattggtccaaacctcagaaacaagcaaagaacttagatactgttgaagaacctgcaaggaaattgagaaaattaatcacttcaatggatcaaaatggtttatctatgtacctccccaatttaaaacttgcaaatattcatacctttgtccggctcaagccgtaagtgttggctaattttaaaatatccttcagaatgtacttcttctccaactgtacagactcaattaaagagaggacaacgctctcaatgtattgcatgtccccagacaaaaaccgagcagtatcaaccccaggaatgatcttttctagtactctggaacggtccgccacaaacttttgttcttcgagttttagtttccattctctccaaaatgaagactgaactttgtcatttttgcttatttcatctgaaaagaaagtacaaattagatttgcaagcatatgatagaaaaaaaacaataaagatatcagggacatgtatagaatatggaacatgtaaatgttcaccagtgaccgcatagactcattatcaaactctatttgataattaatggaaaagccaatcaccagtacctgttgtctgtttttctttaaattttctcagcagcatctcccttctctgagcaggaccttcacactcgaccccgtagttgtgtaacaagcaatatatcattcccacattcatgatgctactaatttcttggtaatcttttcgtcttctcagctgctcttctattacttcaacaccactaaaagcatccacaagatttaacagaaaggaacaacaaataatgtctttctcctcagtaataggaggctcagtagcagcttttgctagagaggcaatcaaatcatctttaggagcaaaaccgtttcttgctaaccaggaaataacagttaccacagcctgtgttctcacactcacatattgtgttctagaaatcaagccataaattgaactatcactgctttcagattttttactcagttcaagtaaccatggaagttgcaaagcagcaaatgacaaaagttttccattttctactaaaacagattcccaactgcttccattctccagaggtaagtttttagaaacagaagaaagaatatcttttatattactgatatgtacatttcgatcctcatcggcagcaccttcaactgcttcaaaaccaccttttaggtgaactatgccgtctgaatctaacatatttgaagaaccttgaactgagaaatttggagagtttgacccagtcaacgtcattaaagtctcacactggccttgcatatctagatctttccatgcagaaagcaactcgcttatagattcttcatcacaatggctcaaagcaaaaccaagtaattgttttcgagaattaacatccatattttcaagtgccggaccccttgctattgcagcacataagtcccaagcttgaccatgtcctttcttggccaaaacaaggcagagatcaagtgccagttgcagatcaccagcaactgcagcttctctagcaatagcttcctgcacagcacatatgtcatctggagcgctaagtccgagaagtttggcaatctcaatgatttcatcaacatgtagatatgctccggtttgacttgtgatagccattttaataatttccatgggatcttttatttgcctgaattgcacaggtaaaagtgcaactccaagactaggaagcttaacagtaatggcatcaatagtatcaagctctgctttaactattccactgcttgagagtagattcagacattccttagccttccatatctgaataaagttgcagtcatgcaatatatgagaatataaaacatacaaccaattctattctcagcttaatttcagctaggttatcattaggcaggttcaacgttcattttaatggtaaaacttgagtttaaatacaaaatgtatgcaatcctacttctttgagaaagaacatgaacttgactaaacaaataaggaaacatacgaacaacatatttatgacctaatgtagctaaccacgataatatgaggctattaccaagatagtctaaatgtaacaataataaaaaagcaccgagatagtctaaagcaatagcaataataaaaaaaaagccaacttgactatgaaacgtgcttaataaataacatgcagatgcaattaactttaaggatattgacaaatcatcataacagagggttgacaacacttttggaacagataacacaatgcaagatggtatctaagaattattatgcattgtaaacaaccaaataaaaaggaaaaggaaaacaagttgcaattccacttgagcctagctagtctcgagtggtctgggatccatgcccataaatgtacgttatactattgggggaacaaaaaaaaaacatagggtacataaaacaacttaaacttgaagcagaaagaaaatatttactccaatttcatacttacttcagggcaagcaagacttgaagcagagaaaaaatattcccttgcagcttgaatgacaagactctccgctttatctgatgccaaggcaacagaacttgtaccccttaaatagtttctagctagagaaaacttcccggctttaagcagtcctctacaaaa

SEQ ID NO: 34609 - DNA, 1441 bp, Cannabis sativa
taactaagcgggctttacaaaagtcctccaaatttagttctatcagatcaactgataactcccttccttccacatatataggaagaaatcaaacccacctattggagataaccagctctccagtaggcagtaaagttctgaagcctctagaaagtacatcactaggcctattcaatttctcaattattctacttgaaatataagaatgcgtcgtaccaaaatcaatcagaacaatcaataaagtaccagcaacagaaagctgacctgtcgcaatggaagggccggcatcagcctcggcctgactcagggcaaacacccaggcaggagcaggtgtatcatccttcttttgttctggtcgtagtaactgtgggcaattcatcttcatgtgacccactaccccgcaatgaaaacaggccctggccttacactcgccatggtggcgccttttacatctcggacattcaggaaaagtccgccaattttcattcccgccacaatagaaaccttggttaccctggaaccttttgtttgggcctgcagatgcttgttcattaggccttttattgcgatcaccagagtcagtacccctaccagaaccaacacttgatgtttgcttccatgaatctcttctggcaatatttttctttcgtatctgatcttctgcaccctcaacaactagggccaatttgactatctgggcataagtccgaacaaccctaagttgtttagcaacaactatcacatctcgtgcaatatgttcatccaatcctccaataaactttacttttctagcagcttcagtagccacttcatctgaagcaaatttttccagtcgatagaacttggtggcatattctgttactgtcatgctgccttaagtcaatcgtataaattcttctgcctttgctgcccgaatagactcattatagtatttctcgtaaaataatgctcagaaagcatcctaggtcatgttattcaggtcatgaccttgagacacaatctcccaccaaatacgggcttcttctcgtagcatataaatagcacacctgactcggtcattatcctcgacccacataaaataaaaaatggatgttatcatactcatccactgctccgctttaagtggatcaggaccaccctcaaatactggcgggttctgcttcctcaactgctcatacaactgttccaaaccattccctgcatccggtggcactactagaggtgtcggaggatcaggattagggtttagagcaagctgagatcattgctccctcagctctcgaatttgttcaccctgctgccggatggtctcctgcatcgcgacatataattcctcccagtttggtgctagtggagggttctcgccctcaccagcaaccccgagcccaactagctcgcgattacctcagtctgcctggggtgcataatctatacacctgtg

SEQ ID NO: 34610 - DNA, 1594 bp, Cannabis sativa
  modified_base (463)..(463): a, c, t, g, unknown or other
gtgatagatgcaagtgatgactcgtcggaggttggttaacatacgtggctatccactgacacttgtcgcatttctttacaaagttgaaagcgtcttgccacagtgtaggccagtaatacccttgtcgcatgatttttaaggcaagggaattaccaccagtgtgattcccgcagatacccccatgaacctcgcgaagtatataatcgcattcttccccatcaatacatttaagtagcggctgactgaagcttctgcaatataatctcccatcatggatgacatatcgagcagctcgatgtcgcagttttctcgcttctatattatcaccgggcaagatattcttttccaagtaagtgattattggagtcatccaagtaacttctctggcaacatctatctccatcacttcatctcgactcaccgtcgggtgagacaacacatcaacaggaatcacatcgagcantttagcttctctagttgaggccaagcgggcgaaagcgtcttcatgtgagttatgagcacgcggtactcgagagacaactactttcttgaacttctgcaaaaactctcatactatggcgaggtacttagtcagacgcctgcctctagccagatattctccgtttacctggcatacgacgatttgggagtcgctaaaagcctgtatgtattctatcttcatctcatgggcgagctttaatcctacgatcaaagcctcatactcggcttcattgttagatgcagaaaattcaaatcgtaaagcagcatgtaccttaaaattgttcggactgataagtatgattccaccaccggagccttcgctattagaagcttcgtcgacgtacaaagtccatcattctccatttggtatgacagtatcagttttttcttctacgagagccacctcagtacttggaaactcgagaatgaagtctgccaaggcctgccccttgatcgtggatcttggtatgtacgtgatgtcaaactggcttaggtctactgaccactttaacaaccttcgcgatgcctctggcttcgctaagacttgcctcaaagggtagtttgttaaaacctcaatgctatgggcctggaaataaggtcgtaatattcttgacgatattaccagggcaaattctagcttctccatttgaggataacgagtctctgcatctaacaaatgcttactgacatagtacaccgggtattgtcgaccttggtcttcgcagattagtaccgaactaatcgcatattctgacaccgccacgtaaatggataagacttccccagacatgggttcggacaatattgggggctgtcccaaatgcatttttagtgcttgaaaagcttcttcgcattttccagtccattggaacttcttgttgccttttaagatctgaaaaaaatctttgcaattatcagaagatcgtgatataaaatgatttagagcggcgactttacttgtgagactttggacttcttttggcatagtcggggatcgcacttctactaatgctttgatcttcgcggggtttgcctctattcctcgctgattaaccataaacccgaggaatttccctgaaccgactccgaagac

SEQ ID NO: 34611 - DNA, 1730 bp, Cannabis sativa
  modified_base (648)..(657): a, c, t, g, unknown or other
  modified_base (766)..(766): a, c, t, g, unknown or other
tttgattgccatatgcaccaaatcctccaatttcacataatggtgtagttcaactgtattaacaatctctcgattcaatccattcaaaaaccttgccattattgcctcccgatcctcttcgacattggctctaatcataaccatctccatatccttataagactcataaacaatcttgtagccttgatgaagaccttgcaacttgaggtacaagtctcgataatagtgagattgtacaaaatgacactttatctccctcttcatagcctcccaagtctcaatctcacattctccattctacctcctgttgatgcacaactaatcccaccaaacaatagcatagtcagtaaactcaatgacagtaagttttacctttttcatttcaaaatagttgtggcaatcaaacactaattccatcttcttctcccactccaggtatgcttcaggatcactattcccttggaaagcaggaataattatctttatatttcccaaataattatctacctgattcctagcttctctatcccgactatacctcctttggttatgtaaagaccgcttagctttaatttgaaaattaccagataattagggtttaattatggaaattatttattaattctaaattattaatttatgatgatnnnnnnnnnntcagaatgcattttatatgtcatatatagaaatttaataattttgtatatattcagtgcccggcaacattggaacgcggtgtttgactattagaatcacatcttagtanttttagtatagcgggacaatatagttagacattgggaatgtcgggaatggtcgggattttagaatttcccaaaataccccttagtgaccttttatgattttttttagggataaaggggcaaaatggtcattttgcttttgtgtgttttgtcttttagtgaaggttaattagtttatatagtctgaaattaagttattttttaattgataaattaattgaataaaacctaagttattcttcattttacaaaaatataaaaaattatcgaaaagaaggaaattctctctctctctctctctctctctcttgaaatccctagagcagctagggttcttatttttgtttcttcaattatgtggtttctagcaaggttctagtgattcgaagctctacgtaagtttctaatgctttcctctttgatttcctacgttttaagttatggaattatgcatgccgtgtggatttatactactgtagctgttgttgttgtttgaattgtgtttctggggtttaaatatgattagaaagtttgttttgtgctgcttgatggctggttgtgaggtttgttcaaagtttgagcttatgagctcaagctttgctctcacatggtgaaaattgtttctgagcttgtagtagtgttttattgcttgggatatgttctttatggtctaaatatcaggtctggaaagtttggtaaactttggggttgaattgaagttgtggtggaattttgagtgattcccacagtgaaccagaattcttgttcagaggaacctgtaggaaccggaattccggttggtccccaagaaaccccgcagaacaagaattatggttgggaaccggtctaccggtttgggcgatttcgggaaccctagtttttcccattttttgatgtttagggtatttccatgttatttatcgatagggaaacttttagtttcaagttctagtccccgggaagtga

SEQ ID NO: 34612 - DNA, 1737 bp, Cannabis sativa
  modified_base (318)..(318): a, c, t, g, unknown or other
ctaattacttctttatcatttagttccattaatttactagtagaagtataatttagatctcatcaaaatttgtgcacaacattccagttttagaattaatacttcaagggaactagcattcgattcgttaagaaagttaggattccataattgtaaattatgtttccagccatcgacattattatattcccaaaatagaagttgtaagattcattttctttgagaaactttaatgagtgaatcaaagaaactaataacatgaacaggagttcatgataactcaagatttaggtcaatctactattgatcatcattatnatatgaattaggtctttatagttaatggtatgttgataaagatagcttcattcatatcggtcattatcatatataatctctattatatacattaccttcactttgatgtcatactacatctgtaatttgaaccgagattacttgtactaaagaacaggcattagtgaaccttactagcaactattgattaatgatttcataactttaatatattgctgattgttttattcatagctaagtggtcttagttctttgcacatctacaagccacatcctcatatatgaataaagaatttttaaatatttaatataaattattcaataataatattaataacttaacatccatacatatatcaaatgtttagctcttaatttaataatcaaaaaatatctttacaggctttttagggtataaaccctaacaagtcctgcaagaaagctcataatagccatttgctctccttggcgctattgaaccttcagttcaggactaaatggtagtaacacattaagctcttcatatgttttcttgaattccataaagtaattcataagagactgatcttatttctctgcacgataaaagactttgcaaacatcatacatacgagataggtttgtcttttccagaatacaaaaatccaagtaatcccttagttctttaaccaattcacagtgattaatcaaactaataacatcattatcaatagaattttgaatttgaagaaataagcgagcatcctcacgtaactacatttttcttgaatcgtctttttctttgggaaaatcatcagttaagtgatcatctttgttaatactttttagataattcgaatcatcttaaaccattccaaataattcaaactaatcaatttatggcccgttattttaaatatcacaggaattacatcagaaacaacgtccactgattttgggtctgattttgtctctaccatgatcttgaaagcaaaaacaattaaaaaagaaaaggaagaaagtgaacaacaaagaaagaacacctaaacacgaagaattaaaaattctcaaaccacaatatgagaagaaccaccagagacaaatgcaaggaggacatagataattcagaaaaggagcataagtaaatcgctgtcgaattcaaggtcccagccgcccccatgcaccgacgtgtagggaagttctccgcgaattagggtagcacgtgagcctcacacgtggtatttctagtggttgaacttttgggttttgatgatcgacgattgggaagttttcctgtgtgggctatgagaatagaaacacactccaaatagggctttcgtaaaaaaccctaaattttttaatagcctaaattttgaattcctaatctagaggagctactatgccatgtaaataatggtatgtatttatacacaacttaga

SEQ ID NO: 34613 - DNA, 1283 bp, Cannabis sativa
taattccataatcgcaattatgtaacctttaaagaagaggcaaccgtcaatcaagtaaacttttaaggcgtcacatgtaaatttcaatacatgattgtaattacgtaacccttagagaagaggcaattgtcgattaagtaaatttttaaggcaacaataaccaacttaattgtttcaaatgggaaccaatggcaaattccaaaagagtaagtacgttttctttaaagaggatgcaaaggtattaaaaaccaacttaattgtttaaaatagaaaccagcaacaaattctgaaagagtaattaaaggtttttctttaaagaggaggcaatttatctatcaagtaaatttcaaagtcatgaaaagttaatttcaatacttcaaaaccgtcggttgatccaaaaccgtttgaacaatacaaattctcacacagtggcaaaaggcaacattcaaatatctttgaatttttgaaacatctaaggaaacattatctatcaagtaaagttctgagataacaaaagttaattttaacttctgaaaaagcaaccagcatcaaatttccaaacaacaattattctttatcgttcgaaactgtttaaaaatgaacaatacaaatcttattaacagtggcgaaagataacattccaatgcacatttttataaagtaaattttttagacaacaaaagccaattttattatataaaaaggcaaccagctgctaattgcataatcgtaattatgtaactgtttatcaagtaaacttttaaggcatcacaagtcaatttcaatatttcacaaggtggcttagtaccataaggaaaaattcaaaggtatttttcattttgtaacaatggaagaaagcaattgtcaatcaagtaaactattatttatacatgacaatatattttactcccaattatttatttccttaagtcaactagcaaaaaattcgatcaagttaaacaagttaaatatatacatgtattaatataaatatataccttgttgatgataaatgtctatggaggaaggtttgtgttagcaggctcaagtgcagcatgtaacaacacaagtcacaaccctttctccaacaactgctgctaaaactacaaatctgttataaaacgatttcataagtctaatgcacatagaaatctaaaaggatttatccaaaatgaataacgtcagaacaactactagaccacacatgagtttaataaatgtacttacaacagtgaaatttataggctccataggagccaaaacaatggaatttgttcttctct

SEQ ID NO: 34614 - DNA, 2188 bp, Cannabis sativa
tttctatattaaagcacttttaagaatatgtttggatctgtgatttgtatatttcttgagtgttttataaaccctaacatcaggtattttattggagttgagaactgaagattaaacataaaccatgtgaagtttcagatgcatgctaattatttttaatatggctgtatatatatatatgtatgttaattatttttataagcaaaatatcaaatcttttgtgttgtcttttcttagatcatattggttatgtaaagttattttggaatcaattttccaaccacatatattgacaataagttggagaaaacaataatgttataatttctcactcattatttgaaatttttttcaacaacattcatttaatgtagcagataattctacaaatattatttctgttaattaaccattctcttataagtggagggtccaccatgatcaagctttgtaacaataaaccatgcaagttctattaataagtggtgtctaattttattcatatattcaatttaatatttggttgttacaagacaacacatgtgattctattcaaataccttcagtattaattgtcttttcaatatatgtctcacttgacaagacacaagtttttactataaatataacaacctttagttgtgtcaaccaacaagtgaagtagtactcatctaattatctctataatctttttctttctacatttttcttctacaatattcataatgggtttctatttgccaggagttgttccaactaagaaatttcttcgacgatctttgtctaactcgagcaaaggagcatcaaataatgtcgttcatgtcccgaaaggacatttagctgtttatgttgggaagaacgaaaagaaacggtttgtgattcctttgtcaattttaagtcactcttcatttcaagagttgttagttcaagctgaagacgaatatggatatgatcatccaatgggaggcctcacaattccatgcagagaagatatatttattgatctcatatcaaatctgaattaataatgttattcataaaagtgtggcacattcttttatatatttagtaaaactagaaattcttttattaatcttatcatttttcctcatcatgtggagtgggaaaagagctcccagattgaggaataatattatacatggatacaatgttaaatgttattgttatacgagtttaagttttaaacatatcttcatgtgcttgataattattgttacagaattgaaatagagtaaatttgatattgtattttgctttcttttgaaattattcccacaaagctcgctatatatatataactggccaaagttactcaaatgaacctttataattaggatatgctttatttgataagagagtaataacaattacaagagattaaacttttcccatgtttgttgccattttagttaattattgtatgtgtttaaacttaaggcaaattaaaaacaataagatcttgcatcccctccggtatcacttcagtttgaaagaaatccttcacggaatttataacagcgtttccaacaatatgccaatatttttgaaagaatttaggattcataccatctggtcccggagacttatcagggtgcatttggaaaacaacatctttcacttcttgatcaacaatgggccgaagcaaactttgattgtgttcctctttgactcttggcaccacacactcaagaatatctccccatacaccatcttcagccttaaaaatttcattgaagtaatccaccataacatctcccaaaccattctcccaagttctcaaaattcctgtagtatctctcaaatgaataatttgattgttgcgtttacgagccgatgctttagcatgaaagaacttgctattgtgatccccttctttcaaccacaattgtttcgaccgttgtcgccaaaagatttctctttggttaagcacttgaaacaactgttgctttgcttgtttgaacctttgcttcccttccacatctctcctctttttaaattggttcatggtcttgttacattgctttatttgagaagaaattgattcctaagaaaaagaaacctgatctaatgagtgagttacgacccatctctttgtgcaatgttgttgccaaaattatcaccaaggtcctggccaataggatgaagagtcttctttcagaggttattt

SEQ ID NO: 34615 - DNA, 1696 bp, Cannabis sativa
ccaagttcttgtatggagttgaagcccaagtggggaatgcacagatcaagcttcaatgtatgagtgctttcttaaaagatgctgatgctttggtaacaaatggtaataagaaagttcgccttttggttgtccaagtcagagaaaatgcttatgccttagaggatgttattgagacttatgtcctcaaagtgactttgaagaggaatgaaggtgtactaaaaagatttattaatatcttcagagaaggaattgatgtccacaaagttggaacagatatcgagaagatctcatccgacattgatacttggacttcacagttaaaatcacttggagtacagagatcaatacacgaagcagatgaagcttcgtcaagcagccatgtccaacagcaaagacagttgaggcaagcttattcttttgttgaagacaaccatgttgttggatttgataatgatattaaagtgttggttggccttttggctgaaaaagagaaccctcataagcataaggtgatctctgtatgtggtatgggtggtttgggcaaaactactcttgcaaaaaaggtctatcagcatcctcatgtcaggactcactttgactgttatgcttgggcctcaatatctcagcaatgtaataggcgtgatgtattggaaggaattttatttgatttcacttctcccaccaaagaaagaagagaagaaatcaaaaacttaagtgatgttgaattagcaagggagcttcacaactttcagaaacagaataaatgtttggtggtccttgatgatatatggttcaaagaaacttgggatcttctaaaacatgcattccctactactcaaggagacacacatagcaaggtcttactcactactcggaaaaatgatgtagctttgcatgccgatccacatggtttcatccatgaacctcatttcctcaatgacaatgagagttgggagctatttcagaataagtgctattctattggaacagatccatcaagtaatatactatacttcattctttttaatattcttcttatctttatatttatacatgtcaatacattcactttgtatattttcatattatactgacatcagtgtgataggatttaagtggcagagctccatttaatttaattttacgcataggttttgacatgatgacaatccagtaatattattttgtaaccctcatacttaaaagctaaatcataattgtttttgtgtattttcaatgtacaaatttagattcaaatgctgatgaagaaaggaagaaagaattagcggtagagatgcttaaaaagtgctctggtctgccattagccatcattgtgctcgctggtcctctatctaagaaacacaccatccgtgactgggagttaatgaaagcaaatgtgatacactgcataggtcaaggtgatcaacaacatgatgagaactcgaaataccgtagtgttcggggggtgttaggtttgagttacagcgagttaccatctcatttaaagccttgttttctgtacttggctcgttatgctgaagatgtcccaataagagcaaaagagttaggtcttgtactcatagcacaaggttttatatcgcgaagaagagggtctgtggaaactttggaggaagtggcatatgattggttgtgtgagttggtggagaggagtatgattcaggtcaaagaaatgagt

SEQ ID NO: 34616 - DNA, 1310 bp, Cannabis sativa
gcaaacatatagacacaattcatgacagacttaggccttattgctacaaagtcatgcccttttgggttgaaaaattgcaagggccacataacagaggcttattaacaaaatgttcaaagatcttatcggccgcaacatggagctgtatgtggatgacatgcttgtcaagtctaaaaaggttgggggcatgtggaggacttaaacgaatgctttaaaatcatccgcaactacaacatgaagctcaaccccctcaaatgttcttttggagtaggctcaggcaaattccttggcttcataataatgccaaaggaataaaagcaaatccaaacatgatccaagcccttttgcacataaagtcacccacaaccataaaggaagtacaaagcctaacaggacgcattgctgcacttagcatgtttgtgtccaagtctatagagaaatttgtacccttcttcaacaatctcagaggcaacaaaaaatttgagtggataatgaaatgtgagaccgcattctgggagctgaagaaacaattagctcaacaacctgtgttgtcaaaaccccaagacaatgaagagctagacgtgttcctagcagtcacagagcatgctatgagtgatgtcctcacaagagaagaagacggtgtataacaccttgtataatacatcagtaagagactagttggcattgaaaatcagtaccaactcatggagaagctgacctagagcttgctcctggcgtccagaaaactaaggccctacttctagggacaccctataaaggtgtacatcgatcaaccattgcgacaggttttacggaaacctaaagcatcaggccgactacttaagtgggacattgacttggccagttcgacatcacatgtcaaccaagaacaaccataaagggtcaagcccttacaaactttgtggctgagtgcacaaactcatctcttaaaatctcacaagatccaagagaaacgcaatagccagagaagaagcaagggcaagatcagtagcaagaacctaaaagaaccaacgtggaaacttcatgttgacggaagctacactgaccaattgtccagtgcaggcattgcccttataacacatggggggcagcaactgcacggagcaatcgaatttggcttcaaagcctcaaataatgaggttgaatatgaagccttaataactggactcaagctagcacatgaagtacgggttgaccacctagacatattcagcgattctcaactagtcgtgaatcaagtcctaggcgaatatacagcttgagataaaaaaatggtggcctacatgagc

SEQ ID NO: 34617 - DNA, 1695 bp, Cannabis sativa
  modified_base (1279)..(1286): a, c, t, g, unknown or other
gacctgtcccattttccattcctaaccaaatagacccaaagtcaataagttatttgtatttacctcattagtgggtgaggtttacatacaagaaccctcagtctataaatataagaaaactcattcatgcaaaaggttagaatctcaatacttaagagctaaggcaaattctaggattcataaacttagcaaacatttgtgtaatactcaaaggcttttccagccaaataacattgactcatggactagaggtcgttaatccttgaaccatgtaaattctcttgtcttgttctttattttgatctatttctttaactttgatataactataatcaatttctaaaattctcattaaacacaaggggttatgaactttggctagaaactctacaaaaatttggcaagaacacttgtgtaaaatattccatagccaaagagctttaataatattgactcgtggactaaggcttattaacgccccaaccacctataaatccttgttacattatctactatttattcttctttaagcttaatttctttattagtccgtttttaaaaatctcagtaaatattttggtactttcattgagagcttgaagaaagacttaccatagttgacatcaacaaccatggtctaccaaacccaccactacaaggcctatggctcatgatggtggtgacaatgctgccgttgatgatgtgcaccagctcccccgacaaacgctcaggtgggtaccgttgatgcgtgtcataagccatactgaatttactaaataatttttcttttagatttactaattacatcaatataacaacaaatacaggtcaatcccacgatgactattatcaatttattattcaagaattataactaagaattaaaaaatggatttttaatataaatagttttgatatttataggattaaaattaaaaaatatagtattattaaaagaagataagtggttgaaataaagtggcaaaattctaactagtgaggcccacataatggtcgaccacttaagtgtatttttgcccattatgttattcttttttaatccatattattaaatcctaaaccctagttgaaatattataaaaggaacatgatgctctcattctcatccaacctttcaacctaccaaatctagttttctaactatgtctgacaactagtagatgagagactcctttctatagtaatttcacacattatcattgttcttcatcaatcgacccatagtgatagagtatcatgcccacacatagcaagtcannnnnnnnatcatagtgcggaagacggtggtaaccaacccgaagaaaagaaagagatccaggcacaaatcttataattactctgggacagaaaggaacaagggttaaagatctgagcagaaggagtcattattactctgctgcatcaatgtaaggtttttctaaactcttatgtgtttaatttcattgttttagaagatttcatatttagggtgttaatgaaacgtacatgtaagtaaatctagatcctagtaaaataaattccaacacatatatgatacttctctaaaattgagaaattataactctaatgcttattttttaaaaatatgacatacattgtaaaataatcatatttaatcatttaatataattaattaatactgattgccttaataattccatattctaagtaggg

SEQ ID NO: 34618 - DNA, 1315 bp, Cannabis sativa
actttaagttacacctatttgccaagaaatgtcaacttctacaccaaagtaagacttattatatttcagccaaagcatataatcattaaatcttgaataaccccacttatatatacacttaacaaattgcatgtgttgggcctctttattctactttgtagagccgtcacctcaacttaactttatattgtctgttttaagactaaatcctcgcggttttgttttagacatttttccaaaatgcctcatatcaacgaagtagatggaaacagttatattaaaagaaactcttgtttgctcttttcatgtgggacttgagttaatacctcaataacatacatacacattatttgaaaaaaatctatactatttgctcttaatatactgtttcgttacactcttatttgttttagcatttagaaaaactttttaatctttttttttatttcataattacatatgttgtagtaattcaagatcatttgtgaatttttaaaaaaaaatcatacgaatagtttacaatactgaaattaaaattcaaatagttgcttaaaaaaatagttataggtgcaacaaatctttgaacattatttttaccattataaactattcaatttttctcaaaaagattacatgtcctaaatagtaactaatatataagaacatgcttgctttggtataatcaaaattagaatggaatagaaattacaattacaatgtttagttgagccttttaacatttataatccatttacattgtaatgagtattacactacttgcatgaattctcatgagtataactcataaatgaggattaccattaccaatatattacaaaaagactttaatacccttctctctcttacctctttaccaaatataattgacaaaaaataaaataaggacggtcaatatattaattattcagttatatttcattactatttctattattattattacaactatattccaataaatcactacttaaatattgaatagatagaaagtataccgaaatatttctttaccagggtataactctaaacttaccctaaattatttttacttttataaataaaataagaataatgaatgaatttgtttaagaggtacaggatggtgtagctgaaagggatcgttgtgtggtgggaggagttcaaaattctcttcaatcaattatggatttaatgggttatgtaatgggaatactcatctccaatccacaggtaattctacacccaattacaatatcttattataattttttaattaatttttacttctgaaattatacaccatatattatttttt

SEQ ID NO: 34619 - DNA, 1760 bp, Cannabis sativa
  modified_base (1330)..(1335): a, c, t, g, unknown or other
  modified_base (1361)..(1362): a, c, t, g, unknown or other
aatcataattaactgctaatttcaaaattaaactaagcgggcacaggtctgggtctaggtcagggtctagttccaaatctaggttccgagtttcaatcttggtctggattcgggtttcggtccaggtctcagtcttggtctgggtacacgatgtgtcagggcccaacttcaggtcacagtttgggtctggggatatgtccgagttcggttctagggtgggtccacttcctactcacggtcctagtcttgttcgagggtctcggtgttgcggttcttgttcaagttatagttttgggtcaggcgtcaggtttgggtcctggtgtgagtcccaaatctagttcgggaccgagattgggatgcggttctaggtcccggccccaattgtgtgtctcgattctacttccatgtttgggtctgagttcgggtccaggttcggcatcgagtctatgtctgggttgggatccaggtctgggtttcaattcgggtctaggtttgggttggagttcgtgtcctagtccggttacggttccgagtctaggtccaggtcttattacgtttccaggtccaggtccacgtccaagtcttggtttctaacctcgttctgggtcccggtctacttccagtttcggttctaatttcggctcacaaggtacgtgttcaggtccaggttgcgattcgggactaggttcaagtcttggtctagtttcgggtcctggtctaggttcgagttcggggctgcgtcccagatccaaacaccgactacgggttcagtccaagccccaggtctagatctggatcccgatctcgggtctcggtttggttccatttcgtgtgtcgagtcacgagttgtgtcctagaattaagtccgggttttggttcgggtcttgggtcccggtcctagttccgttgcccaagtctgtatctcgattctgggtccaggtcccgatttgggtcccattctatgttcgggtttgggtcctagtcaaggttcgggctaaagtctcggtctgggtttttatttgggtttgagctctaatttgtgtcttagacttggtcttggtcctagtcctagtctagttcgagttctcgttgcgattccgagtttgagtttgggttcgagtttgggtcagggttcgagtcctagtttgagtttgtgtttgggtctggatctcggtctagttctgaatcaggctccgggagtgggttagggtcttgggtctgggtcaaggttctggtccgagtcccaggttttgatctcaatctgagtcagagtttagttttgggtctaagtcttgggttctgatcaaggtctgggttcgagttcgggtcnnnnnncaggtctatgtttgggtctgattctnngtctgtgtctgagttttggttcgggttcggctttggtcctggtatgtgttcgtgtccaggttcatgtcctagtttgggtccggggcagatttcatgtccaggtcttggtccgacttcatttttcccggtccaggtcaggtcctagttcaggttgaagtctcgaatttagatcaaggtctgggtttcggggcctaggtccttggtctaggtgccccatccaagtccggttcctaggtcctagtctggttccaagttcgggttcaggtcctgagtcttggtttttgtctaggtcgcggtctgggtttaggtccagggctcgatccctatctttgtctgggtttaggttcgggtccttgtcagggtctagatcctggtctcggttgcgagtgtcaggatcc

SEQ ID NO: 34620 - DNA, 1632 bp, Cannabis sativa
tatatacaaatagatcttgggtatattattaatttttctaacataaaccgcccaaaccgaccgatatacaaccctaattataacaaattgtaatttctaattctaaacttaataatgtgaccttttatcaaaaaaaaaaaaaaatatctaaatatataattaaatgaaacattattaaggtttagaatatgaaacttattttttttaactgttatgatttatgttataggagtgtaatgtgtttttggaaaagaaataatagtttttttagtgtttgttaaacctaaattttggttgtgaattttggttgtgctacctactatctattgtgtgtagttttttttttattattatttaaatttttaataaaatgttaaataattttaatattaaaaaaaataagcgatcaaatccgcattattgcagattgaattggattggatttaaactgctatgcggattgaattggatctaaaatttagaattcgcacttagcacaaattggatgttgtttgaccaaaaaagtacgtatggtatcggatgagcagtcttatatgaaaataagaaataggccgcgcttcgcgtgcgattatttataatttttttaaattatatataaaaaattatatttttaaaaattgttatgatcttcaatatacatacatatataataattaaattcataaatttgaaaagtaaagtaaaaaataagaataaaatctttatttttatttaattaaaaaattattatatttaaatttaaattgcatatattatttaataacttaataattgaatgaaaacttttaaaaaataataataattgaaaaaaggttattaattgatattattgtaatatattatttgaatattaatattttttaattatttttttttgaaaagaatattttttaattattgatatatttttataataatcattttttttatcttataatatcaataaaataaaattttaaatttacattgaaattataaatattctaaacataaaaccaactcatatagcgaatgaataaaataaaaaaggcttgacatttttttatggcagccaaagggacaaatatatatgaaaatcatgtctctttctttgataacatatttaagtttctaattaaatattatagaaactactaaagaggcgcaagaattaaacataatatgtatgaagaaccataatttcgggttgcagcgctagttgtaataagagtttctatatgattttttattgcaatttaagttgcagcgctacttgcaataggagtttcgatgtaggatttcgtaaaaatatattaaaaaaaaactgttttgaagtgtaaaaatgaaaaaactccaattaaaaattacaaacgactaaaatttaaataatgagaactacaataatctaagactttggcgatacaaaggttagtcttgaatgcacggttcactcaattatttaattttcttatttactgtctaggcacatggaatacaaaaaataataataataaaacaaatatgaaagctcttaacttttagtagtaattcaattgtataatggaaaatttaaaattaaaatacaatactaaattactcaatatatatatatttatatataaatctattcta

SEQ ID NO: 34621 - DNA, 1008 bp, Cannabis sativa
catatagactaataaatgaataaagatattaattatcattctaattgtgtccattttatcttttttgtatagcaagttatgtaattaccaacaaaaatatgtacaaagggcttacttaaacctagtagctggacagacaaaattaaacttgtggaatacaagtgaccaataagtctgctcggttacttgggggcaactatacacccgtacaaagcataggtaaaaatatatataggtacatatgcaatcatttagaattaaaagaaaatattaatttttaagataataaaccatgataacattgggattaaaagatgcccaaccagccagttattttaaatcaaaatgaaaatattttccaagtttaaaagttgcttggttgtccatattgtacttaataataggcatgtaggctgaactggtgattttttttttaaaacatcagacaacgggagttcctggttctttgtatggatcagatgtatcttcagtggctggagtcttattctcttggttagtaggaaggctggtattggctgcttcaatattttctttggctttttgggcttcacaaaaatcaagataagcctcctttttctcattgaggtaatcaaagttagcctttgattagccctccaaaactcatagaagacgtccagagcagttgtctccaaactttccacctccttttgaaggacatcctattcaacagtaaaagatgtccgctcaaaatcaaggatctcctacatgattctcttcttctcagttagatcattgactctggtctctagattggtgagaagagtacagagagtcccctctcatccttaagagaatttacatcctttgccaaagcctcattgtctggctcaaggtgagcgatggatggcatgtcactaatctccttcttcaagtctttaatgaatttgttagcctccaagagttgcttattgacttcacataattgaatactcttcagctcggcatccttcttggcctcctccatct

SEQ ID NO: 34622 - DNA, 4487 bp, Cannabis sativa
acacatggtgcatgaagcaagtatcatatcactacgtattagaaatagttagagcatctccaaaattctctacattactaaaaaaaaaaaaatatattttatttctcttctacatcatttttgacattcttacttctaaaatcattccattaataggatatcactcttcaaaaatactataattataatctcacacattattatttaattttttagtaacaataattttttagtttcaattttttattaaaaaaataatgataaaattaatgctactatataacattcacacatattcctagaataacattcttttccctccaatggtgtagcatctcaaaattttgccacttcatctatccacctaagcaagcatccctttatttattaccattggagatgctcttagttataagctttagttcaatttatagtttatgttcgaggttgttattttcagttatggagctaactcaagttcgttaaactccaactaactttgttctcattcgctgcctatgtataggcatatgctctgtacaaactatttaattcaattgagataataaaatattgtctttatctctctcgaattctctcatggtatcagagcacacatctcacacttcttccatggccaaatcttcaacaagatcccaagatggttttcctccatctaattctaagcctcctcagtccgagacacttcccaacgacgcctctgctccgattcctccatcttcagctgctcctcgccgatcttcaagacctcgatcttagattggcctagattcctttgttcattcccctattgttgttgatactcattcccaccagctcaagatcgtggaactcttgacgatgtttccaaccccttcttcctcagctccgacgatcaccctggcctcgtcttggtttcctcgatcctaaatggtgcaaattatcagtcatggaagagagacatcaccatggcacttgctgctaaaaacaagacagggccttcatcgatggatctttgcctcgaccaactactagtaacctcctatataaactcttggattcattgcaataatatggtaatgtcttggctcgttcattcagtctcccttgaaattgctcaaagtataatgtactttgatcttgctactgatatgtggcatgatcttactgaaagattcaatgaggcaaatggtcctcgcatctttcaattacaaacacaattaacttgtttgcaacaaggtgatcaatccgtcacctcatattttaccaaactaaaatccttttggaatgaattaaaagaatttcaacccaatacgacatgcacttgtggtgccatgaaggtctttcttgactactacaaccaaaactaggtactgcaatttttgactggtttaaacgaatcatatgcctctattcgtgctcaaatcttactcaaggagccgattcctaacctctccagagtttgctccatgattgttcaagagaacgccaaagaacgcttggcaattctgatattccaccacttgcacattgattaggccatcttcttccaccaatcctcgacgaacaaagaaacccagaccttcgtgttccacctgtggaaaactaggccatctggttgaaagatgctacttcattcatggatttcatcctgatatgggaacaaaaagaagcaagaaaaaggaaatgccattgctcatcaagcctcggccagtttcaatgcagatgatgcatcttgcacactgatttcagttgatttgttcactcaatgtcagcaactaatttctctactcagtcaataactcagctaaatcgctcctcgtccagaacttgctgttcctgcgactgcttccaacatggctagtaacaattcatttattttttttttttctgaatcttggatggttgatagtggtgccacacaccacatgtgttgtaacataagtttctttcaatctttttctcataatcctttttctaaacatgttaccttacctaataacacccaaataccagtacatgctattgggatttttcaaattaaccttgcataatgttctttatattccaaatttcaggatcaatcttttttctgttattgcatacattgacgacacaactaattcagtcctctttaaacctgaaatatgtgttattcaggagcattctcatagacttgtgattgggatagctaagcggcatggcaagctttatttgctgcaacaagatgctactgcaatggccaaaatgaatttatcctttagatagcatcactatgacaaacacaaaggcatgttttaggcatggacatcagaaaagaaaagggaaaaaggatgttgtacttgaatcagaagagttatatccaaaatgtactggacacctttaaaatgagtaactcaaaggcaattagcactccacttgcacaacacttcaaattgagtgcaactcaaatgcttaaagatgaaatagagggcagagatgtcaaagatcctatttgctagtgcagttggttcaattatgtatgtcagggtctgcactagacttgcatagtttatgcacttggtctttagattcatgggaaacctggaaaagaacacttggaggccctgaaatggatcttgaggtactttaagggagacaaagggttggttttagcatgaacaaatagaggaaacacctaaatgtaatcaatggatatctggactctgactatgcaatgtgtattgatactagcaagtctttaactggttatgtgtttaagatgtttggtacaacaatcagttggaaagcagaccttcaaaatttaatggccttgtccacaaatgaagttgagtatatggcattgaaaaaagccatcaaggaggcactttagttagctcgtttgatggaggaatcaagactcaaacaaaaagttatcacaatacattgtgataatcagagtgcaattaaattaaccaagaattgtgtgcaccttgaacgtaccaaatacatagaaataaagctttatttcataagagaaattatggagaaagaagctgtgaaaattgtcaaggttccaacaaaggataactcttctgatatgatcactaaggtggtgtcaagtagtaaattcgagaagttcttgaagctgattgggataggagtcagttgagccctgaatggactaggggacagcaacatcgagcaaaatttcaagaaacttcaatttgcaaccaagttggatatttgttatgtatggttacaagttagttactagtttcatgttttaaaaagttagttgctcgagttgacttggacagcttggaataggtgttagttaattcagttagtattgtcattagcctataaatacccatcacctattgtaattcagtctagcttgtcatatcactaaattataaagattagggtgagagaaaattagttctaaaccattgagagaaaagtgacccttgtaactcttaattggattgatcaagaactctgtatcaaaaatttgatgatcaataagataatgatagttgtttttccaactaagatgtagagcattgcacttagttcaaactcgttaaattcttggtgttctcttttctattttaattcattcaattattcttgtgattcttggagtgataggttcttcaaattgtgtttgtttatctatgtgaacttgcatttagtgcctttattgattcacaacaataaatattatattgaaaaactttttaaaaattataagatttgttaaacaacctataacattttatcagagaaattctcatactggtctactttgtgttaaatgcagtaacaatatgattaaataaagacaaaacatactcaatctataacattatctttattattattacttaaaaaatatatacctcgttattctttttataagagattgatatatatattaggaccaattttcgttgcacaatttattaaatttaaagttatcctatcaacaaataataaaaataaatatataaaagtacgatataactaagtatatgcaaggtaattaaaaataaaataacatttttcctagaagataacatccaaaactacacataaattctattagtaagcataataatgaaaaaaatacagaagtaaaaaaaataatagagataacaaattgctaatacttagtacaatacaaataaattaaaagtaattaaatggggttatatattgtaaataataggcttaccaaaacttgtaattcctcttcaaatggtggaaatttcaaatcttgaggttcctctcaaacattctactatgtctagtcatttgtattggacttttgtgagcaaagtataccttctgttatttgatatatatttttattttgcttaatcaatatttctaatatattttaaaacttaaaaattgttcagagtatgaagacataatttgttttattcttgtttctctttttttctatttgggtaaagtgtataatattgagttttata

SEQ ID NO: 34623 - DNA, 1065 bp, Cannabis sativa
  modified_base (848)..(850): a, c, t, g, unknown or other
ccagttcttacatgaacctagacaagaacattgggaggcagctttgcgtgtggtccgctatttgaagggctctacttgatagagaattttactacgagctcacaactctctttctttgacaagatggtactattttgattgggccacttgttctcttactcgctgctctcttactggttggcttgtctttcttggtcattctccaatttattataaaaccaagaaacaacacataatggctcgttcttctgcagaggccgaatgcggctctatggccttctattacatgtgagttgaagccaagggtcttcacctgagcttgggcatttaatatcatactgctattggtctttattgtgatagtcaatcggctttacacattgtttagaatctaatttttcatgaacaaacaaaatatattgaagcaaattgccactttgtacatgatgctattcaggatggtactattattccttcttatgttcctagtgtagttcaattgactcttattttttcaaaatccttgggtacacggactatttgagttctttctctcaaagttgtgcattcttgatccacatgctccaacttgagaaggtattggaatattattatctattaacatatgttctgataatcgtgtattttaggcatttatgttcttgtaaatatcctagacttgagtttaaacttatatctattgagaggagtgagtttagccatgattttaggtttttattctttagatttcttcctcaccttatatgtataaattaggataaatactattttggatcatgtgttttgtaaaagttagcaattgtaccatctgttttgttaaatgacannntagaccctatattttttaaaatagtaaaaataggaccctaagctcaatttttaacaattttactttttaatataaccacttttaagataatttctaacacgaaccgatactgaaaatataaccaactttatcgttacatctctagattggattattattaagttctattttgataaaaaaaaaaaaatcagttcagagtcctatttgtacaattt

SEQ ID NO: 34624 - DNA, 1285 bp, Cannabis sativa
aaaatattcatttatcagaaaatcaattatttatttatttccttaaatagaaaattcatttccataattaaaatattcttatagctgtttcatgcatgggcataatatttcccacgggatcattcaatcagctctaacattgcgtgtaatataccccaataatgaaattttagcagataccttacacgggtcatgggtctgtccatacccgccacttagcctatacacacccttcaattctcatacgaagggggcatgacaacttacgtagttaaaacactgccaagattactctaggtctttttttttcttcttcaatagaaacttagagtaaggagttagggtttattgctaaaatattgtaaacacatcaaattcaccctaagaggctaatagattgactcgtgaactaagatttattaacactcgaaccacgtaaaaaaccttcatctttttatttctgccatttataatttctttagttcttaaatatttagttttaaaaatcttggtaaacaattattattttaaaaatattattatctttttttggttattagagtattttagttattggttattagagttataaagatattgagttattgaagttttagagttattggaatgaaaatttctaagttttgcgacttcaaatgatatgtttgattcgctagagaataatatttttagcagataaattttttgtatgatactttcagtctcattagaaatattttttagtgatttttattagttgctcattttctttgtattttatgcagttgaaacatcttattttcaaatagaacatttggagaagtgaaacaagtatcgactgttaatttaggaatgcaagatggagatttttagtaattcaagcatatttttttggcaattttaatgatgttggataggattttttcttcaaaatgtggctgcacatggattagctgtgcatgatctttggatggataaataatttgtttcgctgctagatgactgtctattattttattctttgagatgtataaccatttagcctgtatgacattattattataaatgatattggtcattgctttacaaaaaataaatatctacttataaaaatattaaaattttattagatgaaaaataaaaataaaaaaaaaaaaacttattgggtaagatattaatcaatcacttataatattttttatacaaaaaaaattattagaaaaaattatgaaaagataaataattacctataaaaatataaaaatatttattagatgaaaaataa

SEQ ID NO: 34625 - DNA, 3413 bp, Cannabis sativa
  modified_base (387)..(395): a, c, t, g, unknown or other
ttccacatcgagtttactaatgaaattaaataaatatatacatataatgtagtaaaaataaaaataatatcaaaatatttttggttatgacaggtcgatctgatagtaagtattaaattaaatatttacttctatttggctatatcgaatttaagagaaaattaagaactagaaaaacaataaaaaaaacattaaaataggaagcaagtaaattaatatgtaaattaacgatgattaaaagttagtgttttcgatttcaattgtatctatcgattatagtttaacatgattcaattcctagtaccaaattctatgcaatagtaggtttactcgagtaatttatagtcttctcaggtatataaatctcaattacatgcaaattttctnnnnnnnnnataaattaaacatgtaaaaggcattaaacacagaaatcctataagctatccaaaccatataggtactctcgtcctatatcgaaatttgttcctatttcactatagcataattgacacttacctctaagattttgcatcaaaattataaatatttaattggtggccaggcaattaaaagtaagtaagtacgaatgaaatataatacatagaaattgagagaaaattaaatcacatcaaaatcataaatcgatgtcaaacaatattcatctacaccctaataaactgtttagctactcttgttcatagtagtaaattcacacatattaattcagaatagaagaagagattgagaaaaaaataatgttgaaaaccccgttaagaaaaaccttcacattgattttgctctctaattttcgtactcctgaattgcttgctgaaaaatatcgaagtctcactccttttataactaaagaaaagataaaaaagatacaaaaaaatctaaaaaatatcataagcttgaaattcaaaggggcgggctgcgacatgtaggtcctataccgcgacctgtgtttgcaaatattcacgtcttcatgctgcttagacacgggcctaggcatgggatttccatgcctagccagaaccctcctttatttggacagtgaacattctatgaatttatacctaggcacgcccatgtattgtccaatacgaccttctctgccaaattttaagcctttcatgtcctagcataggtttttaatgttgaggtgctcctccaaagtttatatttttttgccccgagaattgatttatttgaccattttttctatatttcttcaatattttctactttaaacttacaaaataacatataccaaaaagcgtaaaattgcaccaaataagagtaaaacttaattaaaaatacactaaaattatcctaaaattagtactaataaaaacctaacacgctaatcatagatatgaaatctataacttctacaactatcattaatttacaagtagctaaagtgtttaaggataaatacattgaggggtagatcggtaaatattgaggggtagatcggtaaattttttcctactcgacggtaaattttttcctactcgatggtaaattttttcctactcgatgtagatcatctatagaggatctttgattatatagattgaaagaattagtaattcaaatcgcatctatttttggtatataaagtgttctatgtaattaggagtacatttctgatagagtcatgaggaattaataaattaggaaatttactttgtaaatttcagatctacttgttggaagcttattacatagggccatggtccccaaactaactggaataatattattttctagtctcaattaattggttttaattaatcagttagaattctaaataagactatgtcttgtttgtgaatttttaccaaagaagggcacaattgagaagaaaagagaattcaaggtttatttattaatatagagaccttgaaaggtctaattaataaatatatttaaataggaattgtatttgataattatttataattattaaacagatagaattaatatttaaataactagagctaaaaaatggcattactgaagaaagacaagtttgtttcattaaggaaacaaaataatgaaaaaattctaactcatgggcttcattaaggggttctgccatgagatgcattctaagccattgaatctttctaatcagcccatttagctctaattcttaacctaattaatccctataaatagaacattacgggtttcaattcaatagatgactctagactctctcttgtctggcaaacagaatcaaaagtaaactttttattttctattttctatttttgaattcctcttaattttttcatagaattttgtagtctatggtgaattgagagtatacccattcatgtcaaaacaatacttaacatagccagaaaggaattaagggctagagatatgaatggaaggagtcatattatttcgttgtcatcaatgtaaggatttcttaaactcttatgtgtttattttattgttttaggaacttcatatttagaatgttagatattacaaattataatcaaacatatatgttagtaaatctaaatcctcgtaaaataagttccaatatgttccaccattccccactcctcctggtgttggatcgtcatcgcatcctcccaagattcagaacaacaacgacgatatattaaccatcgttagaacattaaatttattgtaattaactttagaacttaactttttttttctaaaccttttaatattttatttatttatcgttagctttagaactttttattacatattaatttagcaaaaatcgaacatgtttaaatattagttcgatttaaataatatcaatatgaatattgttttttttaattatgcttctttaatatctaattttatatttataattaattaatatcaatatatatatatataaaggagaagaataagacagtgacgtggcagtctaaaattgatttaaataggtctatatattctctccttatttctctcattttttttttattttttattagtttttaaacatctatatatcactatatcacattaatataataaaaaaatatatatttttattaataattttttataaaaaaaacatgtgaaaattctaaattataaaaagactttacactaatatctattaacatcataaactcaaacatatatatatatatatatgggtgtaactatatggttacattttttttcttacatgtaatagaaggttaccaataggtaaaaattctatttttagaattaattaattataattaactattttttaaataattaaataaatatttaagaagaccttttttagcaataaaaattgataaatattttttttatttatatataaatctcttagcttaattattttaacaactaagctatttaattataatatttacaattttttt

SEQ ID NO: 34626 - DNA, 1142 bp, Cannabis sativa
atgaagctgaggaagagcaggtgactctgctcaaaaggaggaaaaagcttccagcccggcccaggcctatcaaacatgcaattctcatcagggagcccatttcttctgctaggccacctcctcccgtactcggaaaagggaaagccattatgtccgaaataagaggcatgtcaggtgatgatggacttttgaggcttgtttggacaatcaccttgcacactacttcatcttgtttttgagcttcttaactattatgcctcatgtttgtgatgtctattttctctaaccatgttgctttttgttccgtgtagaaatgtctcagaagatgatcgatgctctgaggaagaggattggtggaagctccagcgcatctcccctggccaagaagcctaaaggcggtgagggaacttcttccaaggaaaagacgcatgctggggaggtcatcgatctttccgaggagctgacagttgcaaacccctccactccaaaatttgcccagtcgacggagtctcaaggagggagttcggataggtttgaccaaacgagaagtgggtctgaactggtgcgtacctctactccacctttgccggtgcttccggaggccaagaaaggcaaggagatgctcgctcactatatgaactggttggttcctggggttagtgagcagctggccggtgccgacaaatgactcttctctggagctgctggtgggatgagtcttgaaggagttcacaagggtaagtcttccttgacactcttctttaagtctctttacttggctcaaatactcaagttttttctttgtgcaggccggtctgaagttggcctacacctaatctcgggctaagtctgcttcttccaagaacacggctttgtccaacaccatgatggcagaggtggacttggccaggaaggatgctgaagatgtcagggcagaactcggagttgttcggacggagttgggtgaagccaacaagaagcttttctctgcccagaagaaaatagttgagctgtccaaggatcttgaggcttttgaccgacttgaggtgatcatcgagactttgtctactgaagtcaatagtcttcaggatgagaggacatctcttcgagcggtcctttgtcgggtgaaggaggagaaggaa

SEQ ID NO: 34627 - DNA, 1391 bp, Cannabis sativa
  modified_base (1156)..(1164): a, c, t, g, unknown or other
atagtatccattttagatgagctattactttatttaaaaaatgatatctttgactcttgcctaaatgtgacactatatcagtttgttggataattttcacatgtctttattacgtgctaaatgtatgataattttttaattgtgtatgaatttatattaaatcttcatgttgttttctgttattaattattgtaatacgaattttgagtcttcattgttggtctaacttaatttgttgttttaatgggacaaatcccaaaagattgtcatccgttaaacaaacataataatgttagatctcaatagataaatatttgtaaatgcaacatctagttgactcatccaaagatgacaacttagattaatgtttacaatatgaaacaatgaaaaagttcataaaataaaaataactttgactcttgcctaaacgggacatcattgaattcttattttaattgaaattattttttagttttttctcttagttttttcatttagaaattgcttagatagtatattattagatagatagtttataaatcatatgcttatgatgtcactctattttcttctatagaataaaaggcgtagatgactatatttcagatttctattcccaaaatgatataaatcattcaatcttatagaatctcttacttttatatgcttactaaaggcaatctaaacttagagttagattaatagtgatggtccaagaaagaaaaactactcaaggaatatatgtataaatttaagtctttgacttaaaattttagattccaaatagaaatttaaatttcaagtttccaagaatacattagacactacaatgtaactttcataagttgttaatacccatttcaaaatggatccgaactgtatgttaatgtatagattatgagttatgtattctgtgaccagaatccacttgaactattctaagaactctttgttgtacctagaccgaagtcatcaaaatagcacaactacattttaatatttatggcatatacatagtgtttttgacaagatcagtctttgcaaagaaaaaatatgttaatatccacttggaagtaggattatctgtattcgaatatatagatgtacattcagaggtggatataagttataattaaattcttaagacgatcactcnnnnnnnnnccttatgcaaagaaatttgaaaatgttctgaaaattttcatgaatttctagtaatgttaaaaaatattaaggtaagtggttaaagatcttgctaactgatattggtggagaaatatttggttatgtagttcaaagatcattaagttgaacctcaaaatgtatccaaacgtacctctcctaaaatttagattgcatattgataaaagtaaaaggtctatgattagtta

SEQ ID NO: 34628 - DNA, 1444 bp, Cannabis sativa
  modified_base (1284)..(1286): a, c, t, g, unknown or other
gttataatttctcaattccggagatttattaaactctaagagtattatttatgctaaatgtgaattatgtaatttttatgatttttgctcggcgctggtagaaaatgcgatagatggccgttagagtcacatgggtaagtctagaacctatttctaaggggggcaaatatttgagatatttagaataccaagtttaagcggggttataatttttgactattttacccctaggcttattattgcttaagttacaagtaagagggcatttttggtatttcacttttgaggtttaggtggctgcttgagagctggacagttggctatttgttttttcagcttgaatttagtggttttaggagttaaataattagaagaaaatcaaaaattcgagaaaattgtggaaactccttttctctctctctctctctctccctttgctcggctcccttagaattagaaagaaacttagccaaaactttcattttcttgggaaataagcaaggaaccaaggtgttaccaagtggaggtaaaccctagaacttagtttttggtatagtttggatacgaatttggcaagtttcaaacttgtttgggttacctggtgcaaaccggctaactggttctacaggccatgtagaaccagttaaccggatcaggggcaggtttcccgaacaatttgatttgttggtttatgttattttcaaagccttagttagttattttctcgataactagggtattgttataagaattatcaatagcagaacccttagtagtgagcttggattcccggattaggtttttggcgtgttatttacttgtttacgtaaatgtgacttagggcatccatccagcatgaggttttccattcaagtagtgagcttggattcccgaattagattggatggccttctgcacatccctagcgtacgtgcttttgtaatgcttattgtctaacgacctgtctaggtaattgcttttaaaggagaaacctttaggcagcatgtgtccagacatttacgagatatcttacattgatcaaacaccacacgatgaaaaactacctacaaaataggggtgttcatcaaaccgctcaaaccgcccgcaccacaccgcaccgcgaaaaaaatgcagtttgaaattcttcgcggtgcggtcgcggtttgaatttttcctaaacctcgcggtgcggtgcggtttgtggttttgaattgtttatatgcggttcaaaccgtaccgcttcgcacattataaaaataccaattttttatatttatttaggtnnnatatgtgaatgtccaacccaaaatccactaattgatatattgttgaaacttatttttttttgctttttttttcaagacttatggtatttttgataagtgttgctcaaattttgttgtatttgtgatagtttaatcatttggtgatagtccaaaccgca

SEQ ID NO: 34629 - DNA, 2709 bp, Cannabis sativa
  modified_base (117)..(128): a, c, t, g, unknown or other
  modified_base (1025)..(1025): a, c, t, g, unknown or other
  modified_base (1138)..(1143): a, c, t, g, unknown or other
  modified_base (1175)..(1177): a, c, t, g, unknown or other
tcacttgattgtcttccaatgttcctttcctggattaatctgatagctactcattactcccactcaacagcacgtgtctagtctaatatataggaaagcatatctgagacctctcannnnnnnnnnnnaggaattctttcattggcctttatcttttctggaataattgagtcccgtaattcattgcgtcactttttttgtttttgtttttttttttaatcaaagcaatttcctttttcttttctttagcagaaaaaacaaataaaatttttattgcgtcactatttttgtttttgtttttttgtttttttttttcaatgaatgcatttttttttcttttctttaggagaaaatgcaaataaaaaatttaagcaatgatgcagccgaaaaaaaatttctacgttggattaaaatcttattgtgggtacatatgtataatgtatacgctattataaagtgtgatacaaaattaagtgactaattatgttatgggtatcataaggtatgaagttgtcatagtaataatgtgtcaataccataagttaatttataatttgtttaagagagtctataaataggtagtggtccccaagaaacacaaacactagagtttttgtattctctcattcctcatcacagaaaatacttttaaaaaatagtgtattcttggaagatcaaaacctactctgcaatctccaacaatggcttcaagttagtgcttccgctcagcttttatcatcatcttcttctttaatttagcaaaggctatatagatttatgatttagggttttctatgttaaagcactttcagtaatatgattagatctgtgatatatatttcttgagtgttttataaatcctaacaagtggtaccagatttggaaattttgtaatatgccgtgtatatataaatggttttctttttttctgtgtaaaatgctttatctcatatgctgtgtatagcgtggatttcgtatatatctattttatataaaatgtggctatataacagaattcttagttnatgagaaattattgggtgacttttgtttaacgattttttttttggatttttactttaactttattagaatatcttattaattaacagaatattattaattttataatattatnnnnnntatttaaaaataaaaattatgtaaatattttnnntaaagaaatttaaatttaaatttattatgtaactgattttattgatttagcgttattttaataattaatcttttgaaaaataagtgaatttgttattttaaccctaaaagagaatttaagttagagaattgcattccaccatgcgatgataaacattccacgctcgataacttctttcaaacaaatccatattcaattcttgttatgagctttggtaaaaatttaaagatcaaaaatcagaactgaatccatcttcctttctttatttttctctcaaaatctctgattgaaaaccacccaagaaataaaaaatgaagaatatagggtgatgtatatgtaccaatgatgcttgcattgtcaatgaggttaatctatgcgacacctgcgaccactgtgtcaacaagacatggtgagagtgtgagctttggcgtcctttggggcttgttgtgttacaacaatgtgtatcaatccatgattacatattaaatcattaattactgttgtgctacctaaagaacaagaacgattgatattgaccatcaagtaattgcttttttattattattattattattatttatattaaatattttgttattttttaaagttattatttatttaattaaattacctgtgacttaaactttgacagtaatcaacaatttttaatgaatgtttaaacaggggtaggctagatctggaatctttgcggaggctacacttaatatgacaacaatcctatgctttctacaacatcattaactaccaaaatttaataaggtgggttgcttctaggaattctcagtggcaagagaaataattttttcaatgaatcacacggtggtggagacctcttgagttatgttagtgacattctcctaaattatatctatatatattagaatatcttttaaggtcatttcttatgttaatatctgatttattgtgtaatatatatatatatattagaatatcttttaaggttatcattcaatttaccacaacacaattgccaattcttgaactcatggactgtggcatggccatatgtgatcccaattctccagagcctacctcaaaaaaaaaatagtgattgtgatgtacagaaaacatgataatgccacagtctcacatatttactagaatatgatcatcaaacatagtagtttttaaaaaataagcttatggggttgttgcttgaatgtgtgtttctaaaatttactagaaagttatttatacttgtacagatatttttggatcttatgttttgttattgtaagctgattaacattaacttattctttcaaacatttttactataaaacatggcagagactgttgctgctattgttgtttagttactcatggttattatttcaggaggttatgtatcccaacaaacaatagtaaaaaaggaaaatcttatttatatatattttaaaaaaagaaaaatatcattgattggtgtctagcttgtagaatatcactcagcccaaagccatatttagactttggtggaaaatctttgatca

SEQ ID NO: 34630 - DNA, 833 bp, Cannabis sativa
gggcataaaacccaacacaaattagggttcataggctcacgtgagcgttttcaccctagaaacctcaatctgccaagcaaactaataaggacatgacttatttgggcatgaaaatgaataggtttgtggataaagtttttatgccattaaatcctcaagaaaagaggcatatgtgcccactctgtaatatggaaatggcattgcccatcaattttggtgggtactgccacataggaatggcagtggtctctcctaacaaaccatgaagggaaaattgttcaattaggttccctaaacaccaaggagtgaaaaacaagtgagagaaactatttcccacctaggaattaccctagctgatcactgtcataacaaaatggtagtgcccatcaaatttgatgggcactgccataaggagatggcagtggtcggccatgaagaggggaagtgagattttttctaacaatgcattttcatcaataatatgtcaaaattaaatgaaagaagccaacaagtggtaaagaaaccacttggtcgaaaactgccataaagaaatggtagtgcccaccaattttgatgggcactgccacaatggagtggcagtggtcggcccttggataaggaaaagggtttcattgcccaagttacattataaacatatatgtatcaaatacaagtgagaaatttcacccaaggctttataggatccatatccgaccactgccataaggaattggcagtgtccatcaaatatgatggccactaccacaatggagtggtagtgatcgaccactacacaaggaaaggggtttattggccaaattgtatttttaaca

SEQ ID NO: 34631 - DNA, 1125 bp, Cannabis sativa
cattacatttattgctctttctctcaatcgatttcccatttattgctccagatccttttggatcgtttgaaatcttatcttcaggggatttccttgtcttttatgcattatcccttttgtcttgtgtttatatcataaatgggtgccgtcgtttcgagctcttcaagtagggaggcgatcattacctgcactggctatggttacggcgtagggcttaggaagggacgttttcagcatctcttctcaaccttcctcagtaagttaactgtctccaggtatatttctctcttcctctatttaaggatctgggttcttagaagatcactactttgccaacttttacctttcaaactgtctgccactgttctgagtcttttcttctttctatttgatcctatggattctctggctcttaacatgactgaaatcttgaaccttactgatcgtgaagctatcgttcatgatattgaggatgattttaggggggataaccctcctcctcaatctttctgccttgtatttcgtgttcttacccctcgtaccatcaaactggaatggtttgaggaggctatgaggaatgcctggattacccgtgcatctctaactttttcctcttatggatcaagtatgttcatggtggaatttgagtgtgaaggagatatgcgaagggttcttgagggccaaccatggcactttgaccattgcttggtcacttgtgccaatcctgctgggcttgacactttgcttcctaaccaactgcgttactcacccttttggatacaagtccatgcaatcccctttggccaaaaatctctcagacttgcccagctgattgggaatgaggttggtgactttttagaggttgataaggccaccatctttaaagtctcaagcctttttctttgtgtccgtgtcctggttgacatatctaagcctatccctaggggtattcttattgactttaaaagcatccatagggaaaaatggcttagtttcaagtatgagaacctaccaaatatctgctatcactgtgggatgtttgatcacacccttaccaaatgtattaggtatctcaagaagtgtgatgatcactcggctccccctcctttgccttataaaattcct

SEQ ID NO: 34632 - DNA, 3374 bp, Cannabis sativa
atcatctttctcatacacaacaccatcagaagatgtaatttgttcaccaccacagttgatcccaaagttagaatctgcagaatcaagaaacacataaaaatttagttaagaaagtagtaatattgattaatacaactagaaaaaaaaaaatagactgcgtaaactctacttacagagggatcgatctcgattacatggaaaatttctctgaaggcagtccaaacctaaaagaaaactaaaaacaaactaagcataaattggaccgataattgaagttaattatccaacaacacaatctagaaactttatatttgcttagctataacctagagcaataatgtgggtgggaagatattatagatagcttcacaacaacaactaacctgttgtttgaattatctatagtaaaattgttgccaaccaagttactgcatcaaaaaggtgaaatataaatactagtcttgtcttcatgtaagtcgtttttttgtgcagtagaacaagcatcaacataacacaaaagtactaaatcatataggtgttattttatggatgaaagtgaaccataaattaaagtgaaaaaagaaaaaaaataatatttcttgaaaggcatacaacaataaattttgttgatcgttaacccaagaaggaatgcttcccgcaaaattattgtatgataaatctctgcaagcataagatatagtacatgaatgttaattttagagtgattaccatggatgaatcctactaaacacactaaaatattatatacgttgacttacatgttgagaagagatgaactgtttttctgaggcaaggtaccattaagactattgtttccaagaaacctgattaaaggaaacaaaattacttagtttgatatattccataatagtaggtactatgatataatgcaattaatgagagacaaggatatatattaattacaaataaataagtgaatccatgttgaaaagagactctggaatcggtccatttaacttgttaaagctcaaatccctgtaaagatataaaagtacgatttcatagttagaaaatagtgtatgttgggtagtgttgagtcccttagtgaacttacagatatttcaattgtgtgagtttgccaatactcgatggaattgtgccagtgatatcattgtttctcagttctctgcaggttatatatgatgagttgttactttgataataatccaagagattgattttgtgttgagaaagagtgttacttacaaagtttcaagagactttatattggtgataaatgcaagagaggaacttgtattagaaatatcactcaaccgcctacatgtatataattcacagtcacacttaatattattagcttaaaaattttgaagatgaaaattctattgagcatgttacacacaattgtactaaagaagttagatttgctaaggttgatggtataggcccttgaaaagagttcccttgcaaagccctgtatcaacacaaacaagtagctaactattgtgaatatacagatatagacattgcaatctaacttttcagttcaacttatcttacaagtcagtaagatttgaccaacttcctatgaagtgaggtatcttgcctgtgagttcattatctgatgcataactggtcaataaaagatcatcatgtcataattagacaacaaactttttaaacttattgtaaatcatatcatgatgagagggtacatagaagaaacagtttacaatctttttatgcttcggagattttcaaatgttgaaggaatctctccactaactccacaactggaaaaactactataaaataaacaatgaaaagaaaaggaatcaggatgagaccaatttacgactctaatcatctataaaaaaacaaagaggcattaatgttacccccaacttacagtatttctaatttggtcaaatcccctagttctggcggcagcagaccagagaaattattcgatagaatgtacctgtattcaaaattatttccaagatttaatgtcaataataatgtgattgaatggtcaatggcaatttaataacttacaatttagatagctgagtaagtagtcccaattcctttgggacctctcctgacaatgcattcatactcaagtccctagtaagtagtaatcccaaagagaatatatataaagaaataaacaagtatagagaaatttttgaatatatcatactaaatttatgtaagtatgcttacaagtattgcaagttagtgaggtttccaattgatggagaaagagaacctgtcaagaaattgtagcccaatctcctacaacaccaagtgtaaatgaattaaagttgtaaagtggtgatgataagaattgaaaggtcagaagaataagcacatacagataggagagaaaggtcagagtccatagctcttctggaatctgaccaacaacatccaggttataaatactcctgcattgtggttataaccaaaactaaatcacaaaacaaagttggatcttataacactttaaagcatgttcactactgttgtaatgtgatcagtctcatgccaaaactgtgtacaaagttagtagttagttatggtagttgacagttagttctgttaactgtcttggttagctacaaatttacttgttttagtttttttttgggtatagatagatagtgttaaatttgttagaattcgtgtgcctatgtaatatgccaactaagcaaccggttttaacaaacttttcaagttagttaaaactgttatatacatgtaggtttagttaaatgtatactcgggtattagtccctataaattcagattcatagtaataaagaaagtattattcatttctgtccaagttcttttaagtgtggttcattggccttacagtttgttttctgttgagtgcattagaggagtgttcttgtgtgtgttatgaactcccatggtgtgtgagattgagctttgaatctctaacacaattcattttacatagagccttgtatagattttattctctcattctctctctcaatgtaattctctccattaaagaataaaatcaaacattcttcaatctctttgttttgctggttttttgctgctgcatttttgttgttgttgctgtttatgtatagctcatcattgagcatccaatcttgattgttaaagtgtgatgatcgatcacaacaagtggtatcaaagcatgggtttagctcaatcaagattcagatttgaagacaccaagaatcatcaagaagatggatgcagccagattcgagattaacaagttcaatggaacaaatgatttcgggttatggaggatcaagatgaaggcatttcttgtccacaatggaatttcagaagcaattgat

SEQ ID NO: 34633 - DNA, 1989 bp, Cannabis sativa
  modified_base (1610)..(1616): a, c, t, g, unknown or other
cattgtagctggaataattatgatggtatagtatttagctaaaactcaatagacaaaaataaataatatttttataaagaaaaaaatatattcgttttagatacctaataactcatattccatttacaaagaataccatatttgaatatctgaaataagaaaaataaactaaccttgtgattgaagttggagggtctccaacttcctaaatagtaccaaagaattttcatcaaaatgcaataacatgcttagtgttacacaaaaaatttgatcccaagtataagctgagaaaatattaagaacttatgtacagtttgtaccaatcagcctaacacgcttatgtttaattaatcactctatttataattcaaactattctgtattttttttctcttttattttagaagcctaacatgcttcttttctttacctttgtttgcaaatcttcctccgaaggaattttgctgccatttcttcgaatagttgaccaccatgccataagctcatcctgcaatattggcagacaatgggagccaaaaacataactatcgatcacaaaagtaataataataataaaatgagtaacatatttggtcgttttgactgtttaatacttgctacggaagttataaacatttagaatagtagattcaacctatttactaaataggtaattggctccaaacaagctttagaagaaagcctatggggcttgacacgattcagctatgtcgacatgaggccatcaaagtcccataagtacaagagtcatatccgaggcatgaaaaataaaataattgcttaaatacttaagtttaacttttgattgcaaataaatactaaatttaacattttacaatgataatacctaaattatatttttagaactttcatatgtatctcgcaattaagtgtcaagtcattaatgttattttttaattagtatatttaaatcaatttttaaatgaaaaataaaataacctgaatcaatcaacgattgtcatgtggtaatttatttgacacttaacagtcaaatacttacaaatattctaaaattgtaacttaagtattgttgctgtaaaaaattaaacttaagtatttacctgtaactgaaaattaaacttaaatatttatgccacaaattactctaaaaaatatttgaaataaataatatcaattcatagacaagaaatcatgtgaattttccctaccaggacagtttcactatgtattcatgggggtggagacagaacaaaaaagttcatctctgtgtaaaatatgatgattggattgtataatgtatttcataaaatagtatacattaataataaaactagaacattaaataggaaattactaaatacatatagaaaactactaaatataatataagaactaatatacagctaatattataacacttcccctcaagttagaacataaatgttaatcatgcctaacttgttaaaaagataatcaacccactacccattgcctttgagatagaaagaaaaattccttgtttactccgagtaacttcaatacccaagaaatactcgagcacccctaaatccttcatgtaaaacttggtatgaatgaaagacttaagnnnnnnnatgccttcagtatcatttccagtaataatgatgtaaccaacatacaccactaacaaaatgataccatcttttaaagaacgctgagtgatttgacttacttttcaacaaactaaatttcttaataatctgactaaatttaccaaaccaagcatgagaattttgtttcaatccatataagatttgcgaagacgacaaactcgccctaacttccccctagcaacaaacccaagagattcctccatatacacttgttcctcaagatatccatgaagaaaaacatttttaatatcaagttaatgcaacggccaatgatgagtagctgccatggaaatgaacaatcgaatagatatgagtttagcaacaggagaaaaag
